United States Patent Application Publication US 2006/0123505 A1 - sequence listing, part 21

SEQ ID NO: 47478 - protein, 327 aa, Oryza sativa
MAQPTWSARRVTAALVVMVVVVLAVAGGSWAQLSPSFYSYSCPGVFNAVKRGMQSAIAREKRIGASIVRLFFHDCFVQGCDASLLLDDTASFTGEKTANPNNGSVRGFEVIDAIKSAVETICPGVVSCADILAIAARDSVAILGGPSWDVKVGRRDSRTASLSGANNNIPPPTSGLANLTSLFAAQALSQKDMVALSGSHTIGQARCTNFRAHIYNETNIDSGFAMRRQSGCPRNSGSGDNNLAPLDLQTPTVFENNYYKNLVVKKGLLHSDQELFNGGATDALVQSYISSQSTFFADFVTGMIKMGDITPLTGSNGEIRKNCRRIN

SEQ ID NO: 47479 - protein, 141 aa, Oryza sativa
MTRTRRSTAEQAEQVLVARSSDNSEAIVGSRRERERERERERERVVVEERESRCREGKGGQAKMARRGGGGGGGWWGWGGDQWRWRARGARRRRSGTGWRTCGRWRSRSCHRPRSSTPASRTSPSPPSTARLARKAGWHTW

SEQ ID NO: 47480 - protein, 317 aa, Oryza sativa
MGWAVALHGGAGDIPRSLPPDRREPRLATLRRCLDLATAALRSGRAALDVVELVVRELENCPHYNAGVGSVLTADGTVEMEAAVMDGNTLRCGAVSGLSTVVNAVSLARLVMEKTPHIYLAFDGAEAFAREQGVETKDPSHFITEANKERLRQAKEANRVQVDYTQPIPKDDNSRVGTVGCVAIDSAGNLATATSTGGLVNKMAGRIGDTPVIGAGTYANALCAVSATGVGEAIIRHTVARDVAALLEHAPPAGLSLGDAAARVVAGVPPGKVGLVAVSAAGEVAMAYNTTGMFRACATEGGRHEVAIWPDDADGAN

SEQ ID NO: 47481 - protein, 514 aa, Oryza sativa
MAEGETPPSSSAAAAAPVLAALASLQTYSSALSAFTSAWRALYSDATALDSTLASRLEGFSELDLLCSAMDGPGLRAYLTEHRDALQDSSLPALDAALLVAPDPGRLVLSAAAGFCRAPPTEGAAKVACRLLVDLLDRLRALGVKPSPEARDEARAIAADWKRSKRIGPQAVLKKETIAFLLLVGAFGLVDDVGDASEVLDLVVSVSGRERAVEAFVGLGLDLEKHMPVFIHTMIKKGKQLEAVKFIQALNLVEKYPLLPVLRSYISDAAKAGNMIRIRGDDSACQTEADAKERMLLGVLQKFIKDQKLEELPILEIVKQRLAHLEKKSVERKRAASAAIEAAHEVSKKIQKQEKQQQQVQSAMRSRVPGKAAQNSLSQNIHSVDSLSRPLMSSQSMGISGVLNLYQAASSQNIIPAISPSPLSQHPVGIKNQTLNTPPVQTRYGGLADYYGLSSGRPRPDSVSPGSSVTSAHTSSRSKLYSADPLAAVSRASDKKGSSYNYSLSSMSTYNPNP

SEQ ID NO: 47482 - protein, 423 aa, Oryza sativa
MDIDLDRARALRVLGRGAMGTVFLVEARYGGFRYALKVFDKRSAAATRHDAERRARWELSVLSRLAHPHLPCLLGSAETPGLLAWAVPYCPGGDLNELRYALPDRVFSPAAIRFYVAEIVSALCELHASGVAYRDLKPENVLLRADGHVTLTDFDLSRLLPPKTAAPSSASPPPRMFQGGGHRPRVSARSEIPLFSHATKPDPSPPAANPSAKQQLQSLVRFIMKGDRSELSKKAKSARVSPVSRKPASFASSWGKSFSFVGTEEYVAPEMVRGEGHGLAVDWWAVGVLAYEMAYGRTPFKGKNRKETFRNVLLKDVEFAGDSRRRLPELTDLISRLLERDPRKRLGYQGGADEVRAHPFFAGVAWDMLDVVSRPPYIPPPADDGDEVVGDGEDFSIREYFDKLHQPPPPESESSSSEFSSEF

SEQ ID NO: 47483 - protein, 110 aa, Oryza sativa
MRRHGPPRRRARAPAGAHTAIERLLGGALCPPPFTPLPASTFGRRQGKVQGLRFRSFDPSGSLLFLSFFFVDFSPQTDLCARVALIPLLVFSLGSPRFRSSQVGSIWLND

SEQ ID NO: 47484 - protein, 331 aa, Oryza sativa
MSSAIFPSSVVAGIEPLVSFKDVPNSEKQNLFVSKLNLCCAVFDFSDPNKSSAEKDIKRQTLLDLIDYVDSSSSRFSEAVIAASSRMFAVNLFRVFPPNYRSSSSGGGEGEEEEPMFEPAWCHLQLVYELLLKFIGSSSLDAKVGKKYFDHSFIVKLLNLLDSEDPRERDCLKTILHRIYGKFMVHRPFIRKAVSNIFYHFVFETDRHNGIAELLEVFGSVISGFALPLKEEHKIFLWRVLVPLHKPKSVGVYLQQLTYCVTQFIEKDPKLASSVIIGLLRYWPITNSQKEVMFLSEIEEILETISTAEFQKCMVPLFRRIAQCIKSSHFR

SEQ ID NO: 47485 - protein, 129 aa, Oryza sativa
MEISVDRSRRRHPVATAISFYSSTTTAGTCGSPSSPPKMRRRLPSSVFRRRQKGRVDASSARCGRIAGENSRLHSSPSTAPSWECGASSRRPTLRNRTALSSGETNPWWARRGVCSRRRGCQVCFGERR

SEQ ID NO: 47486 - protein, 872 aa, Oryza sativa
MASAAPLPPTPPPSQQQQPQPQGKEQQQQMAVAMNARRLVMIGDRLRTHFRGGGGTVLEPPDLAHLVYAFARGIDFALSSGDVPTVASEIPSILKKVYLVGKDQFLQSSVMVLMISCKNACSEKWFQPTDCTEILRMANELSGKFCTPVSQPDNDSTVIQIISTIMPRYYPQLKFERLVTSLEAKVGYDVLMADFFIHKNVPREEKINLIVVQKEDLNASSCIANPPHVSFLVNGKGVDKRTNVSMETGPQFPTDITRMLKYGANIIQAIGYFNANYIIAVAFLNKLESFDAPNLNDYAQPVAADPPDSDLLEGPSRVSLKCPISFRRIKTPIKGRLCKHYQCFDYDNYMELNLRKPTWRCPFCNTPSNFTDLRIDQKMVKILQETGEDTIDVLVFADGSWKAISTNDERSDRHSSDVIQQSRDTMDTDATADDVIDLINEDNDGDVPMSFTSASEDVKPFLNCQDLSVADYLSDLPMNTVSQAEDLYAGGASRGNNERGNATSTSGQNSSLPSTGGLGSSSFGTLESILPHNILHPVITDAVSPSLDTSNSVVLRQHVAQGTRSDIVPSQPRIDPQLRLEIARPPIPRNVAREPTGIQALPVQPQRVRPNIYNCPPPFPQSSPASAYQVHQVTNADSVITAMSTGIGSLSRAPDAATLLQHQSTQQEIRATQNYHQGQFIGLTAPQNFMGTRPPPGVPGQAIGANAHGAPPAQQSHHVHRLVSNLMNQLGQATVAQPSTAPQVLPSQPGGTSAVNPQIRGHLFPAQQRSQAMRPQAVPRPTISQAPPRAQSPFLPATARPPSTPPPIGTSDDLQELPVDESWRPTGQMRGSLTGEAYSVAIGRYNPSVNIAGQQTSHVTSQARPAGPDARR

SEQ ID NO: 47487 - protein, 250 aa, Oryza sativa
MKFNIANPTTGCQKKLEIDDDQKLRAFFDKRISQEVSGDALGEEFKGYVFKIMGGCDKQGFPMKQGVLTAGRVRLLLHRGTPCFRGYGRRDGERRRKSVRGCIVSQDLSVINLVIVKKGENDLPGLTDTEKPRMRGPKRASKIRKLFNLSKDDDVRKYVNTYRRTFTTKNGKKVSKAPKIQRLVTPLTLQRKRARIADKKKRIAKKKSEAAEYQKLLAQRLKEQRERRSESLAKRRSKLSSAAKAAATTA

SEQ ID NO: 47488 - protein, 316 aa, Oryza sativa; identical to SEQ ID NO: 33275

SEQ ID NO: 47489 - protein, 145 aa, Oryza sativa
MLWHRTLKSQMGSGVILILWVMGADRNAGARNNDFYQALNMAKEEVCVGAEEEFCVGAAEEGVSCTLRIILPIIPEHHSSAGAILQAGFLAIISVFCIGNNLAFIKVRNIRKTQELMVLHFLTRYWSHWCTTKISLPLINWMEVT

SEQ ID NO: 47490 - protein, 183 aa, Oryza sativa
MNSTILDVFKSRNINGEFSGTVIHFYSFSYEGKDDTWYKGEIFPVMSLKTPLEKGKGIRVSIWTFPAEKEKELKEMILDLLPLESTALLKPSFAAYNSHIDRAILCCTPCTSNMTSWIAKQVQIPSDSYLQEDSKNMIRSILNLSKVMWDLGYACDGLDDPQSFIMMDSNVKLLPFGIRKRQF

SEQ ID NO: 47491 - protein, 490 aa, Oryza sativa
MVAATKSDSTNTVAKPASSLLFGTGDAIAEAKSTAQDTANKASSNLTSNDGIASTTSASTAPFTFSSSGNNTFGFNSPAQPAGFSTSVDGSTTQPSATSTIFGSKLPQSEGTMSQPSKSSPVQFSSPFQTVTTTTGASSSGSGSVAFGVGTASTGSGITSFGTGASSSWPSTVSFGLGASSSGTGALLFGAGASSSGTGALPFGAGASSSGTGALSFGAGAGTSSSGPGTVSFGAGTSSGPGTVSFGVTTSSSGSLFGNSPFGSGTTFSGPGSGFAFSSPSSSAGSSLTMASTSMFSTSSTASSSPAFSNPFGSSSSPPSMFTFGQSASSGGGFSFGAQSSPAFSSQAPVFSFTSASMNSSTPQPAFGMTNANTSFGMGSPGNDQMNVEDSMADDTNQAAPAPAPIFGSSPFGQPASSPAAPVFGAPAVPSAGVFQFGGQQGSMQQNAAFPPAGGSLEFQGGNFSLGSGGGGGDKSSRRVIKVKRNPKKR

SEQ ID NO: 47492 - protein, 90 aa, Oryza sativa
MSFWCLPSAIVTLPHGPHLSVTHGSGSVCVSSEEPIISCGHVRVFSLAGPFHLLLADDDGCFASAACYPACLIQRRLRPCRKLTRHRLPL

SEQ ID NO: 47493 - protein, 224 aa, Oryza sativa
MENRVGESSATAVDGGGGAKDSGSFECNICLELAQDPVVTLCGHLFCWPCLYEWLHVHAHSRECPVCKAGLEEEKLVPLYGRGKASTDPRSRSVAGVQIPSRPAGQRPATASQPDHHHDHLPHHDPWFMGGAGAPVAGGRWGNYTFSAAIGGLFPLLSFQVHGFPQAAAYGPAAGFPYGYGHSFHGWHGHGFPHQAPQGQHVDVFLKVLLVLVGVLVIASLIVF

SEQ ID NO: 47494 - protein, 343 aa, Oryza sativa
MFNCAAREKAMVINLEFIRAIVTADEILLLDPLTIDVIPFVEQLTHHLPLKNLVCGNGQPGGDDHGEKHDDSHGDQVPRLNEATGAEHELPFEFQVLELALETVCSSFDVNVSGLERRATPVLEELTKNVSTRNLDRVRTLKSDLTRLLAHVQKVRDEIEHLLDDNEDMAHLYLTRKQLQNQQVEALISSAASNSIVPGGTSLSRLNNSFRRSVSIATSMHLDNDVEDLEMLLEAYFMQLDGIRNRILSVREYIDDTEDYVNIQLDNQRNELIQLQLTLTIASFGIAVNTFIAGAFAMNIQSKLYSIDDGSFFWPFVGGTSSGCFMICIVLLWYARWKKLLGP

SEQ ID NO: 47495 - protein, 61 aa, Oryza sativa
MLALSVVELRLLDSTRSSSCLMSKELTERQHYCILLFRKSFVPKVSVLNGLQRSRTVAFPV

SEQ ID NO: 47496 - protein, 420 aa, Oryza sativa
MGIFSGAGAHRPSCPSAANCAKWAQTYLKYCLCSTRDGMALTLGLLSVISWGVAEVPQIITNYKHKSTEGLSLAFLMTWIVGDFFNLIGCFLEPETLPTQFYMALLYTITTVILTGQTVYYSHIYHRLKAKKARATSKPQRHQRADASLREKLLGPKVIGEIRNNSHLGATVPIPTSSPITVNTEIVRQRHGPSSLSEYYYTSARSLSSSPVPMSGTWSANYHQTNSPPEIDDQKESLVSEFSPAQYAASPLIKNSLSVVPWMSLLLGMSVLHFLVGTTHQEVPNGIVIPVGRRLLLLADDHADSSVSNGSGSGIGSFLGWAMAVIYMGGRLPQIWLNMKRGNAEGLNPLMFTFALVGNVTYVGSILVKSMDWSKLKPNLPWLVDAGGCVLLDTFIILQFLYFHYRKRHVPDEPDSADKV

SEQ ID NO: 47497 - protein, 553 aa, Oryza sativa
MASISPTSSSVAALRGHPVQFVKGGAVSKEAKGSISFSPVANSNNANVKFTGLRVAASLKRDGAFPGDGYSGNDNTVLPKSTSVRGQDYPTADSVLPTESIIVPEISNAGLKCVADMFSDEDKDTEQDLDSPTEGFSSISEAIKDIQQGKLVIVVDDESRENEGDLIMAASLVTPEAMAFVVRYGTGIVCVSMKEEDLERLNLPLMVATKENEEKLCTAFTVTVDAKEGTTTGVSAKDRAKTVMTLASPDSKPEDFNRPGHIFPLKYREGGVLKRAGHTEASVDLAMLAGLPPAAVLCEIVDEDGSMARLPKLRVFAERENLKIVSIADLIRYRRKRDRLVERSSVARLPLRWGNVRAYCYRSVIDGIEHIAMVKGEIGDGQGVLVRVHSECLTGDIFGSARCDCGDQLAMAMEMIEKAGRGVLVYLRGHEGRGIGLGHKLRAYNLQDDGRDTVEANEDLGLPVDSREYGIGAQILRDLGVRSMKLMTNNPAKYGGLKGYGLSIVGRVPLVTPITSENRRYLETKRTKMGHVYGLANGQASHQTGSNGAKGEH

SEQ ID NO: 47498 - protein, 544 aa, Oryza sativa
MSNRFNENPYDDIEFTDVAASKDVSHTSSVRNNSKEFTWLGPAWLCEKRWKHYRSFCRKGITISVHNFVYILSEEKKRLIAQVEDLYEDTNSTNVVMVRWFDKVDEVGVELPPDVGDREIFFSPGLQDLSVECIDGLAAVLSAQHFEKFQSSPKHSYWQPYICRRQIDEDGVKPFDVTQLQGYWSQEVLRTMFNAASSLKVRFKVTKGASSSDGAQKRKRDAFSETDPQQCVPSAAFGSDSLKNDLEHKTQKQLYPGSRAEVLSQDSGIRGCWFRCFVLKRRGDKIKVRYEDLQDADETGNLEEWVLLTRIAKPDQLGIRIPERPMVRPYHVHSKDPCSFDAGSIVDAWWNSGWWEGIVLQQGNDRRLQVYFPGEKQIADFCEDDLRHSREWAGGKWNSLGERKDITHLLPPTSVHEEGGLLSKPVSQEGNPSSKLESDERCDDKSLGTKISHDQKHQKRVLADLTNALKFDNLKWRPRKRSRRSGSKRQSDTSSGSGSSSQGDMEESSPCGSFAVLNSAPDEEVCKSSGEPLFMRVSNLVMSR

SEQ ID NO: 47499 - protein, 801 aa, Oryza sativa
MDNILVVCKSTLADDESASEVSSGSDSDSDCILGDDCPSDDDEEAAQIHKRFKELKEKLKTGKVDKLDDVVFEAGAEQDGNDTPSFDSDDEESVEEVASDEEVSARKLIKYPRFKEKPGVPTFELGMTFSCKKQFKKAITAYGLAERKAINFVKDDPKRVRARCDWPSCPWVCLLSKNSRTDGWQIATLENSHLCPSRRDNKLVTSSRIAEEYGKFIVANPSWKLAHMKATVQEEMFADVNISKLKRAKSITMKKAINAAKWQYQKLYNYQLELLRSNPGSTVVVDREVDMDPPVFKRIYICLDACKKGFLAGCRKVIGLDGCFFKGAKNGELLCAIGKDANNQMYPIAWAVVHKANKEEWHWFCGLLCSDLQVGDGSGWVFISNQQKEIINAMDKWAPQAEHRICARHIYANLKRHFYDNEHQKFWKCAKAPCITLFDLAMAELVQLTTPAVQTILNNHPQHWSRAWFRSGSNCDLVDNSMCESFNKWILEARFFPIITMLETIRRKVMVRIHDQRTISGRWTTSVCPNILKKMNVYITESAFCHATCNGGDSFEVKHHDNRFTVHLDKKECSCRYWQLSGLPCPHAISCIFFKTKTNSLDEYIAECYSVKEFKKIYSQCLEPVEGMSSWPEDDKEPLNAPGYIKMPGETRRESNEPLKATKLSRIGSIIRCSKCKQIGHNKSTCNKHHGGGSSTPDSLQVVNPADNLMLSNTQQSSKQSRKRKSRTAANTNSASQSRKTVSSKQKALVELHAHSQGSTSATIKVTSGQAFVNVSTSRISKVQAKEAYTWSTAAYASMGI

SEQ ID NO: 47500 - protein, 269 aa, Oryza sativa
MDANAGSFVAVRRLAGSERAAGAAAFHHSSSAEVVTGSTAWIGKGLSCVCAQRRDSDARLSFDLTPVQEECLQRLQNRLEVQYDSSNSDHQEALKDLWRASFPGAELRGLISEQWKEMGWQGKDPSTDFRGGGFISLENLVYFSKNFPKSFQELLRKQNGDRAIWEYPFAVAGVNITFMLIQMLDLQSVKPRSFIGAVFLKLLSENDQAFDILYCITFKLMDQQWLDMHATYMDFNTVMKSTRRQLERELLLEDIQRIEDMPSYKLLAR

SEQ ID NO: 47501 - protein, 339 aa, Oryza sativa
MDGLHTELALGLIGCCGGDGQQQTAPFVAKTYQMVCDPRTDALVRWGRDNNSFVVVDPAAFSQLLLPCFFKHGNFSSFVRQLNTYGFRKVHPDRWEFAHESFLRGQTHLLPRIVRRKKRGEGGGGGGGASCSFGGGAGEHQVAAAAASVGMSGEEEDAAEDVLAKEAALFEEVQRLRHEQTAIGEELARMSQRLQATERRPDQLMSFLAKLADDPNAVTGLLLEQAAERKRRRQHLPSHEPTVCPLPPAPPPQPPQPLLALAGAAAMDGTYWWTTEHHHHHHHQMKPMTVLPSLEPPTASCGVHQVPELGGGGVMGLTTDGEAKVEPPFPFCLLGQAFF

SEQ ID NO: 47502 - protein, 529 aa, Oryza sativa
MSPTISPVLVFLLLSLHQSICSSAHDAASASSFSSCLATHGVSNFSLPASPSYNTTLNFSIRNLRFTLPDVTRPAAIVLPWSKEDLRRAILCARNSSLAIRVRSGGHSYEGLSYTTENHVPFVVIDLMNLNRVQVDSVSATAWAEAGATLGELYYAVGRSSQSLAFSGGSCSTIGLGGVISGGGFGLLSRKFGLAADNVLDAVLVDPNGRVLDRNSMGEDIFWAICGGGGGSWGVVYAWKLRLVPVPHNVTVFIVDRTGPVEYVAGLVHWWQHVGPNLPDEFYLSVYFPTGSSDGNVSVSFEGQVLGTKQQTLSVLSQSFPMLGVTESDLSEMSWVESTAKFANVGTVSDLSNRSPGTNSYTKSKSDYVKAPISRHDMVEIARYLSAGPPGSIILDPYGGAMARIGSDATPFPHRAGILYSIQYTVYWGQSDQARANEYIIWLRSLYTYMTPHVSKDPRGAYVNYLDLDLGANNWTHPIGGSSMEAVARARSSWGAAYFGNNFNRLVSTKTTIDPSNVFNNAQSIPPLN

SEQ ID NO: 47503 - protein, 79 aa, Oryza sativa
MAAPATGGGISADVPILHSENLTSNVKSIYYRFRSFSSPPPPPPQPKFRIRSDLISRVMLMSVRLDLGFMRRHGLICSD

SEQ ID NO: 47504 - protein, 602 aa, Oryza sativa
MKYVLVTGGVVSGLGKGVTASSIGVVLKACGLRVTTIKIDPYLNTDAGTMSPFEHGEVFVLDDGGEVDLDLGNYERFLDIKLTRDNNITTGKIYQSVINKERRGDYLGKTIQVVPHITDEIQDWIERVAMNPVDGKEGPPDVCVIELGGTIGDIESMPFIEALGQFSYRVGPGNFCLVHVSLVPVLNVVGEQKTKPTQHSVRGLRGLGLAPDILACRSTEPLEENVKAKLSQFCHVPVSSIINLHDVTNIWHIPLLLRDQRAHEAILKVLDLQFVGKVPREPKLVEWTERASKFDKLKATVKIAMVGKYTGLSDSYLSVLKALLHASVAMGRKLVVEWVPSCDLEDSAAKETPEAHKKAWKLLKGAEGILVPGGFGDRGVQGKILAAKYARENNVPYLGICLGMQIAVIDFACSIMKLPGANSTEFDPDTMSPCVIFMPEGSKTHMGATMRLGSRRTYFHATACKSAKLYGNARFVDERHRHRYEVNPEMVPEFEKAGLSFVGKDESGRRMEIIELPSHKFFIGVQFHPEFKSRPGKPSPLFLGLIAAASGQLETLLQPSSNIVNPNPMPRFPIPKKTIYHAKKPLDSLVNGYFANGNVIHT

SEQ ID NO: 47505 - protein, 501 aa, Oryza sativa
MATGDPNPTTTPPSQQLQGADPQPQSQQDAAANATPAAVAVREDYVQNAVKFLSHPKVRGSPVLYRRSFLEKKGLTKDEIDEAFRRVPDPQPSATATAAASPSPSQHPNNQNHSSTVVQPYAPRQPATPAGSIIVATQPKFSWYRAFVAAGLLLGFGVSAAVFVKKLLLPRLKSWIRKVVAEGDENEGRQIKSKIDEETAEAVKASASAVSAIAKTNQELLASKDEEKKILVTLTQALDSQAKELKSLCESLNRSRDSINITREDRFSQYRALEEHAPSAARNGPVNTPWRASQQTNMYGVPNSDFGSGRPSFASTHNEATPGSFSRSYVETSAAHRGDNRSSGSKPWEMQQYSQQRIGYGSNSQLSDDGCPETQDNYGGGPSYSYHQNQNQNGKAPAPDIQAEEARPSVYISGAEERSPPPPPQRRWVPPQPPGVVMPEAVAAIRQPKSLAKQPSSEASQEAAGETHANGASSSSPLPEEALVNGSAAGRSEIEEQAEAI

SEQ ID NO: 47506 - protein, 588 aa, Oryza sativa
MSRLRTTLLCPFLVQSLSQAHLILMRISSPTMMNWLLKMLLKLEMPLLKKKQLKKKKLRQLKKKKLLCPKSLKQFLKMTTDQQRWTLTVRYQSEVRYAKREQDDHVVPFHESAEFEEPTDPLAYPDEQPLPLESLHETDPTAQEASETEQEEEATASQRLDQPPNEQNEVEDDKAPETPTYSVATQISDKKFLLERKRSLSLSLDGSVASEMELSEPSTVDQLKSALQAERKALSALYSELEEERSAAAIATNQTMAMINRLQEEKAAMQMEALQYQRMMEEQSEYDQEALQLLNELVTKREREKQELERELDMCRQKVLHYEDKERRRMASFKANGHSPNGNGTSVSSSGEDSDGHSDEYCELGESPDGSNLQSPSHAAFSPRTDQENKKHLVALDDSLTYFEMERLSILEELKTLEERLFTLEDDDINDTSAAVGRSSDEYELSADGLHSPGNGDITSDKAKFEGRNSICRGKSLLPLFDAAGDESSDQTPSARVGDVQVDNSTKPVSVLVKEQERLAIIEEVDHVYERLQALEADKEFLRHCIKSLKKGDRGMDLLQEILQHLRELRSVELHVKHAGDALAANSA

SEQ ID NO: 47507 - protein, 324 aa, Oryza sativa
MSSVYVLEPPTKGKVVVQTTAGPLDIELWPKEAPKAVRNFVQLCLEGYYDGTLFHRVIKSFLVQGGDPTGSGTGGESIYGAPFADEFHTRLRFNHRGLVACANAGTPHSNGSQFFISLDRCDWLDKKNTIFGKVTGDSIFNLLALADIETDKDDRPVYPQKILSVEVLWNPFDDIVPRQLKKTEPTAKGDIEGKSKKKAVKQLNVLSFGDEVEEEENEAASSVKDKIKSIHDVLDDPRFLKGEAPDEQLTKEQEDKKKETVQSVREALVSKKSDFRELEHDSETDDYPDDENEEDFDNRMRSQILRKRRELGDIRSSETSKKNR

SEQ ID NO: 47508 - protein, 773 aa, Oryza sativa
MESSSEEELEEDFPGHEWITPQSSIRAAYQSQTEKGIRKICSELLELKDAIENLCGNMQSKYHAFLRISEEVVEAEQELIELQKHVSAQGILVQDLMSGVCRELEMWQKHCKDEHVEEKDLQTELDEILSYDTQDSKVSFLDKLDTLLAEHKIEEALLALETEEKKCMATDDPGKELDAEISTYKTALSKRKSILEDQLVRYSEQPSLSITELRKSLSGLIKIGKGSLAHQVLLKAYGSRLQKNVEAFLPTCSIYTETYSATLSKIVFSAISKVSKESSSLFGDSPMNLNRIIQWAEYEIETFARLVKENSPLPESVSALRSACICIQTSLTHCSYLESYGLKFSNLLMVLLHPYVEEVLELNFRRLRRKIVDSAKNDDILLPSPQEGSRLSSSVAPNIMLTSSGKKFMSIVNDVLDQVTPMTIVHFGGTILNKFVQLFDKYVEALIEVLPGASEDDHLVESKEPIEFKAESDAQQIQLIGTAYTVADELLPAAVSKFFDIQTEKKRIGGTGEGLGSGSIYSIEYKEWKRSLQHSLDKLRDHFCLQYVLSFIYLEGKSRLDARMYLELKTDDLLWECDPSPSLPFQALFVKLRQLASVAGDVLLGKEKIQKVLLSRLTETVVMWLSNEQEFWDVFEDQSIQLRPSGLQQLILDMHFVVEIAVCGRYPHRPVQQLVSVIITRAIAAFSVRNVDPQSSLPEDEWFLDMAKVAINKQLGTSGSESELEEPVVVHDEISDSEESSISSPSTIGSEDSFASANNDDLETPVYFTDPEA

SEQ ID NO: 47509 - protein, 508 aa, Oryza sativa
MAATPPSSQHRRPLSSSASAASLAGKPRGGGLLLGRYELGRLLGHGTFAKVYQARSADSGEPVAIKVLDKEKAMRHGLVPHIKREIAILRRVRHPNIVRLFEVMATKSKIYFVMELVRGGELFGRVAKGRLKEDTARRYFQQLVSAVGFCHARGVFHRDLKPENLLVDEHGDLKVSDFGLSAVADQFHPDGLLHTFCGTPSYVAPEVLARRGYDGAKADIWSCGIILFVLMAGYLPFHDQNLMAMYRKIYRGEFRCPRWFSKDLSSLLNRILDTNPETRITVKEVMESRWFQKGFRPVRFYVEDDQVHSLADGDNDMPELEPSEPPPPPPFPPPPPQQDDDGEESGWESDSSVASCPATLSSEERRQRPLGSLTRPASLNAFDIISFSKGFDLSGLFEERGSEVRFISAEPMQTIITKLEEIAKVKSFFVRRKDWRVSIEGTREGLKGPLTIGAEIFELTPSLVVVEVKKKAGDKEEYDDFCNRELKPGMQHLVHHMGSVPNIPSDTE

SEQ ID NO: 47510 - protein, 79 aa, Oryza sativa
MPSSVVNHVAPSCSVAVACTQRRCCRRGTRAALSPSTSEAQATDAIFSFAGALLLHLLCHGWSQRNEKENTREEKKENF

SEQ ID NO: 47511 - protein, 119 aa, Oryza sativa
MEILLLLHLRDLESLAPCGCRLGHSKDERNEWDFLSSSIHRDLHHTWSCLLDMESLLVPQDVVVFGLSSSLGEYASYMQKCIIFFRLHLLSPWLSHLPKFHGVEQLLLRRQGLVLVLQG

SEQ ID NO: 47512 - protein, 183 aa, Oryza sativa
MATILENIQKARFLPTRPLKDELPTFQGGGGGGGGGGGKESHLMGLRKRLSSFSDKIQPISSASAGWAFRRSKSAPSLGAFAGGPLKRWWDWGVGWLMSKKPGFATDLEMNEEEVAALGRGSRGSWGHILYKMRSGVRRLVTSHSLPTTHRAAAAASASAQCKPAATFNYTQSFHSGQTAMAY

SEQ ID NO: 47513 - protein, 680 aa, Oryza sativa
MLTSWEAILEKMSTAPRLPPPRGAPALSVSDDQAPRPRLAEPTRGQPPKPLKSPLSTSSSPSPSQSPPDAAPPMASPAAPLALLILLVSLAIAAAQSGQPSSPPRNSTNISDAAALHTVFEKWGLEDGTMPQGYHPCGKLVWSNSSEMEASINCSCSSNECRITHLNVTGYRNITFIPAELFSLTELVSLDLSNNNLIGQIPPQVSNLSKLETWHFNNNRLNESFPNASALLSIQSLWMFDNDIEGMVPGFIANFANLTDLRMYGMKLQGPIPENFSKLINIENLMIGDLDTEGYPFNFTGDWVNLSTLSLRNCGFTGKFPNQILKNLNKLTYVDLRSNNLSGSIDLQQYDSSLKYLYVGENNFNGSLPDQMPQSLVALDVTYNPLLRGRLPSSSADRKMRINYIGTSIGAGSSVGSENLRLLNCVDMKGCNTTGLTNPVSFAVNCGGKQYTPPSDPSNMFNDDSANLGAADFHVDTNNNWVVSHVGTDPFSNSSGIVTTGNGTNIPELYRTARTSTGSLWYYVVGLPSGKYTVQLFFAEIVIESGSGRRLFNIDIQDRNIMTDFDISKEAGGSNRPINRNYTADVTTSVLKIHLYWNGRGTCCIPRNGTYGPLVSAIRVFPSAETQASPPPVALTSRHDEKRRGVVAGIAALSIAATVISSSAVYLWWKWVSLVKHRKA

SEQ ID NO: 47514 - protein, 506 aa, Oryza sativa
MSDSELSQSTVVFGLRMWVLVGVAVGAAFVLFLVLLSVLCLLASRRRRRRRGPNTSPVQQLPVSAPPKNPQKVKAPKDIQEVPAQATAAAAAKTPLAQVLQMPAPPPPPPPMAAAAPPPETVQIATGKEHRITYPEPPHRSGSSSHGSGEAPSVPEVSHLGWGHWYTLKELEAATEMFADENVIGEGGYGIVYHGVLENGTQVAVKNLLNNRGQAEKEFKVEVEAIGRVRHKNLVRLLGYCAEGNQRMLVYEYVDNGNLEQWLHGEVGPVSPLSWDSRVKIILGTAKGLMYLHEGLEPKVVHRDVKSSNILLDKHWNAKLSDFGLAKLLGSERSYVTTRVMGTFGYVAPEYAGTGMLNETSDVYSFGILIMEIISSRVPVDYNRPPGEVNLVDWLKTMVSTRNSEGVVDPKMPQKPTSRALKKALLVALRCVDPDARKRPKIGHVIHMLEVDDFPYRDERRGARAPVQARVADKPVAIEAGDRESDSSGNNSARQTEPFRWRNPES

SEQ ID NO: 47515 - protein, 603 aa, Oryza sativa
MSSDDDDDGSGRTKLIIAAVVMLLAIVLGTVAYVVVDRAGDDDGLSKRGMKSTMRSVDLFCAPTDYRVACKDTLERVLARSSDPADHPHAAAAAAITAVERELARGFDRSSVLEAVRASNDSRVAEALRDCRTLLGDCRGDVSRALTSIAWRGVDAVSQDLQAWLSAVITFQGSCVDMFPQGPIKDQVREAMEKAREISSNAIAIIQQGAAFAAMLDLHASESHAAEGEELDVDHDIQHHVDRHLEDQSLPPVPPWLSDEDRRMLTSGEEFVAGLTPNVTVAKDGSSDFTNISAALDALPEAYAGKYIIYVKEGVYDETVNVTSRMANITMYGDGSKKSIVTGSKNIADGVRMWKTATFAVDGDRFTAMRLGIRNTAGEEKQQALALRVKADKSIFFNCRIEGNQDTLFAQAYRQFYRSCVISGTVDFIFGDAAAMFQRCIILVKPPLPGKPAVVTAHGRRDRQQTTGFVLHHSQVVADEDFAGAGGGSSNTSSSSGAAPRLAYLGRPWKEHARTIVMESVIGGFVHAQGYMPWEGKDNLGEAFYGEYGNSGQGANSTGRMEMRGFHVLDREKAMQFTVGRFLHGADWIPETGTPVTIGLFGG

SEQ ID NO: 47516 - protein, 502 aa, Oryza sativa
MPRRTDNAASANSVEPEKSEECLEFDDDEEEEVEEEEIEYEEIEEEIEEEEVEEDEDVVEEVEEVDEEEDEEEEEESDETEGVSKTKGVHQKDVTEKGKHAELLALPPHGSEVYVGGISSDVSSEDLKRLCEPVGEVVEVRMMRGKDDSRGYAFVNFRAKGLALKAVKELNNAKLKGKRIRVSSSQAKNKLFIGNVPHSWTDDDFRKVVEEVGPGVLKADLMKVSSANRNRGYGFVEYYNHACAEYARQEMSSPTFKLDSNAPTVSWADPKNNDSASTSQVKSVYVKNLPKNVTQAQLKRLFEHHGEIEKVVLPPSRGGHDNRYGFVHFKDRSMAMRALQNTERYELDGQVLDCSLAKPPAADKKDDRVPLPSSNGAPLLPSYPPLGYGIMSVPGAYGAAPASTAQPMLYAPRAPPGAAMVPMMLPDGRLVYVVQQPGGQLPLASPPPQQAGHRSGSGGRHGGSGGRYGGGGGSSGSSRPGAKRQRGDDNSSSRHKGRRRPY

SEQ ID NO: 47517 - protein, 524 aa, Oryza sativa
MEKSSELWLLWAVFSASLVFLYLTIRRRSGAGAGGKPPLPPGPTPLPLIGNLLDLRGGVIHDKLAALARVYGPVMMIKLGLNDAVIISSRDAAREAFTRYDRHLAARAIPDTFRANGFHERSAVFLPSSDERWKALRGIQGTHIFTPRGLAAVRPVRERKVRDIIAYFRDHAGEELVIRQAIHTGVLNLVSSSFFSMDIAGMGSETARELREHVDEIMTVFAQPNVSDYFPFLRRLDLQGLRRSTKRRFDRIFSILDDIVERRLVDRGERGGEGGASSNSSKSKHQYDGGDFLDALLELMVTGKMERDDVTAMLFEAFVAGGDTVAFTLEWVMADLLRNPPVMAKLRAELDDVLGGKDQSAIEEHDAGRLPYLQAVLKESMRLHSVGPLLHHFAAEDGVVVGGYAVPRGATVLFNTRAIMRDPAAWERPEEFAPERFLAREGKAPVDFRGKEADFIPFGSGRRLCPGIPLAERVMPYILALMLREFEWRLPDGVSPEELDVSEKFMSVNVLAVPLKAVPVKVIN

SEQ ID NO: 47518 - protein, 350 aa, Oryza sativa
MAFRRTLARGIWAGKNANAAAACPAAAAPKPPARRPLPAVDDCPTLAYLRPRPGTIRYTTASVPLPAHCFPALPVGDQLFNRLRLDGLVPPTTAVTRPPEEEGVGVTVEEARKVARAAEMEVARARLRSNAQSVVSGSEFAALCVDIAGGAEGGRRLARALDDSGVVIVLGDAVFLRPDMIAKAIGSMIPATAHATRAAASVVEVRKKREEEEELRAMEEEKAGIDAAAAAQVRRELWCGLGLLAAQTLGFMRLTFWELSWDVMEPVCFYVTSLYFMSGYAFFMRTSTEPSFEGFYRSRLASRQRRLMRARSFDVARYEALKEQVGGGARYGVAARDAIVLRQQHVTHVH

SEQ ID NO: 47519 - protein, 212 aa, Oryza sativa; identical to SEQ ID NO: 31965

SEQ ID NO: 47520 - protein, 925 aa, Oryza sativa
MAEVLASGATGLITSLLGKLASLLDDEYTLLREVRGDVEFLQAELSGMDDLLVRLVEMEKNGHGTKKWRVKLRELAYEVEDGIDSFTHRLGSARDRAGFVRGFMKQLNLMVRHQVARQIQELRDQIEVECARQMRYTQLGGGGSSSIDAAVADQIDCRVKALYVDPDHQLVGMDGPVASIVELLTMEEDESSARQLRIVSIFGPGGLGKTTLANQVHRKIKGQFDYAALVSVSQRPIRDILTKIAPSVIPTDSSSSLDTCQLIEIVKDFLQDKRYLIVFDDIWSTKMWENLMSVLPRNNKKSRVITTTRMSNVASSRSPRSNGHIYEMESLNDADSKELFSKIIFDHKGKCPKALDEIADEILKKCGGIPLAIITLASLLAKKPKTRKEWKRVKSSIGNACELEGMRQTLSLSFYDLSYDLRNCFLSFSSFPEDYEIDRERLVLRWIAEGFISGKEQQELMEEEGNNYFNELVNRSLIQPIDIQYNGSARACRVHDLMLELIVSLSKEENFITTLNGPECLPMPSKIRWLSLHSNGNEVMQVVTNNRRHVRSVSFFPPVAQLPPFVEFQAMRVFDVKGCQFGEHKKMKNMESLIQLKYLNLAYTNVTELPKEIGEVHFLETLDVRNCQIQSLPPSLCQLQKLVRLFVSLGVTLPDKIGKMQALEELSHVAILCNSLNFVKALGELTKLRVFRVDCRYSWLNGKKQAPRQSVSTHEDVLLSSLQNLLKKKNLRSLEIDLTNGSSLVFSLMNPYCPLPQLEELVISNSISRVPRSMRSLKDVIHLEIKLDRMEEEDLHIIRDMSHSLLFLKIHLEITPEERLIIDSEGFECLKQFEFCCVGMGLKFVQGAMPDLEKLDLDIGVRKTMSKYGGFDFGIKNLEALKHVGVKLDCQYAENREIQSAEATIRSGVLPRRIMPQIQRIGVNR

SEQ ID NO: 47521 - protein, 435 aa, Oryza sativa
MALPCAFLSAAAAANATSFSSSPESRRCRSVHRVPSRPRPPLAPPARVMGKGNSKRKAANTRLWMRLDRRGGCEMILCDKSFVARRSGLPARDLRVLSPLLSRSPSILAREKAMVINLEFVRAIVTADEVLVLEPLAQEVLPFVEKLRKYFPLKSLDVDDVSTHMHTENQDGELAQDVSCYEVEGANHELPFEFQVLDFALEAVCLSYNSTISDLNRSAIAVLDDLMKSVSTRNLERVWSLKSSLTRLLASVQKVRDEVEHILDDNEAMAHLCTARKTKGQKDLLNTILFPETRLCRTHSSIENSTGIRTCVPSDSDAHILDMLLEAYFKQLDGIRNRIFLVRQYIVDTEDYISIQLDNKRNELLGLQLTLIIASFGIAINTFIAAAFAMNIPHRGYHFVIGVPFGQFVGATSFLCMSIVILLFTYAWRNRLLCT

SEQ ID NO: 47522 - protein, 99 aa, Oryza sativa
MMRLLTGCASPSSSSFRFRPLSVHALPASDVVIAEGITGRYHDSYWVHAWTVGPGPNGDRVITHLREYLNTDLTVTRLPPTRCLWQSRRPDLPALLLAL

SEQ ID NO: 47523 - protein, 244 aa, Oryza sativa
MLLSLGSSGQAQRLPPQVMSPAAAAAPPPGGGRRRDAEEAVPHQVHRRAEAADAGALGAARVAPPEARRGHRRRVVPRHRRRQGRLQGLDAQQQAQLPRRPQRPPQRLLLLRRRRRRPAIQPSHLTSSSSSSSSTRHRLQHQRNSHRRHRRRRRHHRRRQPPRERSIVAAISIKTREKKRQQVAFSDHSIFLFFCFLDRSSKKLTPRKDAAAADQFLMPSYSKRKKKRRKKSNLSLSLYVLGIR

SEQ ID NO: 47524 - protein, 343 aa, Oryza sativa
MQIREGGPRRGAASAARSPMSAMMLAMFATMASFYVAGRLWQDAQSRVYLIKELDRRTGQGHSTISVDDTLKVVACRQQGKRLASLEMELAAAKHEGFVGKYTYETNGTNSRKRPLVVIGIMTSFGRKNYRDAVRKSWLPTGSMLKKLEEEKGIVVRFIVGRSVNRGDASDREIDEENRSTKDFMILDDHTESEEESPKKTKSFFANAAESFDAEFYAKVNDDIYINVDTLSAMLKEHWDKPRVYIGCMKSGEVFSESTHKWYEPEWWKFGDGKTYFRHASGEMFVISKAVAQFISINRSVLRTYAHDDVSVGSWLIGLAVKHVNEAKLCCSSWPSGALCSAL

SEQ ID NO: 47525 - protein, 292 aa, Oryza sativa
MGGAHFPGEGEVVAGEGDAVVPLRDVGKMEHGCEHYRRRCKIVAPCCGEVFACRHCHNDATASGDRHTICRQDVEKVVCLLCDTEQPVSQVCINCGGNMGEYFCDVCKFYDDDTEKGQFHCYDCGICRVGGKENYFHCAKCGSCYAVALRDNHQCVENSMRQNCPICYEYLFDSLKGTRVLDCGHTMHMECFSEMVEHNKYTCPICSKTALDMTHHWALLDQEIEATIMPPVYRYKVWVLCNDCNKVSEVDFHVIGHKCSHCNSYNTRSTSRPADLSGSSSPSTSDSSENNP

SEQ ID NO: 47526 - protein, 316 aa, Oryza sativa
MMKKLVRLLIMVEVVAMAAAPRRAAALSMDYYGMSCPFAEMVVRSVVSQALMGDPSLAASLLRLHFHDCFVQGCDASVLLDSTPDNTAEKDALANKSLRGFEVIDRIKDALESRCPGVVSCADVLALAARDAVIMAGGPYYGVATGRRDGTRSSAADTVALPPPFLNATALIQLFGTHGFTAQDMVALSGGHTLGRAHCADFKNRVATEAATLDAALASSLGSTCAAGGDAATATFDRTSNVFDGVYFRELQQRRGLLTSDQTLFESPETKRLVNMFAMNQAYFFYAFQQGMLKMGQLDLKEGDAGEVRTSCRVVN

SEQ ID NO: 47527 - protein, 755 aa, Oryza sativa
MAPSFSIREYAASMRGTAASRHPALSAAGDFPPMPIRRFRWWVDELHAAVSRRRRRRSSPAAAAAVARKNSKRSVSDLFAATGEAPAMDSRRRKKPRSQEDDDGVEKMKKKGIFISSTPNAPKVSVNKLHPPSPQTFQVHERQKHINIENMKMYDFEIWKPENSAKVPKNSILRKHTKRSSFTVSINKEKCSNLKGSEAIELSHKLGKHVTFSGVDDIHIRNKLSSTLPQLQNHCNVYSDKSNEADRLVSAKISSHENKEASGRDIYDRWTSESSGAKDPINLIDLNRTLPCIPDFNGAFISGSEVPDLEHTENATSDLQIPGDVREEAVLKHNQDLHSKSPRSQCELNSCDLGRIINLRSIASLLPDEAINISDRGMIGHPLNSTEVNKFYADYERSSVRDDTMEGKAPYILPQHTVQYTSQFTENWYTNMNLGNFHHAGREFSSCPCENQLNSEKPMLHSEINVQHEHAVMSQRTMRLMGKDLTVSTTGGKCIGETAKVHVNSSVSCHHTTNIFLELPRQGHPFLSLQSRSFSNIQVDAPSTSHDYVGYKMHNLKRRFPEADVFSGNGIECEDRLRDFSYLHCGQNALAGFSPQGGKYNTRSDQNSLSATTFLPTFIPHAKQSAVYRANSTWKHNPYPANLLVHPPDGTNFRKDQNQIIRGVAEIPSSVNTMSRDTVWKTRKIDVDNSNISSGVRYISRSGPVKLRPGAKHVLEPRQDTDDGNYPPMYSCVPFFVIRRGGNILSGQTKSHRKV

SEQ ID NO: 47528 - protein, 391 aa, Oryza sativa
MERGAAAAGALSCTFRSPSPSPTSPAAPHWRPLLGFRSRSRSRGRGWGQRAVVAGAPRLFLPPPCRRFRYCSQSKLLGTNKGQNRCSLATFSSFGQSGISLNNEDLVKDKLLIDCGEDQDCVIDGIVALGKFDALHIGHRELAMYASKAGTPFLLSFVGIAEVLGWEYRPPIVAQCDRKRVLTSWAPYCKNVVPIEYQVEFSKVRYLTPRQFVERLSRDLKIQGAVAGENYRFGYRASGDAAELVKLCEEFGLSAFIVRSVMDTARSYNGVTTSVNSSDKGQVSSSRVRHALAMGDMEYVSELLGRKHRLVLTVKENHLQERKRIMLPKSCMLNMPPADGLYENCDLLNGGHLGLCRVIINSETIVIEMKDENSLLPNTIQENQQLGIEFG

SEQ ID NO: 47529 - protein, 492 aa, Oryza sativa
MASRSGDRRLAVVAFAAAVLLSAAEGLGVNWGTMASHPLPPRAVVRMLQDNGISKVKLFDADAGTMEALAGSGVEVMVAIPNNLLDLLTDYDAARDWVHENVSRYSFDGGVNIKYVAVGNEPFLSSLNGTFLNVTFPALQNIQRALYDAGHGDTIKATVPLNADVYNSPENMQVPSAGRFRPDIAGLMTEIVQFLNQSGAPFTVNIYPFLSLYGNDNFPLDYAFFDGTTSPVVDTNGIQYTNVFDANFDTLVSALVAAGVGGLPVVVGEVGWPTDGDKHARADLAQRFYAGLLRKLASNAGTPLRPNQYVEVYLFSLVDEDAKSVAPGNFERHWGILRYDGQPKYSMDLAGQGRDTALVAARGVAYLPRAWCVLNPSATPDAMSRVGDNVNYACTYADCTSLGYGSTCNGMDAAGNASYAFNAYFQVQNQVEESCGFQGLAVQTQQDPSTNACNFTIQIEPSAAAGRRPAAVAVTVATAMLISVLAAMVTTP

SEQ ID NO: 47530 - protein, 349 aa, Oryza sativa
MGLAAGAPPPCTASTTHPPPSPPPAQRRLPAPPRARPQRRRHTRSAPALARKRGSRGAGLPPPTETTGHARDGGGGTKPPSPRGHAPSRRAYVSARGGRLARGQATRRRGSWPHLRRHRGQIWRSKETARQKRITAIGAGDGAAEADRCGTIVAFIVRLPPDTALPLCSPTTPPAGNGACGCGRSGRARASCHHRPSARRKDWEGRQAAEGRIGREGRDEKVVVMPPLPHRHGAQHGGRVNAVGRPRQCRRTPLPSSLRRRRRCRWVLRVAVAVAVAGGRRGGGASAAVRRRWKVRRGWSSRRRAPPWERTQRRARGVGAVGGGRREGRRSGGSSDFSGFLWWDLPQKK

SEQ ID NO: 47531 - protein, 468 aa, Oryza sativa
MDRRAVVYDAEAVDDHERQGTVWTATSHIVAAVVGSGVLALAWTVAQLGWVVGPLVLVGFSCVTYYTSTLLANCYRYPDPVTGTANREYIDAVRCYLGPKNVMLCGCARYVNLWGTLVGYTITASASMIAVKRVNCFHREGYGAGDCGASGSTYMVVFGVFQLLLSQLPSLHNIAWLSVVAVATSFGYSFISLGLCAAKWASHGGAVRGTLAGADLDFPRDKAFNVLLALGNIAFSYTFADVLIEIQDTLRSPPAENKTMKRASFYGLSMTTVFYLLLGCTGYAAFGNDAPGNILTGFAFYEPFWLVDIANICVIVHLIGAYQVFAQPIFARLESYVACQWPDAKFINATYYVRVPGRWWPAATVAVAPLKLVLRTIIIMFTTLVAMLLPFFNAVLGLIGALGFWPLSVYFPVSMHVARLGIRRGEPRWWSLQAMSFVCLLISIAASIGSVQDIVHNLKAAAPFKTVN

SEQ ID NO: 47532 - protein, 144 aa, Oryza sativa
MYFTNVMLPQEGYFHSVVCNSDFRNSTVNSDMRYMEWDDPPQMEPHFLNTTHYDEIVESGVPFARKFRENEPLLDKIDERVLHRWRHRPVPGAWCTGRKRWFNDPCSQWSNVNIVGPGPQAEKFRKHMNQIIEESASGNNSCKQ

SEQ ID NO: 47533 - protein, 232 aa, Oryza sativa; identical to SEQ ID NO: 36883

SEQ ID NO: 47534 - protein, 145 aa, Oryza sativa
MTSPVRAGRGPLLARAGDPPSPPHRRLMGARSSVTARRDLGSSTPAATRSDEDNASPLSSSGQHGDGAPRAAAAQIRPAAVPSSWLLDWGRSSMVASRGDSCPPHSPTTPSRPPHRTEPPHGLVLAVARPRRPRPAAASFIAVPL

SEQ ID NO: 47535 - protein, 524 aa, Oryza sativa
MATRVKDVARRSSKKYVDEALYRRLFRRGSTPQAVREEVDGFLDSRKRAFKWEVGVCVRRLRKQALYRPALKLSEVMARRGMNPTVSDQAIRLDLVAKSRGIAAAEKYFLDLPETSKTHLTYGALLNCYCKDLMTEKAEALMGKMKELNFAFTAMCYNSLMTLYTKVNQHEKVPSVIQDMKADDVLPDIYTYNVWMRALAARVDIKGVERVIEEMKRDGRVTPDWTTYSNLASIYVDAGLFEKAEAALKELEKWNTSNDLEAYKFLITLYARTQDLVEVHRVWRSLKRNQPRRANMSYLNMIQALANLKDLPGAEACFKEWEAQYINPPKTNTKAPGTAETSSNESDVKATKDKGTDGELKHPKYDIRVANAMIKAYITEGMFDKAVAVKKRAKMRGGRLNAKTWEIFMEHYLKEGDLKMVHWCADRAIKKGHSAGRIWVPPHEVTETLMDYFEKNKDVDGAEKFVEVLKKVQKDLGTVVFEPLVRTYAAAGKKLPGMRHRLKIENVEVSEETAKLLDSVCIDQ

SEQ ID NO: 47536 - protein, 203 aa, Oryza sativa; identical to SEQ ID NO: 31602

SEQ ID NO: 47537 - protein, 746 aa, Oryza sativa
MPAMCVLQGTSTAGGCRYRQAVPAGRGGRLDVDTNSGVRRGFLPQGRRRYRPVTQPTAQRVMADTVSGGPTTVLLFGAHTNLALLLMAHPRLARNIDRVYVSGGAVRAADPAGNLFTAFATNPFAEFNIFGDPFAAYQVIHSGIPITMIPLDATNTISVTEEFVSEFQQHQQTYEAQYCFQSLDKVLMRLRGRSNGHGNTSYYMWDSFAAGVALSSMRNGEVDGENEFSELEYMNITVITSNKPYGKRDGSNPFFDGRATPKLGLKEGGVHSGHVQTGIRDSFCLVPGSNRGRCEDGYTREVSGPEGVRVRVATRAKPNTDKNSSLEKEFSKSFLEVLNRPEQTGLFNINTQFPYYREVLYKPVFRNVSRGKPVIFDMDMSPGDFVSLIYLLKTPIEVIDLKAVLVNGNGWANIASIDIVYDILHMMGRDDIPVGLGNTTALGIPTLGCNNSYAIPHGSGGFIDSDTLYGLARSLPRSPRRYAPESLDHPEDRQPLALEVWQSVRKQLDPGEKITVLTNGPLTNMANISLSDRDASSVIERVYVVGGLIKDGGDENGNLFTVPSNKHAEFNIFLDPLAAKTVLESDLKIALIPLTAQRKAASFRAVLAALEDIQHTHESKFVHELLSLLQELQIKQKLYHHLDIFLGEILGAVYMVEGSGLKPSVELKPVSVIANTNKSTDGQIVISKNSAKLVRVLSDFDGEIYSKQLANSLANKRQSAVIGSFEEQKAIWSRPVNSSGNIKKQK

SEQ ID NO: 47538 - protein, 616 aa, Oryza sativa; identical to SEQ ID NO: 32610

SEQ ID NO: 47539 - protein, 202 aa, Oryza sativa
MEVEASYSYGFLPSGRHQPYAPPPPHPAEEGELWEYFPCPFCYIEVEVPFICNHLQEEHCFDTRNAVCPLCADNIGRDMGAHFRVQHSHLLKRRKPSRPSSSWPTPSNNSDPYFEGPPQYMMNNRTYQDPAPDPLLSQFICSMAQTDTNSDNTNTEIAVSAVSHDQRLSQRVTLTDDASKLELKERLQRIEFVKEIIMSTIL

SEQ ID NO: 47540 - protein, 67 aa, Oryza sativa
MGEQVHLVYNNSVLCNLQGSSFLHINSASKWPNYLCWIVMGVYYRSFSIFNSSCIIHLLLQNTWIHL

SEQ ID NO: 47541 - protein, 594 aa, Oryza sativa
MGKQASGSREIMKGIGECRRLKALWLNENPALKEGVDKVILDGLPELEIYNSHFTRKAGEWALGFCGDIIGADNPCSSAESIPLENIASLDLSDRCIHKLPVVFSPRKLSSLLSLNIRGNPLDQMSSDDLLKLISGFTQLQELEVDIPGSLGNSAISILECLPNLSLLNGINVASIIESGKHIIDSALKPRLPEWSPQESLPERVIGAMWLYLMTYRLADEKKIDETPVWYVMDELGSAMRHNDDANFRIAPFLFMPDGKLASAISYTILWPVHDVHTGEECTRDFLFGVGEDKQRSARLTAWFHTPENYFIQEFRKYKEQLQSSSICPSREVTPVTKSIRPSDGHALRVFTDIPQVEEFLTRPEFVLTSDPKEADIIWVSMQVDSELKNALGLTDQQYTNQFPFEACLVMKHHLAETIHKAWGSPEWLQPTYNLETHLSPLIGDYCVRKRDGMDNLWIMKPWNMARTIDTTVTGDLSAIIRLMETGPKICQKYIECPALFQGRKFDLRYIVFVRSICPLEIFLSDVFWVRLANNQYTLEKTSFFEYETHFTVMNYIGRMNHMNTPEFVKEFEKEHQGQLAFFSLYYACLVTDF

SEQ ID NO: 47542 - protein, 618 aa, Oryza sativa
MDVVWPHGHGVWGSSSASRRSAMLHGSLDIWIHEARNLPNMDIVSKTVVDILGTKKKKKAANGAMTSDPYVTVQLASATVARTYVVNDDENPVWAQHFLIPVAHEAPAVHFLVKDSDVFGAELIGEVVVPAEQLEAGEHVEGVYPVLDPAAGKPCAPGAVLRLSVQYIPVARLTMYHHGVTPGPDFAGVPNTYFPLRRGGRVTLYQDAHVPEGSLPEIRLGNGALYRQGQCWHDVYDAISQARRLIYITGWSVFHTIQLVRDGGAGVSLGDLLKRKSQEGVRVLLLVWDDPTSRNVLGIQMEGYMGTRDEETRRFFKHSSVQILLCPRSAGKRHSWVKQQETGTIFTHHQKTVILDADAGNHKRKIVAFVGGLDLCGGRYDTPTHPLFRSLQTLHKDDYYNPNFAVLDAQGPREPWHDLHSKIDGPAAYDVLTNFEERWLKASKRSGVKKLSKANNDTLLWIGRIPDIASIDDEVYSSDNDPERWDVQIFRSIDSNSVKGFPKNPREATSKNLVCGKNVLIDMSVQTAYVNAIRGAQHFIYIENQYFLGSSFNWDSHKDVGANNLIPIEIALKIANKIYANERFSAYIVIPMWPEGNPTGAPTQRILYWQKKNNANDV

SEQ ID NO: 47543 - protein, 927 aa, Oryza sativa
MLSSGARWQPRRSGWAEWGGDARPARSPPPRRRRPDVAAGWRGEGTSRVRGRGEKGTTHGGAEGEGAVVAPVRTADAVPARNAVAVAGGLATRGVERDAGQVVAREEKRHGGELGTKRGLEERAARSPPPPPPPKRRAVSAIRQFPPGCGRDAAAPVARGRGCDGGVRLLDEATAAPLAGSKDDSAVPGVVEKVASVDGGDSMANAHHHHHAMMDTVLMKSSHVSDENQVARKVGSLENGAEGSARGKGGHGGELLGRKEVLAQAANLLPKRRIVSATRRFPPGCGRDAVAPLAHREESKVGSSLEAMPVDAGWGVSKEVVTTDGRNNSVNQCASNIVGTVKCQELEEGEVAAEACCDVESQKVAGHGEKLESAVPVTSAVTEVLTRCGSDEMEGCSYAAEATEKHLSMGGKCSIGGPFNEIVHGKRVLGSDGIKREVPSLAMEDHGSIAHDQELVEVELTTGDHIQEAQVATTVNPHESTISRHEAAVSANTAPEVSIRHFSSVKNGNTSQHEETIYASAAADVVKVMNKCKGTKSKAAAEPWAEGPSKEHFKAKRECEKDGMKKSSMNVPTEVFRDGIMRTKLLLTARKAVKPPLNTLHIPFSMGKEESVVTNSASFGPKKKVKVKSPHESKGIPMKIVSTSGLAGKDNLINEKALSLEDDDILKALAVHNGKLELYLNVPSCVERHRQHGSENGNDRSKIRMLCRRFQFICNALLHAVEQGSLMVRRIDLEADKIIRKLPGFTKHGPTVGNVRGVEVGDEFLYRVELALVGLHRPYQGGIDTTDHNGVLVAISIVASGGYPDELSSSGELIYTGSGGKPAGKEKHEDQKLGRGNLALKNCIKTKTPVRVIHGFKGQNREDVSHSRAKQILTFTYDGLYLVLDCWREGLKGSRVLKYKLQKIPGQPKLPLHIAKYQNTRLGSQGW

SEQ ID NO: 47544 - protein, 314 aa, Oryza sativa
MANVIPEKRVHAEIPWSLIAYAGISDETSPPTVAIFLRDMRLNIAYAKAGDRHWKLLDDKAWSTFPSSISRSDGQQLRYVNYLSVVTLRGRIYLVTYQGNILKLSIRPRPQLIPIVKDQTKHSMWHGRVLCPNVVSYLVPPNDDDHRMLMVRYYGDLTHLTDHEQRCIKRRKKNDLIKLPSKNPCRYNWRILQVFEVDIVRKKLVRVDGIADDRAVFVGDVACVSLSIDRFPSILGNTVYLGMNSCCAVGFGLCHLKDRTVEPRLEHVLESGRKAPLLVDISLFHLGRIVPFARPCTLEEYLVCSVGFKNGIKD

SEQ ID NO: 47545 - protein, 609 aa, Oryza sativa
MEASAMEEALSKKTTSKGGLRTIPFIISNEVFEKVATFGLHANMILYLTERYHMTAATGTVVLYFWNALSNFLPIFGAVLSDSCLGRFRVIALGSVVSLAGMCLLWLTAILPADRRTPECEARRDDCQLVPWQLPLLFASFVLMSVGSGGIRPCALAFGADQLDRRDNSARNVRTLQTFFNWYYTVLGLSIVLASTVIVYIQQAKGWVIGFAVPVVLMLTALTLLLLGSPFYLKAEADRSVLVGLVQVLVASYRKRRGPLPPETADASRFHNRAGYKPRTPSNRLRWLNRACALGDNPDKEVNPDDGSARDPWTLCTVQQVEDVKAAVRVLPIWSTGFMPGVIIGQQMFPVLQAKTMERRVGGLEIPAASFGVFSILTLTVWVAVYDRALVRPLSRLTGHARGVTLRQRMGIGLALFAVAMAVAARTEAARRAEALAEGLRDYGPQSGRAVRMSAMRLVPQHCITGLAEALNLIGQIEFYYSEFPKTMSSIGVSLLALGMGFGSVAGSAIVGAINAGTRSGGGRDSWLSSNLNRGHYDYYYLVLAALCVANLAYFVWCGWAYGEEGQNRVTAEEEAVEDTKTKEEQQQKLQNLFSEAGCCCVCFSFLLL

SEQ ID NO: 47546 - protein, 895 aa, Oryza sativa
MFGRLCYACLFLNWEQSRKSTQSRQRQYFEQKKRQQQSPGVQSQVDVSGTGSQAYHDQAPRSLDVINLNNLATPISHSSGPETVDNVVPPLDCTLLSASPIEGLKKITSACSNLKEPCSQPRLSSSSDHHDGAASANPYKEPLGCKIPPPKSNSVKKQNPNVELNNEISLFDLVSDEGPNNKSTARPAREAHVSFSVKGLGHVKMETPPQSPRSTKRTLPLPPKVMRYTQNKARRYIPFDATKQLDSIINDINVLKERRFSEKRTCPLDESGYERSKQSNCYFPHSFENHNNKFFPEDEDMFCETKAEECWRSKHGRLDDNLTDENSERLWKMEPFNSEDRFPTPIVEQFDTRDYGFKDRYSPEQRTSTRTNTRFETSATHDLFSDQSMMDNGNDTVLFDWERHPPIKKKSNLNSTFGPSAWSFDMVDDSEKRRSPRSEESCSSAAVMKDGSCKKPSLSVECEENKMNEKDDFHISFDNLDIPKMDAHLDGVSLFDNLEEHHKRTDDQNNLEAGYWSDKATEKRRTREPSCRLSLKEKFSDWGSTSPTTHWKGQTGLSNPSSCTVLHEDKPFNSASEMSTYQTAGSSSPERRPASKVSPVFHRPDNAIFDDDIHLQSSVSDIFGDRIEFSKPNCSMGLQSDIDMSTFLAEKVDKRKEDNLDTSKNQNADMFLPNKSVSSVRQNVGGQHSSCAQQPGKDSLLQGFSPGIDFQDSRLNSFWEDGLADNGTFQGDIELTDLLTRKNSDKNEDRIEKLSKPETKMLTETPQAYPDHRNEMRETETCSDGSEVTNPPGVQKQTSLATQVPANLGCLQETSREMLKVHAHTECVKREKIEYPCVDFSTPLHLRNKIPDVDHSKSNFMFHSPFVGGSLSTLSVPQLSLCTPSLLFCLMFSDL

SEQ ID NO: 47547 - protein, 173 aa, Oryza sativa
MCSMGILEAMRGRVFFTLNLLGSCNFHHFARGANAAYLAPRFQVLVPFSKFMNSCKSYLRCPNASSDSPKAQEILKEPASSEEGCSSSLESCDQVYLAQVSILNTENKERCSLEVLKEDIQEPTFLRGKPFSSINIWMNRAHLRSSTHYDPHHNLLCVVAGCKKGVFVFVLVF

SEQ ID NO: 47548 - protein, 376 aa, Oryza sativa
MLGAARRQLGSGPMLGQVLRRLRPATAAAADAARAYSAAAKEMTVREALNSALDEEMSADPSVFLMGEEVGEYQGAYKISKGLLDKYGPERVLDTPITEAGFTGIAVGAAYQGLRPVVEFMTFNFSMQAIDHIINSAAKSNYMSAGQISVPIVFRGPNGAAAGVGAQHSQCYAAWYAHVPGLKVLVPYSAEDARGLLKAAIRDPDPVVFLENELLYGESFPISAEVLDSSFALPIGKAKIEREGKDVTITAYSKMVGYALQAADILSKEGISAEVINLRSIRPLDRATINASVRKTNRLVTIEESFPQHGIGAEICMSVVEESFEYLDAPVERIAGADVPMPYAANLERMAVPQVDDIVRAAKRACYRAVPMAATA

SEQ ID NO: 47549 - protein, 484 aa, Oryza sativa
MERYKIIKEVGDGTFGSVWRAINKESGEVVAIKKMKKKYYSWEECINLREVKSLRRMNHPNIVKLKEVIRENDMLFFVFEYMECNLYQLMKSRGKPFSETEVRNWCFQIFQALSHMHQRGYFHRDLKPENLLVTKELIKIADFGLAREISSEPPYTEYVSTRWYRAPEVLLQASVYNSAVDMWAMGAIIAELFSLRPLFPGSNEADEIYKICSILGTPNQRTWAEGLQLAASIRFQFPQSGSIHLSEVVPSASEDAISLISWLCSWDPQRRPTAVEVLQHPFFQPCFYIPPSLRFRSTNGYAATPPSVGAKGAVDQKNARRYSVGPLSNGRPAVNYSYLSANTPARAAGVQRKLELDHQVNMNSCQAPEGNHKLTKAEAMNQPWSRPPPAAAAVRSNGNYFTKDQGPRAPDIAEKLSQLTVGSNRVPSLASDKFVDMKARTHGNTMKRPLPPVGTRTWHAPADPFRRPYEMPGDRAFLPRKLVS

SEQ ID NO: 47550 - protein, 148 aa, Oryza sativa
MRRTVRDDEMVMRWWWWWTGGDGGVAGGGVSPDRAWPGERDDVEAHARARVDEVSLEAAHPQHLLDPIDFFKKCCHQMVFVATVVLCLTWMCPWRRRRGSARSRRRRRRRGPPPVRHRPSRASARRTSRGPLPPERQREDRDERGERG

SEQ ID NO: 47551 - protein, 260 aa, Oryza sativa
MWRRPGQLRLHLAAAAGAAGRGARRRNPLPPVPTVPSSSSSSSASTTTTRDLAAFARGSSSSSRSLSDRAGGGECWSCGASGAFLSCGSCGSVQPVDPAVDYFRIFGLEREYTIKDNNLEGKYKDWQKKLHPDLVHSKSEKERAFAAEQSALVIDAYRTLSKPLSRALYLLQLEGIPIDEEKTITDPELLMEMMEIREAVNDANDSQTLEKIQSQIKRKLETWSHSFQEAFERRDFDRAVKATQRMRYYERAVEETIKKL

SEQ ID NO: 47552 - protein, 264 aa, Oryza sativa
MGLSVAEAVTSSGLHLVPISFSSRDTLDRTVRVGHTDVRIYGPSAREDVLSSVIDEFPDVVVVDYTAPDSVNANAELYCKLGLPFVMGTTGGDRQLLYKSVQDSNNYALISPQMGKQVVAFLAAMEIMAEQFPGAFSGYHLEVLESHQAGKLDISGTAKAVIACFEKLGVSYDMNRMVKIRDPEQQLEMVGVPEEHIEGHAFHLYHLTSPDDSVSFEFQHNVCGRSIYAEGSVDAAMFLHRKVRSNDSKRIYDMIDVLREGSMR

SEQ ID NO: 47553 - protein, 306 aa, Oryza sativa
MAPSLLRPASPCLNLAPPTADGPGRSRSAVTIGGSRPLSVSLRVGGSSRRDFPCTTMASRDHSGLTRQLLDFQHGTVDEIDGEHDPFMELKARFMDFKHRNCVDNISNYQNLAQQQTPKFMVVACADSRVCPSSVLGFQPGEAFTVRNIANLVPPYQHGASETSAALEFAVNTLEVENVLVVGHSRCGGIQALMSMKSKQDDSQSRSFIRDWVSIAKSARLSTEAAAGNLNFELQCKHCEKESINSSLLNLLTYPWIEKRVNEGTLSLHGGYYNFIDCTFEKWKLVYRQGLEGGSKYAIKNRTTWS

SEQ ID NO: 47554 - protein, 604 aa, Oryza sativa
MNQDNYFEEALKMRNLLEEFYQNHGKHKPSILGVREHVFTGSVSSLASFMSNQETSFVTLGQRVLANPLKVRMHYGHPDVFDRIFHITRGGISKASRVINISEDIYAGFNSTLRLGNITHHEYIQVGKGRDVGLNQIALFEGKVAGGNGEQVLSRDIYRLGQLFDFFRMLSFYVTTIGFYFCTMLTVWTVYIFLYGKTYLALSGVGESIQNRVDILQNTALNAALNTQFLFQIGVFTAIPMILGFILEFGVLTAFVSFITMQFQLCSVFFTFSLGTRTHYFGRTILHGGAKYRATGRGFVVRHIKFAENYRLYSRSHFVKGLEVALLLVIFLAYGFNNGGAVGYILLSISSWFMAVSWLFAPYIFNPSGFEWQKVVEDFRDWTNWLFYRGGIGVKGEESWEAWWDEELAHIHNVGGRILETVLSLRFFIFQYGVVYHMDASESSKALLIYWISWAVLGGLFVLLLVFGLNPKAMVHFQLFLRLIKSIALLMVLAGLVVAVVFTSLSVKDVFAAILAFVPTGWGVLSIAVAWKPIVKKLGLWKTVRSLARLYDAGTGMIIFVPIAIFSWFPFISTFQTRLLFNQAFSRGLEISLILAGNNPNAGV

SEQ ID NO: 47555 - protein, 883 aa, Oryza sativa
MSACGYHSPRFSEDIAFLPQWLQPHRPLAVGEHGKDSAAVSSPSCVNCAFIGGPAQEQHSCLNTMVNAASCSGFSLHLSGDEGTPTGTTPSNGNVVPFSLHLSSESTSKLSSTQANGLNSVTCKDVLGGFCIDDQAQEIKTVPQNQSEAKDLREICKMSSEEINKTCDSKGHRRQQLSGRKVDVRKLRSADVNDAVELSIAASEAMVIAEMILLDSQSDKLATASLEAALHVKEARKQCFLEELEHSCGSSESDLDETDRLSELDETEMLDAFQDVGLSLVQTACASQGQNISGLKQEISHASSHPCDAEAHVLESSPEKQNIRWNSHDADTNDHVSDSLASHNKEGGVVAVQTNVGTRKHVKGLFNKETSFISESMDGMDEFPSPSRIASMEMAASSRASFLHKIKGSCEENQGAEAAQLCSQVVCSNLSLVDPLCSIVPCSISFNEGPPSQAPECIQSKGDKELISTKEFPSKQDLEGEAGPSCTPVSNILLRRRKYSSLRPFSTIAPRPYVSKSTEPHNDVDEAVCQQGSFAAVTLNKKIRRVQASKVCVENNFEAGNLHEFSKVLKNPSYAQGVSEHQNSMKSLKRKKAQFSEAKISTRKTKNIRRTQTKSRFSWSDSRLIDTIEPREYIDNKEALFHGLDFLLTGFQSHKEKEIEPLIRKFGGYVLSRVPSCPLDKRSKLAELARCKPPIVLSPKKVSTAKFLYGCAINSWILNPSWLFDSIQAGVMLPPGKYFIRQVHSMQGISMFDQSLHLRKNTLLFDGVGFLILGKISFCSKFSNVIKHGGGQVFASLQGLVQSLKDRSSSHGIILVASEASASRHLSYCGLEHDIKTAPASWVIGSLYSGKLIPLKKDRCASFRKIKMPSFQQPQAFDMSQEI

SEQ ID NO: 47556 - protein, 473 aa, Oryza sativa
MSEEAPPSPVMRPVFYDGCPGCAMERKLESSQGIPYKEFFFVGITTIASSLPISSLFPFLYFMIEDLHVAKKEQDIGLYAGFLGASYMIGRCFASLFWGVVADRIGRKPIIKFSILSVVIFNTLFGLSVKYWMAIATRFLLGALNGMLAPIKAYSIEVCRPEHQALGLSIVSTGWGVGLVVGPAIGGYFAQPAKQYPNVFSEKSIFGRFPYFLPCLCISLIALVVLISCIWLPETLHKHKDTEGEIEMIDDSRSTLEEDSHKQKSLYKNWPLISSIIAYCVFTLHDTAYSEIFSLWAVSEKRYGGLSFSSKEVGQVLAVAGAGLLVYQLFIYRSVHKFLGSINSSRIASALSVPILATYPFMTHLSGFRLGIALYLGTILKGVLSITIITGTSLLQNNAVSQSQRGAANGISTTAMSFFKAIAPAGAGALFSWAQERQNEAFFPGDQMIFFILNVIELIGLALTFKPFLAIPN

SEQ ID NO: 47557 - protein, 888 aa, Oryza sativa
MEGIEGLLADFGVRPQGKAAPMAASRSRSTTTTGSAWPNPRSTPAPAQSYDGLFGAPPSAAATTTSSSPFDSLFNGPPTSSSSSSSAAARATVYDDDIFGAVPGLRPSSNSASSSSAARYDGDDVFGGGRRAAASPAFDDVFSSNRSAAAPSYDDILGGFGVKPQAGEEKRSVVVEDDDLLGGFGRKPHSEAEKKPVVVEKANGGNGFDDLIPGFSGSGPQRSRKIIDDNKDEPAVRTSKSTASVLDDDPFVVLETNSASGSTYPSPSSFMDPLEHLNNSASSKGKNVDNTTDNDSLPDDSSAFNQVPKSDPLFTSEFNGDTKYMNPPSKARDSNPLHGSMNGNSARGSSTEDLGDAKTKSQSARYSDIYVDGSSSDRYATDGVGDQSPRSTESEDDIWLTVSEIPLFTQPTNAPPPSRSPPLLKQRPLQAKANGNYDGYVRQSNQNHNQYRDMPDQAEVSSLDEMEGFAKDKSQMPSYDDNFFGEAEQSERTSSDREEKERQARLEQEQEMKLMEEKKREQRRLEKERELEQQKERERQAMERATKEARERASAEARAKAEREATQRAQRAAVQRAQQEARERAAAEAKEKAARIAAEARERAAPEAKERERAAAERAAAERVQQEARKRAERAAVERAAAEARERQAAAAAAAAREKQSSADDLESFFGAGARANSAPKQRTPTVDSMFDSQPQSRATTNGSQRSASTSASMRKAPSATNIGDDLSNLFGAPASSDVFQEVEGESEERRRARLERHQRTRERAAKALAEKNERDMQVQREQAERDRIGDTLDFEIRRWAAGKEGNLRALLSTLQYILWPECGWQAVSLTDLITGAAVKKQYRKATLCIHPDKVQQKGANLQQKYTAEKVFDILKEAWNKFNSEELF

SEQ ID NO: 47558 - protein, 409 aa, Oryza sativa
MGLSRRAKNLIVDVPFQGAKWLRCVDLAGQLFGNTATPPPPTTIAHGSESAAVQEDYTSQTLVSDSCNPKKKAAGLKMERIRLPRPILKFRPALNEACRIDCFPFVDHKMFWVDHLGRPFLFEAETRLMDMLPCLHKPKSMPFSVFVPNADADNDYEHHRPGSSLFVMERIPKPEVNSSTQWSDQFEAFVYCKHKRTSTNFSKTWQWQLLPPPPYVREPKYWHSCSRPEISSYTSLTVNGDPHICISIDGVGTYCLNTASHTWIKVGNWTLPFHGRVEYVPEFNLWFGFSSDESPHYLAASNLSAMDSQPQLVGRWEELYLPEDLKECKNPQLVNLGSGRFCITRFFHSRSHNSDSRGDVDQNVAVFTGVEVKPCFQDANGGSGKVELQMIPHKSLFHKSNHTTIDAVF

SEQ ID NO: 47559 - protein, 383 aa, Oryza sativa; identical to SEQ ID NO: 44401

SEQ ID NO: 47560 - protein, 328 aa, Oryza sativa
MERENSWLRRTKFSHTVYTRLDHQRAPIAPLGRDVEQKLQRFISMGKSVSMPVNRDEDAVAAFKHSVSLPTARSSLQIDKEKANKQKADFDIPSSPPVNSVNSKGLKARSLVKSPSSAMLLSYLNKAHPNRDSNLKKTDRPQHKLRSKSPLPNVAPSDVFREARASSRRFTSPPPKRRGSERSIYGKSFDRQLSDMSQSPDLCSTPVSSDKHKSLKDSSWTRRYFDNGGRRRVSAVDATEVRRNRGVSMAQAVQTTVDWTLDPSKLLVGHKFASGAYSRLYKGLYDDKPVAIKFIGNLMMTTMGRWLQNLKNSITVRSMLYLTSITRM

SEQ ID NO: 47561 - protein, 426 aa, Oryza sativa
MQAHRSPAMVGGGGAGAVGPPSPATVPVRRRCEGTAMGAITLDLRPGNGVGPFTLGMPISGAFAQIEGQPTLYDVVHVKYFDEEPLKLDFVISFPDHGFHLRFDPWSQRLRLIEIYDVKRLQLRYAKSLIGGPSTLATFVAVYGLFGPTFPGIYDKERGIYTLFYPGLSFAFPIPSQYTNLFTNGEVADLPLEFPDGTTPVTCRVSIYDSSTDSKVGVGSLMDKAVVPALPAGSLYMEEVHAKLGEELLFTIGGQHIPFGASPQDVWTELGRPCGIHQKQVDQMVIHSASDPRPRTTLCGDYFYNYFSRGIDILFDGQTHRIKKFVLHTNFPGHSDFNSYMKCNFVIYDAEAEGTDQPGSIPKSCITPRTKWEQVKEILGDCGRAAIQTQGSMNNPFGSTFVYGYQNIAFEVMKNGYIATVTLFQS

SEQ ID NO: 47562 - protein, 315 aa, Oryza sativa
MVCSELSNFEELDGVEEDGNYIPAIAIVGRPNVGKSSILNALVGEDRTIVSPVSGTTRDAIDTEFTTEDGQKYKLIDTAGIRRRAAVASAGSTTETLSVKRAFRAIRRSDVVALVVEAMACITEQDYKIAERIEKEGKACVIVVNKWDTIPNKNHQSTTYYEQDVREKLRILDWAPIVYCSATHGSSVDKIISAAALVEKERSRRLGTSILNQVVREAIAFKPPPRTRGGKRGRVYYTTQAAIRPPTFVFFVNDAKLFPETFRRYMEKKLRSDAGFPGTPIRLLWRSRKRPDKKGKSADNSLQSSVIPSRMALAT

SEQ ID NO: 47563 - protein, 251 aa, Oryza sativa
MGIKGLTKLLAEHAPGAAVRRRVEDYRGRVVAIDTSLSIYQFLIVVGRKGTEVLTNEAGEVTSHLQGMLNRTVRILEAGIKPVFVFDGEPPDMKKKELAKRSLKRDGSSEDLNRAIEVGDEDLIEKFSKRTVKVTKKHNEDCKRLLSLMGVPVVQAPGEAEAQCAALCENHKVFAIASEDMDSLTFGARRFLRHLTDLSFKRSPVTEFEVSKVLEELGLTMDQFIDLCILSGCDYCENIRGFITFFLFSHT

SEQ ID NO: 47564 - protein, 510 aa, Oryza sativa; identical to SEQ ID NO: 33324

SEQ ID NO: 47565 - protein, 583 aa, Oryza sativa
MGSWRRKAYGALKDSTKVGLAKVNSDFKELDIAIVKATNHVECPPKDRHVRKIFVATSINRPRADVQYCIYALSRRLSKTKNWTVALKTLIVVHRLLREGDPTFKEEFLAYSYKGSVLQRANFKDDSSQLAWDCSAWVRAYALFLEERLECFRILKFDIETERLMRSPECSSKAHSRTRTLPCIELLEQLPALQQLLFRLIGCQPEGAAGTNYLIQYALALVLKESFKIYCAINDGIINLVDMFFDMPKYDAIKALVVYKRAGQQAEDLSDFYDSCKQLELARTFQFPTLRQPPSSFIATMEEYIREAPRPSINSVENGERKLVTYDQEATEESEKPAEEEKDEPAESEQEQEPKQEPKPPETTGDLLNLDAEVSPLVAELEENNAWALAIVGTGDQTKASTSLDLFSGNTSGWELALVTAPSSTSQTVQTKLAGGFDKLLLDSLYEDETRRRQIAGVTYTGSIGGGAPNPFDTNDPFATSSSFLPPSNVQFAMLNQQQHQYYQSQHQQQYYQPHHFQDHQHHHNMYFQTHYQQNQIYQQQQQQQHQYPAPQAGSSNPFGDPFGDLVPMAMAVSQKHGHSSLI

SEQ ID NO: 47566 - protein, 200 aa, Oryza sativa
MGMEARRKMRFAMVCSSNMNRSMEAHSLLGRAGLDVASYGTGTHVKLPGPSLHEPNVYDFGTPYNVIYDDLRRKDPDLYKRNGLLPMLKRNTSVKLAPQRWQDNAGDGLFDVIFSFEERVFDLIVDDMHNREQRMLKNALIINMDVKDNHEEAGVGAKLALDLCQKLEGADEDWEEIIDDLIITFEKQHKRKLTYNMAFY

SEQ ID NO: 47567 - protein, 618 aa, Oryza sativa
MDEYHHRMGAAADFRRDLEDLVCDHLGGCFSPTSSSSSCSAAGGGVAAGHQPDEEPESSAARRRRRESRLLSRWVARQAEEVLSSMEREVERRNREAELLALARLHPVSTLDPSSFLLSSPTAPPPRPQAPSPTAPPSLLQMWRELEHRRSDADQPFDREPSPDTADRERVRQIARRLTANTDVPTAAAAAATTGEWLGETERQRVRLVREWVQMASQPRDSRVASRRDDTAAGERERRGEPPRLRGRQARLDVITRMARERQRELQGISGYHIVSEFPHRSRNRIQGLLRGRFLRNVVLPVEEEERPPSVAARELGQLRQSHRVSTLRSESAVSSEDVSRFDSSVAESVGVLGSDEPQQGAEVRALTGTENTTQIMLEDVGLQEADAENAAIESPSVALDNMVEMHETQVDNRLQDEAGRDARFWQPSLDDSLDRWPNETAEDAERNWEDNAEELHSETMEDDAREHDHLQDEHDEWHDDESHGTENWQDDFQDSPLDMGPIPRTENRFIPPDDDNVYSMELRELLSRRSVSNLLSNGFCESLERLIRSYVQRRGRGPLNWNLDAAIPSVNSPNENQEQERNAETRQFQAPVNRPALVIPPPPFATPTATMAQRIAS

SEQ ID NO: 47568 - protein, 581 aa, Oryza sativa; identical to SEQ ID NO: 31284

SEQ ID NO: 47569 - protein, 394 aa, Oryza sativa
MAAGRHGGYRDYEARERELDAEASRRSKEQQHHHHPSGRHQRGDSDPRCEADRRRDGGRSRGGRELSNGYGHRRSPPPRSRLSARLGDREPGEVLSGSASDDSGGRPHRARENGVSSSSRDGESVVAASASSPSKKRKFSPIIWDRDSPKPMHSDVAKGKKAVDSVPTELPLPPPPPLPPQDHIPERLAVEKSPMDVEPAVASESPEQLQEHAESRVMEEEEEYSTMRNISTSRWAGANDDEEEGAPHRKKKSASPADSAELGQRKKALSPELGEVVASDISGGRTMSRSSDSGRLGADENEDLEVDKDDYMDVDRDDDGNSDIANHQSGMDSEYEVRRSETPEPVKPPHRCINMLQGCRSVDEFERLNKINEGTYGVVYRARDKKTGEIVALK

SEQ ID NO: 47570 - protein, 408 aa, Oryza sativa
MGNCCGTKISSDAISRNASGSRRRRSGSRRKGTGLSSRVSSSVAAVTPRSEGEILRCANVRSFAFNELKTATRNFRPDSVLGEGGFGSVFKGWVDENTFLPSRPGTGMVIAVKKLNQDGFQGHREWLAEVNYLGQLSHPNLVKLVGYCLQDEQRLLVYEFMPRGSLENHLFRRGSHFQPLSWNLRMKVALGAAKGLAFLHSDKAKVIYRDFKTSNVLLDSNYNAKLSDFGLAKDGPTGDKSHVSTRVMGTYGYAAPEYLATGHLSAKSDVYSFGVVMVEMLSGRRALDKNRPAGEHNLVEWARPYLSSRRRIFRILDARLAGQYSLAGAHKAAALALQCLSADAKNRPTMHQVVAALEQLQETTTTSHHHRSPQSRMLLGGRGFNASGRSSAGAGARPRRLSASPLPA

SEQ ID NO: 47571 - protein, 159 aa, Oryza sativa
MSLIRRGNAFDPFSLDLWDPVDGFPFGSGGSSSSSGSLFPRANSDAAAFAGARIDWKETPEVHVFKADVPGLKKEEVKVEVDDGNILQISGERSREQEEKSDKWHRVERSSGKFLRRFRLPENTKPEQIKASMENGVLTVTVPKEEPKKPDVKSIQISG

SEQ ID NO: 47572 - protein, 261 aa, Oryza sativa
MAGSSAATSCARFLALLATCLLWNEAASFTASGWNKAFATFYGGSDASGTMGGACGYGDLYSTGYGTNTAALSTVLFNDGASCGQCYRIMCDYQADRRFCISGTSVTITATNLCPPNYALPNDAGGWCNPPRQHFDMAEPAWLKIGVYVGGIVPVMYQRVPCAKQGGVRFTINGRDYFELVLVSNVGGVGSIQSVSIKGSRTGWMAMSRNWGVNWQSNAYLDGQSLSFKVTSSDGQTLTFLDVAPAGWTFGQTFSTSQQFS

SEQ ID NO: 47573 - protein, 229 aa, Oryza sativa
MTLREEATLKVLKVVATLGKAISTGAIAAVGYYVPGIVGAKFGEPSLPRLPRFAMAAVTSWFAGKVMYYAILQGSTEFILKHGEERMKMELSNIILNKHSDDKTLVEAVKTQFFAERLFSDQYQDRTLFRWHLRRTYVDSAFMERVKEIEVKSSNDGPGLISGQRIISTRPFGDLMEDPLACILGSPDSNMESNKSAEHTGTIVKRREVRAHRRSHRHHHRHADKFSAL

SEQ ID NO: 47574 - protein, 517 aa, Oryza sativa
MPHHGGRKKKNKGGKGKPRKKTDDRGEANVGSGDSSPAVRVEEEAEVEAEAEVGTAVEPQRSGTLASPTDVVEAAQHGQRQQQASQSQQTPSPRSYAAAVVNKREDETVGYNFLQFLRSFTVEHREGPFYAGELKSMVYQNSKTFCVYYGHFQGQYANLGTKISNSYARVVGFLRSAIGRFITEYELDDQWREISNDPPKIHIDALPPAGSIVSLQYFLGQAHNKLVETARIYDPNGSLVADSTKLGRRVFLGFLIYIINQHKDGRSWCGEFSIDDLLVRNESTFGITKAASSHASCKAMAKDLKQLAKILEKHFRTAQGQVPGYFIKLFSELKESAGELGQYNSEKTRKFHKYLSSHLALRSAMSRRHLFMDLFRAYQLLGKTAKKDLISLLGSMFPEDKWLDQVDKHQMFIKVSEYGIVEGDADKASNSQDQKKKRSYSGDLLDLLVFIRHVTEHGADHTKDDNMEQKLKSLVEIDLIIAKYLSAAVVDLIKALVKSDLLKDTFSDPWNAFSNSS

SEQ ID NO: 47575 - protein, 480 aa, Oryza sativa; identical to SEQ ID NO: 28540

SEQ ID NO: 47576 - protein, 186 aa, Oryza sativa
MRPAVSRAAFASVLLAPRAVGVAARCASSSSSAASPSVAAATYDHASFIKEVAATDPPEHLSSLLNVLQARGEKLVSPGAKRGLIPLVVPLAESPAGNLTSLLRWPTAPSGMEMPVVEVRNHGLWLLAKNVNQYIHRVLVEADINGYADDLWSAVGDTGKKLYTKGDFKESQMADLDAYLLKKVEG

SEQ ID NO: 47577 - protein, 932 aa, Oryza sativa
MERTLLNPPPSLRSPACRTTTATRIRPSSSMATMIPTPPPMRHARLVKASAAGRRELHAPPIAPPILLGLRSPAAASYGRASGGGGRRRGARVVARMGFDMFTDKAIKAIMMAQEEARRLGHHAAGSEQLLLGVIGEGTGIGAKVLRGAGLSLKAARAEVEKMAGRGPGMVPMGIKFTPAAKNVLQASQEEAHQLGHNYVGSEHLLLGLLREHGAALVVLKNFQADPSNIRSEVIRMISDTSEDHQPVSAAVGGGSSTTKIPTLLEYGTNLTKLAEEGKLDPVVGRQNQVDRVVQILGRRTKNNPCLIGEPGVGKTAIAEGLAQRIAAGNVPETIDGKTVITLDMGLLVAGTKYRGEFEERLKKLMDEVKQNGEIILFLDEVHTLVGAGAAEGAIDAANILKPALARGELQCIGATTIDEYRKHIEKDPALERRFQPVKVPEPTVDETIGILKGLRERYEIHHKVQYTDESLIAAARLSYQYISDRFLPDKAIDLVDEAGSLVRLRNAQLPDEAKELEKKLKKIMAEKSEAIRSQDFEKAGALRGEEVELKSEIMSLVDKSKEMSKAAVDSGESPGPTVTEADVQHIVSSWTGVPVEKVTVDESSRLLAMESSLHRRIVGQDEAVTAISRAIRRARVGLRDPRRPIASFIFAGPTGVGKSELAKALAAYYYGSPEAMVRLDMSEFMEKHTVAKLVGSPPGYVGYAEGGQLTEAIRRRPYAVVLFDEVEKAHPDVFNMMLQILDDGRLTDSKGRTVDFKNSLIIMTSNVGSGVIEKGGRQLGFAGDGSGDGGYGVIKNMVEEEMKRYFRPEFLNRLDEMIVFRQLTKLEVKEIAGIMLAEVTGRIGGKGIGLQVTERFKELVVEQGFDPSYGARPLRRAIMRLLEDTLTDKMLAGEICAGDSVIVDADGDGNVVVVGRRSAGLPDLKSPAFTV

SEQ ID NO: 47578 - protein, 444 aa, Oryza sativa
MASAAVTLPRVMLAAAAVRAAMLALGEWQDAHLEVRYTDVDYLVFSDAAASVAAGGSPFARATYRYSPLLAYLLVPNSLLHPTWGKLLFSAADLLVGLFIDTILKLRGVPDSTRIWSVVAWLFNPFTFTIGTRGNCEPIVCAVILWILICLMNGRVLQASFWYGLIVHFRIYPIIYAIPFVIVLGKNYAGPAGRPILTQWTSKQHLQSDKSSPSVERATSLLTNLWNFLTSLITRNTILFGLLSGSMFFLWTGVFFYLYGWEFLNEALLYHLSRTDPRHNFSIYFYHIYLHHQQGFSSIQKLASFLPQLIVQLALILRFSRDLPFCLFLQTVAFVAFNKVMTAQYFVWFFCLLPLILPWTTMKLKWKGLACILVWMGSQLHWLMWAYMLEFKGQNVFIPLWAAGLMFLAANIFVMLMVINHHKFTPLFSSSTVKSASKIAAKKE

SEQ ID NO: 47579 - protein, 503 aa, Oryza sativa
MEQAAAEAEAERMRREKKDGVVKEVIRLERESVIPILKPKLIMKLAYLVEQDKDRGEFLKLCRRVEYTIRAWYLLQFEDLMQLYALFDPVNGVKSLEQQSLTPDEIETLELNFLTYMFQIMEKSNFKLLSDEEYDVAQSGQYLLNLPIKVDESKVDKKLLTRYFKAHPHDNLPASVDKYIIFRRGIGIDRTTDYFFMEKVDVIISRVWRSLLRVTKIDRLFSKKKQLRAKKDPKKTDEVNEEVEEQEFSVERIRLEKMELSIKNLLSQMTIQEPTFERMIVVYRKSSTEAKPDRGIFVKHFKNIPMADMELVLPEKKNPSLTPMDWVKFLISAVLGLVTLIGSLEMPKADIWVVIAILSGLIGYCAKIYFTFQANMVSYQNLITKSMYDKQLDSGKGTLLHLCDDVIQQEVKEVIVSYYILMEQGKATVQDLDLRCEQLIKEEFGVECNFDVVDAVKKLEKLGIVSRDSIGRIVCVPLKRANDIIGQTTEEMVMRAQQASTGS

SEQ ID NO: 47580 - protein, 308 aa, Oryza sativa
MDVRRGGGGGRIVGAARRALTWGALPLPMRITNGLAMVSLVLSSCDLLRLCSDRERPLGGREFATVVYLVSLFAHPDAPATTTGDDDDGQGGSRRARPAAAEPAPMHGHGGGMMEADDEEIVAAVASGALPSHRLESRLGDCRRAARLRREALRRVTGRGVEGLPFDGMDYQAILGQCCEMPVGYVQLPVGVAGPLLLDGREYHVPMATTEGCLVASVNRGCRAISASGGAFSVLLRDAMSRAPAVKLPSAMRAAELKAFAEAPANFELLAAVFNSCSWQLEPSTQYRRNSMGCIYGQVSWFHGYLFA

SEQ ID NO: 47581 - protein, 144 aa, Oryza sativa
MSPGYLEPTFLEHDNCLSFCSRKADAMVPYQLQVKVSAAEAGAKDILKSPYNSFSYSDVPPSLLLRIVRLRVGNVLFNYKNTQMSEVTEDFTCPFCLVRCGNFKGLECHMTSSHDLFHYEFWISEDYQAVNVTLKKDNMRTEVN

SEQ ID NO: 47582 - protein, 527 aa, Oryza sativa
MIPGNHDWFDGLHTFMRYICHKSWLGGWFLPQKRSYFALKLPNGWWVFGLDQALHGDIDVYQFKFFAELCQQKVGESDSVILITHEPNWLLDWYWGDKTGTNVEYLIREYLKGRCKLRMAGDLHHYMRHSFIESKEPVHVQHLLVNGCGGAFLHPTHVFENFREFYGNKYETKIAYPSYDDSSKIALGNILKFRRKNWQFDVIGGFVYFVLVFSMFPQCDSFRILREDSWADRVNSFFTAMWNVVFEILEHSYVSLAGVVTLLMVSFFFVPTKLSRRRRALLGFLHAVAHLTSAVILMLLMELAIEICIRNNLLATSGYHTLYEWYRKVESEHFPDPTGLRTRLEQWTLGLYPACIKYLMSAFDIPEVMAVTRSTICRKGIESLPRGGAIIYYVCVFLYFWVLSTPVVSLVFGSYLYICINWFHIHFDEAFSSLRIANYKAFTRFHIKKNGDLEVFTFAVDKVPKDWMLDPDWDMEPKEPFQMSYTRKFPSKWRAASGSDPTNAVRIVDHFVIPRTPPDSPTSGSAS

SEQ ID NO: 47583 - protein, 414 aa, Oryza sativa
MGNCASAIDSFFFTKRANNENDDDDAAPGMSASKRTTSSTTTGKLSTLSNSTFIPSTISGVSTDDAYPDGQILESRNLRIFTFAELKNATKNFRTDTVLGEGGFGKVYKGWVDERTMNPSKSSTGVVVAVKKLNPESVQGTEQWESEVNFLGRISHPNLVKLLGYCKDNDELLLVYEFMAKGSLENHLFRRGAVYEPLPWSLRLKILIGAARGLAFLHSSERQIIYRDFKASNILLDSNFNAKLSDFGLAKHGPDGGLSHVTTRVMGTYGYAAPEYVATGHLYVKSDVYGFGVVLLEMLSGLRALDPSRPSGKLNLVDWAKPLLADRRKLSQLMDSRLEGQYHSRGALQAAQLTLKCLSGDPKSRPSMKEVVEALEKIKLIKSKSREPRNSSSLVRGQGNSPRSDSARTSSKGR

SEQ ID NO: 47584 - protein, 189 aa, Oryza sativa
MNWSCSNATRLSHVLSEQLVTEIEEGKASKALLKEKETLITTMQTELEQTREENTQLKQSLEEKTSALDLIIQEHQAVKAELEQALTKQKVAEDENRNLIDRWMLEKMKDAERLNEANAMYEEMVLKLKSAGVGGIQHNALQEADGIIRRSEAGYMDIMETPIPSTCRITIRAHDGGCGSIIFSITQTS

SEQ ID NO: 47585 - protein, 207 aa, Oryza sativa; identical to SEQ ID NO: 31688

SEQ ID NO: 47586 - protein, 203 aa, Oryza sativa
MSNEWLENGQCPLARSYRAMSGILPLVAKALQPPAGVKLKCPPAVVAVRAALARTELVKSLRTQPLPAKMVAIALLGMAANIPLGVWREHTKKFSPQWFAAVHAAVPFIGMLRKSVNMPKTAMAFTIAASIVGQTIGSRAERIRLKALAAKNDADSTTVADMYPNKTGNCSDTEGKAWDPLAMKMMAGRASGGAAAPTPSMCF

SEQ ID NO: 47587 - protein, 560 aa, Oryza sativa
MVWALTPVDTVRGAQRCYIFAAGTYKVGRKDCDVIVQTDTSISRVHAEIVVEKMVAWDPQSGAPANPSYVRVVDRSKYGTFFNKVQGTQGSRLHKDEDAMLADGDTVTFGTGNATFRLSFVPIVVFFHGKKSGRISPCLQAVMTSIGAYATRKWSDECTHVLVDESCSLTPELLDAVLAKKQIVLGDWFKVMAEKNIHTEMPSSTQYIPKLTLDGMEIQVVEIKLIESCLAGYTFILGSSEKYKFGDKLHALLESTGAKYLHVDEFCANSQDSGAGENDKDILLVPAKSPLEFSKIRGLFPLSKITDVKLFAAILSGHLEATAIEPPAYIVASSNSTDETIVVDSDVEIDTATSDHTVAASKSEHHIEHISDDKKEVVAISEEDAVNLVEAKTSINLHSDQEKDEIVKPMEEDVKVIEKTATMRGFKVEGEDIPVMTKVPKDETLDSRDETCHVIYTQNLVVESILQSARAESIETGGINFKRFRKRGAVSGNSFKDLIPYSREPYRESDYERGTVTDFMREEKKRRQMEAIAEDLFNNAKPKKKAAAGSSIHTMLTGRR

SEQ ID NO: 47588 - protein, 487 aa, Oryza sativa
MDSPGGAAAAAAAAESSNRAGEDAKSDGVSCQNSRRPNLSLQIPNRAFDDTLPTSTRIKISPSPNSARSGLPPRPNSTRTKSSIRGIIPQRSFKAKSSLQDGDQTILLIPDTPSSSGQQVKATTSRSFSFTKVINSLSAKRTHSLPVTPVAASGPSSHEGHADNLPSTVKNEVETQIRRSLSAPGNHDSKDLRRTASSGLIRVIPTTPRPVPVETVASNDGIEEAVDAPEDGGEDIPEEDAVCRICLVELNEGGETLKLECSCKGELALAHQECAIKWFSIKGNKTCDVCRQEVQNLPVTLLRIQIRTVNRQPRNGVQQRAAHPHRFWKETPVLVMVSTLAYFCFLEQLLVADMKSRALAISLPFSCLLGIFSSILASTMATDNYLWAFATFQFAFLILFAHIFYNLLKMGAVLAILLASFTGFGIAISLNAMLIEYLRWRLLRNQRLTQRRNHRHGQSGNNASNENTASNARQQGSGSDQQSAEHG

SEQ ID NO: 47589 - protein, 803 aa, Oryza sativa
MSGAPCSNLGLVPRDMHGSIPISTTNSSGPSIGVSSLVTDANSSLSGGAQLQPSTSMNADSFMRLPASPMSFSSNNISGSSVIDGPIVQQSPPQEQMQKRRSSSVTSQPVIDAAGALHAQKKSRVDIRQDDILQHNLIQQLLQGQSSLHLQGQQNPQIQALIHQHKLAQIQQQQQHQMLQPFSQIQQSQVGIPRQPQLRPPLAQPGMQLAGPVRTPVENGLCSRRLKQYLYHKRHRPENNPITYWRKLIDEYFAPRARERWCVSSYEKRGNPSGAVPHTAPDSWRCDICNTHGGKGYEATYEILPRLCQIRFDHGVIDEYLFLDMANEFRLPNGLMLLEHTKVVQKSIYEHMHVIHEGQLRIIFTPELKIMSWEFCSRRHDEYITRRFLSPQVAHLLQVAQKYQTVATESGPAGVSNSDAQNICNMFVTASRQLAKNIDHHTLNEHGLSKRYVRCLQISEVVNHMKDLIEFSHKNKLGPIEGLKSYPKQTAAKLPVQNMHEPKQLMAAAGLPNDQTNLKAMGVKTEMNTHANETHGIGPIGNGPQNAAALNNYQNPIGNGLQNAAALNNYQNILRSSVANQSLLQQEASSMFKGPTAMHNGIQLEASRSFRGPNQVHLAQFQHPASFQQPMPQQSSLQGLGVSPQYQQHVLHQLLQEAKNTNNRVLAQQQQQQQLQHAPANSGLASGGTAITGSAASGDHMNNNGAVKGGTPMVTTGPSSVINNTASILPSRSNSFKSVSSNPQVAAAAGGGIGSGGHAATPKADALHELDDLDNLGNLISTELEESGLFLGDQAGGGYSWNM

SEQ ID NO: 47590 - protein, 534 aa, Oryza sativa
MGLLEDLLLAPRVDGGGGGDGEAMAAPDYAIPPLSPTAASVVHRCARIAGVEVEQLLRRFEPEKGDQPLAYARSVVEYCSYIALRVETKRHDYLSDSEFHSLTYDMMIAWEAPDDETDAALQKMSFSFVDGKDDDDCGSMFCLSPTQMAIQVDGRRTVSPEAFAKIIPACPAMAHAITVRNLFDALTNSTGGRLHFLIYHKYLKCLDKVLRFAKRISGGHKAPALQLSDGEVILDIYGAATTKPILQHIGTSTWPGRLTLTTHALYFEPVSVDFSYNEAVVYDLSRDLKQSIKRESTGPWGAQLFDKAVMYKSSSTREPVFFEFPQFKGHTRRDYWFAIIKEVLHAHKFIRKYRMINLHKAEALSVATLGILRYRTVKEGFHILPAHFKTTLAFNLAEKLPKGDKILEALYGQMKDYSSRFRVDEDSVQSSSDDLTLADPFPLSAYTLVNMGLLTLKEEDNPEEWDLTVRDVQTGGTSSVQMALERSVGYSGRVEAARATLDQVKVEDIDTNVAVLKELLFPLIEIGKRLLFFG

SEQ ID NO: 47591 - protein, 326 aa, Oryza sativa
MKRKTRNKIILTTLLVSAAAILIGGTVALILTAGTWKVKMKESREKICDKGWECSGSKYCCNDTITDFFKVYQFENLFSKRNSPVAHAVGFWDYQSFITAAALFEPLGFCTTGGKQMQMMELCAFLGHVGSKTSCGFGVATGGPTAWGLCYNHEMSPKEDYCDKTNLQYPCVEGAEYYGRGAIPVFWNYNYGAAGDGIHEDLLHHPEYLEQNATMAFMAAMWRWVTPMKKKQPSAHDVFVGNWKPTKNDTLAKRLPGFGATMNVLYGDQICGKGYIDDMNVIISHYQYYLDLMGVGREHSGDNRDCAEQAAFNPSYKKPDDQQQQS

SEQ ID NO: 47592 - protein, 477 aa, Oryza sativa
MDAAAQESLILELHAIEAIKFGTFVLKSGITSPIYLDLRALVSHPGLLSSIATLLHTLPATRPYDLLCGVPYTALPIASVLSVHRSVPMVMRRKEAKAHGTAKSIEGAFRAGEAVLIIEDLVTSGASVLETAAPLRDQGLVVADAVVVVDREQGGRENLAANGITLHSLMTLTEVLAVLLKHGKVTEEKAREVRQFLDANRKVTVPGAAGAVKPKAVRKGFAERAGLAKNPMGKRLFEVMEAKQSNLCVAADVGTAKELLELAEKVGPEICMLKTHVDTLSDFTPDFGAKLCSIAEKHNFLIFEDRKFADIGNTVTMQYEGGIFRILDWADIVNAHIIPGPGIVDGLKLKGLPKGRGLLLLAEMSSAGNLAHGEYTAAAVKIAEQHSDFVIGFISVNPASWSVAPSSPAFIHATPGVQMVSGGDALGQQYNTPHSVINDRGSDIIIVGRGIIKASNPAETAREYRIQGWGAYQSSLP

SEQ ID NO: 47593 - protein, 628 aa, Oryza sativa
MMMRVLGFMGDGGGGGMMTAQAAAEAAVGAIGCGYDLTSDLRLSRVKAGGRLVDIDGASGAARRELVLPWGAVVGGVPVGIVADKGERTRFRSDVLSFAQMAEQVNQTMSVAGKIPSGAFNAMFDYHGCWHKDAAATGSLCFDGRFIELYAVEAPRAHLALLDRVKRDVPPFWDPAALAEFIDKYGTHVIAGVKMGGKDVVCIKQLKGSNLTQSDVQSRLKKLSDDKLAQDSPESLTARDDKFLLGLNGSLLLGPGSAAWRSFRPSVVSHKDDILSIHIRRGGVDNGQGHSNWLSTISGSPDVISMAFVPITSLLTGVRGCGFLNHAVNLYLRYKPPIEELHQFLEFQVPRQWAPEFGELPLALGPRKKKNSLPSLQFTLMGPKLHVTTAKADSGNRPVTGIRLFLEGKKNNRLGVHLQHLSATPGTITIAGEVASAEDATVRERDYIEPIKSPLLSHVCTAPVQYNGARIDDCAAIVTRAWLEVQETCLKKVLFLRLGFSGVASTKIRRSEWDGPFVVSRKSGSLSALFSARLSAAGAGGSAQMMQQQQPVGEKVEVNSAIFPKGPPVPLPVQRMARYVDTTEVMRGPADLPGYWVVTGAKLCIEGGKVALKVKYSLLIAEVLDYPE

SEQ ID NO: 47594 - protein, 1055 aa, Oryza sativa
MFYSQFILAKKGPLGTIWIAAHLERKLRKNQVADTDIGVSVDSIIFPEVPIALRLSSHLMLGVVRIYSRKVNYLFHDCSEALLKIKQAFRSTAVDLPPEESTAPYHSITLPETFHLDDFELPEAAFQGDIDHHVSTKEQITLQDNPEKTGYSTSQFGLDERFGDGNSSHIGLDLEEELMLNKDQSIQLEADDGIIIQGRSAVHPTDMEVDDNQNKDESAEGYNMEDGPSSHNKLNPLSADGLVGNSLPNWHTYNVQTPDLNDMLLNNDGNAGPSASYYQPSPFPCDEPASPEFVSAQAPATPGLMEETVPSRVHESPVLSPQRKASPSSNDETAKTAENANDLVGAETTELALTKPVQIESSGAVQEIDSLSQQCATEELPPQAETSNLEATMDKSMINTDGVAASGEATAAKETTEVSLVENSLELCADGPTEPVIENQTQFNDGSVDVQGGGQHAPHAILATADSQVNVEASTQEMASNDIPSDLPTLEFPEREKMLSAPDVELYQANDLGQVTAEKGTTESDGSNKVGSLTSRKRHLEDSLPALESATTEKLSSRPRGKRTIDGIPDDDDLLASILVGRRTPGLRLDSTPIPPKTSSLKRPRLTSKSTTPKRKVQMDDAMVIHADTIRQQLISTEDIRRIRKKAPCTRSEIWMIEKGSLEDDIFHEPIFSCMCKELNDLQYRTYEIVAHPTIHNMEIHVRLDMSQTMADGSNDVGTSGAKDSGNHQDHVVLPDGAESDAMHPEATDAADTRTDFDSHMPSDKQVNNVEGVTEQLTDNEKETAVVEKATTNMGDSAQVDSLDKEYLQDVPADLQRSTNTNTPLFVLDDMPGPDVVLDSSDPVSAQAVDDMKGELSDIVHDNVNAFDNKDMPTSEVTVLEFTQNASGFPQPTEDENVLSAMGENSGLQENHVGSVMDLDNMGHDFSLKECSDFGSAIQGVDTDFLMYDDEVDCDEANDDEPNPEEFQSLDNSGWSSRTRGVARYLKTLFDEESGLGRKSVAIDHLLSGKTRKEASRMFFETLVLTTKDFISVDQPNSFDFVSVKPGPKLLKSDF

SEQ ID NO: 47595 - protein, 321 aa, Oryza sativa
MVAAEENPESFFAAAPPLRDADAVAARLGEFIARNSSAAGAGGGGRRIVCVTSGGTTVPLEQRCVRYIDNFSSGHRGAASTEYFLKAGYAVIFLHRRGSCQPYCRFLPDDSFLKFFDVDAESKVQVAECHAPVVKKAIGDYCKAIEGGYLLKLPFTTIFEYLQLLKMVATSISSAGPLGMFYLAAAVSDFYVPWDSMAKHKIQSGGGPLDMRLSQVPKMLSVLRNQWAPLAFCISFKLETDSDILIQKADMALNKYKMNIVVANLLATYKEEVIIVTDKERSTIRKMNKDEDLEMQIIKILSQNHSKYICGSTNGCVQSPY

SEQ ID NO: 47596 - protein, 499 aa, Oryza sativa
MYRIAGSHLRSLKRYSYSRFASTSVVKQSSGGLFSWLLGEKSSQLPPLDVPLPGITLPPPLPDFVEPSKTKVTTLPNGIKIASETSVSPAASVGLYIDCGSIYETPASSGASHLLERMAFKSTTNRSHLRLVREVEAIGGNVSASASREQMCYTYDAFKAYVPEMVEVLIDSVRNPAFFNWEIKEQLEKIKAEIAEVSDNPQGLLLEALHSAGYSGALAKPLMAPQSAIHRLDSSILEEFIAENYTAPRMVLAASGVEHDELVSIAEPLLSDLPSVKRPEEPKSVYVGGDYRCQADSDKTHIALAFEVPGGWFEEKTAIIVTVLQMLMGGGGSFSAGGPGKGMHSRLYLRILNNYHQIESFSAFNSIYNHSGLFGIHATTSPNFASKAVDLAAGELLEVATPGKVTQEQLDRAKQATKSAVLMNLESRVVASEDIGRQILTYGERKPIEHFLKDLEAITLNDISSTAKKIISSPLTLASWGDVIHVPSYESVSQKFFSK

SEQ ID NO: 47597 - protein, 92 aa, Oryza sativa
MSSRRSRSRQSGSSRITDEQISDLVSKLQDLLPEARLRSNDRVPSSRVLQETCNYIRSLHQEVDDLSERLSELLATSDMSSAQAAIIRSLLM

SEQ ID NO: 47598 - protein, 196 aa, Oryza sativa
MAKARKQQPQGPFAGGAAAGERSFLGFQYHHHHRGGSVAPAYGDDDDLPDLAEADVWYAPSSEGGADHRGGGGGGGGGGGLEIGGGGWGGGKHKVGGLSRAFADGRQVAASAPVQVPAWPGRYADPDQAAFAEEEKRREEEDDAGDGDGDGWVPPHVYLARRQARSSVVEGVGRTLKGRDASRVRDAVWSRTGFDG

SEQ ID NO: 47599 - protein, 656 aa, Oryza sativa
MASSPDTTLAFHAARPVSISLPASPTGFDVARSGVELQRHAMTDAPCMLPLPGWPAMMAVAQPDRMIFRSQPIAVLGGAAALPQQSRSSQVHDGTSRDGAPRAAAAAATTTGKARGRRDTSYDSFKTWSGKLEKQITTHLRGGRQQQQQQQPEQRRQDEEPEDDDAAAAAAAAATTASSSRSYSSMPRVQRFFAALEGPELDKLRVHHEQPSPCRLALVEQLACTLVRSRSQRAAVVVVLVSCRRQSSEALVLPSDKTWPFLLRFPVSAFGMCMGMSSQAILWKNIAISTSTRFLHITVKINLVLWCVSVALMCAVSALYACKVAFYFEAVRREYYHPVRVNFFFAPWIACLFLAIGVPPMVAASLPHWLWYLLMAPIVCLELKIYGQWISGGQRRLSRVANPSNHLSIVGNFVGALLGATMGLREGPIFFFAVGLAHYIVLFVTLYQRLPTSETLPRDLHPVFFLFVAAPSVACLAWARITGEFGYGSRVAYFIAMFLYASLAVRINLFRGFRFSLAWWAYTFPMTSAAIASIRYSSEVKNAFTQSLCIALSVLATLTVTALFLTTLLHAAVHRDLFPNDISIAITERKLKPIAEIHEQRQQQRDKNATTAADIHPDSACIKDLEAGVPPPPSYAGDRSTTTTSTDPCPLGAGQF

SEQ ID NO: 47600 - protein, 533 aa, Oryza sativa
MGGRGALPVVAGVVLVLLVVAARGASAAGGGGGGGAAAAAVNGDRLRAEQIRKQAKDAAASAAALAAASSRLHLDRARHLRLLSSLHRNLTATLRDLSAAASASASASASEAGYASAGDEVRRLDLQAKDLIRAARAAIADAKPLFDPQLKIQRLKDAIFAQNELLARAKKRGAFASLIAAKSIPKPLHCLAVRLTAERIARPENYADPVPPPHALEDPAMFHYAIFSDNVLAASVVVRSAVANSLDPSKHVFHVVTDRMNLGAMQVIIRLMDLKGAHYEVKAFEDYKFLNSSYVPVLRQLESANLQKFYFENKLENATKDASNMKFRNPKYLSMLNHLRFYLPEMYPKLHRILFLDDDVVVQRDLTGLWKIDMDGKVNGAVETCFGSFHRYWQYMNFSHPLIKEKFNPNACGWAYGMNFFDLDSWRREKSTEQYHYWQSQNENRTLWKLGTLPPGLITFYSTTKPLEKSWHVLGLGYNPSISMEEIRNAAVVHFNGNMKPWLDIGMNQFRHLWTKYVDYDDSFIRQCNFAPP

SEQ ID NO: 47601 - protein, 203 aa, Oryza sativa
MIQEMFNSRATRARSLNVLLSLTSTRKGTQTISEYFAKMKALADELAMSGKQVDAEELTAFILNGLDDDYDSVVSALAAKTKPITLSETYAQLLNFENRLNLRREGNMTANVAGRGRGNAPSNRGGAGRGRGGRGGFNGAGTNAGCGGRGAGQQQRSGNDTRPVCLVCYKRGHVAADCWHRYDDSYVPDERHLAAAASYAYFF

SEQ ID NO: 47602 - protein, 799 aa, Oryza sativa
MESRPTATADEPPPPLVAMHAACLRDGKTAVFPLGTEEIHLVAMTSKRNLPNLACFWGYKVPSGLYNSCLSMLNLRCLGIVFDLDETLLVANTTRSFEDRIDALQRKLSNEIDPQHISGMSAEIKRYQEDKSILKQYIENDQVIDGGKVYKVQTEVIPPLPDNHQPMTRPIIRLQEKNIILTRINPLIRDTSVLVRLRPAWEDLRSYLIARGRKRFEVYVCTMAERDYALEMWRLLDPDSRLINSVQLTDRLVCVKSGSRKSLLNVFHDGSCHPEMALVIDDRLKVWDEKDQCRVHVVPAFSPYYSPQAEANFSVPVLCFARNVACNVRGGFFKEFDEVLLPRISEIHYEDEINDFPSAPDVGNYLITEDENAAILNVNKDPLAFDGMADAEVERRLKEVSCSVQAVNPIPTNADVMPVAPNQQLITSSVPEAPSLGMIPLNNDQGPQPPSSWPVAQSAPVDPSQSSPAREEGEVPESELDPDTRRRLLILQHGQDTRDPAPPCPAGSPVQTSVLPVQSHGNWSHVEDEMNPRSLNRTSTGFHLESDDINYDKKQPHNPPYFPDEDNLITSDRYNRRIHRYPSQLPHSEDHHMLNRSSIAYRSFPGEDMGNRFGPSNHRSSKIEPGHQFVQNAETSAGVLEEIAVECGFKVEYQSTLCSTAELQFSIEVRILGEKVGEGIGKTRKAAKRQAVNMSLRNLAEKFLTSDPDKMMILKENGFSSNSNSFRYSGGSRDDTSPVASTSNESRYMGERVDTLRKPAGSVAALKELCTVEGYNLVSKSSHHVLVVHQVKKLMLRSK

SEQ ID NO: 47603 - protein, 277 aa, Oryza sativa
MDIEAFIHGGSGGGDADADHPLGIFSAADLSGFGFADSSTITGGIPNHIWPQSQNLNARHPAVSTTIESQSSICAASPTSATNLNMKESQTLGGTSGSDSESESLLDIEGGPCEQSTNPLDVKRVRRMVSNRESARRSRKRKQAHLADLESQVDQLRGENASLFKQLTDANQQFTTSVTDNRILKSDVEALRVKVKMAEDMVARGALSCGLGHLGGLSPALNPRQACRVPDVLAGLDYAGDDPFTAGLSQPEQLQMPGGEVVDAWGWDNHPNGGMSK

SEQ ID NO: 47604 - protein, 269 aa, Oryza sativa
MALSWPSAIRLAVATVLLAAVGVALFTLPVDKILKDFLVWIKDNLGPWGPLVLALAYVPLTVLAVPASILTLGGGYLFGLPVGFVADSIGATIGATAAFLLGRTIGRPYVLSKCKDYPKFQAVAIAIERSGFKIVLLLRLVPLLPFNMLNYLLSVTPVGIGEYMLASWLGMMPITLALVYVGTTLKDLSDVTHGWSEISTTRWILIISGFILSVVLIVCVTRIAKSSLEKALAENGDAGIPQLPVVASPSDLQQPLVIRIDTSNEDHEK

SEQ ID NO: 47605 - protein, 465 aa, Oryza sativa; identical to SEQ ID NO: 31629

SEQ ID NO: 47606 - protein, 220 aa, Oryza sativa; identical to SEQ ID NO: 29263

SEQ ID NO: 47607 - protein, 224 aa, Oryza sativa
MGVRERGVLAGEEGAPEDDQATPAAAVEPPVVFVVVVVVAAPAAAGGGVPGGGAVRARRRGEPAAARQERPDRGGGEAAAGAADDARADAGDGGAHLGGGAEAAADDGVPGARHEEPGLPPDARRPAGRPARRPEQGARGRPLQEAPPPHRVPPHPQRRDLRRRRVGSYAGGGRRGGAGRRHHPARRRRRRRRRRHRELLDAAAQPRPGGEAARGRRRRRRPGE

SEQ ID NO: 47608 - protein, 455 aa, Oryza sativa
MSPRIPTRANLALAALLILLTIAATTLASAKCIAKNKPEGEEGEPSGAGAAAAHASPEKKPGSNGGLTTMSVGESVPEIKKDSSDDGAAVNESKKPKSSGGLTTLSVDDSQAEPADSIAEPVEDGTDDGEDESEKKKKKKKKKSKSKSSDDDDDDAEKKSKKKSKNSDDDEDDKKKSKKKPKNPDDDEDDKKKSKKKSSDEDNDGAKKKKKKKSKGKSSDEEDDEKPKKKSKSKSKSSSSDEEDEKKSKSEGQAAAKPKEEDEEGGSASASASTSAPKNEHHSGTMSLPDPDMIAQPVMQALNPVVKALCGKTDHADLCESSIGQLPQQPPAQLDDIGVLRLSMNALRAKVQEAISVATNRMGAASGDEVSKDAMGDCLQMYDDMKSNLDSADAALKKGDKDTAHTMLDSARTDVDTCEDGFSEREGLKPIMGDLDKILAELSSNTIAIASAIIE

SEQ ID NO: 47609 - protein, 470 aa, Oryza sativa
MAIRITMSYSGYVAQSLASSFGLRCTAAAAASSGAAPGAGARFLQDALSRPFCLFASSRHSEYHHDADDHNHPKPKPKPKAKALPAASAIAANGGGHSLLLSRSCATKAPVNDPPSSLAIGLLMVFTSGMGSATGRVGASSLSASPSISSAFNPAALLPFLQATKWLPCSDLVTSAAPSRKSARPVDVAKAPTAAPAATPVSRTKPAPAPSPRPAHVPSPAVAAPSKVGVKALVGSGVINSGVINSSGASSNVGVGVKPLVGSGAINSGAAGMVRKSSPALGAAAEVSRRNWLSRWVSSCSDDAKTVFAAVTVPLLYRSSLAEPRSIPSKSMYPTFDVGDRILADKVSYVFREPNILDIVIFRAPPVLQALGCSSGDVFIKRIVAKGGDTVEVRDGKLLVNGVVQDEEFVLEPLNYEMDQVTVPQGYVFVLGDNRNNSFDSHNWGPLPVKNILGRSVLRYWPPSKITYGL

SEQ ID NO: 47610 - protein, 331 aa, Oryza sativa
MDVDELLLIAISHGNNEDGSDGVVGISDEVYAAELQLQELIMSSAMAATAAAAADQLDSGSAVHASSEDAAAAAHAKTSPSSALVPAAECSSSSAAAMTLVASVVKCSCSSSAMAPSATTTSFLFCKICMDDVPASDAHRGSHGCAHAFCAACLAGHIAAKLHSGGGVYCPEDGCASAVDPELCQPILPEDNFERWCAALCRAMVLGGRHVYCPFTDCAEIIADERGGDSDGQPTECPACRRRFCERCGVAWHGGVSCGEYGELAVGDRGEGDLAVVEMAKGSRWRRCPRCEFFVDRYEGCSHITCRCGLEFCYGCGQEWGPTGHSSCQRP

SEQ ID NO: 47611 - protein, 569 aa, Oryza sativa
MADAAGIATVLAADGRDFLLRNSADQVKISSIEASTVALYFSASWCPPCRRFTPKLIEAYNELVSQGKNFEVVFVSGDKDQEAFDAYFAKMPWLAVPFSDSECRAKLNKRFKVRGIPHLVILNATSGEVYTEDGVELVTVHGTEAYPFTTERINELKEQEKAAKDNQTVQSVLGTPTRDYLLSNKGDRVPISDLEGKYVGLCFVVNGYGPVVQFTSLLAKFYEKLKEVGEKFEVVAVSLDSDEELSNESFAGMPWLAIPQEDKMGEKLARYFELRGLPTLVLIGPDGKTLNNNVADIIDEHGQDAWEGFPFTAEKMEILAEKAKAKAELQTLESLLVIGDLDFVLGKDGAKVPVSELVGKTVLLYFSAKWCGPCRAFLPKLVDEYNKIKEKHNDFEIIFISSDRDQSSYDEFFSGMPWLALPLGDERKQHLSKTFRVRGIPSLVAIGADGRTVARDAKTPLTAHGADAFPFTEERLLEMERKIDEMAKGWPGKLKHELHDEHELVLTRCTTYGCDGCDEMGSSWSYRCRECDFDLHPKCALGKEEEKKGDDEAEAEADPACEGGVCRKA

SEQ ID NO: 47612 - protein, 308 aa, Oryza sativa
METPRHDDESHGGAAVTALLHEMLLRARRDGEEPELSDEQLRSNDQLQEDEMLALEAIYGDNISILSAKDGLRCFQVHVHCEIPDGISVSAELSRDDNRDQNSRFFDTFSVQHLAPISFTCLMPPSYPSHHAPYFTLSSQWLDTVKVSSLCLMLDTIWSQQLGLEVVYGWVQWLQSSALSHLGFNDGIVIQQPDSMMGPVDVRVVAEIVSVESAVQWLISYNEEQCHESFLIGLHDCMICFTERAGNWYASVHTCVVKIILFPVFTSYCFIISSLPELKFSKHYSITSFFTEFVITKRKMICSQCSDR

SEQ ID NO: 47613 - protein, 871 aa, Oryza sativa
MEEGFVESGSFSRSSSFGGFEEWMALVRKRNGSGTPSSSSPQQPRSGGFAAQSSVSSEGLELGHPYSDAIDYSLSYQLPTTSLWDRLGRVTMMDIESSDFNWSSLSSLHHTKHTDTSTEPYEDDTSRSFEVTVNSGGVVFIALFKTSEYDDLPSKETAAVIKIAPSRMATQSERFGYELAKWLGVRTPQGRVIHNFSSEWHQMKDAVENARDAAISSCDELEEMICTEMLEALELSRCLFLMNYVHGSPLLENTMPFDSHDSAEKTAEALGRVLILDLVLRNEDRLRCRPLGWRGNYANLLVADRNAYANLDSLDDVYDSAIIRYKPEIIRSPQNRKPRRAVSISGSIGSDTSDLMLPDNPSQPEISSFHIIAIDSGVPRRPPACKRAKDQESYPKLVELTLNNWDYSSNLLFELSFGKLGIPGPEEFDVSSDLSYHSPLSESDMVAAVNSFRGGFRSALRDLQRFHIFLVTLYQKLDGLLKIFFNLMYKVLNEYDREDAGSSDSLCSTETHMDSHDSEVPKHMRRPSRTLSRDNFDLSSPSSRENFMIKNFKGSSDASRGLRLTMKLRDFNKYAKADGELCKEIEQWNDMLRTEVVKLCQDNSFNTGFFEGIDNSIAVDAYELKVRLEHILERISLISDAASTERPSQITDYLYIGGALAARSTYTLKHLGITHVLCLCANEIGQAESQQPDRFDYQNFSINDDENADISDVFQDASDFIDYVQHLHGKVLVHCFEGKSRSATVVLAYLMLRKKFTLLEAWNMLKKVHRRAHPNDGFAKVLLDLDKKLHGKISMEWHHRRPAMKVCPICGKNAGLSSSSLKLHLQKAHRKISSGSVDTAMSLEIQKAVEAIKAGRGGGDSPTHSAEKVTS

SEQ ID NO: 47614 - protein, 501 aa, Oryza sativa
MAYSSRSCDQCSHERRSGFMKWLCAFLKGTKDGEANRRRPRVTAGEETTLWEEPVRPKKEEPPRHNNEEMDHALALALADDAKNTKERNHDKGENDEELARAIQDSLNMNPYQPYNPCAPSQTQARSRGYRVCGGCKHEIGHGHYLSCLGMYWHPQCFRCSSCRHPIREMEFTLLGTDPYHKLCYKELHHPKCDVCLQFIPTNRTGLIEYRAHPFWGQKYCPLHEHDRTPRCCSCEKMEPRNTKYMSLGDGRSLCMECLDSAIMDTGECQPLYDSIRDYYEGMNMKLDQQIPMLLVERQALNEAMEGESKGPHHMPETRGLCLSEEQTVTSILRRPRIGANRLLDMKTQPQKLTRRCEVTAILVLFGLPRLLTGSILAHELMHGWLRLKGYRNLKAEIEEGICQVMSYLWLESEILPSTSRYGQASTSYASSSSSSCRPPPSKKGGISHTEKKLGEFFLHQIANDTSSAYGDGFRAAYAAVNKYGLRQSLNHIRLTGGFPV

SEQ ID NO: 47615 - protein, 273 aa, Oryza sativa
MSLACGLPLLECVYCLGCARWAWKRCLHSGDRDSATWGLASADDFAPVPRLCRLIMANYDHHPCHPLDARCVVRRRTYADTRGRVTPYLLYLDHPNSDIVLALRGLNLARETDYALLLDNRLGKRRFHGGYVHNGLLRAAAWVLDAECDLLRDLLADHPDYTLTFTGHSLGAGIAAMLTVVVLLNLDKLGTNLHRSRIRCYAMAPARCMSLNLAIRYADVINSVVLQVSPALFPLFNSCYTCLFLLTIPTTSHLICILHLLSQQNNYSSLLTG

SEQ ID NO: 47616 - protein, 149 aa, Oryza sativa; identical to SEQ ID NO: 34962

SEQ ID NO: 47617 - protein, 516 aa, Oryza sativa
MGSGGGGGDLGVAREVREEERGGGGGGMRKARVCVRAPHGAGALLVVGGAVVGAAVFAWCRRRCRSDGGEGEGERKEGAKNHGEHPAKEEGGLDGGVVEGEQGDAQRLHQIYQNLSRDNVEVGVNGSDGKATDELYQIQKDDEVVPNGDKIVLSELVTEAVEKYDHGSIKDCAEIAPDGMVNEAVETYNHNSERDCAEITAHVMDTENVTEDDDNSGKNDAENEIIVNENEGEENSAENTFSLSSPDITLEEHDNNNCVDQDTASTETTPTTEKVMHQEQVSEQVKMAETAEVKPAEETETTPMVQTEVKLEEETETTPVAETTEVKPAEETETSTVAETLQVKPAEETDTTSMAETAELKLAEETETASMAETAEVKLAEETETIPMAETAEVKLAEEKVMKKNEFEHEEENSKEEYVKPVNSLAYSSVPSLLKRTVKKGQVNPRWNETGMKLEQDCTNGELNEHDLTKAGATAMGGAVLTMARRPDSMAILALIVAVTIAITIVVRLYVPLQAT

SEQ ID NO: 47618 - protein, 389 aa, Oryza sativa
MAEPEQQQQQANPDEVVLGQETGGARVAILNRPRQLNVISDRVVYLLAQFLESWEKDEDAKLVIFKGAGRAFSAGGDLKMFYEGKSDDSCLEVVYRMYWLCYHIHTYKKTAVALVNGLVMGGGAAMVAPLKFAVVTEKTVFATPEASVGLHTDCSFSYIHSRLPGYLGEYLALTGARLNAKEMIAAGLATHFVPSEKLEELEKCLLNLNTGDESAVRAAIEEFSTDVQPDEDSILNKLPTINKCFSAETIEDIIKAFESEGSIDGNQWIATVLKGMRRSSPTSLKMTLRSIREGRKQSLPECLKKEFRLTMNTLRSVVTGDVYEGIRALSIDKDNAPKWSPATLEEVKNEDIDRLFEPFSSEKELQVPSDDSNRWSGKFEHTVYGRTSE

SEQ ID NO: 47619 - protein, 793 aa, Oryza sativa
MLPDGGADDEERWLAEGIAGVQQNAFYMHRALDSNNLKDALKYSAQMLSELRTSRLSPHKYYDLYMRAFDEMRKLEMFFREETRRGSCSVVDLYELVQHAGNVLPRLYLLCTVGSVYIKSKEAPAKDVLKDLVEMCRGIQHPLRGLFLRSYLSQISRDKLPDIGSEYEGDADSINVAVEFVLQNFIEMNKLWVRMQHQGPVREKEKRGKERNELRDLVGKNLHVLSQIEGVDLDMYKETVLPRILEQVVNCKDELAQFYLMDCIIQVFPDEYHLQTLETLLSAFPQLQPNVDIKTVLSQLMDRLSSYAAASPEVLPEFLQVEAFAKFSNAIGKVIEAQVGMPVVGAVTLYVSLLTFTLRVHPDRLDYVDQVLGACVKKLSGNAKLEDSRATKQIVALLSAPLEKYSNIVTALELSNYPRVMDYLDNSTTKVMALVIIQSIMKNTTCISTSDKIEALFDLIKGLIKDMDGAQNDELDDEDFKEEQNSVARLIHMLHNDDHEEMLKILCTVQKHILQGGPKRLPFTVPSLVFSALKLVRRLQGQDGDVIGEEVPATPKKIFQILHQTIEALSCVPSPELALRLYLQCAEAANDCDLEPVAYEFFTQAFILYEEEIADSKAQITAIHLIIGTLQRMNIFGVENRGTLTHKTTGYSAKLLKKPDQCRAVYACSHLFWTDDQDGIMDGERVLLCLKRALRIANAAQQMANVTRGSSGSVALFIEILNKYLYFFEKGIPEITNTVIQDLIELIRTEKQSENTVADPSTEAFFASTLRYIEFQKQKGGSIGEKYEQIKTT

SEQ ID NO: 47620 - protein, 256 aa, Oryza sativa
MPLLPMTKLELGHRGEAWEPGCLRAVAGELLFTFLFVFIGVASTITAGKAAGGAGEAAAVTAAAMAQALVVAVLATAGFHVSGGHLNPAVTLSLAVGGHITLFRSALYVAAQLAGSSLACLLLRCLTGGAATPVHALADGVGPVQGVAAEAVFTFTLLLVICATILDPRRAAPPGTGPLLTGLLVGANTVAGGALTGASMNPARSFGPALATGEWAHHWVYWVGPLAGGPLAVVAYELLFMDVEDAGGAHQPLPQE

SEQ ID NO: 47621 - protein, 275 aa, Oryza sativa
MPRREGGRSRSAAYLVLFASCLLAVAAASHQEFHEAAGSRTLLMSHEHTNQVHCSRERSRAAWKAIDEYLMPFVEKEKYELPSKCRLHPGNDMFREQEQHKIHFDINEWRCGFCKKAFRAEKFLDQHFHNRHNNLVDNSQGRCLADLCGALHCDLMLEFKKPKSKCSATAAARNRHLCESLADSCFPINQGQSASRLHEFLLRQFCDAHTCKNGSKPFPKGGRKQTNRFYLALCALTIVLLPLFYLIVFLHQREMKKGGQNLRRISKVVQKKKPS

SEQ ID NO: 47622 - protein, 284 aa, Oryza sativa
MAGGPAAVSFLTSIAKAAAGLGAAASLLSASLYTVDGGERAVIFDRFRGVLPETVGEGTHFLVPWLQKPFVFDIRTRPHNFSSNSGTKDLQMVNLTLRLLSRPDVVHLPTIFTSLGLEYDDKVLPSIGNEVLKAVVAQFNADQLLTERPHVSALVRDALIRRAREFNIILDDVAITHLSYGIEFSQAVEKKQVAQQEAERSKFLVAKAEQERRAAIVRAEGESESARLISEATAAAGTGLIELRRIEAAREIAAELARSPNVAYVPAGDNGRMLLGLNAAGFGR

SEQ ID NO: 47623 - protein, 39 aa, Oryza sativa
MEEGERRVAICKEGKLHWNFSWFLLFSFLLIWGFVHVYN

SEQ ID NO: 47624 - protein, 319 aa, Oryza sativa
MPARAAALSCRGVSPHPRAHSLLPGRRRRPVLPFADEAAAAPLRVSSVPHSRAYGCGGGGYFVHLEDRDDGEASRLLRALRRVLPDHQKWAQPDLLKAAVISTMSILAVPLEASASAETCQPANSMANMPIFIAVALIGAAVGGLLARQRKEELKRLNTQLRQINTALRRQAQIESFAPGLTYAPVGRATETEVIVDPRKQQLTVNLRNGKTFMRNQDLDMAVKEFRAALELAKSVGDRFEEKKAARGLGASLQRLGKYREAMNCYYKVLELSKETGEDSGCTEAYGAIADCYTELGDLERAAKLYDKYISRLQPGGGE

SEQ ID NO: 47625 - protein, 253 aa, Oryza sativa
MGAAGHGLLLLHPQHPAGEAHHGVPRQEPRRPRPRLHLHRRHRQGLPRLARHGREEHRHRGQEARAGALQDLQPRQHLAGDGAQPGVHPGEAPPREGQEERGRDARQWRRAIHARQHLPREAAARLQADHQPRRRAQEVRQVVPLLLRLHQGIQELVTIIRPNSSANSFLFLSSFFLLILWPSSGRFHSRIKTLTFLFRLFFWGKYFRMFFGILGGILFLGEGREEEESNGEQHFSLPFPFIFSMLFCKFRSP

SEQ ID NO: 47626 - protein, 853 aa, Oryza sativa
MVLICSESSDDKNKCGDELINYILSWSWTTCIESNFENPQESAASSYAKSLLEPLVEETVAAVQSALQKLCFAPQFKIIDILPAAGVNISFLDIDLQEVITHNTERGDIFLLCTELPRDSSQLCNDEAVLAMATCSNLYDTFQRSFNVKTHQKVKRQKFNHALFLCNILMNIQIWESLNAVILYDCPIINDLLAPPSMVVTCCNEELVDVLMSQKITLDEVQLEAAKAIYSAARCKHSRSIHVISGAHGTGKTKIVFSAVASLLSVSEKVIVCVPNAQSFSAMCSDFVEMAESHMDEELGICLGDILVLSNETGLEDNVQQLTIITRVKEVLPLMIWHDMMKALRKSLAAFKEKYVAEFKEKYVASAKHNCQPSAKKLLTSLFFEKAGFLLICLATFRKHFPKNMFSEQVSKRIKSLIKCVSKLENLLKDRNLKEYDVHVAFGILSGKRETISVLAKDLRQTKNHCVTALDDLLTRLDLPFNKDCIWLRNYFISNAKCVLCTPLSTFDLQLSAGSIETLIVDNADQIRDYDLILPLTLRDVKNIVLTGDPSKVKEGSFFQRLLSVGFSVFELRRQYNLLDDKERHEADGQNTLSEALNDKIKAEELSLTIGSPKQLYSEFTWLHRPHNQKYILPQLCDQKGHPHCTVHASLAALEFKYKYKAASENPPHDFSSKFCTKHMLNVYAAKYGELGSERESTRGSKRLSNVLDILQNDGAKREAMMGKQVYKISSYACTYKIGNDTECLQETIDHLKIGDISIGSFKVSENLRFFKPGEVYIYNPEKPVLTPTANQPSAHCVLVIGGGGCPSDSTAEPVLACNMQFMIQNSYGKGFGELGIGRVRGDSFSTMHRISL

SEQ ID NO: 47627 - protein, 84 aa, Oryza sativa
MASTSPAAPINRGLLDLMAARSWPPDPVAWRLMEGLLVWRMEVLTLLSVVHSRLTGAAATTIAGTARHPPPLHHPLPPHTSLPA

SEQ ID NO: 47628 - protein, 612 aa, Oryza sativa
MAEMARDEISDMAVDTIPCPADMAASGTSTVPEVTTDKLIIPYVEHQSPSASHASIFEKLDAHEEAELDDSFDEVPPGTEAGLASLVIMEKNKYQPSKSVDSVLDIYRYTSWAFFRQILHESVMKEWASLFSGALSNCFDSWYARKNIVAKTMDDTLRPKEYTYYRKRKLRKNCEASSSEKPMDEQLSRPLRDLVECKVNMKNIHRSSKAGISQRVSVVEKPSKKRAKPSHNDNINLNIQQDLKLLSDKVPKRNRSSHPTSKPLVSSKVPTEDRTTSAMPAKKRKQKNLATESNLKTKAVILSPESHGCEAPTEKRTTAIMPVNKRKKNLSGESKLKAKPLTSPESYVCEAPIDNRTTSTMPAKKRKQKNLSNESNLKKKPLVLCPESYGCARASVSGWEWRDWARNATPSERAQVRGYRVRSILSAPENNVLKSSQVKGSSARTNRVKLRNLLAAAEGTDLLKIMQSKSRKKRLRFQRSKIHEWGLVALESIDAEDFVIEYVGELIRRQVSDIREDQYEKSGIGSSYLFRLDDDYVVDATKRGGLARFINHSCDPNCYTKVITVEGQKKIVIYAKRRIYAGEELTYNYKFPLEEKKIPCHCGSQRCRGSMN

SEQ ID NO: 47629 - protein, 91 aa, Oryza sativa
MRTSSFLGKADVVLRGFSGYNTRWALRVLARAMEGAAAVGAADPVAVTVFLGANDTSLPDWKQVHQHVPLDEYQSNLRAICAYFKGHVWRR

SEQ ID NO: 47630 - protein, 579 aa, Oryza sativa
MKSRRALWISRERTRRTANYEDRENPFWALAGMPPPSSVPCQLQSTGGTGMESSPEHLPSPPCQARTPSPPPSGRASSPSQLLPWEQRERERIQSPPMSGRASSPSQQLPWEEGACPERVRSSPMSGRASSSLQQLPWEERTCPERIPSLPKKKMYWFARSREANSVQVSRPGEASYPEATEGKPEYNLHVLKSMKKKKKKKKKRGKRNKRGQGGSEDKSQEKQEVAQEHLGSVSSSYSSPLREPQAPLVPMWTSPSGEVVYGITDDPTAAEAYHWAFHEYKNKRARQELLPTVRSSISAAIEHYNPEQKKTQINASKSIVSLSAYHDGREINQGTGIIIECDEVKNSAIILTSAWLICIKKPFDDWSHKDYAPEAKVTVHMLDDTISVCRLLYFSKHFDIALFETVGGLTIPIMPLKSDLEYGQDFCVLTRDINIDLICTTVKVKYLDPYEHQHNHYMFIGGSIPKCGTGGALADFSGNTVGMLFCTLPMVAFLPSSLILTCLRLWKKFGQIVRPQLGLKFKTVDFQEMTLIELLSRKYNITSGLIVGEVSAECAAEKLGIRVGDIILSLSREKAFQV

SEQ ID NO: 47631 - protein, 288 aa, Oryza sativa; identical to SEQ ID NO: 30583

SEQ ID NO: 47632 - protein, 492 aa, Oryza sativa
MAAATPNGIPASRPLASSVPIEAVLFDIDGTLCDSDPLHHVAFQEMLLEIGYNNGVPIDEEFFINNIAGRSDVEAAQNLFPDWPLEKGLKFLEQLLMQISDDQQTVEMLSGFSASVPQSQLQHDYHQGCLGVHREEVGVADSTTVSSAVVTEECTVRELQDIEGLLMQIENDQENAESLPDFSTPVHLHDCHQAAFGDFQGSQRATFNIANLSTMVQESPNFDLQTGPSNQITESILTTEPMNGETNAVEETSPLRSMSVLGSYDRQDGDDEFLEINDFFDPEDLEQILGSTRSQNLIPADDGVFDSLQYSDAPMFLPGSFDRTGVVAENHYVEFGASGIQNQGFQHTTELLAHNQVALNVRNHMKDNHVVFSHSSDATIIHTVNEQPPNRSSNASQSWFNGALSALLDSVPSSPAMAAENIGLNRTLQRISSFRSQQPAREEVSSTLINTRRRGGGLIFISLMVLLVAIMWTFSNGSAVKLSKGLWKFPST

SEQ ID NO: 47633 - protein, 684 aa, Oryza sativa
MDEMIPKPLISNDNEMMHGHGYTTMVHGNNEILNGNELAVHAEVIPSASTRGQKRKSAIWEHFTLVDVSDGCKRASCIHCNQSLAYSSGSKNSGTSHLTRHIAEWCRVLKDRQKSRRYTTYNSSNENASFDQERSCLRLAKMIILNDYPLHIVQQPAFLSFVDSVQPNFKMVDIGTIETEVYAIYLREKDHLQQALANIPGRISLTVGSLTTNQSIRYISLAAQFIDSEWRLHRRVLKVMMAPWPQSENAVSRAIIKCLSDWNMQDKLFTITLEHDCSSHDIYSANLRNHLSGDNILMLKGQTFAVRCYANILNAVAHGVLASVHNVIYLIRESIKFIKADDAHENKFAEIAVELKITSNNSLCLDVTSEWNTTYLMLLAALDYRQVFTLLESYYDNYGTAPSTEDWKKVEAACGFLKLLYAFTLNIMSAEGNHQTANMFFHDAWVLQLELQNGMAHGDDVIRGIVIGIHEKFDKYWKDCNVVLAIAVAMDPRFKMKMVEFAYSKIYGPTDAAKYVKLVDDAILDLYKEYAAQPELLPLSPIYVDQVPADGLPFIETGGAPATASPSTAAAGAGLVDFDMYLSEVTTMGQPFKHELELYLEEALTQRTPDFDVLKWWQDNTLKYPTLSRMARDVLAIPMSTVGVGSSVFLPDNGSRSLDDYRSSLRPELVEALLCAKDWLQYSP

SEQ ID NO: 47634 - protein, 232 aa, Oryza sativa; identical to SEQ ID NO: 36999

SEQ ID NO: 47635 - protein, 139 aa, Oryza sativa
MSNSASGMAVCDECKLKFLELKAKRSFRFIVFKINEKVQQVVVDRLGQPGESYDDFTACLPADECRYAVFDFDFVTDENCQKSKIFFISWAPDTSRVRSKMLYASSKDRFKRELDGIQVELQATDPSEMSMDIVKSRAL

SEQ ID NO: 47636 - protein, 238 aa, Oryza sativa
MGEEANCNVAMESAAPKENGHTTGGAAAEAKAAAAWAEIAVTDAAAVPKPTPPPAAVAVDPRLQGISDAIRVVPHFPKQGIMFNDITPLLLRPGVFKDAVDIFVERYRGMAIAAVAGIEARGFIFGPAIALAIGAKFIPLRKPKKLPGEVISETYVLEYGTDCLQMHVGAIEPGERVLIVDDLVATGGTLCAAIRLLERAGADVVECACLIGLPKFKDFYKLNGKPVYVLVESREYEK

SEQ ID NO: 47637 - protein, 488 aa, Oryza sativa
MAMKNVVRFFFVLIHVSSCLGRSGKMFSPGFVSLSESLPSWPIVSAGISVTASLVLSLFLIFEHLCAYHQPEEQKFLIGLILMVPVYAVQSFFSLLNSNVAFICELMRDCYEAFAMYCFERYLIACLGGEESTIRFMEGRFQFSESSPLLDVDYDYGIVKHPFPLNWFMRNWYLGPDFYHAVKVGIVQYMILKPICAILAIFMQLIGIYGEGKFAWRYGYPYLAIVLNFSQTWALYCLIQFYTATKEKLEPIKPLSKFLTFKSIVFLTWWQGIAVAFLFSTGLFKGHLAQRFQTRIQDYIICLEMGVAAVVHLKVFPAKPYRRGERSVSNVAVMSDYASLGASDPEEEREIDNVAIMQAARPDSRDRRLSFPQSVRDVVLGSGEIMVDDVKYTVSHVVEPVERSFSKINRTLHQISENVKQLEKQKRKAKDDSDVPLEPFSEEFAEAHDNVFGGSVSDSGLARKKYKNTKRAPSSLKPFEFRLGRWFQ

SEQ ID NO: 47638 - protein, 390 aa, Oryza sativa; identical to SEQ ID NO: 31260

SEQ ID NO: 47639 - protein, 92 aa, Oryza sativa
MPGSSRAVTRCRWRLHETPTHWQNGVPAVQLPARMLSGSEKCTFKARSAARSVSLPLLLLRPREEAEATMDRAINSATEIHTGNPIAMSGCV

SEQ ID NO: 47640 - protein, 523 aa, Oryza sativa
MDVPSVVIPILVVLVSRLLTSALVHLLWKPYAITKLFRGQGITGPKYRLFVGSLPEIKRMKAAAAADEVAAGAHSHDFIPIVLPQHSKWATDHGKTFLYWLGAVPAVSLGRVEQVKQVLLERTGSFTKNYMNANLEALLGKGLILANGEDWERHRKVVHPAFNHDKLKFMSVVMAESVESMVQRWQSQIQQAGNNQVELDLSRELSELTSDVITRSAFGSSHEEGKEVYQAQKELQELAFSSSLDVPALVFLRKLPIIRGNTRAHQLVKKSRTMLMEIIEGRLAKVEAAEAGYGSDLLGLMLEARALEREGNGLVLTTQEIIDECKTFFFAGQDTTSNHLVWTMFLLSSNAQWQDKLREEVLTVCGDAIPTPDMANRLKLVNMVLLESLRLYSPVVIIRRIAGSDIDLGNLKIPKGTVLSIPIAKIHRDRDVWGPDADEFNPARFKNGVSRAASYPNALLSFSQGPRGCIGQTFAMLESQIAIAMILQRFEFRLSPSYVHAPMEAITLRPRFGLPVVLRNLQG

SEQ ID NO: 47641 - protein, 368 aa, Oryza sativa
MALSDRSRESLLPSFLYTSSAARSFATGATRFPSPVSPASPAPGAVGGGAPISIQAPREKIEMYSPAFYAACTAGGIASCGLTHMAVTPLDLVKCNMQIDPAKYKSITSGFGVLLKEQGPRGFFRGWVPTLLGYSAQGACKFGFYEFFKKYYSDIAGPEYAQKYKTLIYLAGSASAEVIADVALCPFEAVKVRVQTQPGFARGLSDGLPKFVRSEGALGLYKGIVPLWGRQIPYTMMKFASFETIVEMIYKHAVPVPKSECSKSFQLGISFAGGYIAGVFCAIVSHPADNLVSFLNNAKGATVGDAVKKLGLWGLFSRGLPLRIVMIGTLTGAQWGIYDAFKVMVGLPTTGGVTPAPGAAEKALQASA

SEQ ID NO: 47642 - protein, 360 aa, Oryza sativa
MPELRSGVRQARLEAKKVEDLAAQDPAENLVVVAPTVAGRCGRGRGGRGGGRATGRGRAGGRGRGVPVIDLDPDQPCEVLPGAAIGGVAAGGPHHIEELANKVVKMDGGSAEKIGGGEDDGNASPVPDKVQVGHSPQYKVERKLGKGGFGQVYVGRRVSGGTDRTGADAIEVALKFEHRNSKGCNYGPPYEWQVYSALNGCYGIPWVHYKGRQGDYYVLVMDILGPSLWDVWNSVGQTMTPSMVACIAVEAISILEKLHAKGFVHGDVKPENFLLGQPGSPDEKKLFLIDLGLASKWKETPNGQHVDYDQRPDIFRGTIRYASVHAHLGRTGSRRDDLESLAYTLIFLLRGRLPWARLPG

SEQ ID NO: 47643 - protein, 70 aa, Oryza sativa
MLLWSMSNLESCLITSLRREDCKRKKLDAFSSRSYLVLNIAIETWWFIVILSQRTFFWTPNAMLRLQTLA

SEQ ID NO: 47644 - protein, 237 aa, Oryza sativa
MVMNPDAVRNVVGIIGNLISFGLFLSPLPTFVTIVKKKDVEEFVPDPYLATFLNCALWVFYGLPFIHPNSILVVTINGTGLLIEIAYLAIYFAYAPKPKRCRMLGVLTVELVFLAAVAAGVLLGAHTYDKRSLIVGTLCVFFGTLMYAAPLTIMKQVIATKSVEYMPFTLSLVSFINGICWTIYAFIRFDILITIPNGMGTLLGAAQLILYFCYYDGSTAKNKGALELPKDGDSSAV

SEQ ID NO: 47645 - protein, 283 aa, Oryza sativa
MYYWFKRAREAGGGGGAEVGGFTRILHSGKPDAFVDEIPTFVADPLPAGTDQGYVVLNRPWAFVQWLQKADIQEEYILMAEPDHLIVKPIPNLSRDGRSAAFPFFYIEPKKYENVLRKFFPEHEGPITKIDPIGNSPVIARKESLARIAPTWMNISIAMKKDPETDKAFGWVLEMYAYAVASALHGVGNILHKEFMIQPPWDLEIGDAFIIHYTYGCDYDMKGKLTYGKIGEWRFDKRSYDSKPPPRNLPLPPNGVPQSVVTLVKMVNEATANIPNWDSYAAA

SEQ ID NO: 47646 - protein, 102 aa, Oryza sativa
MAAPWWDSEYKDRSSLEYRVYVGNLPYSVDEQTLMDYFADYGAISAEIAWDSEMGRPRGFGFVNFEDNESVNAAIHGMNGQDIGGRKVTVARAQMRPRRWRA

SEQ ID NO: 47647 - protein, 574 aa, Oryza sativa
MYRAAASLASKARQAGSSARQVGSRLALSRNYAAKDIKFGVEARALMLRGVEELADAVKVTMGPKGRNVVIEQSYGSPKVTKDGVTVAKSIEFKDRVKNVGASLVKQVANATNDTAGDGTTCATVLTKAIFTEGCKSVAAGMNAMDLRRGISMAVDAVVTNLKGMARMISTSEEIAQVGTISANGEREIGELIAKAMEKVGKEGVITIADGNTLYNELEVVEGMKLDRGYISPYFVTNPKTQKCELDDPLILIHDKKVSNLHAVVKVLELALKKQRPLLIVAEDVESEALGTLIINKLRAGIKVCAVKAPGFGENRKANLQDLAILTGGEVITEELGMNLEKFEPQMLGTCKKVTVSKDDTVILDGAGDKKSIEERAEQIRSAIELSTSDYDKEKLQERLAKLSGGVAVLKIGGASEAEVGEKKDRVTDALNATKAAVEEGIVPGGGVALLYASKELDKLPTANFDQKIGVQIIQNALKTPVHTIASNAGVEGAVVVGKLLEQDNTDLGYDAAKGEYVDMVKAGIIDPLKVIRTALVDAASVSSLMTTTESIIVEIPKEEKEAPAMGGMGGMDY

SEQ ID NO: 47648 - protein, 296 aa, Oryza sativa
MRRVRVSSHQSPVHKLGDSQMKLTPKFRLATTSALPSSMPASDLEQASWETPLIPGLPDDAALNCLLRLPVETHEACRLVCRRWHHLLADKARFFMQRKVMGFRSPLLFTLAFHRCTGKIQWKVLDLNYLTWHTIPAMPCRDRACPRGFGCVAIPSDGTLLVCGGLVSDMDCPLHLVLKYDVYKNRWTVMTRMLAARSFFAGGVIDGRVYVAGGYSTDQFELNSAEVLDPVKGVWQPVASMGMNMASSDSAVISGRLYVTEGCAWPFFSSPRGQVMIQRLTAGRLCQLECVKGGPV

SEQ ID NO: 47649 - protein, 369 aa, Oryza sativa
MMGTAVELGRRHGGDHRFYDASRVRRGYHHHGLPKARWAPAVHQEKAAEEPSPSPARAPVPPPGVAGNLERFVAAVTPFVPAQFPSKMQRAARGWRGCGVDAEREEAPHFFLRDVWEAYREWSAYGAGVPLVLDGCDGVVQYYVPYLSAIQLYGDPAVLRLSSGPRHIMDDSDGEYHDSSSDASSDYELGRVKHLTQEGFSSDDGESGDLHGRLLFQYLEFDSPFCREPLTDKISSLSARFPGLRTLRSCDLSPRSWISVAWYPIYRIPTGPTLKDLDACFLTFHRLSTGPEEDNGGAVKYWGPGSKPTIPLSVFGMASYKFSNSIWSSTDGDRQLASFLQQAASDWLRDSRTSHPDYQFFASRGAYNR

SEQ ID NO: 47650 - protein, 57 aa, Oryza sativa
MVGYFHPASLLSPLYKVLAAVTLLCLLLHPTTTTSVFSCTLLASGVTVKVAEPAWKG

SEQ ID NO: 47651 - protein, 508 aa, Oryza sativa
MPHPRPRGGGDRLGALPDEALQHVLPFLPLPEAVRTGALARRWRHLWKSMPVLRITGEGRVLNRSGVRRLNRFVNHLLLLRDRSARLDACEINLGTFRSQDDPQINLWIRHVLLCEARDLRVHLSIDNNSFEMENLALVSRHLTRLELSNVVLKDHFLNFSSCPALEELVTRNCHIEAEEILSESLKWLTAVDCVFSSYPRTRISLPSLVALELTEPWGSTPVLESMPSLLTASIKLTDCDDHCGKEEFGGSCDDNACDNCGANGGSSGDCVLLDGLSEAKSLELIAKPRVFIFRSDLMWCPTFGKLKTLLLNEWSVAIDLVELICFLQHTPVLEKLTLQLCEGPVNWMENEGSYDPTENPFASKQLKVVEVKFEKFDLRVHKIIMIFSTYGVNIEQIYIQRSVVHSEEPTDDSGAGPSRVRTPPISTSENAQLKITIDQMLGQQQELLAQQQQQQHFLSQLQRRQQILCDITAQLSKYAAPPISQRPPQANLYPSGFMFRSLAECTC

SEQ ID NO: 47652 - protein, 445 aa, Oryza sativa
MSFRSIVRDVRDSFGSLSRRSFEVTLAGLSGLTGHHRGKSQSTVHELCDADLIIQESRWASLHPELLRDVIRRLEASESTWPSRKDVVSCAAVCKAWREMCKEIVLSPEFCGKLTFPLSLKQPGPRDGMIQCFIKRDKSKSTYHLYLCLSTAVLADSGKFLLSAKRHRKTTCTEYVISMDADNISRSSSTYIGKLRSNFLGTKFIIYDTQPSYNGAVIPPVGRSSRRFNSKKVSPKMPSGSYNIAQVTYELNVLGTRGPRRMHCVMHSIPASSVEPGGIVPGQPEQIVPRAFEESFRSTTSFSKSSIMDRSMDFSSSRDFSSARFSDIAGGTINGDEEGQNKERPLVLRNKAPRWHEQLQCWCLNFRGRVTIASVKNFQLIAAPAQPPAGAPTPSQPAPPEQDKIILQFGKVAKDMFTMDYRYPLSAFQAFAICLSSFDTKLACE

SEQ ID NO: 47653 - protein, 570 aa, Oryza sativa
MCESSPSLHHGQMQPSPSSPRAPPPTAAQASGYKHFCRVCNKGFTCGSALGGHMRAHGVGDGDGLGADDDDDDDDDSLGDEAVRRARGGADDPWNAGGPSSSGAATHVYELRTNPNRVTRSRQVCKNCGKEFTSWEHFLEHGKCSSGEDDDDEDDVDHSLQPWSPSPEADGEEDSAPAAGWLKGKRSRRCKGTGVDLSPTPSACAAGEEEDLANCLVMLSSSKVDQAGVTEAEQRSSSSASKEHKRLITFMEPTTYVLDTVMALPPPAPAPQYVSTVPRGMFECKACKKVFSSHQALGGHRASHKKVKGCFAAKLESNAAEVAEPSHHAEVADRSEDNPAKATSDARRNVHASIDGDGNAGTSDAAAELSMAIVPIEPPVAALAAAPLKKKGKMHECSVCHRLFTSGQALGGHKRCHWLTSSSADHTASVPPLADDLVPLSFRPMLDAPEPALDLSIAANPPLLASAATVRPKVGGSSFHLDAPPPVYIPSSPAIPSQRNKATATTGSQNANDAVGLSTAAAEDEADSTTVKRARLSDLKDVSMAGETTPWLQVGIGSSSRGGADDNDKE

SEQ ID NO: 47654 - protein, 642 aa, Oryza sativa
MESLALLHAKPGGLPPRAGLRLPLPRARSARVSLPSSPAAPVSLQSPLLLASRSGPTSRDAVVGLGLGCGLLRRRSGASGGGGGGVSCGAQPAAAAAAGAVPAAQPEGKKFLGVEVKTLKKIVPLGLMFFCILFNYTILRDTKDVLVVTAKGSSAEIIPFLKTWVNLPMAIGFMLLYTKLSNVLSREALFYTVIFPFIAFFGAFAFVLYPLRNVIHPTALADKLLAALGPSFLGPVAILRIWSFCLFYVMAELWGSVVISVLFWGFANQITTVEEAKEFYPLFGLGANIALIFSGRTVKYFSNLRKTLGPGIDGWEVSLKGMMSLVVLLGLVITSIYWGVNKFVLNDPSLPKSDRKKKKDKPKLGMKESLKVLLSSRYVRDLATLVVAYGISINLVEVTWKSKLKAQFPSPNEYSSFMGDFSTATGIATFTMMLLGRIILRKFGWGVAAMITPTVLLLTGVGFFSLILFGQPLTPMLATMGMTPLLAAVYVGALQNIFSKSAKYSLFDPCKEMAYIPLGEDMKVKGKAAIDVVCNPLGKSGGALIQQFMILTFGSLANSTPYLGGILLVIVLAWLGAASSLDKQFSSLAKEDLKRDMSAKEKVDPSLLKAPEADVLVEHTNGTIESEATATESSPSNSSPSN

SEQ ID NO: 47655 - protein, 551 aa, Oryza sativa
MLGRNAMLGPPRRGEGETSRRGEGSEGDGNGEGDAVDRLSALSDGVLHHIMSFLKAWEVVRTCVLSRRWRHTWASAPCIDLRVRYNDVDSEPPEELRDFVNRLFRRREASAPVDTLRLQSSDPDELFDNDDANAWIRTAINRNARFIHLTGHRTEIGVLKHRALVSTHLKILKLSYVLIDDKILKQLSSGCKSLEELDLKDCAMTGHEISSASLKILKMDKCKINVDLSITAPNLVLLNLITPYIQVPSFKNLESLVSCSVILDDFFLGDAYEHSSDEDDIDETTDEDDIDDQKKTYKTGYGFGFPQKGYGLAGNKDDYGYGSDIESDDNTYEYSEIAKEYGDQQYAQNSSTIVQGVGTSQQTKTISGGHNFLHGLSNARSLELLAGAGEVVLSRELKSCPIFSNLKTLSLGEWCMAAEFDTLIFLLQRSPNLQRLFLKLKLNFNTRKPLESGAKPMGRSFTCKDLQMVKIRCSKDDVRVHTLACLFRANGIPIEKIYVRRTGSSYLRGEKFMRDLGKHELEFWGSDSEFCGPNSEFCGSDSEFEDSDMEF

SEQ ID NO: 47656 - protein, 83 aa, Oryza sativa
MGSPSAKYLLFSLAILLVLSSQQQALLPSAFARQLVPMPTNTAAGKNNISVNYQFHLYMFCEISCGETNHYISLNIWSCGSFF

SEQ ID NO: 47657 - protein, 187 aa, Oryza sativa
MYTYRESIVLGKTTCSIFTVNQILRELSWKWPGGSYELLSRNCNHFCNTFCEKLDVPKLPAWVNRFANAGDAALEVAENTAEKLKQAKKDIAGACKAATTYLTGASSSSPSNADDSGGSTNSSLFEGTWLRSIIGISMKPSRSLMCSDSSDSSDDEKSEDERESDCQQPSGDQIEEKKDATQEQAGK

SEQ ID NO: 47658 - protein, 367 aa, Oryza sativa
MIVATATIPFFPSFHRPRFRPGGLPRRVVVLRCSASSWEEREEARWLREEQRWLREEQRWLREESRWRAERESLLAEIAALRLRLGTVEAGPLPLPSVDAAVASPAPSPAVAAVPPPPPPPAAAPRPPLVVEEEVEVRKEVVVVEQKAAKAKSGGGDGGGRRTLRVGAEGEDVRAMQEALEKLGYYSGEEDMEFSSFSSGTERAVKTWQATVRVSESGIMTSDLLDMLFTGQVGQDVKTKDGINGAAIPSITEIAEIQQTVVKGNGVSGVGLSENRVFLIGENRWEDPSRLTQKNKPISSATNASTKKCISCRGEGRLMCVECDGTGEPNIEPQFLEWVGEDTKCPYCEGLGSIVCDVCEGKTVATN

SEQ ID NO: 47659 - protein, 523 aa, Oryza sativa
MAEGAPIIYLDPATVAEARRRGDDPRKLEECTKYLMTHIYGLLPGPPVPIAAARTHAACAAAASDGVDRISALPDAILRNIVSRLPVKDAARTAALSRRWRPLWRSTPLVLVDAHLFPRGRSFGVSASAPTRADTPGIVAAVSRILAAHPGPFRCVHLLCGFMGSYQAQLEHWLRFLAAKGVDDLILVNRPWPFEAALPAAILRISTLTRLYIGMWKFPDIAGLPTNTAFPNLRELGIYAVAMEKEGREVEFIVARSPVLETLNIQGGNTQVLRLRLEHRSLRCVQICSCCVENLAVVDAPCLERLVLYDSLSKDDSCVRVKIVHAPRLRLLGNLETGFHMLEIHDTFVSAGIRSSPSALFTSVKILGLNVNFGVRHDAQMLPNFLKCFPNAESLHVVCAKCSEATSLVSPNFWDDAGPIESIVSHVNVLTFREFKGEANAISFLKYFVQNAQMVKNVAVVLANPQFTSYSIDTLWTAKILKSVRWASKISSMQVYRSDDSEGGLIWSFQRGSDYSIRDPFVY

SEQ ID NO: 47660 - protein, 233 aa, Oryza sativa
MGGGGGGRPTASGANSSSSSDDDGDAAWKAAIESIAAVGFGLPLSNGAAKATSGGGGEASHGVEQQPPQEGKAQAPGLKLYQIKVRNMLDNMLEKNLEIVKTTCSNLADPMETDGGIKLFKKAPPGIRMDAMDKYHVQLKRPRILPGTDIDEKSKKFRHMLKSVAVDGNDILVSAKKSSERSLARLEAREAAAKAAAKREEERVRELKKTRGEKWLPSIARQMKEEKAWEQRK

SEQ ID NO: 47661 - protein, 468 aa, Oryza sativa
MELHRCSLLALLLAVTCSVAVAYDPLDPKGNITIKWDVISWTPDGYVAMVTMSNYQMYRQILAPGWTVGWSWAKKEVIWSIVGAQATEQGDCSKFKGGIPHSCKRTPAIVDLLPGVPYNQQIANCCKAGVVSAYGQDPAGSVSAFQVSVGLAGTTNKTVKLPTNFTLAGPGPGYTCGPATIVPSTVYLTPDRRRRTQALMTWTVTCTYSQQLASRYPTCCVSFSSFYNSTIVPCARCACGCGHDGYRGNGGGGKNARAGDGRSRRNSGGGGGHSGGTECIMGDSKRALSAGVNTPRKDGAPLLQCTSHMCPIRVHWHVKLNYKDYWRAKIAITNFNYRMNYTQWTLVAQHPNLNNVTEVFSFQYKPLLPYGNINDTGMFYGLKFYNDLLMEAGPFGNVQSEVLMRKDYNTFTFSQGWAFPRKIYFNGDECKMPPPDSYPYLPNSAPIGPPRSVAAAASAILVVLLLVA

SEQ ID NO: 47662 - protein, 299 aa, Oryza sativa
MQCSGIVVDWNKTSRLATIVTCSAAVCFDGALVHPNPKLLVHLPNRSTAEGQLLFFNAHYRIALLEALVDFPLEPANFGSSPKFGQKVFTLARDKKSSFFARSGTVLLQDPPFFLKYKYWLSLSSAIELCGTGGPAIDERGDVAGMTFGRLPNPDVLSISILQTCIDMWRRFSRVARPFLDMDLIAFETLDITHQEEIESEHGITDGFIVDLVCDDSTAGRLGISRGDVIVSYNGLRDFTLHTFEEYLLNLGWGFLESTDPSWTINLELEIYDPVRGTIRGVTFPLGFSDICEDVLVLP

SEQ ID NO: 47663 - protein, 412 aa, Oryza sativa
MENTQFSRPKAVPYNDSWEIPNSDYILLYLNDKQTGKITCMVCGKEGHYTCECPMKNKEKYVICTLCGKVGHCHLWCCHQNESERRACRRCGEKGHYDNWHHLGCSSCEKHHPLGRCPMGKITCFLCEGNGHVPVQCHLSPMLTAITQNQRESFRATLRQALRETSNTAVTPITLTRELEPYNDKNGGQPKGDNEMVPRVLGFNQGEEGHSALRNPNRCHVPSSDKANVAADKAPNQSLGVTCFNCGGKGHYSNKCPQKQKQHGVRSTNAAAMKDKTPNLTGVTCFDCGDRGHFSYTCPQNLLEVMLTAELEPHDDTYERQPKADNGTVPTVLSLNCGEASHCGRNNPMKSLESSSDKINSTAMTYKAPKRVLGVICFNCHEEGHYANRCPQKQQGINSGTSQSPIKRQRKE

SEQ ID NO: 47664 - protein, 286 aa, Oryza sativa
MSGGLYNHQGFSPARTLSPQIRSNPEADSQYLSELLAEHHKLGPFMQVLPICSRLLNQEIMRVSSMVNDHGFNDFDRRRYRSPSPMSSPIMRPNLHGNGFGPWNGIHQERLGFPPPPPPGTSMDWQGAPPSHGSYIVKKIVRMEVPVDAYPNFNFVGRILGPRGNSLKRVEASTGCRVFIRGKGSIKDADKEEKLKGKPGYEHLNDPLHILIEAELPANIIDTRLRQAQEIMDELLKPVDESQDYYKRQQLRELAMLNSTLREDSPHPGSVSPFSNGGMKRAKPSH

SEQ ID NO: 47665 - protein, 128 aa, Oryza sativa
MRVDLATAARIRRGCRRRVGGSSAPFLPCEPARVKTMGKRRDGGDHCGGELVLRHPWSSGGHPWRRRHRACLSPSFPFSSSSPAEETATARCFRSQSGNHQEPPFLFDGSRRRRKLPGSTTPLINYFS

SEQ ID NO: 47666 - protein, 446 aa, Oryza sativa
MDVEYDVIVLGTGLKECILSGLLSVDRLKVLHMDRNDYYGGDSTSLNLNQLWKRFKGEGTPPAQIGASRDYNVDMIPKFMMANGTLVRVLIHTGVTKYLSFKAVDGSYVFNKGKIHKVPSTDMEALKSPLMGLFEKRRAGKFFLFVQDYKENDPSTHKGYDLNKMTTKELISKYGLDDNTIDFIGHAVALHKEDNYLTEPAIDTVKRMKLYAESVGRFQGGSPYIYPLYGLGELPQGFARLSAVYGGTYMLNKPECKIEFNDEGKVCGVTSEGETAKCKKVVCDPSYIPDKVRKVGKVFRAIAIMSHPIPNTADSHSVQIIIPQKQLGRKSDMYVFCCSYSHNVASKGKFIAFVSAQAESENPAAELKPGIDLLGPVDELFIDTYDRFEPTNDPSSDNCFISTSYDATTHFESTVMDVLSIYTKITGKTVDLSVDLSAASAAEDDL

SEQ ID NO: 47667 - protein, 403 aa, Oryza sativa
MVGMYQQQLVEDPFPLSGGYCSDQPRHAPASASTSTSTSSSAAVAASPLAQAHGAGEPRRLFEAFMGEILLPLRGEGGANGGGVGRGPGGVGDLGELLRWTREVAANPVAARPVPAEVKARKRQVLALRRARYLRMEDVANADELPSFFKKRKYRSHNNHAERQKGKGSMNMPTRKSERLAKRMKLMTSVLLTQRKKIGVGEHFQAEVPDWTEPPSDELARYKNDPNISKMLGTRIWPPEGQVLQTDKKIAGQGRMESCNCSYPGSFFCRQHHTDAARDQLRCELGRAFTEWRFDSMGEEVSKMWTREEQLKFNALERLVPVMDHKTFWAVASKHLASKTRIELVRYYLNVFLMRRVLSQCRLNLLEIDSDEDETEEEEDEDQSESTSTSQRTQHAQNVKSIS

SEQ ID NO: 47668 - protein, 794 aa, Oryza sativa
MVLETMRMISPVWRDQRQWRKIDQSMILMWFPKSKSPCEETVSSMEQSEVMFTIGNNEDDLSCVERPKAVEEDRLVNDSNVVSKEQIPCKETVSSMEQSEVMFTNSVDHVSSSTKEPVNLLEDKMSCIEKHVCLDETSSNDLFQLASGGSHSEASGIDKPRHQADCASLTPDQLVIPKEMDIDEGLHCTDADVGIKTLSSAVGHADEDITAVNLSKNVCSPHLTVGDDIQDSVRQTIDITPMPPQVDLAEVSTSSTSHEIDKVSSKDGIDERNPNVNLTSDEVNEVHGIDVEEIPHIEDIAAYNDYQEPNTVRGTRDFEEDTQNEEIIAEASSHNITAVQSTCNVEEKEQIEEFDSNSSCNKIHEISSRGVEETKLTDVNVETADEINVASSLENVEEKQSNRETIADPSVEIDVANLPSSLELSKLDVETSTYHTAYEANAVNAMENVEEMKQKEEIAVAPTSHINTISSTTNDDQKQSEELSVGPSSDEINVPHGEFSVKEKTEETVSDPTSNKTDMVSTSGGVEEQNHGDEVTSGTNTHEESVILVHTTDNVEKKMNKDLTSEPADNVEEEVQSEDIATDPTSHESSTLHITDGAESKKQDAKVAADLAAGKIDVPRSADDAEEQKHEATVSTDDDLKGDDPSESNSPQIIDGAGDKEQDAETAADPPPGKTDAPPSTDDAEETKPKEEELETVGTVVDDLKEEDKEEIAEQGSDREFRQEPRLTEVPPLREGRRNQGVEEAEHQGSRAVVPAAGVERRRLSGEARLSQSGGFRAAAGLELSGEVTGGEEA

SEQ ID NO: 47669 - protein, 482 aa, Oryza sativa
MGSRFPSHQLSNGLYVSGRPEQPKEKAPVICSTAMPYTGGDIKKSGELGKMFDLHVEKSRKSGPLGNQPSRNTSFGGAGSNSGPVSNALGRSNYSGSISSSVPGAGGSARAKSNSGPLNKHGEPGKKSSGPQSGGVTPMARQNSGPLPPVLPTTGLITSGPISSGPLNSSGAPRKVSGPLDPSVSMKMRATSFAHNPAVTNLNADDGYSIKGSIPKTILWMVILLFLMGFIAGGFILGAVHNPILLVVVVVIFCFVAALVIWNICWGTRGVTGFVSRYPDADLRTAKDGQYVKVTGVVTCGNFPLESSFQRVPRCVYTSTCLYEYRGWDSKAANTEHRQFTWGLRSMERHAVDFYISDFQSGLRALVKTGYGARVTPYVDESVVIDINPDNKDMSPEFLRWLRERNLSSDDRIMRLKEGYIKEGSTVSVMGVVQRNDNVLMIVPPSEPISTGCQWAKCILPTSLDGLVLRCEDTSNIDVIPV

SEQ ID NO: 47670 - protein, 309 aa, Oryza sativa
MVGRRRTAVPVASRVGHRHPFRRRSPPHGRPVAGAPRIPIIFQDDLAQVAASHLQEKDHIYVSGQLTGDIPPTKLMDGQANIQVLAQMLSFVGGKAVQADSMVDEEEGFMQIVEAEKKVETKKFIPKYPPRTVSGYRNKDKLNKLWNDVVANPQDWTDNRPQKKNGSINAKYPDFKNNVSKEALWLDTAPKAVLEKLDDLVFSSDFSAAKKYRPFGGDKGNGTNWAKKSQDSSSISKQKQGELWQDLVDNPGKWWDNRSDKPSIKYPDFKHKENGTPLWIGSQTPKWAIDALPPAKPSKAPFKQETFLS

SEQ ID NO: 47671 - protein, 320 aa, Oryza sativa
MDVDFWGVVIEPCNKKEIFCPEDTLYHLTSVALDEAYGLKDSNVKVFVEVNDEKFAIGTLSSKRHPHIKVDFCFKKNFQLFHTSLISKVAFCGYQVKNLGKFTDSEGDESDEEVPPDNMIKEAQKSKLPAKSATVASAMQKAFVKEIEHYEKSKADDDNNERYRDISVVGESTGNEDSSDDADYEGKSSDEEETTAKEGESTDEKETPAKEGESSDEEETPAKNTKEENEPVVTPLKTFPHEMAKIEAPITDNKTGTNTSKRGSHLQVTNPHPAKQAKRTPIKNDTPKRSASYVCNSCKKTFNSSGALKDHSKAKHPATN

SEQ ID NO: 47672 - protein, 200 aa, Oryza sativa
MSRSSLAMALLLAAFAAAATANSGAAPAASDFIRKSCRATQYPAVCVQSLASYGGAGAPPPRSPRELARAALSVSVDKARSASTYVGHICGPGGGRGGAGGAGPVRDCLENMADSVGHLRDAAQELGGNMGRAGSPGFKWHLSNVQTWCSAALTDENTCLDGLSRGVDAATRSAIRGKIVEVAQVTSNALALVNRVAPAN

SEQ ID NO: 47673 - protein, 123 aa, Oryza sativa
MGNVWVFDARLGSFHRAPRLYALCIGLLAWNAVVYSLPFLLFLLLCCFVPAVGYALGYNMNSASVGRGASDEQLAALPQWRFKEPADAPRDRDHDDQVSARSVAAYVNIVGYVSFACTEMIRQ

SEQ ID NO: 47674 - protein, 373 aa, Oryza sativa
MAHQRQRDTSSEEELPREPWTVEKDVHLLNNLAAHGGEFQREPWVEKDDAASWTVEKDDVPLVNNIVAHGDPEGSSNSLARSGGHLANVHEGAGMFYQPNFKYIFCDMDGTLLDSSGLVPETNAEAIRVARSRGVQTIIATGKSRPAVIEVLGKVNLAGTGGIVSESSPGVFLQGLLVYGEGGQKLYQQNLDIEVCREALLYSLKHRVALVAFSQDDCYTTLDDHPLVDFFHVMYHEPKAKIISDVDHFLSTIDIQKFVFLETPEVISSVLRPHWARRVDGKAQVVQAQGDVLEVVPLGTSKGNGVKILLESLCASPDEVMALGDGKNDKEMLQLAGLGVALCNGCEVTKVVADVIGASNDESGVAQAIYKYL

SEQ ID NO: 47675 - protein, 686 aa, Oryza sativa
MARSGRERRDQEEEAAVVSVERVFEGRVVPGWKEQVTLRALAVSALLGAMFSVIVMKLNLTTGIIPSLNVSAGLLGFFLLTSWTKLLDKAGVASVRPFTRQENTVVQTCVVACSGIAFSGGFGSYIFAMSDRISDQSGEARDEHNIKNPSLGWMIGFLFIVSFLGLFSVVPLRKIMIIDYKLIYPSGTATAHLINSFHTPQGAKLAKMQVKMLGKFFVMSFSWGFFQWFYTGGDGCGFMSFPTLGLEAYRNKFFFDFSATYVGVGMICPYLVNISVLLGGVMSWGIMWPLIEHKKGDWYPADLKPSSLRGIVGYRVFISISLILGDGLYNFLKVMTRTTTALVMQVRAMMSEPTLPVSGGGGQTPEETFDDKRRTELFLKDQIPNWLALSAYVVIAVVSIATVPRIFHQLRWYHVAVSYVVAPVLAFCNAYGCGLTDWSLATTYGKLAIFTVGAWADASDGGIIAGLAACGVMIGIVSTASDLTQDFKTGYMTLASPRSMFVSQVIGTAMGCVIAPSVFWLFYKAFHDIGMPGSEYPSPNALVYRNMAILGVQGLGSLPKHCLDLCIGFFVAAIAVNLARDLAAPKVARFLPLPMAMAIPFYLGPYFGIDMCIGSLIRFVWDRLDGARAKAFAPPVASGLICGDGIWTLPQSVLALAGVKPPICMKFLSRTTNIKVDAFIAKLPSS

SEQ ID NO: 47676 - protein, 97 aa, Oryza sativa
MTPPPPSTMGTTSPIRPPPPSPSSASSPAPTASTGRSCPPAPLPPPPTGWPSSSTSTSSAPPSTRFMAATTTTFSTTSTSMLYTSYILPLAFSLRDG

SEQ ID NO: 47677 - protein, 351 aa, Oryza sativa; identical to SEQ ID NO: 32926

SEQ ID NO: 47678 - protein, 183 aa, Oryza sativa
MDSIHEEQRPRRRQQQQQEGGGEETVVEVPEMDGELLVELLEASLAAEEDEEAVAQRKQQLGFFTADVGDGWDGQELMNSIHPHQEEEGCEDCGLDDILSDFDGGGYPPASSPPYLSEFWMEEMDHATAGPFAVAGECPGEEWYMDGMAMEWEDGRSYYSFHYPSYGADASCTDQLYSSPLWE

SEQ ID NO: 47679 - protein, 601 aa, Oryza sativa
MSAHHPPHGIAAGDARKAHHLGGDPKNLSWCGVGVGDHHFLPRKLVGGGGPSAAKLALVSFLAVILVLAVDLSLTGAGANRRLRLQYLHYIGDGGGGGGGGGVGGGGEEAKNNELPWLSVPDPSNFTEELIDRWLTPGGTPCRDSRTANISIPVLDDAAAAGEVTTLGSAEIHEFTFWALDDAGQRRCLGGDFFEIDLAGDEWKSRPPVVDHGDGSYSFRLQVAPRFAEGDFRLTIILLFRSFEGLKFSSLRFKYHAEMRRIPLLFGPSNSTRFLPALETCRAADFARDVWSGRWTRLAKNDSCEEVDDAGRYRCLEPQHPCEAPWCAGPLGALESNGWVYSAHCSFSLFTADAAWRCLDGKWLFFWGDSNHVDTIRNLLTFVLGVTNTSAVTRRFDAAFTNPSGGPGTVRITSIFNGHWNMSMNYLGLHSLRNKGFQRLVRSYFLAEDRAPDIVILNSGLHDGCYWTSVRAYVQAAEYAAQFWAGVMAEVRSRGHAVPRMFYRTTIATGGYARDLAFNPSKMEAFNGVLVEKLRRHGVLTGGLIDNFDMTFPWHYDNRCNDGVHYGRAPAKLLWRDGKVGHQYFVDLMLGHVLLNAICNG

SEQ ID NO: 47680 - protein, 269 aa, Oryza sativa
MLLQKHSAHCSNDLWNLLDIAAKMSGPLASYHPRALIQSLYSGQWKRANTVLQHLVQSMQANKISNTLLECSFCGKSCHNIPECPLSESFTDMTSNDISNRGLLWGDNQRSTAFSLLSPSNSYPRMEDINTTTSTSQSSEINKLLATNVSISTISDMERTQIVALSDLLGKITDQSHASPYKSLDEAGRRFWVAVQFERLYALRRSEDPSSAEVFHVDSASIAWALQSDCQDDLLNSVLPAEPSWSEMRNLGMGLWYTNVSQLRTKLSG

SEQ ID NO: 47681 - protein, 149 aa, Oryza sativa
MNVVKEQALWEEAEELVCISKKIFDSTNLDKKLLYPFPSWFNSRETRKKNYLDLTSWVSLLETYANERSASPEADGEAYDVGLLDDKTGDASADLDYEKSACSGETSDAAFDEESASPGDATKEADIDEPVAILGTPMVARSVEWRPMA

SEQ ID NO: 47682 - protein, 524 aa, Oryza sativa
MKGGGGGGKEAVTASILRFLLLLLLPLTALYFFYTLHLLLASAASSSSSSCPPDAASSSSSVRLSTNGTSAGAAAVTVAAGKKAPAAASTETTLQHVVFGIAASSRFWDKRKEYIKVWWRPRGAMRGYVWLDREVRESNMSTARTGLPAIRISSDTSGFPYTHRRGHRSAIRISRIVSETFRLGLPGVRWFVMGDDDTVFFPDNLLTVLNKFDHRQPYYIGSLSESHLQNIYFSYGMAYGGGGFAISWPLAEALARMQDGCIRRYPALYGSDDRIQACMAELGVPLTKHPGFHQYDVYGDLLGLLAAHPVAPIVTLHHLDVVQPLFPNAKSRPAAVRRLFDGPIELDPAGIMQQSICYDGGNRWTVSVAWGFAVLVSRGVMSPREMEMPARTFLNWYRRADYTAYAFNTRPLARSPCQKPAVYYLSSARRAAALRGGDTTVTRYERWRRANETRPACRWNIADPDAHLDHIVVLKKPDPGLWDRSPRRNCCRVLSSPKEGKKGGDKTMTIDVGVCRDGEFSQVV

SEQ ID NO: 47683 - protein, 196 aa, Oryza sativa
MVVYTQEHVYRHPWDRVTAAAWRKFTDPASRTALSHVADVHTLHRRVDPEAGRLQAARSITVRSPPLPFILRRLLPAAASSPSGAALCHCVETSLVDAPRRAMDVVVRNVSLRGLIEVEERSTYRPHPERPEEWTQFRQETTIRCRPLSALAAVAEKVETRCAERFLQNSAKGREVVERICRYLEAEAAGAASSAI

SEQ ID NO: 47684 - protein, 596 aa, Oryza sativa
MGKDGGDPGGGGYPLVAVCIDKDKNSQNALKYATESLAHKGQTIVLVHVHTKGSSGGVEDAAGYKQPSDPQMKDLFLPFRCFCTRKDIHCKDVVLDDHDVSKAIVEFAAHAAIEKLVVGATARGGFVRFKAEISSSISKTAPDFSTVYVVSKGGKVTSVRQAVRQAPAVSPLRTMIQGPKPDNVSTQKWTPPPPPSTTRPDIAGTPKIQDNFIMSPFARGANTSVRKAFPDYSMPESSDISFISSGPRRSLVLYPPRLSSGSDAHDHHSFEATRPPSMWGGDSFGSDSQSSNSSFASSLPMEDMEAEMKRLRLELKQTMDMYSTACKEALTAKQKAMELQRWKTDEEQRSHETRLTEESAMALIEQEKAKARAAIEAAEASQRLAEMEAQKRISAEMKALKETEERLKSMGGGGSRGAVRYRKYTIEEIELATEHFADGRKIGEGGYGPVYKGHLDHTPVAIKVLRPDAAQGRSQFNQEVEVLSCIRHPNMVLLLGACPEYGCLVYEYMANGSLDDCLFRRGGGPVIPWQNRFRIAAEIATGLPLPPPDQARAARPPATSSRATSSSTASTSARSATSASPASSRPPSPTASRSAT

SEQ ID NO: 47685 - protein, 315 aa, Oryza sativa; identical to SEQ ID NO: 32973

SEQ ID NO: 47686 - protein, 316 aa, Oryza sativa; identical to SEQ ID NO: 30262

SEQ ID NO: 47687 - protein, 387 aa, Oryza sativa
MAPVETRSRAGRGRPAGSRSSPVRRRDGGVAASPGSQSAASTERRKKNRGSKRNLSDGSGEDGRPGKKINLEEEELEEERMPLEDEASACSSCSSPLCEPYIPRVVIGCNAKGKEIYKPIECDELRALDLWEAKYQAKRDRQMNLCTLKPCIPPTCLVDPKLLHIRESSTETVLRAAKFVMGLSSSVDGNPLSQCSGFIVDWDDKSKTGIIMTSALLICKKSSHTDDWKYASQYATDAQVVVHFVDGTTVEGQFLYCQEHYKIAFYKIVLDKPTHLPSFNKGVKWAEEVFILGRDGSSHLRISHGRVQYLNAHVNERHHYMYIHGVDAASEYYNGGPVIDFRGDVVGMYNLSTRGSFIPSNILLKCLQLWKKFQYVFFSHFVMMLPN

SEQ ID NO: 47688 - protein, 116 aa, Oryza sativa
MEPPLSTPRAVAAVCPSRHRRRLARARRSHLALPRLFGLLLPCSHWDREEGETGSAHPAAPPPRARAEQPVSLVPYSRRDGEEGEGGSICADTVSPAPSAPSCPRRLAVPRHSPLE

SEQ ID NO: 47689 - protein, 244 aa, Oryza sativa
MPSSNLKPENEDEELDAKTIYRTTYMFSATMPPAVERLARKYLRNPVVVTIGTAGKATDLITQNVIMTKESEKMSRLQKILTDLGDKPAIVFCNTKKSADARAKDLDKAGFRVTTLHGGKSQEQRETSLDGFRNRRFTVLVATDVAGRGIDIPDVAHVINYEMPSSIDTYTHRIGRTGRAGKKGLATSFLTLENTDIFFDLKQMLIQSNSPVPPELARHEASKFKPGSVPDRPPRRNDTVYATH

SEQ ID NO: 47690 - protein, 406 aa, Oryza sativa
MMASDRLDAERIIEYFKGKSILITGATGFLGKILVEKILRVQPDVKKIYLLVRAIDQASANQRVQSEVTETELFSVVKEKHGKGFSRFIEEKVVALAGDIIYDDLGLDPPLLQHLADNLDVIVNGAATTNFYGRYDVSLDVNVLGVKHLCQLAKKCRGLKVFLHVSTAYAGGEQEGLIQERAFEEGWALREGMHLDVDAELRLVADVRREVEDDDDKARRKAMKELGLARARHFGWSNTYVFTKAMGEMVLSRMLLQSSSPAPAITGAGGVVVVRPSIITSIQRDPVPGWMQGTRTIDTLIIGYAKQNLSCFLGDLDLVMDVIPGDMVVNAMMAAAVAHSGEAGQERPAVYHVSSSLRNPAAYSVLYEAGRRHFRRSRGLGSAARSSPPRRCTSSRPSPASRCTCW

SEQ ID NO: 47691 - protein, 294 aa, Oryza sativa
MDAPVITLLVFLVAVAAATAAAEMPRMEHPRKGDGSLSLLAVGDWGRRGAYNQSMVAAQMGIVGEKMDIDFVISTGDNFYKNGLTGVDDKAFEESFSDIYTAKSLHKPWYTVLGNHDYRGDALAQLSPVLRKVDSRWICIKSFVVSAEIADFFFVDTTPFVLKYWTDPKNSKYDWRGVSPRETYIANVLKDLEDALEQSKAPWKIVVGHHAIRSVSQHGDTKELLEHLLPILKAHGVDLYLNGHDHCLEHISSRDSKIQYLTSGPGRRRGAGCRRRTRTRWSSSTTGRDSCRCG

SEQ ID NO: 47692 - protein, 490 aa, Oryza sativa
MAPPRPSPAARLLREYGWDLLLGSIAAFYAVMVPYTKVEESFNVQAMHDILYHNYHIEKYDHLEFPGVVPRSFIGALVVSVISSPAVFVMHLCHVQKVYGLLAVRIVLGSIILMTLRLLRVQVKRKFGHHAEAFYLILTATQFHLLFYSTRPLPNVLALAFVNLTYYFWFKGNHRRTLQALIVAAVIFRCDMILLLGTIGLALLLSRSISLLEAIKCCVSTAIICIGFTVLVDSILWRRILWPEFEVLWFNSVLNRSSEWGTHSIHWYFTSALPRSMLVAYPLCMVGALLDRRIVPYILPVFSFVVLYSKLPHKELRFIMASIPMLNVSASLAASRIYNNRKKTGWKLLYVLMIGGFLSSLGYSGVTFMASYNNYPGGYALKALHEADSVMKDKIVHIDAFTAMSGVSRFCESEYPWRYSKEEKISIEEYQERNFTYLLNEHRHISGYKCLFAVDGFSRAKIQPRIPLLSLVKEPKVFAHGNTRDPDIFR

SEQ ID NO: 47693 - protein, 132 aa, Oryza sativa
MEEDEMRMREKLATMDERQAMAMRLTWISELVASNKKSIAGNKAYILALIDAIDNDRCPYTAAELSDKIRELREDRVTVILPAQAVIKTMIDSVRAATPAAGGDGGTRRRGADDNSGAIGCGPTHQSRTISR

SEQ ID NO: 47694 - protein, 109 aa, Oryza sativa
MSTDLTIPPSMEAPGADIQALIQRLRLHRPRPSPYAAAAAPSPDAAAPPAELLFRPRRAAVLICLFRGAAGELRVLLTKRSSKLSSHSGRFLCQEERLRRVMLMMQQQH

SEQ ID NO: 47695 - protein, 739 aa, Oryza sativa
MGSLPAADKPLPALRYPPARRDDDIVDDYHGVTVPDPYRWMEELESEEVKGFVDAQAAVAEAVLSTCDDHRVRLRGQLTALFDHPRYRAPFKRAGSYFYLHNPGLQPHSALYVQHGLGGGEEPDVLLDPNTFSDDATVSLAMFGVSHDGEHLAYGTSASGSDWVTIRVMRVRDRRHLHDEICWVKFSAIAWTRDGKGFFYSRFPAPKNDGAPLGAGIKTSVNLNHEVYYHFLGTDQSEDLLCWEDPDHPKYIYTPEVSEDGKYVILSVAETSEPVNKLYYCDLSALPDGLEGMKGNHGNAMLPFVKLVDEFEAYYALIANDDTQFTFLTNKNAPKYKLSRIDVNEPHSWMDILPEDEKAVLESACAVHGDKLLVNYLSDVKYVLQMRSLVTGELLHDIPIDIGSVNGISGRRDNSEVFIEFASFLTPGIIYRCDVSKETPEMNIYREISVGGFDRTDFEAKQVFYPSKDGTKIPMFIVSKKSIVLDGSHPTLLYGYGGFGMNMTPHFSVTRIVLMRNLGFVSCIANIRGGGEYGEDWHKAGSLANKQNCFDDFIAAGEFLVSAGYTNPSRLCVEGASNGGLLVAACINQRPDLFGCALAHVGVMDMLRFHKFTIGRAWTCDFGCSEKEEEFHWLIKYSPLHNVRRPWEKGHRRQQYPSTMLLTADHDDRVVPSHTLKFLATMQHVLCTSVKESPQTNPIVARIDRKSGHGCGRSTQKIIDEAADRYAFAAKTMGISWID

SEQ ID NO: 47696 - protein, 342 aa, Oryza sativa; identical to SEQ ID NO: 32941

SEQ ID NO: 47697 - protein, 502 aa, Oryza sativa
MFRPEILRLSVEMTGLSNSADSAPASPNNGTEPPMMRTNGGEQMGGSEAAHIRIDEIIRRLDAAEKEAQAQVVEARREIFRVPGRHRLADEDAYQPSLFSVGPYHRHGTEEMGRNELTKVRLMKLQLGADADQAASLQRECLLSMASLEQEARRCYDGDVAMDSGEFCMMLLVDGAFLIAMLTAFGIQEQDDAPANKEEEEDSGPGTGSRTQKRVLVDGFLDLVLLENQIPFFVVHSIFGLLVDHAGTTLAKTAWNAVRNFMQHIPTASNADDVKEDCKHLVDLCHTYLRPAGWQQAAAAGGGHIQRFRTATEYSESGVRFRVRSDSEPAPRFGLLDVDFSWGVVTMSRHVIDEKMSCVFRNVLAFEQDSGAGVERDAYVTAYVVFMSQLLGSAGDVAVLSRSGVMEHSLGNDGDACALFRGLARGLAFDTDGDHYLRGVGLELNRHHGRRLNRWLAWVARRHFDNPWLILAWLAAAVLLLCTLVQTVFAVMSYRPSAKLNS

SEQ ID NO: 47698 - protein, 366 aa, Oryza sativa
MTGDGVNDAPALKKADIGIAVADATDAARGASDIVLTEPGLSVIISAVLTSRAIFQRMKNYTIYAVSITIRVVLGFLLLALIWRFDFAPFMVLIIAILNDGTIMTISKDRVKPSPLPDAWRLQEIFATGIVLGTYLALATVLFFWAVRDTDFFTRTFGVHPIGGSTEELMAAVYLQVSIISQALIFVTRARSWFFVERPGLLLVGAFLIAQLMATLIAVYANWPFAKMKGIGWSWGMVIWLFSIVTFFPLDIFKFAIRYFLSGKAWNNAFDNKTAFANELDYGKSKREAQWAIAQRSLHGLQQAETSTALFDDNKDYLELSEIAEQAKRRAEIARLRELHTLKGHVESVVKLKGLDIDTIQNHYTV

SEQ ID NO: 47699 - protein, 623 aa, Oryza sativa
MAAAAATSRLLRRHPPPLPLLLRSSISSSRPLLQQPELSPAAAADAAPATDAAPLPPKPSTGSPFYGENWRNPAAAANPSSSSLLPAVVGGGAHARAAAYSASPGAAELKETFAEWMAEQRWEEMKQLFEFWVRSLDPASGKPNRPDLDLFNHYLRAQLMSGALPIEMLDLAEQMREFEITPNTASHNLILKSMVQAQEADGAEKLIERMLQTGTQPDDESYNLVVNLLIKLNRVDSTLKYLDLMLKSGYTISSSVFVEYVRACVRSGRLDTLASVIEKCKATDQNKVLCPPWSWCVEIAEAAFEANNSKLGLFALEYLARWIARSERVIPPLHLSVDEGLVLSALSAAARTCSTDLLNAAWSILRKSLHQKRAPTPEAYLAKIYAHSSIGHLQRAFGTLREFENTYGNFEDIDSELFSPFTSLRPLVVACCKDGYTTLDSVYVQLENLSSADSPYKSVAALNCVILGCANIWDLERAYETFEAIKEKFGLTPDIHSYNALLHAFGKRKKTEEACNVFQHLVSLGVKPNATTYGLLVDTHLVNRDAKAALAVIAEMVDAGFTPSKETLKKVRRRCSRESDFDSDEKVQSLAKQFNYRMGGENRREMLFNIEYSAEFTSTPSPS

SEQ ID NO: 47700 - protein, 51 aa, Oryza sativa
MQHSRMRNYLTIVVFFCARFVNNFLCSVGWERGILPHQEIYAAEEADERLL

SEQ ID NO: 47701 - protein, 753 aa, Oryza sativa
MEGQSQHRAPEREGSHNYDIESTDGSGGLWRRNGSSSGALLRYNDSGGGRSGSAGEPLLRKRTMNTTSQIAIVGANVCPIESLDYEVVENDLFKQDWRSRKKKQIFQYIVLKWTLVLLIGLLTGLVGFFNNLAVENIAGFKLLLTGNLMLKERYLTAFFAYGGCNLVLAAAAAAICAYIAPAAAGSGIPEVKAYLNGVDAYSILAPSTLFVKIFGSILGVSAGFVLGKEGPMVHTGACIANLLGQGGSRKYRLTCNWLRYFKNDRDRRDLITCGSAAGVAAAFRAPVGGVLFALEEAASWWRSALLWRAFFTTAVVAVVLRSLIEFCRSGKCGLFGQGGLIMFDLSSTVATYSTPDLIAIIILGIIGGIFGGLFNFLLDKVLRVYSIINERGAPFKILLTITISIITSMCSYGLPWLAACTPCPVDAVEQCPTIGRSGNFKNFQCPPGHYNDLASLFFNTNDDAIRNLFSNGTESEFHMSTLFIFFTAVYCLGILTYGVAVPSGLFIPVILAGATYGRIVGTLLGSISDLDPGLFALLGAASFLGGTMRMTVSVCVILLELTNDLAMLPLVMLVLLISKTIADNFNKGVYDQIVVMKGLPYMEAHAEPYMRHLVAGDVVSGPLITFSGVEKVGNIVHALRFTGHNGFPVVDEPPLTEAPELVGLVTRSHLLVLLNGKMFMKDQLKTSGSFVLQRFGAFDFAKPGSGKGLKIQDLDFTDEEMEMYVDLHPVTNTSPYTVVETMSLAKAAILSVH

SEQ ID NO: 47702 - protein, 550 aa, Oryza sativa
MKEMAAQDPSLLLGTTPQGNTCLHISSIHGHEGFCKDVLTLNNSLLTVANMDGETPLLTAVTNGHMSLASILLECCCTLGFSEAILQQDRNGCNALHHAIHCGHKDLALELILKEPALSKAVNKYSESPMFIAVMRDFTDVSEKLLGIPGSSHVGTYGHNALHATVRNGNAVMAKKILEGRPWLGKERTRERKTPILMTVIWDKIDVLRVLLEHDVLLGYECYDDGGNLSPLLVAAAYRGHVDVAQELLNHCPDAPYCDRNGWTCLHEAVKEGQTEFVEFILRTPQLRKLINMRNNKDGQTALHQAVRMCNPKIVASLLSHKDTDFTLNDHKTGQSVIWQLCLGSERAKTLNWNEVSMLMTKADPEAATTLHRQFARKRLTDELARNVKSLTQTYTSNTSLVAILMATITFAAAFTLPGGYSNDSGSEGLPVMAKKLAFQAFLISDTVAMCSSLAVAFISILARWEDLEFLLYYRSFTKKLMWFAYMATTIAFATGLYTVLAPRMLWLAVGICFLSVLLPILTKLLGEWPVVKLRFRLGKTFKTDLLDMV

SEQ ID NO: 47703 - protein, 548 aa, Oryza sativa
MAASRARQLHALYLTRGCRDPDMWANLAKVYASNSFLREAAIIYSKLLPHRTHHLPLVIVLLKATASRADPVLGRALHAEAVKSANAHDRLVGTTLVSVYCKCGLLADARRVFDGMLDRNAVTCNAMLAGYAAAGDMVSAEALFAGMGSRTPVTWATLIRGFAGKGDMAETRRWFEAMPLGMQNVVTWTVAVQAYVAAGDMETARELFNKMPARNAFVWSSMVTGNFKAGNADEAQAVFDKIPVRNLVNWNALIAGYAKMGCCEKALEAFHSMLKDKIKPDEFTMAGVLSACAQLGSLEQARKVHNFIIQHRIRKNQFVMNGLVDMFAKCGDLAFARNIFDNMQWRNTECWNSMISALSSHGQSIEAIRLFSKMECSEQKPNEITLLAVLGACTHGGFVDEGLRIFSKFDIYGVAAAVEHYGCLVDLLGRSGRLREAYEIVKNMLVEPNEVIWGSLLGACRVHGDAEMSELVSSEIHQLHSRRVSTNDAEYILLSNIMASSERWEQAERMRRKMALHGVGKTPGCSSVELEITEHQVCAGSGTLSQLH

SEQ ID NO: 47704 - protein, 381 aa, Oryza sativa
MLMATLRPAPASMVVLCAVVVVGAVFVVVAEGGGSEEAAASTGKAAMVPALFVFGDSLIDNGNNNNLASFAKANYYPYGIDFAAGPTGRFCNGYTIVDELAELLGLPLVPPYSQASGHAQQLLQGVNFASAAAGILDESGGNFVGRIPFNQQIDNFEATVEQIAGAVGGKEAAASMVARSILFVGLGSNDYLNNYLMPNYNTRRRYTPRQFADLLADRYAAQLTRLYKAGARKFVVAGVGSMGCIPSVLAQSVESRCSPEVDALVVPFNANVRAMLGRLDGGGLPGASLVFLDNYGVFKAILGDPAAHGFAVVDRGCCGIGRNAGQVTCLPFMPPCDGRDRYVFWDAFHPTAAVNVLIAREAFYGGADVVSPINVRRLAAL

SEQ ID NO: 47705 - protein, 173 aa, Oryza sativa
MATDAILETIKPRRSAERENLPVTNATGKGRGGDHLIGLRRRMSSFSVRIQPLMSSAGAGGAFRRATSMPSVKALAAQAGAVRRWWGWGLGWVMNRRPAFARDLEMNDDEAAALGCHCRGTWRHVFYRLRAGARRLLGRDGLPLSAHDFRYDSVSYAHNFDNGDAAAAARPEP

SEQ ID NO: 47706 - protein, 446 aa, Oryza sativa
MSRRNAGAMQREGSVKDWEEFDPSPSPKLAYSQSYVAMRGLLTSVASLDLVLMSSSLKSAWAAISSHKHARSLERSRSKGMSLKRAMLQLLVCFMVGIFIGFTPPFSVDLPGKIASENGRLPFDGDAIDRRQMVERQGTKLEPFVAEAESEASSEPQVEEGPPVPAMLDDEADFVEASPIVHSVNDSGIVVRKHLIIITTTSVRPHQAYYLNRLAHVLKDVPPPLLWIVAEWPYQSRETAEILRSSGIMYRHLICNRNTTNIRKIVVCQKNNAIFHIKKHRLDGIVHFADEERAYSADLFEEMRKIRRFGKWPVAIHVGTKYRVVLEGPVCKGNQVTGWHTNQRRGVSRRFPIGFSGFAFNSTILWDPQRWNSPTLESIIVHSGGRGGLQESRFIEKLVEDESQMEGLGDNCTRVMVWNFELEPPQVNYPIGWLLQRNLDAVVPIT

SEQ ID NO: 47707 - protein, 805 aa, Oryza sativa
MEAEDDERAEAEAEARREKEAGNAAYRKLYLETAVRHYTRGALLDPRDISFLTNRAAAYLLMSKYKECVRDCDEAVEKGRELRADNKLVARALARKASALLKLAACAADYDPAIRALQQSLAEHYSEETLAKLGEAEEARKEIEERERLDQEAADHHRDRGNDFFKQKRYQEAAMHYTEAMKKNPKDPRVFSNRAQCHIYLGALPEGLEDADKCIALDPTFLKGYLRKAKVQLLMGNYEIALATYVEGLKCDPNNLEVLDGLRRCAACIKRANGGDSRAEDLREILGDLHLNDDLCNKLQKSMDEAAVLKKEASDERLKRIESERLARTLEDLYLSQVQQRKETEESLSRVQQEFEQLKIQQDEVTVELQRVNEQNENLLGQLSDSREHFEWLLSEHDQLLRERDNAVREVEELRQKRGQMLSVLVTAMHCEFSSSEVESATENFSNSLKIGEGGFGCVYKGILRNMTVAIKVLRPDSLQGQSQFEQEVSILSRVRHPHLVTLLGACSESSTLVYEFLPNGSLEDFLMCSDERQTLTWQARIRIIAEICSALIFLHKNKPHPVVHGDLKPANILLGVNLVSKLSDFGISRLLIQSSTNNTTLYRTMHPVGTPLYMDPEFLSTGELTPQSDVYSFGIVVLRLLTGKPPVGIKNIVEDAMEKGDLNSVIDTSVGEWPHLHIEQLAYLALRCTELSRRCRPDLSGEVWAIVEAIRDAALSSPSSSRSAQDQNSPPSYFICPISQDIMDDPHIAADGFTYEAEAIRSWLCNGHDTSPMTNLLLEHEELIPNRALRSAIQEWLQQHSMSL

SEQ ID NO: 47708 - protein, 84 aa, Oryza sativa
MFATCISNIVSWEESIAALGPAKGNALPLVGGIKVGYCSERQTRGPLVAKMWWILNYTASLPGLTTMNCPSMPSQPKPQLGKPS

SEQ ID NO: 47709 - protein, 215 aa, Oryza sativa
METAAMPRSPCCSLPSARVLPSRLPLLPRPAPAALSAPAARPVVARCAAAAGHGGEGEMPIEKRFPPFPAVMDINQIRDILPHRFPFLLVDRVIDYKPGEYAVGIKNVTINDNFFPGHFPERPIMPGVLMVEAMAQVGGLVMLQPEVGGSRENFFFAGIDKVRFRKPVIAGDTLIIRMTLIKLQKRFGIAKMEGKAYVGGDLVCEGEFLMATGSE

SEQ ID NO: 47710 - protein, 73 aa, Oryza sativa
MAVAARAPLGVVAVVAVLVVGIFMPAAAQAPAPAPVSDGTSIDLGIAYILMLVALVLTYLIHPLDASSPYKLF

SEQ ID NO: 47711 - protein, 523 aa, Oryza sativa
MAGAEAANGRNKYAVLDPSDEPEGRRRPSAWERRSKERFVLACAIFASLNAILLGYDVGVMSGAIIYIQKDLHITEFQEEILVGCLSVVSLLGSLSGGRTSDAIGRKWTMALGAIVFQAGAAIMTFAPSFTVLMIGRLLAGVGIGFGAMVSAVYIAEISPAAARGTLTSLPEICINLGILLGYVSNYAFSGLSEHINWRIMLGVGILPSVFIGFALFVIPESPRWLMMEKRVPEARAVLLQISESEAEVEERIAEIEEAANLLKSTKSEDKAVWMELLNPSPAVRRMLYAGCGIQMFQQITGIDATVYYSPTIFRDAGIKSDQELLAATVAVGFTKTVFILVAIFLIDKVGRKPLLYVSTIGMTMCLFVLGIALTLQKHAMGLISPRIGIDLAVFAVCGNVAFFSIGMGPICWVLSSEIFPLRLRAQASALGQVGGRVSSGLVSMSFLSMARIISVAGMFFVFAVISTVSVAFVYFCVPETKGKTLEQIEMMFEGGKEWRGSEIELEDTQHLIQSSKKSVSLG

SEQ ID NO: 47712 - protein, 114 aa, Oryza sativa
MRRLRRLDLSYNETLSDKEVGAMLSSCHNLIDIRLRGCRCLTRGSLVSLLRYCGRSVEVIDITRCLSIAAADVELFAQEATRLIQVIIEDSLLSEELRAIAHKKGIRVGPLRCD

SEQ ID NO: 47713 - protein, 244 aa, Oryza sativa
MEMYRKISKGDVKFPQWFTTDVRRLLSRLLDPNPNIRITVEKLVEHPWFKKGYKPAVMLSQPNESNNLKDVHTAFSADHKDNEGKAKEPASSLKPVSLNAFDIISLSKGFDLSGLFENDKEQKADSRFMTQKPASAIVSKLEQIAETESFKVKKQDGLVKLQGSKEGRKGQLAIDAEIFEVTPSFFVVEVKKSAGDTLEYEKFCNKGLRPSLRDICWDGQSEHPSLAQSSTLTQSSKSISRHAI

SEQ ID NO: 47714 - protein, 256 aa, Oryza sativa
MPPPYSHIKVVREEDFRSRIGEDGHYFDLIDFSAIEGFNVPPTMTILRFKEKLTEKFGTPLQCQRLWWWARRQNNTYRVDRPLTTEEENLPVESLISALCFEGDHLQLFLEVLNTNSLPTWSNMDDALVFLKHYDPGKAQLRYVGLLSVKVASRPSEILPKLRSLAGFCLSEMIELYEVRLSFFFFCRAAKKGQPNLLKIEEYIQIYKVITSTRSCRSNGNCHRSNFPKAKDYTKRLLSYISENPSFLPNRHFLFD

SEQ ID NO: 47715 - protein, 339 aa, Oryza sativa
MPPSSAAMLDEEENQWRRSLCLSCRGDGVHGRSWRHRQPHPERQEALRPVARGATPGDPHAAAGEEGGLRLPGGVGGGHHPPLPQARGGVVAAAGPPPGPALAVVRRRGGGAAGARGGAPRRPPGVPRRRHGHRGGAPHVPDDAQHHGRRGARRDRRRRQRLGRVDQGVGRRGEPARRPDEQVPLPHRQGRHEAGREDDTVPHWLRHGSTNGERPVHGVHLHDVPGARHLHLPRQHGAPRGAPRRRRPGPRLRHRREVGRPRPRRGAFRRRAARAGLRLQPRAEVQEDGGEGAGGGEAGAARRRRSVQLDPWPSGAALILTESVVIITVTSLCLDRKKI

SEQ ID NO: 47716 - protein, 646 aa, Oryza sativa
MAVGATATKLHMPSAGGRRPSLFHLAAVAVLCTVSYLIGIWHHGGFSASPAGGVASSVSIATTASVSCVSPTPTLLGGGGGGGDSSSSAPLDFAAHHTAEGMEVASGQVHRTYEACPAKYSEYTPCEDVERSLRFPRDRLVYRERHCPSEGERLRCLVPAPQGYRNPFPWPTSRDVAWFANVPHKELTVEKAVQNWIRVEGEKFRFPGGGTMFPHGAGAYIDDIGKIIPLHDGSIRTALDTGCGVASWGAYLLSRNILAMSFAPRDSHEAQVQFALERGVPAMIGVLSSNRLTYPARAFDMAHCSRCLIPWQLYDGLYLAEVDRILRPGGYWILSGPPINWKKHWKGWQRTKEDLNAEQQAIEAVAKSLCWKKITLKEVGDIAIWQKPTNHIHCKASRKVVKSPPFCSNKNPDAAWYDKMEACITPLPEVSDIKEIAGGQLKKWPERLTAVPPRIASGSIEGVTDEMFVEDTKLWQKRVGHYKSVISQFGQKGRYRNLLDMNARFGGFAAALVDDPVWVMNMVPTVGNSTTLGVIYERGLIGSYQDWCEGMSTYPRTYDLIHADSVFTLYKDRCQMDNILLEMDRILRPEGTVIIRDDVDMLVKIKSITDGMRWNSQIVDHEDGPLVREKLLLVVKTYWTLGEEKE

SEQ ID NO: 47717 - protein, 182 aa, Oryza sativa
MPRETPPPPPPEGGEVHEVVEGEDGQAEDQEERWARLLPELMSEVVRRVEASGGERWPARKDVVSCACVCRRWRDAAVAVVRPPAESGKITFPSSLKQPGPREFPMQCFIKRNKKNSTFYLYLGLTNATVDKGKFLMAARRFRRGPHTEYIVSLDADDLSQGSNAYMGKLRSDFWGTKLQNI

SEQ ID NO: 47718 - protein, 630 aa, Oryza sativa
MVMAGCPAGIPSQALQLLDIVLRDMVLAERNDMGYVAFGRSYFSPGLGSRELDKGIFAWKGFYQSCRVTQQGLSLNIDMSSTAFIEPGRVLNFVEKAIGRRITNAITVGYFLNNYGNELMRTLKGVKVEVTHRGNLRKKYSIAGFTEQSADVQTFTSSDGIKTVKEYFNKKYNLKLAFGYLPCLQVGSKERPNYLPMELCNIVPGQRYKNRLSPTQASNLINITNDRPCDRESSIRQTVSSNQYNSTERADEFGIEVDSYPTTLKARVLKAPMLKYHDSGRVRVCTPEDGAWNMKDKKVVNGATIKSWACVNLCEGLDNRVVEAFCLQLVRTSKITGLDFANVSLPILKADPHNVKTDLPMRYQEACSWSRDNKIDLLLVVMTDDKNNASLYGDVKRICETEIGVLSQCCRAKQVYKERNVQYCANVALKINAKAGGRNSVFLNVEASLPVVSKSPTIIFGADVTHPGSFDESTPSIASVVASADWPEVTKYNSVVRMQASRKEIIQDLDSIVRELLNAFKRDSKMEPKQLIFYRDGVSEGQFQQVVESEIPEIEKAWKSLYAGKPRITFIVVQKRHHTRLFPNNYNDPRGMDGTGNVRPGTVVDTVICHPREFDFFLCSQAGDQRDKPS

SEQ ID NO: 47719 - protein, 792 aa, Oryza sativa
MSTCPVLNDRPIDEWKVTELKDELRRRDLSIKGLKDDLVKRLAEALQGEVIDGGEETVNGTPPVENQTQDGALVLDDASGFQASAEQNVDEGPAEVAAKNEGLVSVIEASTEGGTLVLDDGSGFQASTEQNVDEGPAEVAAKNEGLASVTEASTEDGTLVLADASGIQASTEQNVDEGPSEVAAKNDTSTNTKLEESSAKGEPCVSIGCEILEQETKSSHLDVILSHADAVASAEEMITESLILKKGSNENDLMYEKDQKDSDHISTDCKPEQSGPKDQVSEVNQDLESQIKCVSISPDDILVNKNDNVEGNMNADNFGLGLESKQDIVKPSSSNPSSVGDDLQTPDDDKEISLIDMSLQDTDMSLKKKEGSPDSIYPEKLNLDRSSGDESMEEDAMETKHMDSKTIPDYLEGKSEVTLEHVSSGDESMEEDVMETKHVDSNTKVEHVSSGDESMEEDVMETKHVDSNTKPDYLEGKNDVTLEHVVKEVILLDTVTEGSSVDQKEAISQEKPVMPTEKRKAEDQEVVANNEPIKRQRLWNVDDVKPEQATSKLSGSDASKVVHPPARRRSFGRSDSTARGNSPKERMVPPPQKPATTSLRIDRFVRPFTLKAVQELLGKTGSVCSFWMDPIKTHCYVTFSSVEEALATRNAVYNLQWPPNNGSSLVAEFVDPHEVKAKLEPPPPPPAPINPTAATAPSHQSKANQIMPPHAADTSRGLLPTPPALARLPTFNNAPAREMLPPAPKNPEPPVVVTLDDLFRKTQASPRIYYMPVSEEVVSAKLAARGKGKKAA

SEQ ID NO: 47720 - protein, 97 aa, Oryza sativa
MVLDSLSSPHRRSQNTFFLSSPKKLQSSKDDVGSWSALVERHRFLLTTLVVLVFLCTIYLYFAVTLGAPDACSGLAGTEKAVCRAKSALRHGKLKFF

SEQ ID NO: 47721 - protein, 406 aa, Oryza sativa
MLRLSCCRPTAGGGLAGAMLHLLPLLRARAATHLPTSSLDLSRRRRLLLSTAARSAAATPFSVEEYLVDTCGLTGAQALKASKKLSHLRSPAKPDAVLAVLSGVGLSRADLAAVVASDPQLLCARADNIARRIASLRDRVGLSDPQIGSFLLAGGAKGIHACDVASRLEFWIPFLGSFETLLRILKGNNVLVLSDLEKVIKPNIALLQECGLTVCDIAKMARFAPRMFTSNPKQVEGFVRRADELGVPRTSGQFKYMVGIFANISEGSATARMEYLSRSLGCSMDKLRSAVQKLPQILGLSETNLGSKIEFLVGKVRLEPEYLLKTPKLFTYSLEKRLVARHYIVQVLAAKGLKGLKKDVPFCSYVQLGESCFVKNFIDQHENVVPGLSDAYAALRAGKVPPEVQH

SEQ ID NO: 47722 - protein, 669 aa, Oryza sativa
MEGGTKKVFTVQVEDGKPRKDGRPAVGPVFRSALSKDGFPPLEPDMKTSWDVFRVAAGKYPDNRMLGWRPVKDGVIGPYIWKSYREVYEEVLQVGSALQQLGVKPGSRIGIYGSNCPQWIVAMQACNGYSLICVPLYDTLGAGAVDFIIDHAEIDVIFVQDKKIKEILSANCKSAKRVKGLVAFTSGTSEEITSADQIGMKLYSWKDFLKMGKENPAQPCAPKPNDTCTIMYTSGTSGEPKGVMLSHESHAIYVKGVDLFMEQFDDKMTTDDVFLSFLPLAHILDRMIEEFFFHKGASVGYYHGDLNALRDDLMELKPTLLVGVPRVYEKIYEGILKALSELRPLRRLIFNALYNRKLANMKAGCTHKTASPFADMLAFRKVKARLGGRLRLLISGGAPLSNEIEEFLRVASCAYFIQGYGLTETLGPSTVCYPDDMSLVGTVGVAATYTELRLEEVPEMGYNPLGTPSRGEICVRGNFFTGYYKNPELTNEVMADGWFHTGDIGEMNSDGILKVIDRKKNIFKLSQGEYVAVEYLEKVYVFPPTVEDVWVYGDSFRSMLVAVVNPHEENTMKWAESNGCKGSFAEICKSEGLKEHILKELQSVAAKNKLRGFEYVKGVILDPIPFDLERDLVTATMKKKRNNMLKYYKPEIEKVYQKLEEQRVAAKSK

SEQ ID NO: 47723 - protein, 783 aa, Oryza sativa
MGTKVNIIVGSHVWAEDPEIAWVDGEVVKIKGEEAEIQATNGKTITANLSKLYPKDMEAAAGGVDDMTKLSYLHEPGVLQNLATRYELNEIYTYTGNILIAVNPFQRLPHLYDPHMMQQYKGAPFGELSPHVFAVADVAYRAMIHEGKSNSILVSGESGAGKTETTKMLMRYLAYLGGRAATEGRTVEQQVLESNPVLEAFGNAKTVRNNNSSRFGKFVEIQFDKQGRISGAAVRTYLLERSRVCQISDPERNYHCFYLLCAAPQEEVEKYKLGNPKTFHYLNQSNCYELVGVSDAHEYLATRRAMDIVGISTQEQDAIFRVVAAILHIGNIEFAKGKEVDSSVLKDDKSKFHLDTTAELLMCDSGALGDALCKRVMVTPEEVIKRSLDPYNATVSRDGLAKTIYSRLFDWLVDKINSSIGQDPNSKSLIGVLDIYGFESFKLNSFEQFCINYTNEKLQQHFNQHVFKMEQEEYTKEQIDWSYIEFVDNQDVLDLIEKKPGGVIALLDEACMFPKSTHETFSQKLYQTFQKHKRFVKPKLSRTDFTICHYAGEVLYQSDQFLDKNKDYVVAEHQELLSASKCSFISGLFPPLPEETSKSSKFSSIGARFKQQLQALMETLNSTEPHYIRCVKPNNVLKPAIFENVNVMQQLRCGGVLEAIRISCAGYPTRRTFYEFLHRFGILAQEALEGNCDEKVACKRILEKKGLVGFQIGKTKVFLRAGQMAELDARRTEVLGARQKRFKGKYGHISCGRSSLIGGRHLYLFRQYGEEDWLVNCLIKCEG

SEQ ID NO: 47724 - protein, 42 aa, Oryza sativa
MALHLLHLLAFSLLFAVATPIRDITDVCSSQIKGINNPPCLN

SEQ ID NO: 47725 - protein, 638 aa, Oryza sativa
MQEEFDWPTLVLSTSPETENVTSSSVRSTTKNDVVIQQGSISSYWPWDVMKLENDTHFLSHSSGDGMKCTKADHFLSHANRGSLNLDYQEQPSKSNFATDLGSHAYSKEARTLGRVYHGQQPYFSPSSCSWEKSSALKVVPNSPDASGHIVGEMRTKTNILSARSNYLSYPTDVPHIRYRDEVKVDLSQDDNSKQYRRPDQFTAFSNFNGQSSEHLETAKGANYMDEITPISRQWCFDNRGPSLPRGLVYGDEIPSLSSKKCNGNVASSYSRIWDYSAETTSVRQCYGDKIPSLSHHWHYRDKIPLHSGQWCHDAEARPLSNYQQGASYGNGRLRDNISRGGRNEQVNIISSRRTMTKPRVANKVVSSTDHYKINKDNLWRNSEDIRDQVRGPRANKLNNSSTSSIKNNAIPPLVCRDQINRPEFTVQYEHAKFFMIKSYSEDDVHKGIKYNVWASTPNGNNKLDAAFHEAQILMKEQGKRCPIFLFFSVNTSGQFVGLAEMLGPVDFKKTMDFWQQDKWNGFFPVMWHIIKDIPNRFFKHITLENNEGKVVTFSRDTQEIGLPQGLEMLKIFKAYHQGTSILDDFYFYEEKENMRHAQKGRNLETTNQDLFSDDFRSISVENLEASMQSLSFYETWE

SEQ ID NO: 47726 - protein, 91 aa, Oryza sativa
MASSRVVVAVALLVAAVLAAFGALAPACEGARVMREGAAVVGKMSSYQPPVRHKPPVPPSGPSHRHNKRATVPRKRKHFPPSGPSYHDPHS

SEQ ID NO: 47727 - protein, 296 aa, Oryza sativa
MMDCDKQLLHMCMLFTGQTFRKLMLQEGEKFVLVWFDTPYNQAAYGLVDKLGSLVVRIVFLPFEESSYATFAQLASGQNPQNISNLEGSLLGALKLIMLIGLVVISFGPSYSYTLLRLLYGARYSDGDATVILRYYCFYVICLAMNGTSEAFLHAVANEDKLKQSNDMLLLFSAIYIVLNVVLIKSAGAVGLIAANSINMLLRITYSAAFIKDYFKGSFSFRHCLPAGWGVLLISGLTTAFSERMFLNRNRFKQTLPIHMAIGIMCLGFSSLEIYRGEKQFLTSIIRSLKSRDKLA

SEQ ID NO: 47728 - protein, 325 aa, Oryza sativa; identical to SEQ ID NO: 29695

SEQ ID NO: 47729 - protein, 269 aa, Oryza sativa
MATDGAAAAAAAGSKKKKEVLIFDAEEDLAVSLAKYTAELSAKLAAERGAFTVVLSGGSLIKNIRKLAEPPYLDSVDWSKWHVFWVDERVVPKDHEDSNYKLALDGFLSKVPIPTGQVYAINDALSAEGAADDYETCLKQLVKNGVIAMSQSTGFPRFDVMLLGMGPDGHIASLFPGHPLVNENKKWVTYIKDSPKPPPERITFTFPVINSSAYVAMVVTGAGKAGAVQKALSDKQTSSDLLPVEMAVLQDGEFTWFTDKPAVSMLQNK

SEQ ID NO: 47730 - protein, 361 aa, Oryza sativa
MERAAAGPLGMEMPIMHDGDRYELVKEIGSGNFGVARLMRNRASGDLVAVKYIDRGEKIDENVQREIINHRSLRHPNIIRFKEVILTPTHLAIVMEYASGGELFERICSAGRFSEDEARFFFQQLISGVSYCHSMQVCHRDLKLENTLLDGSTAPRLKICDFGYSKSSVLHSQPKSTVGTPAYIAPEVLLKKEYDGKIADVWSCGVTLYVMLVGAYPFEDPEDPKNFRKTIQKILGVQYSIPDYVHISPECRDLITRIFVGNPASRITMPEIKNHPWFMKNIPADLMDDGMVSNQYEEPDQPMQNMNEIMQILAEATIPAAGTSGINQFLTDSLDLDDDMEDMDSDLDLDIESSGEIVYAM

SEQ ID NO: 47731 - protein, 228 aa, Oryza sativa
MLTVLLLLSKYRLRNVPVIEPDKPIIKNFITQTGVVKGLQQCKGRDWFDYISALPLSDLGLPFMSLDEVITVNSGDLILEAFKCMKDNKIGGVPVVEGPNKKLVGSVSIRDIRFLLLRPDLFSNFRQLTVMEFMKTIGSTVSDSGNGLVKPPLTCSPDASLGSVIDSIASRITHRIYVVDGDFEVVGVVTLRDVISCFIYEPPGYCDNYLASAMDKLEEKGAGSVDTS

SEQ ID NO: 47732 - protein, 569 aa, Oryza sativa
MAAARRAAGLLPLLLSSPSRARLPHRQALALTPPLLRPHRLYSHSPKPSSSAAFSAFASASNGAPAGRARELHLYNTKSRRKELFQPRVPGGEVGMYVCGVTPYDDSHIGHARAYVAFDVLYRYLRYLDHKVRYVRNFTDIDDKIIARANQLGEDPFSLSKRYSDDFLSDMANLHCLPPSVEPRVSDHIDQIINMIKQIIDNDCAYAIGGDVYFSVENFPEYGDLSGRKLDDNRAGERVAVDERKKNPADFALWKAAKDGEPSWDSPWGPGRPGWHIECSAMSAHYLGHSFDIHGGGEDLIFPHHENEIAQSRAACCDSSINYWIHNGFVNVNSQKMSKSLGNFVTIRKVTELYHPLALRMFLLGTHYRSPINYTIEQLNVASDRLYYTYQTLQDCEESCQQHQSKAGDPLPVNTTNCIQKLHDEFETSMSDDLHTSVALAAISEPLKVMNDLLHTRKGKKQEKRLESLSAMEEKIRMVLSVLGLLPSSYYEALQQLREKALRRASMTEEQVLQKIEERTSARKAKQYEKSDEIRKELAAVGIALMDGPDGTTWRPSVPLSEQGVVAST

SEQ ID NO: 47733 - protein, 477 aa, Oryza sativa
MPRSLAHPRSPHHHGPRILAHIAVQRLKRCSIRTNKMQQSRQDVDEHVAELRGELRKAREERDRAYRVLEVSEWKALASANDRTTIETLEAELDASRESEKRMLESLAMQTKQLEMTKIELEEARLENASLRETIQRLEAIAVPVATTPRGRYDRDYQRVHGELRMALVAEDKNKKAMEELVLALKEVNGELHTTRQLLARSQHEAETARLESDRLHVSLKRKDDKLRALSEEVARLRADAEESFAAWRGKEAGFTSCMKSTESELAETRRENARLLESQRSGRDEIAKLRDILRQAVKDTKVVKEALEEARGENAALKEMLGDKDTAIKCTKQELECLRVTEAAARDSVKELQSLLVATSSSPTAAGMKLSASPSPTASGIKLDMEDSSSSHGSRELHGLIKCHSEARVKPPAGLTLPRRRSDNFEGSVYDIFGSMEDQKSELSAFSTMPRSLPARRRVMMRKVGSLFRFKSFSIK

SEQ ID NO: 47734 - protein, 500 aa, Oryza sativa
MENSQMWLLWGALSVALFFYFSTLRRRYAGGKPLPPGPTPLPLIGNLHLVGGGTFHHKLRDLARVHGPVMTLKLGLATNVVISSREAAIEAYTKYDRHLAARATPDTFRACGFADRSMVFIPSSDPQWKALRGIHASHVFTPRVLAAVRPIRERKVGDLIAYLRAHAGEEVLVGHAMYTGILNMVSFSYFSVDIVDMGSQMARELREVVDDIILVVGKPNVSDFYPFLRPLDLQGLRRWTTKRFNRVFSIMGDIIDRRLAHIRDNKPRHDDFLDSILELMAAGKIDRVNVLNMLFEAFVAGADTMALTLEWVMAELLKNPSVMAKARAELRDVLGDKEIVEEADAARLPYLQAVLKEAMRLHPVGALLLPHFAMEDGVEVGGYAVPKGSTVLFNAWAIMRDAAAWERPDEFVPERFVERTPQLDFRGKDVEFMPFGSGRRLCPGLPLAERVVPFILASMLHTFEWELPGGMTAEELDVSEKFKTANVLAVPLKAVPVLIK

SEQ ID NO: 47735 - protein, 125 aa, Oryza sativa; identical to SEQ ID NO: 34520

SEQ ID NO: 47736 - protein, 537 aa, Oryza sativa
MQDGVMHTHDEETKKFFRHSGVHCVLVPRYASTKLSIFKQQVVGTLFTHHQKCVLVDTQATGNNRKITAFIGGLDLCDGRYDTPEHRLFKDLDTAFNKDFHNPTFPVNSYGPRQPWHDLHCKIEGPAAFDILTNFEQRWRKATKWKVNLKKVASWHHDTLIKINRMSWIVTPAADEANAHVCEEKDPENWHVQVFRSIDSGSVKGFPKIVQEAESQNLVCAKNLKIDKSIHSAYVRAIRSAQHFIYIENQYFIGSSFLWSSHKSAGADNLIPVELALKIASKIKANEQFAVYIVLPMWPEGIPTAAPMQQILFWQSQTMSMMYKIIADALQMQGLVEAHPQDYLNFYCLGKREVAAGDSMSQTSLCNDNSTLRSAQKLRRFMIYVHSKGMVVDDEYVIIGSANINQRSMEGCRDTEIAMGAYQPHYKWSADHGQGPPRGQVYGYRMSLWAEHLGAVEECFGRPETGECVRRVREMAEENWRAYVSPEMEETKGHLMCYPLKVDKDGRVRSLPGHDCFPDVGGKVLGTQTSLPNALTT

SEQ ID NO: 47737 - protein, 56 aa, Oryza sativa
MAATARIFKNPRGQIVPTGGFMPCPVYVFFFFLRECPVYVLFIFLLHFWFFLNGKY

SEQ ID NO: 47738 - protein, 229 aa, Oryza sativa
MPPRRKKGVAAKQKPPEPPAADAPLRDRLRWLNDQEYEHRSAAIKAIQAAEIESILSRLRLVESYISKEQQEGCALQYFQENLPNLSVVRNEEQNELELKREDWDKRLIGDHCDDKIFRASVSSLPNVGYVQFSGDSVRKSFIESMPFNFNDFAWGELPEDQLAGIADALQTPGAVSTRLSFGMTPKTLRLPKKGEMLLSVRGSPLGVYKEENLAAVHESTNGSEDAAS

SEQ ID NO: 47739 - protein, 337 aa, Oryza sativa
MGCSISGLNALYDAATGGGDVWINERRFRVLRQIGEGGFAFVYLVREHQASADAARGRSPSLASEDGTYAMKKVLIQSKEQLDLVKEEIRVSSLFNHPNLLPLLDHAVIAVKNQQGDWNHEAYLLFPVYIDGTLFDNAKVMQSRKEFYSTIDVLRIFQQLCEGLKHMHSFDPPYAHNDVKTGNVLITHRKGQAPLATLMDFGSARPARKEIRSRAEALRLQEWAAEHCSAPYRAPELWDCPSHADIDERTDIWSLGCTLYAIMYNVSPFEYALGESGGSLQLAIVNCTLKWPAGPSPPYPDALHQFITWMLQPQPAMRPHIDDIILHVEKLMEKYSS

SEQ ID NO: 47740 - protein, 562 aa, Oryza sativa
MAFLLGAFLGLVLGVAVVMAFARLENTRAEQRRELAATVSSFSKLTVEDLRKLIPLELYPSWVSFTQKQKLKWLNQELVKIWPFVNEAASELIKTSVEPIFEQYKSFILSSLHFSKLTLGTVAPQFTGVSILDSDSSGITMELELQWDGNPNIVLDIQTTLGISLPVQVKNIGFTGVLRLVFKPLVAELPCFGAVCCSLREKSKVDFTLKVIGGEMTAIPGISDAIEGTIRDTIEDQLTWPNRIVVPIVPGDYSDLELKPVGLLEVKLVEARDLTNKDLVGKSDPFAVLYIRPLQDKMKKSKTINNDLNPIWNEHYEFVVEDTSTQRLTVKIYDDEGLQASELIGCARVDLSDLQPGKVKEVWLDLVKDLEIQRDKKRRGQVHLELLYYPFGKQEGVSNPFADQIQLTSLEKVLKTESNGFDVNQRKNVIMRGVLSVTVISAEDLPPMDVMGKADPFVVLYLKKGETKKKTRVVTETLNPIWNQTFDFVVEDALHDLLMVEVWDHDTFGKDYIGRCILTLTRVILEGEFQDEFVLQGAKSGKLNLHFKWTPQPIYRDRDRDQ

SEQ ID NO: 47741 - protein, 83 aa, Oryza sativa; identical to SEQ ID NO: 33673

SEQ ID NO: 47742 - protein, 664 aa, Oryza sativa
MSTRSTTSSVLNFLRHVSFPPDPRLLPSALKSCSALRLARALHAAAAVAGVSRDAFVASSLLHAYLRFGATADARSVLDGMPHRTVVGWSALIAAHASHGDAEGAWGLLERMRSDGVEPNVITWNGLVSGLNRSGRARDAVLALVRMHGEGFLPDATGVSCALSAVGDVGDVAVGEQLHGYVVKAGCRLDACVATALIDMYGKCGRADEIVRVFDESSHMDVASCNALVAGLSRNAQVSEALRLFREFVGRGIELNVVSWTSIVACCVQNGRDLEAVDLFREMQSEGIEPNSVTIPCVLPAFANIAALMHGRSAHCFSLRKGFHHDIYVGSALVDMYAKCGRVRDARMIFEAMPYRNVVSWDAMIGGYAMHGEAENAVRLFRSMQSSKEKPDLVTFTCVLGACSQAGWTEEGRSYFNEMQHKHGISPRMEHYACMVTLLGRAGKLDDAYDIINQMPFEPDGCIWGSLLGSCRVHGNVVLAEVAAENLFQLEPENAGNYVLLSNIYASKKMWDGVNRLRDMMKTVGLKKEKGCSWIEIKNKVHMLLAGDSSHPMMAAITEKLKHLTMEMRRLGFAPSTDYVLHDVEEQEKDDILSVHSEKLAVALGLISTSHGTPLQVIKNLRICGDCHEAMKFISSFERREIYVRDTNRFHHFKDGKCSCADYW

SEQ ID NO: 47743 - protein, 446 aa, Oryza sativa; identical to SEQ ID NO: 31166

SEQ ID NO: 47744 - protein, 218 aa, Oryza sativa; identical to SEQ ID NO: 32811

SEQ ID NO: 47745 - protein, 305 aa, Oryza sativa
MNNHAAGGSTSNGGSGVDGDGGGGGGAARRNTKMPKYSKFTQQELPACKPILTPKWVVSVFFLVGVIFVPVGVVSLLAAQNVVEIVDRYDDACVPANMTENKLAYIQNPNISKECTRTLTITEDMNQPIFVYYQLDNFYQNHRRYVKSRNDGQLRDAAKANQTSACEPEKTTADGKPIVPCGLIAWSLFNDTYSFTRGNENLTVDKKDISWKSDREHKFGKNVYPSNFQNGLLKGGGTLDPAIPLSEQEDLIVWMRTAALPTFRKLYGRIYVDLKKNDTITVKLSNNYNTYNFGGKKKLVLSTAT

SEQ ID NO: 47746 - protein, 77 aa, Oryza sativa
MDNWKGARSCRQWHLWQHMHYSNHNNRKMVRMVIMLVASGSSIVTSNSQVLLEGSSHHDYLTISHFLFHRCIAWALN

SEQ ID NO: 47747 - protein, 157 aa, Oryza sativa
MGGSLEYLAGLFSCGDHHHGHKNSKRRQLQTVELKVRMDCDGCELKVKNALSTLKGVESVKINRKQQKVTVSGYVEASKVLRKAQSTGKKSELWPYVPYSAASQPYVAAAAYDRRAPPGHVRNVEASSAAYVSGGGRTEERLTNLFNDEDPNACSLM

SEQ ID NO: 47748 - protein, 288 aa, Oryza sativa
MDALVSAALEEVSARLSAGIPVTDLWAALRGALEAAGLPIGPAVKRAVWARLIVLPVISVVLGEAEAEAEGPVVDDPKVGVEDAERLGMRLVASAALRDNFLGMYDLRHSKSEMSAVQKKALQRVGASRTSGVTQNDLCKSFGMEGNNFHYIVQSLQSQKLIVRRSTIIKFKGNGAEKEDASQNKRVTNTNSLYLTRYAKDCMNSHQRIEIIKPGLLVSNEETNIDDLQDGTFGVNSDNDVSIHDYLPAMKAICDKLEEASGRVNCSVHLFGVLFHFSSFLTFSNYFL

SEQ ID NO: 47749 - protein, 706 aa, Oryza sativa
MSGFVGVVVSDPSLQGQFTQVELRSLKAKFLSLKRDSGGHATTKNLPGLMKKLRGLNEVISEEEIAAHLSQSYPDADQEIEFESFLREYLNLQSRVSAKEGGGGGGGGGKTASSFLKSSTTTLLHNLNQAEKSSYVAHINTYLREDPFLKKYLPIEPTDNQLFDLVRDGVLLCKLINLAVPGTIDERAINKKRVLNPWERNENHTLCLNSAKAIGCTVVNIGTQDLVEGRPHLILGLISQIIKIQLLADLNLKKTPQLVELFDDSKDIDEVLSLSPEKMLLRWMNHHLKKAGYKKTVSNFSTDVKDGEAYAYLLKALAPEHSPETTLETKDPSERAKLVLEQAEKLDCKRYLTPKDITEGSANLNLAFVAQIFQHRNGLTSDTRQVTLNQTASRDDVLLSREERSFRMWINSLGVDSYVNNVFEDVRHGWVLLEVLDKVSPGSVNWKLASKPPIKLPFRKLENCNQVVKIGKELKFSLVNLAGNDIVQGNKKLIVTLLWQLMRFNMLQLLNRLRSHSQGSQGKEITDADILKWANSKVKASGRTSQMESFKDKSLSNGRFFLELLSAVQPRVVNWKVVTKGEDDEEKKLNATYTISVARKIGCSVFLLPEDIIEVNQKMILTLTASIMYWSLQKQPQSQSETSEQSEPSSMASDAASDIASEDAASITAASEGEEVNSLSDSMSNLTTYDAISNAPPAENGNGVAG

SEQ ID NO: 47750 - protein, 953 aa, Oryza sativa
MEKPCTLLVHFDKGSPSMANEIKADLEGSDVAAKVDAMKRAIMLLLNGETLPHLFITVVRYVLPSEDHTIQKLLLLYLEIVDKRDVASGKVLPEMILICQNLRNNLQHPNEYIRGVTLRFLCRLNEPELLEPLIPSILANLDHRHHFIRRHALSAISAIYRLPHGDQLLPDAPEVVERALTGEQDASARRNGFLMLCACAQERAVAYLLTNAERVAEWPDLLQMAAVDLIRKVCRSPNRADKGRYIKIIISLLSAPNSAVVYESAGALVSLSSAPTAVRAAANTYCQLLSSQSDNNVKLIVLDRLHELRASHRDVMVDVVMDVLRALSSPNVDVRRKVLDLVLDLLTPRNVEEVVMYLKKEVVKTQAGDLEKGGEYRQMLVQAIHSCAVEYPEVAGSVVHLLMDFLGDTNVAAAVDVVLFVREIIETNPKLRVSMIQRLIDTFYQIRASRVCSCALWILGEYSLSLSEVESAISTIKQCLGDLPFYTVSEEGESTDASKPAQPVVNSVTVSSRRPVVLADGTYATQSAATETAISSPAVAPGSLSSTQNLRSLILSGDFFLAAVVACTLTKLVLRLEEVQPSKAEANKASTGALLIMVSILQLGQSSYLPHPIDNDSYDRIVLCVRLLCNTGDDVRKVWLQSCRQSFTKMLAGKQFRETEEMKAKAQISHAQPDDLIDFYHLKSRRGMSQLELEDAVQDDLKAATGEFTKDADDANRLNRILQLTGFSDPVYAEAYVTVHHYDIVLDVTVINRTKETLQNLCLELATMGDLKLVDRPQNYTLAPESSKQIRANIKVSSTETGVIFGNIVYETSNVMERSVVVLNDIHIDIMDYISPATCADVAFRNMWAEFEWENKVAVNTVIQDEKEFLDHIIKSTNMKCLTPPSALDGECGFIAANLYAKSVFGEDALVNISVEKQADGKLSGYIRIRSKTQGIALSLGDKITLKQKGGSS

SEQ ID NO: 47751 - protein, 866 aa, Oryza sativa
MVDKRMQITRITPDEAASGVGIWSVPDDVLYKVLVRLKPRDLIRVAAACHHLRNLSASIMPCMKLKLFPHQEAAVEWMLRREQNLQVLEHPLYKGLCTMDGFPYYINVTSGEISTGSAPTVHDFCGGMFCDEPGLGKTVTALSLILKTHGTLAVPPPGMNVMWCMHKPDKKYGYYELSASNSSNGNIFLSGSKKLRKDVIREDTCSSESLNNGGSVVSTRSSRKRGRLVNPDLNMIAAHPSGKSPMSAPTGAHSTPATHVLKITKNLKHVRKNLMEAYSDGSVGNKRKRDATSELSETWVQCDACRKWRRLLDGTALDSSTAWFCSMNPDSARQKCSIPEESWDLKRKITYLPGFHKKGTPPGNEQNASFFTNILKEHAALIDSETMKALLWLAKLSPKKHIEMEAVGLTRPVLDARANIGKGARPYYKIFQAFGLVRKVEKGITRWYYPSMLDDLAFDSAALGIALEKPLDLVRLYLSRATLIVVPANLIDHWTTQIQRHVSSDTLNVYVWGDHKKPSAHNLAWDYDIVITTFSRLSAEWGPKKRSVLKQIHWFRVILDEGHTLGSSLALTNKLQMAVSLVASNRWILTGTPTPNTPTSQVAHLHPMLKFLHEEVYGQNYQSWDTGIHRPFEAQMEDGRSRLLQLLQRTMISARKQDLKNIPPCIKKITFLDFSEGHAKSYNELAVTIRRNILMADWNDPSHVESLLNPKQWKFRTTTIKNVRLSCCVVGHIKVAEAGQDIQETMDALMQLGLDPSSGEYQSIRYALLNGASCFRCRDWCRLPVVTPCRHLLCLDCVALDSEKCTLPGCGNHYEMQTPETRARPENPNPKWPVPKDLIELQPSYKQDDWDPDWPVDNKQQSCLFG

SEQ ID NO: 47752 - protein, 582 aa, Oryza sativa; identical to SEQ ID NO: 45037

SEQ ID NO: 47753 - protein, 346 aa, Oryza sativa
MARVLPLSIEAGEMAMPRREEVVTDMPSSSAVASGNGIEQPEQNTKDDEYERLVRPAHSVIADDNTVVLPEEPTSRSIWWMKVLLGCFLLILVSYVFVKWGVPFAFEKVLLPIMQWEASAFGRPVLAVVLVASLALFPVTLVPSGPSMWLAGMIFGYGWGFLIIMVGTTIGMVVPYWIGSLFRERLHAWLKRWPQQIALIKLAGEGNWFQQFRVVALFRISPFPYTIFNYAVTVTEIKFNPYLCGSIAGMIPEAFIYIYSGRLIRTLADMKYGNYKMTPVGITYNAISFVIAVVLTVAFTVYAKRALNDIKESEGILTEEYGISTGHKNPHQERSPSRPVPLDDVV

SEQ ID NO: 47754 - protein, 171 aa, Oryza sativa; identical to SEQ ID NO: 30521

SEQ ID NO: 47755 - protein, 366 aa, Oryza sativa; identical to SEQ ID NO: 47698

SEQ ID NO: 47756 - protein, 216 aa, Oryza sativa
MTPFEVAHGCTRWEIIANDAKDGSVFNTAMVEDSRVAMDIILKESCGVFQGISSLVDVGGGHGAAAAAIATAFPNIKCTVLDLPHIVAEAPTTHSNIQFVGGDFFEFIPAADVVLLKYILHAWQDDDCVKILRRCKEAILARDAGGKVIIIEVVVGIGPKEIVPKEMQILFDVFMMYVDGIEREEHEWKKIFLEAGFSDYKITPVLGARSIIEVYP

SEQ ID NO: 47757 - protein, 108 aa, Oryza sativa
MLMWIFVFSPAIGSTSFVGVAILELIRALVSSVINNLSTSLVITLQTWFLCACHQFKCRHTDSVQIWSCKINTDLDVLTSLNRLIPPFHHDNLFLMSKLLPPIQIHRR

SEQ ID NO: 47758 - protein, 450 aa, Oryza sativa
MAQWDALVDAALARLASRNLLRATRPIALAPPPAPPETFAGPGPWDRAAVEIQLDRATLHQWLAEGGEATGQEEEVDEKLILFSGNDYMGLSSHPAIRKAAVKAAQEYGMGPRGSALICGYTTYHKLVEESLAELKKKEDCLLCPTGFSANMAVMTALGSVSSILSVGRKPAEGERIAVFSDALNHASIIDGIRLVERQQEVVAFVYKHCDMHHLDFLLSSCSIEKKVVVTDSLFSMDGDFAPLPELVKLRRKYGFLLVIDDAHGTLVCGENGGGAPELFGCENDIDISVGTLSKAAGCQGGFIVCSNRWKRLIQSRGRSFIFSTALPVPVVASVYAALHVSKKERWRRSVIWRHVQYFASLTKLDLTSPIISIVVGSEEAALRAGRHMLRSGFHVTPIRPPTVPQNSCRLRITLSASHSLDDIKRLVDALSPWLPDKHDEQTYVMASKL

SEQ ID NO: 47759 - protein, 172 aa, Oryza sativa
MLRAAGKRLLGVGLRPAGGGAGEAAAAAAASAVAVVRRRGYHERVVDHYDNPRNVGTFDKDDPDVGTGLVGAPACGDVMKLQIRVDEESGRIVDACFKTFGCGSAIASSSVASEWVKGKQMEDAASIKNSEIAKHLSLPPVKLHCSMLAEDAIKAAVKDYEAKKAKLDKGNE

SEQ ID NO: 47760 - protein, 284 aa, Oryza sativa
MAAAMILSCRYLLICSATLALLLLRLCSGLSLDTVREFLTREEDTVVFGLIERAKHPRNTPAYDPGYLAGGGHGHDASFAEMFVRESEAVQAKAGRYQSLQEIPFFPFRVPFTLAPPYNFTTELYSAAALVNVNDAIWSMYFNELLPLLAKNGNDGNYAATVSSDLVCLQALSRRINYGRYVAEVKFIGDQQNYTTLIRNKDTDALMKLLTSEAQEDVVKRRVQKKAMVFGQNVTLDGPVETGNSNSSQTSFKVDPSLVYKLYDKWVIPLTKQVEVEYLLHRLD

SEQ ID NO: 47761 - protein, 450 aa, Oryza sativa
MSVSGGRTRVGRYELGRTLGEGTFAKVKFARNADSGENVAIKILDKDKVLKHKMIAQIKREISTMKLIRHPNVIRMHEVMASKTKIYIVMELVTGGELFDKIASRGRLKEDDARKYFPQLINAVDYCHSRGVYHRDLKPENLLLDASGTLKVSDFGLSALSQQVREDGLLHTTCGTPNYVAPEVINNKGYDGAKADLWSCGVILFVLMAGYLPFEDSNLMSLYKKIFKADFSCPSWFSTSAKKLIKKILDPNPSTRITIAELINNEWFKKGYQPPRFETADVNLDDINSIFNESGDQTQLVVERREERPSVMNAFELISTSQGLNLGTLFEKQSQGSVKRETRFASRLPANEILSKIEAAAGPMGFNVQKRNYKLKLQGENPGRKGQLAIATEVFEVTPSLYMVELRKSNGDTLEFHKFYHNISNGLKDVMWKPESSIIAGDEIQHRRSP

SEQ ID NO: 47762 - protein, 510 aa, Oryza sativa
MEPAASELMDVHKKLLLASLSCVLLIQVASSDGTAEGVGTTSWTCVCTAHPLGEPNSNSSLSSNCSSSCHCLQADDDGGTGSWNCTCASDKALKKEHTAVHDRGCFTSCNCTSGISQEGKKHVSNKTVIVTLLVCVILTTIAFLGTTAYYLRRKDALSPHSHAYSFDKYTSWSSRSNLVSHRSSPLPQPKPKPRISVLKEFLCSCNPICGNEGGPLPGVIVRFSYSELEQATGKFSDEHLIGVGGTSKVYRGQLSDAKVIAVKKLRPLGGADEDFEFLSEVELLSRLNHCHVVPLLGYCMESQGRQLERLLVFECMGNGNLRDCLDLKQGRKAMDWATRVGVALGAARGVEYLHEAAAPRILHRDIKSTNILLDDKFRAKITDLGMAKCLMNDGVTSCSSSPARMLGTFGYFAPEYAIVGKASLKSDVFSFGVVILELITGRQPIHHHRRRRRRGRAWSCGRRRGCATAGWWWRSCRTRRCRGGSRRRRCRSWRTWRGSACSGSPSRVPP

SEQ ID NO: 47763 - protein, 257 aa, Oryza sativa
MGRGKVELKRIENKISRQVTFAKRRNGLLKKAYELSLLCDAEVALIIFSGRGRLFEFSSSSCMYKTLERYRSCNYNSQDAAAPENEINYQEYLKLKTRVEFLQTTQRNILGEDLGPLSMKELEQLENQIEVSLKQIRSRKNQALLDQLFDLKSKEQQLQDLNKDLRKKLQETSAENVLHMSWQDGGGHSGSSTVLADQPHHHQGLLHPHPDQGDHSLQIGYHHPHAHHHQAYMDHLSNEAADMVAHHPNEHIPSGWI

SEQ ID NO: 47764 - protein, 179 aa, Oryza sativa
MRFLSTSQVKNLALYFEAHIAPRLPLFLPQYARIPLPVSPQITPRAPLSSLSPRPRSPNPNPPPPSPLLTPAAPLRRSPSPLGSRTIPKITSLCAHRRSPPFPRAPSLPPLRTPRPSPAPLPPSGRHHSLLQTWIFTPAPPLPRALIAVPLRHPLPLLLTAHHAASVIYGRLPYRPARC

SEQ ID NO: 47765 - protein, 315 aa, Oryza sativa
MAIAEVMHVCSDHDDDEGTDSGEDFDENEGLLSLESDSTDDVVDIDNELVISPTFSSCNASESSINKSDSGNSSINGTPPLVSAMKGSRAKLGIVTSLSVSWAPDVYDPPVTSGSHTVKGHQRSSRKSHYKYKPAKSSSSRSSSGSKKDRKHSRHSSSSSSSSNHKRDRKPSYRNTVGGVSVGSSSSSRNTDASAAQYRDLYSSSGGNRIDIAVPQYSKLSPLVPSESATYRNVYNSTSGSRTDPTVPHCSKLSPLVTSESASLAGTVPVLKTLEPIKRSSSCCKEQPLSFLSRQFVAAKYKGMFSLWSHNQLAS

SEQ ID NO: 47766 - protein, 426 aa, Oryza sativa
MSESALDKHIVVKIPDHFLPDAFIGESVGKGKEDGATVDNMDPSRPFLVIKKSDLDKAGEWVKIKYAWMAKSLTNDIIIPDPTPQVVRDAFFDISPRLDSVLRKDSVRCFFRLFAECTAAMAFKCNITSETLSCIVRHNALRCAKTVLEGKAPQLSCMHANPNCINPYGIFPLHGAAERFSVDMIKLLFCHGASANLHTVNDAGIPGLLPLHVAVGNTCLHKYLEDNLSPVQYHEDYIYKLIHLLCLPEMKVFLDTVRLLAEKTDNLADELWNYMKNDKLVESAVLLLAARKHIREGKPDGFDIIAQRIYEDYDSLVCDKGDTAEGQKLLEERRALLKCKCLIVTIISQAGEVLDNYIQAHSEVPNVEVLARVSYILKEFGFCPNEEYIDTMILYCSFCIQYNIFFLCKCLLFINYFLNLLLKLSI

SEQ ID NO: 47767 - protein, 282 aa, Oryza sativa
MATTTTTPSSSLTAPLLRPSSNANPAPRSLPLLRSRRCARAVATAAAAAGHGAAHQRSGIWSIRDDLVVPRSPYFPVEYASGQERGPSPMVMERFQSVVSQLFQHRIIRCGGPVEDDMANIIVAQLLYLDAIDPNKDIIMYVNSPGGSVTAGMAIFDTMKHIRPDVSTVCIGLAASMGAFLLSAGTKGKRYSLPNSRIMIHQPLGGAQGQETDLEIQANEMLHHKANLNGYLAYHTGQPLDKINVDTDRDYFMSAKEAKEYGLIDGVITNPLKALQPLPASS

SEQ ID NO: 47768 - protein, 200 aa, Oryza sativa
MASRLVARSRRGLALALSRAGAGAPSRPSPPGLGKTLGYEPTSHLHGAQFLPCWFSTIASNGSHMQKAQETCKPVAGMEHSDALKVMEGTSPKVVAFSPLEAAITKPRSSPLTIESSKVKRSEIATLVTFYMIPSLLVSSKNGLATSILVGAVFHQIYMFHKEIFLDYVHHDITRKWALIYFKLLLLIMAKETIVYFNFI

SEQ ID NO: 47769 - protein, 618 aa, Oryza sativa
MSHPSSSSSSAPPAAAEATSLAPGFRFHPTDEELVSYYLKRKVHGRPLKVDAIAEVDLYKVEPWDLPARSRLRSRDSQWYFFSRLDRKHANRARTNRATAGGYWKTTGKDREVRNGPTTVGMKKTLVFHAGRAPKGERTNWVMHEYRLDGQTTIPPQDSFVVCRIFQKAGPGPQNGAQYGAPFVEEEWEEDDEDVGLLPVEEKDNSDDQEKEISGAMEKGYLQMSDLVQNLVDQNENGTIALPVSDNSNNSNHSEDVDGNSGDILSDQNLGSNFLHHVEPVEQNGLVLNENMFSSANAGDLFNISSPNDGFLELKDFADIADLENPLANESTIWPSDGWPWKSTDSMEAVNGASNEFSPLAGEQIFQPEELEQLLQSLQEDSHMGSTISDPPHSSITNLAKPEEDCLMFYDAPFDSSMCDDGFRQLNGFLGSPSTNLSGIDMVDDGMPYYDAMDDNLFNDLLSSVQPSAGSSSHAFSGPVLTQEVNNSTYTYSPTQKVLEPNFVVGAPSSARLPEAGSQLNYVVLPGNITMEKYHRSIIISCSLVLIHHGKRAFSALFGPLIINLFFFAMRNCSLLYLLVLIEQDLSITRSFLWRHSYLAQSVQCYTQLACDFSLPGH

SEQ ID NO: 47770 - protein, 421 aa, Oryza sativa
MTLGSGGMAAEEGGGNGEAAARGERCVVVAVEETCCACAQLVVGPPNPMMARYVYAFVFLATNLLAWTLRDFGHPVLAELRRLRGSCQGAGYCLGAEGVLRVSLGCFLFFFVMFLSTVRTRKTHDRRNSWHSEWWPAKIVLWMGFTVVPFFLPSPLIQLYGKIAHFGAGAFLVIQLVSVTRFITWLNDCCRSETNLKRCHMQVQVVSIAAYVGSILGVVLMYVWYAPRPSCKLNILFITVTLVLVQIMTGVSLSSKVKAGYLAPGLMGVYIVFLCWTAIRSEPHTEICNKKAEVATSADWVNIASFVIAVIVIVTATFATGIDSKCLQFKKAESEQPEDDDIPYGFGFFHFVFAMGAMYFAMLFVGWNANQTMEKWTIDVGWASTWVRVVNEWLAAIVYIWMVIAPIVWKGGQVGSSPEGT

SEQ ID NO: 47771 - protein, 482 aa, Oryza sativa
MASIPPDDDAAAAAAAGAAENGYGNGKGNGNGPAPRPPPAKRPRSVISAAQIRAEFEHHEAGVARVNNGSFGCCPSSLLDAQARWQRLFIAQPDDFYFHALQPGLRRSRAAVAGLVNAGDVAEVSLVDNATTAAAIVLQHAAWSFAEGRFSRGDAVLMLHYAYGAVKKSIHAYVARAGATVVEVPLPFPVASADAIIAEFRAALDVAKAGGRKVRLAVIDHITSMPSVVIPVKELVAICREEGVDKVFIDAAHSIGQVPVDVRDIGADFYTSNLHKWFFCPPAVAFWHTRKDDPIASQLHHPVVSHEYGNGLPMESGWIGTRDYSAQLVVPESIDFVNRFEGGIEGIRSRNHEKVIEMGKMLAEAWGTFLGTPPELCGSMVMVGLPGCLGVESDDDVMRMRTMLRKDFMVEVPIYYNSRRVEAQEMSKDKNGDAVTGYVRISHQVYNVTEDYEKLRDAVNKLVADGFTSSKLRPSQKQETMA

SEQ ID NO: 47772 - protein, 250 aa, Oryza sativa
MENGLSDEVLKAVFPLLDGQDLVFCMLVCRQWREIAKDDYFWKCICARKWPSICKQPPSDANYQKLYLTFSKPRTPQHLPVPKLTFEDLVFYIDMWLDGSLIFSQAVSGCILRGGLQNTPCGIPDVLVAHLTAPDCILMMEVEPKLEITMGPSITVSVLAHRKDTKKMACVINKSTFDYIDSNAARALAYEYLQFSPRYPFISDIRAWMSLLFLYKGTNVIEVFGIELDFCDAARSETEILWLLDMLDWK

SEQ ID NO: 47773 - protein, 247 aa, Oryza sativa
MVLVVKQYRCTHSASCLCLKGHISEDALFLVFRHMNWNPRMIALFSCVSKWFDDIAKRVLWKEFCHARAPRMMQDLHSGGSHIVDGNWKALGKLLIHCAGCTKGGLFGNIHVPGHFVFRTRFSRTCGKSILPPQCRTDVLYVSDPCEHLDQGEEGDLGFFRGIFKSFASSKVKKMLIEKQAKFHPKEVCPYCKAKLWNLLQANMIPRSASIRLDAYDDSVEYYICLNGHILGLCTLMPVSDSEDAKE

SEQ ID NO: 47774 - protein, 785 aa, Oryza sativa
MEASSWLCYQARGFGSSRVWLWLLLALVLLNCSLVLSASPYLVGMGSFDITGPAADVNMMGYANTEQIASGIHFRLKSRAFIVAEPNGKRVVFVNIDACMASQIVTIKVLERLKARYGDLYNENNVAISGIHTHAGPGGYLQYVVYIVTSLGFVRQSFDVIVDGIEQSIVEAHNNLRPGKIFVNKGDLLDAGVNRSPSAYLNNPAEERSKYEYNVDKEMTLIKFVDDELGPVGSFNWFATHGTSMSRTNSLISGDNKGAAARFMEDWAEQMGLPKQSAHANSDDLRSLHKTSVLPRRVSTIIPEPNEITDDLIQLASSYEASGGRRLAGSSITRRIRSTQQNKPKFVSAFCQSNCGDVSPNVLGTFCIDTNLPCDFNHSTCNGKNELCYGRGPGYPDEFESTRVIGNRQFLKARDLFDSASEEIQGKIDYRHTYLDFSKLEVKVSTSAGGQQTVKTCPAAMGFAFAAGTTDGPGAFDFRQGDVKGNPFWKLVRNLLKTPGKDQVECHSPKPILLDTGEMKEPYDWAPAILPVQMITIGQLVILCVPGEFTTMAGRRLRDAVKTVLTSGNSEFDKNIHVVLAGLTNSYSQYITTFEEYQIQRYEGASTLYGPHTLSAYIQEFQKLAMAMIANKEVPTNFQPPDMLDKQIGLLPGVVFDSTPLGVKFGDVNSDVPGNSTFNKGSTVNATFYSACPRNDLLTDGTFALVEKLDGNNNWVPVYDDDDWSLRFKWSRPARLSSRSFATLEWTVPEDAAAGVYRLRHFGASKPMFGSVRHFTGTSRAFAVR

SEQ ID NO: 47775 - protein, 533 aa, Oryza sativa
MAVLEDLIRAIELWLRIAKEQVPLVDPTLDPVLLVPGIGGSILEAVDEAGKKERVWVRILAADHEFRAHLWSKFDASTGKTVSVDEKTNIVVPEDRYGLYAIDTLDPDMIIGDDSVCYYHDMIVQMIKWGYQEGKTLFGFGYDFRQSNRLSETLDRFSRKLESVYIASGEKKINLITHSMGGLLVKCFMSLHSDVFEKYIKSWIAIAAPFQGAPGYITTSLLNGMSFVEGWESRFFISKWSMQQLLLECPSIYELLANSTFQWEDTPYLQIWRQKLDTNGKKSAMLESYEPDEAIKMIREALSKHEIISDGMHIPLPLDMDILRWAKETQDVLCNAKLPKSVKFYNIYGTDYDTAHTVRYGSEHHPISNLSDLLYTQGNYICVDGDGSVPVESAKADGLDAVARVGVAADHRGIVCDRHVFRIIQHWLHAGEPDPFYDPLNDYVILPTAFEIEKYHEKHGDITSVREDWEIISHRDDESKRPAELPPMFNTLSASREGEDGSLEEAQATIFVHPESKGRQHVEVRAVGVTHDG

SEQ ID NO: 47776 - protein, 649 aa, Oryza sativa
MAPTKGEGPAIGIDLGTTYSCVGVWQHDRVEIIANDQGNRTTPSYVGFTDTERLIGDAAKNQVAMNPINTVFDAKRLIGRRFSDASVQSDIKMWPYKVIPGPGDKPMIVVQYKGEEKQFSAEEISSMVLIKMREIAEAYLGSTVKNAVVTVPAYFNDSQRQATKDAGVIAGLNVMRIINEPTAAAIAYGLDKKATSVGEKNVLIFDLGGGTFDVSLLTIEEGIFEVKATAGDTHLGGEDFDNRLVNHFVQEFKRKHKKDISGNPRALRRLRTSCERAKRTLSSTAQTTIEIDSLFEGVDFYSTITRARFEELNMDLFRKCMEPVEKCLRDAKMDKSTVHDVVLVGGSTRIPRVQQLLQDFFNGKELCKSINPDEAVAYGAAVQAAILSGEGNEKVQDLLLLDVTPLSLGLETAGGVMTVLIPRNTTIPTKKEQVFSTYSDNQPGVLIQVYEGERTRTRDNNLLGKFELSGIPPAPRGVPQITVCFDIDANGILNVSAEDKTTGQKNKITITNDKGRLSKEEIEKMVQDAEKYKSEDEEHKKKVDAKNSLENYAYNMRNTIQDEKIASKLPADDKKKIEDAVEQAIQWLDNNQLAEVEEFEDKMKELEGLCNPIIAKMYQGAGADMGGGMDDDAPAAGGSGAGPKIEEVD

SEQ ID NO: 47777 - protein, 276 aa, Oryza sativa
MAMGDFLPASTAAAFFVLLLGVNGAAAVNFTFHFHNNCPETVWPAALSSAGRPPFPTTGFALPPGASLSVAGVTATWSGRVWGRHRCATGGGRFSCESGDCGTGQVACNGAGGAPPATLAEFTLGGGGGGAGALSDFYDVSNVDGFNLPVEVRPELLERRQEGAAAALCRTTACPADINRVCPSELAVRAADRGGAAAAAVVACKSACLAFGTDEQCCRGRFASPDKCAPSEYSRLFKAQCPQAYSYAFDDRSSTFTCANATGYRITFCPAAAAKN

SEQ ID NO: 47778 - protein, 454 aa, Oryza sativa
MATSTRALLLLPLLLLFLLSRSLSLRADPGAAVSRIAFGSCANQSAPQPVWEAVVGFDPQVFIWLGDNVYGDNKRPFRVFGRERTVGPWRNVPRFYPSTEAELRRRYEMAKAKPGYAKLRERAQVIGTWDDHDYGLNDAGKEFGGKVTSQRLLLDFLDEAEDSSRRQQAGVYASYMFGPEGKRVKVILLDTRYHRDPLSSDGAVLGDPQWQWLERELHGPRSEITIIGSSIQVISNLSATTGPLFYVESWARFPRERERLFRLIDSSKRNGVFFISGDVHFGEISRYDCGAQYPLYDITSSGLTQSVENSVPSVFQPLMRLVALLTPTTLRVFSPNCRYKSCTYGQPNFGAIEIDWNAVPPQIKLELRDVEGNSVGGVEFPISELDPSKAHAITKQGHSYQRHCALETELPWLVWHRLALLLFGTIAVLVIAVVLLGITCLSAANIFTKKSKME

SEQ ID NO: 47779 - protein, 335 aa, Oryza sativa
MESMDHGGGGAGLLAVAAAPAPAAVLTTMHGRELSHSSCSFSSAAASLSSPSSSTSSRSYHAAMSGKSLSCESIPEIMDKQSSFSSSASSYESFIQLEAADLDRITAAAAATRAPAVQTMMASHEQQQLAVAGGSGGYDPKRLPSSIFRTGSTSSGGGGGGGDWSVASNDSLFSINLRHSGDLSARYNSSNHSSSGDLFYDASGGGFHRIPSSTSAAAAAAAAGGGGGGGGLCVSGSCARCTTIAAGKNRKSVRFAPDAEIVSGEITNPSAVFPTEAAAPATEGKEAAKSPDAAAQGGWCLFRCCWPSPPSVWWPRCGCGGGCGVFCCGGENCRC

SEQ ID NO: 47780 - protein, 75 aa, Oryza sativa
MWCKRLDQRWTIPISPPRGSSGESQYSDRHRVPLPAVTPGLRRRRANPAAPLPNPGPTLQAGGHRQFATAIWLLP

SEQ ID NO: 47781 - protein, 518 aa, Oryza sativa
MVVLAASIISKSGKALVSRQFVDMSRIRIDGLLAAFPKLVGSGKQHTYVETENVRYVYQPIEALYLLLITNKQSNILEDLDTLRLLSKLIPEYAPSLDEEGVCKAAFELLFAFIEAISLGNKENVTVAQVKQYCEMESHEEKLHKLVMQSKINETKDVMRRKVTEIEKSKTDRGKPDKGGFGSLRTPNSFSDMGIRGGGPGGDPIFGDMDSFTHKAKGRPSAPAPASASTKVPGGMKLSKAQKTNQFLESLKAEGEVILEDTQPSATQSRSSYIPPSDPITVTIEEKLNVTVKRDGGVSNFDIQGTLALQILNDTDGFIQLQIENQDVPGLNFKTHPNINKELFNSQQIVGAKDPNRPFPSGQNETPLVKWRIQELNESSLPLAVNCWPSVSGNETYVNIEYEASEMFDLHNVVISIPLPALREAPGVRQIDGEWRYDSRNSVLEWSIILVDQSNRSGSLEFTVPAADPSTFFPISVGFSASNTFSDLKVTAIRPLREGSPPKFSQRNRLVTYNYQVV

SEQ ID NO: 47782 - protein, 513 aa, Oryza sativa
MGVEADHGTPCIRTILRCSIRMSYRYASENWVLLFPVLLLYLLFRSSPGFFAFLLSHSPVIICAALILGVLISHGSTNVAEIKEERKSVAEVSDPKYADLSRNIHLEANKGFSAKENTASLNDGEIKDGLNSSREDAIEVVEMVGKISHDRGSTDSQSDEMKVDSEDKPAGTCKWGRAFSVRRRKKLSDIKVEPINAAVDSPLDSSLDSPFGRVGCHDGSPGFDHDQTEGTTPGTPRTRIASVLDEIDPLSSADSPHPDPIQNDDSDNHMSLQDSRTVRDNNYESDKSKANKNDDKNVSTDPAFLGTVDDDKNVMDLGYSEVERHRRLEILMVKRRSRKNIVFDPDSNLDIDNDKVCKRNPSDILSCSDETEFPGSAPSVLHTWRNPFDHPFEQSDESDLHEHVAIPHQDMFFTRHESFSIGSQGRRPSRFKPPFIIEAMDIDEPSASDFQRQFSDKSASTLSTVTESDIISSVADQEDISNNIKNDSSREYESPELPTIPTMGSDIICVGGT

SEQ ID NO: 47783 - protein, 308 aa, Oryza sativa
MLRQCKFVLNFAWFNHLYKGKAEVPFLSEFGETEKLQQKLLLDFTRGVSEFLGVLAVTEENYLQDPESMSSISLFRFILTGDCFDWLDMSLFGYFVDDEATSKAIPFLRSLIHLATTDDMSLRLFIVDDLLPSIVRRLDNQLTCAIQCQRHKLNPGAADSAGKDLVVLCQQLYNYFQIQEFSREGKDNCSAECSFSVWIGKLKKDLELKASSASKELPEGCEWNWEFEEEFQRYLHVYMDILQEVNAMDDCMERDYLDKETLFQKLKFEFRYKHAINSYQHPYMVTIFFSPTTTILHKDLLQMQHADM

SEQ ID NO: 47784 - protein, 459 aa, Oryza sativa
MGIGNGSPSDSRHVSHKEIRDETTPLLPIKEEEEGIHEFNGASFSGAVFNLSTTIVGAGIMALPASIKMLGIIPGILMIILVALLTEASIDMLVRCSHEGKITSYGWLMGETFGQWGRIALQASVVINNIGMMIVYMIIVGDVLSGTSTSGVHHRGIFEGWFGPHLWNSRPVVLLATTLFVFGPLVSFKRLDSLRYTSALSVALAVVFVVITAGIAIVRLIEGTVEIPKLFPELDGTNSIWELFTAVPVVVTAYICHYNVHSIDNELEDRTQTKPIVQTSLALCSSVYIATSFFAYLLFGEGTLADVLANFDSNLHIPFSSVFNDVVRVSYVVHIMLVFPIVFFALRLNLDGLLFPTARHISRDNRRFAIITGSLLAVIYLAAIFIPSIWDAFQFTGATAAVLIGFIFPAMIILRDPYGIATKRDKILALTMIVLAVLSNSVALYSDALNIIFHRKVEA

SEQ ID NO: 47785 - protein, 198 aa, Oryza sativa
MASALLRKATVGGSAAAAAARWASRGLASVGSGSDIVSAAPGVSLQKARSWDEGVATNFSTTPLKDIFHGKKVVIFGLPGAYTGVCSQAHVPSYKNNIDKLKTKGVDSVICVSVNDPYALNGWAEKLQAKDAIEFYGDFDGSFHKSLDLEVDLSAALLGRRSHRWSAFVDDGKIKAFNVEVAPSDFKVSGAEVILDQI

SEQ ID NO: 47786 - protein, 608 aa, Oryza sativa
MFDMMLAWEHPGAVVEDELSENHSALRTTVDIEDDDEGSIFYANSTRLAVQVNDKKTVGLGAFARIAPSCPIIADLVTVHNLFDALTCSSGGRLHFFVFDKYIKSLDKVFRSVKGILQSPLASSFHLDAGECILAMDGDRPIHPVFQHIGISAWPGRLILTTHALYFQSIKVGYGDKIVKYDLATDSDQVIKRDFTGPLGVRLFDKAVMYKSSTLTEPIYFDFPELGGPSRRDYWLAIAREVLQVNKFIRKFNLENVQRAEALSKAILGILRYSAVKEAFHISPSHFKTTLTFSLAEKLPKGDMVLKALYANYFQLLDTSLSHLVTESPVDNRLQNHSLPFSLYALSRMGFILLKRKDEAQSEISFCAVCFGVTKSLEAALEESICYSERIDAARATIDQVKVEGVDANLALMQELLFPFTQVVKLTYSLTKWEDPLKSFLFLAFTLYVIQRGFIAYMLPSFFLAFAVVMLWHKYNGREQLLGVLEVRTPPSKNPVEQILTLQDAISKLEETLQSVNIVLLKFRAVLFAAVPKTTEMVAVAFLAASAFLIFVPWRHLLLIAVLEVYTREMPLRKQNTEKFRRRIREWWARIPAAPVQMIKPNESKKKR

SEQ ID NO: 47787 - protein, 286 aa, Oryza sativa
MRALLRAASVLRRAAAPALGGGRAAPLPPKNLPAVCLNGYSTLLAPANEVLIPQELLSSKTVWTPDRELGQYEDLVARVTNFHNEDKGFMVLDGDVFDVPIRKDIVHRVVRWQLAKRQQGTHSTKTISEVSGTGRKPYNQKGTGRARHGTLRGPQFRGGATMHGPKPRSHAIKLQKKVRRLGLKIALSARTAEGKLLVFDDLEVPSHKTKNIVQYIGQMEGTKKVLLVDGGDIDKKLKLATQNLHYVNVLPSIGLNVYSILQHDTLEMTRNAINRIVERMHTPISR

SEQ ID NO: 47788 - protein, 408 aa, Oryza sativa
MYKSSSTREPVFFEFPQFKGHARRDYWFAIIKEVLHAHKFIRKYRMINLHKAEALSVATLGILRYRTVKEGFHILPAHFKTTLAFNLAEKLHKGDKILEALYGQMKDYSSRFRVDEDSVQSSSDDLTLADPFPLSAYTLVNMGLLTLKEEDNPEEWDLTVRDVQTGGTSSVQMALERSVGYSGRVEAARATLDQVKVEDIDTNVAVLKELLFPLIEIGKRLLFLAEWEDPLKSYVFLFCFLFIVYRGWIWYIFPVFLLGSTIFMLWQRHTGNGQMIGAFEVTTPPRRRTVEQLLALQQAISQLEAQVQAGNIFLLKLRSLLLAAFPQSTNKVAATMLVASAIFAYLPLRSILVLIVLEAYTRHMPARKKSSEKLVRRLREWWLRIPAAPVQLLRPQDTRRWTSRLRSR

SEQ ID NO: 47789 - protein, 118 aa, Oryza sativa; identical to SEQ ID NO: 28938

SEQ ID NO: 47790 - protein, 249 aa, Oryza sativa
MPQVDLESLVCGVAGAGAGDRKVSCETVIAAGESGDASPPRMPPPPPPPDPDFPPESITIPIGDEVAFSELNPIYDRDDSTKGSTNPKSAAGASSNPIPAKSRSNSTRIAGAPAAATTFFGLPASIRPAFTRRRPSQGRRWWRGLVAVLLCGGGCSCQGGGRRHARKKVALDEDHHDGDDDKQAGIAAMRRFKSGRRTASWVEEAIAAAEAAGEEEQQQENDAAADDDEKKQEVERYEPTTLNSGPHDR

SEQ ID NO: 47791 - protein, 260 aa, Oryza sativa; identical to SEQ ID NO: 29589

SEQ ID NO: 47792 - protein, 456 aa, Oryza sativa
MAASSLLRSLSRISRRGCVGGAGPSPFHHSRLPYSPFSTAAADAVERRGFAGLGPTAKGEKARVVVLGTGWAGSRLMKDIDTTGYEVVCVSPRNHMVFTPLLASTCVGTLEFRSVAEPLARIQPAVSKSPGSYFLLARCTAVDPDAHTIDCETVTEGEKDTLKPWKFKVAYDKLVFACGAEASTFGIRGVTDHAIFLREVHHAQEIRRKLLLNLMLSDVPGISEEEKRRLLHCVVVGGGPTGVEFSGELSDFIIRDVKQRYSHVKDYIHVTLIEANEILSSFDVRLRQYATNQLTKSGVRLVRGIVKDVQPNKLILDNGEEVPYGLLVWSTGVGPSSFVKSLPFPKSPGGRIGVDEWLRVPSARDVFAIGDCSGFLESTGKDVLPALAQVAERQGKYLAHLLNHVMKAGGGHANCEIDVDLGPAFVYKHLGSMATVGRYKALVDLRQSKAGYCFCL

SEQ ID NO: 47793 - protein, 414 aa, Oryza sativa
MQPASPVSGDAGPVAEAVPPRGAPQVLVRRRSVPFSPDSPLAPGSRGGGERRSTFREDVSHAAAETYLVTRLAFILLRYLGVGYRWISQLAALIIYAILLMPGFIRVGYYYFFSRQVLRSVIYGDQPRNRLDLYIPRDPKKPSPVVAFVTGGAWIIGYKAWGALLGRRLAERGIIVACIDYRNFPQGTISDMVSDASDGISFVCETVGAYGGDPNQIYLMGQSAGAHIAACALLEQAAKESRGEQISWSVTQIKAYFGLSGGYNIENLVDHFHERGLYRSIFLSIMEGKKSLPHFSPETVAKKLCPETIALLPQIVLLHGTDDYSIPFSASETFAGVLKQAGAKAKLLLYEGKTHTDVFLQDPLRGGRDKLVEDVISVIHADDADAREKDALAPIPGRLVSEWQIKLAHRISPF

SEQ ID NO: 47794 - protein, 587 aa, Oryza sativa
MASMDEPLYPIAILIDELKNEDIQLRLNSIRRLSTIARALGEERTRKELIPFLSENNDDEDEVLLAMAEELGVFIPYVGGVEHAHVLLPPLETLCTVEETCVRDKAVESLCRIGAQMKESDIVDWFVPVVKRLAAGEWFTARVSSCGLFHIAYPSAPDQLKAELRTIYGQLCQDDMPMVRRAAASNLGKFAATVEQNYLKTEVMSIFDDLTQDDQDSVRLLAVEGCAALGKLLEPQDCVAHILPVIVNFSQDKSWRVRYMVANQLYELCEAVGPEHSREQLVPAYVRLLRDNEAEVRIAAAGKVTKFCRILSPQLAIQHILPCVKELSSDSSQHVRSALASVIMGMAPVLGKEATIEQLLPIFLSLLKDEFPDVRLNIISKLDQVNQVIGIDLLSQSLLPAIVELAEDRHWRVRLAIIEYIPLLASQLGVGFFDDKLGALCMQWLEDKVFSIRDAAANNLKRLAEEFGPEWAMQHIIPQVLEKINNPHYLYRMTILQAISLLAPVMGAEITCQQLLPVVINSSKDRVPNIKFNVAKVLQALIPILDQSVVEKNVKPCLVELSEDPDVDVRYYANQALQACDQIMMSS

SEQ ID NO: 47795 - protein, 395 aa, Oryza sativa
MTCRRQRRRRRTSPAAPAPPPVLPPDNDDLIQEILLRLPSHPSSLPRASLVCKQWGRLVSDPAFLRRFRARHRDPPLLGVFKDELHHPVFRSVLDPPDLIPPDRFALRLDDYRAASLLGCRHGLVLIFNYNTCEFLVWDPVSGDRRRVAVPQELDGGERSVMNGAVLCAAGDDGHVHGGGFRSCHFKVVLIGASKMDGRIFASIYSSVTGEWGDAIFTGPVSTIYYFGSPAILVGNSLYWLLSVWGPHILEFNLETSTLAVIDGNWPQMNFSSDCHYCIMRGEDGNVGLAILSYRGFQMWERKVTLGGAAKWVLWKTVKLHDILGLSSAVQREKTDIVGYSEDPNAFILVVDTDFYMFRVDSMQSKKLFDCNVVTRCHPFTSFYTAAMEAIGPDE

SEQ ID NO: 47796 - protein, 160 aa, Oryza sativa
MSISPRFLAVAAVLAGAMYSAATVAADTPGGSCPYPCLPPPIAGGAVNSYPPPPPAGSSSSSSSGGGDGGAGGLFGGTYPPPPPGVMPGAFAPPFGGGFPYGPAPPPPNPILPWFPWYYQHNNPITGSTTSAAAVGRTPASMVTTVVLLPLFLVALLRVL

SEQ ID NO: 47797 - protein, 542 aa, Oryza sativa
MVGPGHRNSHGKRHSDYAENGGGKRRNPGDDTYAPGPDDTVYRYLCPSRKIGSIIGRGGEIAKQMRADTQAKIRIGESVSGCDERVITIFSSSRETNTLVDAEDKVCPAQDALFRVHEKLSIDDDIGNEESDEGLAQVTVRLLVPSDQIGCIIGKGGHIIQGIRSDTGAHIRVLSNENLPACAISGDELLQISGDSTVVRKALLQVSSRLHDNPSRSQHLLASSMTQPYPVGSHLGSSSTAPVVGITPLISSYGGYKGDVAGDWPSIYQPRREESSAKEFSLRLLCAASNVGGVIGKGGGIIKQIRQESGAFIKVDSSNTEDDCIITVSAKEFFEDPVSPTINAAVHLQPRCSEKTDPESAIPSYTTRLLVSTSRIGCLIGKGGSIITEIRRTSRANIRILSKDNVPKVAAEDEEMVQISGDLDVVRHALLQITTRLKANFFEREGALSGFPPVIPYHPLPVGVSEGPKYLGRDTKPLGHDYPYSSGYRGSDDIGPIDSYASYGSSQVSGGGYGAYGGYSGRSGSSGLSGPSSFSYGKRHGY

SEQ ID NO: 47798 - protein, 341 aa, Oryza sativa
MAATALHLPPLLLARRLRFSSAAASTSTSRRTTRLSAQLDDTAAASTSTSTSDKPAAASSFAPPPDFKPPEPKTFEVKPGQSDDIVTASLAIPFRLGTGVFALGYSVSLVSPDEVAPDEYALDFQGRKVKESSKIGQCPRPEKPIEIYEFEGCPFCRKVREMVAVLDLDVLFYPCPKNGPTFRPKVLEMGGKQQFPYMVDPNTGVAMYESDAIIKYLADKYGDGTVPIMLSLGILTTITAGLAMSGRSGKGSKYTPAKLPPEPIELWAYEGSPFCKIVRETLVELELPHLLHSCARGSPRRQEFLKKYGIFQAPYIEDPNTGVKMFESADIIDYLRATYAA

SEQ ID NO: 47799 - protein, 308 aa, Oryza sativa
MAEAVASGAAGRWTLRGKTALVTGGTRGIGYSPQHPSLVLPYRYPVRSETSTAEPLLLFHDQRGEFMRRHAVVDELAALGAAVHTCSRKEAELGERLREWEGKGFRVTGSVCDVSVRGQRERMLREVAGLYGGKLDILVNNVGTNFSKQTTEYSADDYSFIMATNLESAYHLCQLAHPLLKSSGSGSVVFISSVSGVVAVSSGSVYAMTKGAMNQLAKNLACEWAKDNIRTNSVAPWYMKTSLVEDELARKDFADSVVRRTALKRVGEPEEVSSLVAFLCMPGASYITGQTISVDGGMTINGLYPTQD

SEQ ID NO: 47800 - protein, 62 aa, Oryza sativa
MLKPMEMKKVPLRMMGASAMKLLPPKAWSTWMELVLIIILQKYRVQLRGSVHLAMLIWTHKR

SEQ ID NO: 47801 - protein, 400 aa, Oryza sativa
MLDINLFRTEKGGDPELIRRSQRNRSASVELVDEVIALDDQWRQRQFELDKIRQELNKTSKEIGKLKAKKEDASALIQSTEEIKKRLAAKETEVQEAKGTLDAKLVTIGNIVHESVPVSDDEANNLIVRTWGERRLEGNLKNHVDLCKMLDIVALEKGADVAGGRGYYLKDEGVLLNLALINFGLAFLRKRGFKPMQTPFFMRKETMGKCAQLAQFDEELYKLTGDGEEKYLIATSEQPLCAYHLGDRIYPAELPIRYAGYSTCFRKEAGSHGRDTAGIFRVHQFEKIEQFCVTSPNDNESWEMHEEMIKNSEDFYKEIGLPYQLVSIVSGALNDAAAKKYDLEAWFPASKTYRELVSCSNCTDFQARRLGIGYGQKKVSFHLDAGRSNYLKSHLLLPLI

SEQ ID NO: 47802 - protein, 319 aa, Oryza sativa
MESAEVAASSTFGPTPEMEKFLCDLLLDTAQPIAERFRALFSLRNLHGDGPRCALLQAARDSSNLLAHEAAFALGQMQDAEAIPALEAVLKDLSLHPIVRHEAAEALGAIGLEKSIPLLEESLAADPAVEVQETCELALRRIEQQKNAGVSESTTISPFLSVDPALPAKQGLSVHQLREILLNEQESMYERYAALFALRNDSRDAAVSAIVAALGAKSALLKHEVAYVLGQLQNKAASDALSTVLKNVDEHPMVRHEAAEALGSIADQESIALLEEFAKDPEPMVSQSCEVALSMLEYERSGKSFEFLFLQTPGVQQES

SEQ ID NO: 47803 - protein, 134 aa, Oryza sativa
MGRIPSIPSAHPLPPRNPSSAYCADLRHRISERVGCSLRSGLFHSVLNWECECAGQGCWDFTSGRDYRDCPSYVSAVVFLYKAVDLVEGYELLQIIVDSDLYWCDMCPHVFNLCSTCFLMLGLFIQSGILLMFF

SEQ ID NO: 47804 - protein, 102 aa, Oryza sativa
MPLCFIYISKCLLVLMLLATWLTTYKDYLAHNETELALFFFLKKLNGLDLFSYTLIYSINCIFKYTLILVSRLDTCLLKVSGLDTCSLKDFILQNSGSISAP

SEQ ID NO: 47805 - protein, 432 aa, Oryza sativa
MEKAIDRQRVLLAHLLPSSSSDQSLLSASACAAGDSAAYQRTSAYGDDVVVVAAYRTPICKAKRGGFKDTYPEDLLTVVLKAVLDNTKINPGEIGDIVVGTVLGPGSQRAIECRAAAFYAGVPENVPVRTVNRQCSSGLQAVADVAAAIKAGFYDIGIGAGLESMSVNAMGWEGQVNPKVNEVQKAQDCLLPMGITSENVAHRYGVTRQEQDQAAAESHRRAAAATAAGKFKDEIVPVPTKIVDPKTGEEKKVVISVDDGIRPGTTASGLAKLKPVFRKDGTTTAGNSSQVSDGAGAVLLMRRDVAMKKGLPILGVFRSFAAVGVDPAVMGVGPAVAIPAAVKSAGLQIEDIDLFELNEAFASQFVYCCNKLGLDRSKVNVNGGAIALGHPLGATGARCVATLLNEMKRRGRDCRFGVVTMCIGSGMGAAAV

SEQ ID NO: 47806 - protein, 302 aa, Oryza sativa
MSMSYDGDQSEDRQSEEVQSAYKSHGGGVLRGYFNLDRSEEQNEENEWSWIPQDGDPLAESMSSLQTTQEALENEMQKLSDLSKELGADNFSSDNRANNAFVSPDEDDVLETNQKMSHLEQKLEEASNTIREKNSVLSQLQELIDGMHIATPAERAFDIDQLETDLDRQLQEKIEAEIQSLVMLKARQSWQVRTEDQLALKEHKLSSSGGDNGDGDCDSDNARMMMMVKLRETESKIVKLKEQVEKLEVHERELFGTTQVLRMQSRTLKICLFGLLQLVLLFLSLKAFFAQVSDPFDDVVPT

SEQ ID NO: 47807 - protein, 56 aa, Oryza sativa
MLHEKEFKHLLGESVELLCWGFSFVIDLPGGAQCPGVSHSRRLGMRRSLGVSIMIC

SEQ ID NO: 47808 - protein, 519 aa, Oryza sativa
MTYFVISRNLVTFLTTVLHESKVDAARNVSAWVGACFLTPVVGAFLADTYWGRYWTIVVFLPVYITGMLIVTVSASLPMFLTSSEHGNVHRSVVYLGLYLAALGSGAMKPCTSSFGADQFDSTDLEELPKKASFFSWSFYMTTVSTLLSSTVLVWLQDNVGWGVGCAIPTVFMIISFPVFIAGSRVYRFRNLGFSPLKSLCQVIVAAVRKCHLQLPENKSLLYEPSNSSSTTEASHKIQPTNQFRFLDKAAIVLPPSDETCIKPMSSWSLCTVTQVEELKMLLRMFPTWASFVIFFAVNGQMSSTFIEQGMAMDNHVGSFAIPPASLTIIAVLSVLVLVPVYEIVSVPLVKHFTGQDKGFSHAQRIGIGLSLSMIMMVYAALLEMKRLAIVQSSGLADHNVAAPMSILWQTPAYFLQGVSEIFSCIGMSQFFYDQAPDSMKSVCAALGQLAIASGAYFNTFVLGAVAVITTSSGAPGWIPDNLNEGHLDYFFWMMATLSLLNLAMFVYSSTRHRENTAS

SEQ ID NO: 47809 - protein, 290 aa, Oryza sativa; identical to SEQ ID NO: 29707

SEQ ID NO: 47810 - protein, 269 aa, Oryza sativa
MLSGRAVTLHHRSDSGERLVGNVVPDEAESGEEAEASSKVLYRASFQELMPNYLQYDTIIWAVISLLLVLAWGVGLLMLLYLPYKRYVLKKDIFSRKLYVTENKIVYKASRPSYIPFMGIVKKEIEVPLQLVVDVIIEQGCLQSVYSLYTFKVESIASGKPAPLDELQFHGVHNPDLLKTVIIREASKRIQEHQSWKYRIYSGEGPSDVTPIDRLDSPNAKVTASSRHNFQESKGRIPKSDSILLHKLEEVCQSVKNLESLLLGSHSRA

SEQ ID NO: 47811 - protein, 371 aa, Oryza sativa
MASEVEDDAAAVLTNGGAGAAEVRRRRDQAKEILSKQAVKIATKAEEHERFIFKVTHLLGVLGFGTFCYLLGARPQDVPYVYCLFYVIFVPLRWIYYRYKKWHYYLLDFCYYANTFLLVMILFYPKDEKLFMVCFSFAEGPLAWALIVWRCSLVFSSFDKLVSVLIHLLPGIVIFTIRWWNPQTFAAMHPEGRAARVTWPYVEDKSYLWTWLFAVPLAAYTLWQLMYFLIVNVLRRQRLLKDPEVMTSYRELSKKAQKANNIWWRLSGLLGDRNRPLMYILLQALFTVATMALTVPIFLSFQMHVVFQILKVCASTWNGGSFILEVMPRQVVQKEKKKLEMKPMEEANSSQNAEESQGDLSANGQHSSEHS

SEQ ID NO: 47812 - protein, 200 aa, Oryza sativa
MIRPWLSSMAFPSLPSSSIIILTADGSPNVAMRSSSVTLMCGNSGTASVAGYPSSSTSPGSITAHRPWRFLSSRITCANAEMPKKDILGTPSTAADSLTQYRNASATMKLARGHMAATAASNCGRSSDTASVKVTNAAMDASPSALSTPGGIVGNKPYTMYLVVASFTFLSVAACMLVFLLLHARAPGCGCRARSGCQRD

SEQ ID NO: 47813 - protein, 473 aa, Oryza sativa
MAVALEAGRRKRAAVVVLGDIGRSPRMQYHSLSLANQAGMEVDIVANGGSDPHLLLRENPSIHIHEMKSVQLTGILKISGALTLLLKAAIQFIILIWYLCFKIPRPDVFIVQNPPSVPTLAAVKLASWLRGAKFIVDWHNFGYTLLGLSHGRSHIIVKIYFWFEKHFGRMADGAFCVTKAMKHELDQKWGINATVLYDQSPEFFHPASLTEKHELFSRLGNSICSAMGNDDCISVEKEVEDRNTTVFTSWVDGEIFLKPNRPALVVSSTSWTPDEDFSILLEAALMYDRRVAATLGEDDSMDEGKLWIDIKNGKQFVYPRLLFIITGKGPDRMKYEEQIKRLKLRRVAFRTMWLASEDYPLLLGSADLGVSLHTSSSGLDLPMKVVDMFGCGLPVCAASFSCIDELVKINNNGLLFSTSSELADELMMLFKGFPEECDDLKSLKVGALNTGSSSKWSTEWERYALPLVNQVIG

SEQ ID NO: 47814 - protein, 172 aa, Oryza sativa
MGQAWASLQDKLQGRQWKEKQVRKITDKVFDRLTEDTKKREQEALTFEEVYIAVLCVYNDINKYLPGPHYDPPSKEKLKAMMNEYDINLDGLLDREEFAEFIRKLTAESLCAISFKLLVTLVAAPALALATKRATEGVPGVGRVVRKVPNSIYASVITLGVVMAQKSTEGVE

SEQ ID NO: 47815 - protein, 182 aa, Oryza sativa
MVRQLDVCGADGVPSREQLAKLKTLGMILNETLRLYPPAVATVRRAKADVELGGYLRIPRDTELLIPIMAVHHDARLWGPDAAQFNPARFAGGVARAARHPAAFIPFGLGARMCIGQNLAILEAKLTVAVILHRFEFRLSARYVHAPTVLMLLHPQYGAPIVFRPRSSSQPTCEKMNPLTSS

SEQ ID NO: 47816 - protein, 208 aa, Oryza sativa; identical to SEQ ID NO: 30222

SEQ ID NO: 47817 - protein, 232 aa, Oryza sativa
MEGSTSQDHVIGIPVSNTAYGIEEPDFAAEETTTPDHAGFVVGSFQFNNDANSPTTTTTTTDRASKYGRKGDKIAQGIKEHVTLGPKLSETVKGKLTLGARILQAGGVEKVFRQWFSVDKNEKLLRASQCYLSTTAGPIAGMLFVSTERVAFRSDRPLAVSAPGGDKVRVPYKVTIPLRKVKAAKPSENKHKPEQKYIEVVTNDGFEFWFMGFVSYHRSLHHLEQAVAQARR

SEQ ID NO: 47818 - protein, 520 aa, Oryza sativa
MATAADQNPNDAEHREAAAGANAAAEEYEEEDEEEEEVELDGPAAVAAEREKVQAVFKRLSSDPVGIRVHDVIIKGNAKTKEELIEAEVAELLRAAPTVQDLLRNASIASARLRQLDVFDSVNITLDAGPPELPGTTNVVVEVVEAANPITGSAGVYSKPEARSWSLEGSVKLKNLFGYGDIWDASGAYSWDQTSEVGIGVSLPRFKSISTPLMARASLSSQDWLKFSSYKERLLGLSFGLISTMQHDLSYNLTWRTLTDPSQVSSKSIRRQLGHNLLSALKYTYKIDQRNSHLRPTKGYAFLSTSQVGGLWDSKGLRFFRQEFDVRGAVPLGFYNSALNVGLGVGAILPLGRGFMNLSSSVPDRFYLGGHSSPVCSLSGLSSLLGFRTRGIGPTEPRRLVPSESEDGSAASPGRDYLGGDLAVSAFADLSFDLPLKIFRDAGIHGHAFLTAGNLAKLSEGEYKKFSLSEFGRTFKSSAGVGIILPTKLFRVEVNYCYILKQAEHDSGRTGIQFSFSSPL

SEQ ID NO: 47819 - protein, 355 aa, Oryza sativa
MKRHQMESVPRTVSTVVPNTAEATHVFDIVGYSQMKGRGREEHVTSGTFVVGGLHWAILLFPDTHVILLDDEEDNVTAFLELQSQGGSKVRACCDVRLVDQTTGLASSAAPAQPDAKTFKVFNADESNRVSCLKMKRTEFEAPPYLVDDRITLECVVTVKKEPRVSRARPVPRIKVPPSNMMQQLGDLLESKEGADVVFDVAGETFPAHKLVLAMRSPVFKAELCGPMRESGTEPISIVDMQPVVFKALLQFIYTDWLPSIRDLEGDDNSEMIRHLLVAADRYAVDRLKLLCQSILCKNLRVGNVATTLALADQHHCGMLKDACIEFMSCPNMLDDVVASQGFVDLENTAPSLVA

SEQ ID NO: 47820 - protein, 563 aa, Oryza sativa
MGSQNRPPPPRKRQPPPPEDHLVTYKRRRSKETQPLPLMANGANSKKDAKAQHWISWRDTLHGFLQSPAISQGGGIQTCIRHALQHNPCLLTNGVVVHTEFKGNPAHSQGEEAKVQHPNGAAGGKVVSADAAIQDAAAAASSEANKAMCNNALFVILVSQKFALLCHLLLGTFHVNKPGDVIDLEKIDAKMRNGDYAHNPALFDDDIQQMWEKFEQVGQEMTGLASNLSTISRVSYQKQASGFSEAEVAEHRIEEISLPGAVHVVTKESTTTVQLAPCDSSHSTIPKRTVPPGRDLCPCDGCGTKVDVEEGLICDECDTMYHFACVKLLNPDIKQVPAIWHCSTCSFKKKELAADTTNNVAHDCLHGGNCVLCDQLELVKTEEEDPKLPIKIELAEEREGSSVSSMGEDNEPDLSTTALSNLCKHCGTCEDDDKRFMVCGHPYCVYKFYHIRCLKTSQLAIEQQKKLGCWYCPSCLCRGCFQDKDDDQIVMCDGCDEGYHIYCMRPARNTIPKGKWYCTFCKIRRAAEGMHKYEDSVLKIHGNSKHACNVNQSKDSEGDGTGK

SEQ ID NO: 47821 - protein, 272 aa, Oryza sativa
MQAALLLPARPSAAAPPTLLRRGAASASSARAPTPLPAGRLSGGVLSAVRRLTVAAAGSSSSSSGPLYPTPPPTEQDIERAKFEQVVKRLGKTARYFKNLGTLGFWSQLVSTVVSAGILSFSTVITGKVTAPFTFYATAAGIAAGFISVFWSFGYIRLSERLRKTASEPAKAPPRADVIRSLKNGIVLNMLGMGAAVLGMQATVGALVAKALTTSAVPYYQATSPGQSPVLALDVFLVQASANIILSHFLGLASSLELLRSVAIPPAEAAAA

SEQ ID NO: 47822 - protein, 657 aa, Oryza sativa
MGVEVPPEESNRCVRGCCRSAAIPLHLPPSSFSLLSPIAKGSESTVYEARLGGERVAAKKPVLSTSDDLDKFHYQLQLLWWVLPIELDHPGLARLVAAHARPPNYLMFFDFFEPPNLADKIHVEEWNPSVQQVVTIATDLAKALQYLNILGIVHRDIKPANILIDKDFHPHLADFGLAMYQKDIKHVSVENWRSSGKPTGGFHKKNMVGTLIYMAPEILRKDIHTEKSDVYSFAISINELLTGVVPYTDLRAEAQAHTVLEMTYTEQQLTAAIVSQGLRPALALPESGAPPSLLSLIQRCWDSDPQQRPSFKDITEELKIIEKHIAVNSCSLASPANKSQNGNTEVHHYQEALSWLNQGELFAKGNKLDSTVDHWSDIFDQSSKYCPTLSWGSFATCGRRETMEDTHFMLPHMSEEKDLHAFGIFDGHRGSAAAEFSVRAVHGFLKQFNSNTSPTDALTEAFVRTDIAFREELILHQKSKRITQKNWHPGCTAVTALIVRNKLFVANAGDCRAILNRAGEPFPMTRDHVASCPKERERIVKEGTEVKWQIDTWRVGAAALQVTRSIGDDDLKPAVTAQPEVIETILSPDDEFLVMASDGLWDVMSNEDVLSIIKDTVKEPGMCSKRLATEAAARGSKDNITVIVVFLRPVSTAERIY

SEQ ID NO: 47823 - protein, 442 aa, Oryza sativa
MAPPLLLVSLLLIGFVSARAITPSAEAAAVFPKEALPTNSGYLPITTTNASLFFAYYEATHPLTPPASTPLLLWLQGGPGCSGLAGNFFELGPYFVNRDALSLSPNPFSWNRRFGLLFIDNPLGTGFSAAPSPAAIPTNQSVVAAHLFAALQSFFALQPGSRSRPFFLTGESYAGKYIPAAGSYILAVNPTLPTRLRVNLHGVAIGNGLTHPVAQVATHADTAYFMGLINAKQKRELEALQARAVELTNAARWSEAADARGLVLSWLENATGLATLFDAAKKSPYETGPVGKFVNRAEVKTALGARGDVEWEECSDAVGAAMHGDVMKSVKPEVEALLRGTRVLLYQGIRDLRDGVVSTEAWMRELEWDGLPAFLDADRAVWRIGEELAGYVQRSGPLSHVVVYGAGHLMPADNGRAAQEMIEDWVLQAGLFGRHGGMKRAA

SEQ ID NO: 47824 - protein, 323 aa, Oryza sativa
MALASLAAAASLLPAAAARSRVSLARCRGMASSSSPSAAAGASAAARVGVVQMTSVGDLDANYATCSRLAKEAASSGVKFLCFPEVFSFIGSKDGESIKIAEPLDGPIMQRYCSLAKESSMWLSLGGFQEKGPDDSHQYNTHVLIDDSGEIRSSYRKIHLFDVDVPGNMVYKESRFTTAGDTVVAVDSPFGRLGLTVCYDLRFPELYQCLRFKHQAQVLLVPSAFTKVTGEAHWEILLRARAIETQCYVIAAAQAGKHNEKRESYGGSIIIDPWGTVIARLPDRLSTGFAVADVDLSKVEAVRTKMPISEHRKFDSVWKTSSL

SEQ ID NO: 47825 - protein, 546 aa, Oryza sativa
MKMVPYKIVRGPNGDAWVEMGGQQYSPSQIGAFVLTKMKETAEAFLGKTVSKAVITVPAYFNDAQRQATKDAGRIAGLEVMRIINEPTAAALSYGMNNKEGLIAVFDLGGGTFDVSILEISNGVFEVKATNGDTFLGGEDFDGALLDYLVSEFKKSDNIDLSKDKLALQRLREAAEKAKVELSSTMQTEINLPFITADATGAKHFNITLTRSKFESLVQSLIERTRIPCVNCLKDAGVSAKDIDEVLLVGGMTRVPKVQDIVSQIFNKTPSKGVNPDEAVAMGAAIQGGILRGDVKELLLLDVTPLSLGIETLGGIFTRLINRNTTIPTKKSQVFSTAADNQTQVGIKVLQGEREMATDNKLLGEFQLEGIPPAPRGMPQIEVTFDIDANGIVKVSARDKSTGKEQEITIKSSGGLSESDIEKMVREAELHSQKDQERKSLIDLKNSADTTIYSIEKSVSEYKDKVPAEVTNEIQSAVSDLRAAMAEDDLEKIKQKLEAANKAVSKIGEHMQQGGGGGSGGGSSSSSGGDQTPEAEYQDAAKEAKM

SEQ ID NO: 47826 - protein, 208 aa, Oryza sativa
MSIRFDPMESRSSSSSRSVVMMCCVLMLMIAAAAHAGEQEAEECASPMSIEEACRGASETHHAVAYDHCVASLTADPRSSSSEARSLHGLAMLATRMAIDHATSTVCKMDDLAELEPEDSSSPSDARARFEHCLEQYGGAADLLRDALDNLKVRIYGTAMEQLSAALGAAESCEDAWKGDEGNIPIAAHDREYGRMAHIAIGFTHAAA

SEQ ID NO: 47827 - protein, 233 aa, Oryza sativa
MAMGKNGLLGWLCVVVPGRRRRRRGARLVLWGGERRAAAAGRMAGEVMMEHAGRLVVCRADGFCLGRAAPVLAIEDRLDACATYLVLPVDRLPQGRDVVTAASLAALTYDRAAGAPLLAGGAKSPFEYVKDDGGRTVIKVTEEFIVKAVTGRRPPAGGGGEGEDAHGAAALCSTPELRKHYEQLVGAARGRPWSPRLETIKERNGRRRVVDVVVSPTGRLSPVRLLGLDKGIK

SEQ ID NO: 47828 - protein, 343 aa, Oryza sativa; identical to SEQ ID NO: 28943

SEQ ID NO: 47829 - protein, 225 aa, Oryza sativa
MAALAAASTAFAAKPRLARAPSSPAARFSVSCSASGNNGGAGEMAQSLAASAKTFSAALALSSVLLSSAATSPPPAAADIAGLTPCKESKAFAKREKQSIKKLQSSLAINATIEKTKRRFENYGKFGLLCGADGLPHLIVSGDQRHWGEFITPGLLFLYIAGWIGWVGRSYLIAISGEKKPAMREIIIDVELAVKLLPRGFIWPVAAYRELITGNLVVDDADIGY

SEQ ID NO: 47830 - protein, 427 aa, Oryza sativa
MVSVMFVGHLGELPLAGASLATSLANVTGYSLLTGMATAMDTLCGQAYGARQYHLLGVYKQRAMVVLAAACVPIALVWASAGRILLLLGQDAGIAAEAGAYARWMLPSLAAYVPLQCHIRFLQTQTVVLPVTASSAATALLHPLVCWLLVFRAGMGSKGAALANAISYAVNLAILAVYVRASNTCKGRWSGFSGEAFKELRQFAALAMPSAMMICLEWWSFEILVLLSGLLPNPQLETSVLSICLNTGALLYMVPLGLCSSISTRVSNEIGAGQPQAAKRATRVVMYMALSEGLVISFTMFLLRNVWGYMYSNEQEVVTYIARMLPILDISFFIDGLHSSLSGVLTGCGKQKIGAAVNLGAFYLVGIPVAVLLAFYLHLNGMGLWLGIVCGSIIKLLVLIIVSCCIDWEKEAILAKDRVFSSSLPVA

SEQ ID NO: 47831 - protein, 139 aa, Oryza sativa
MSWSLAKSAFMALCIRRAMPERALHVKNTARDAPVATPALLLPPPLLCCSSSEAAKRPITLLDGFSELLAPLEQRAALDGAPDPEQQHLQPLQLLVCGSWRLQPPPNGGYRPVSDLADHRGSDCLFCHLSVMLMLILVE

SEQ ID NO: 47832 - protein, 646 aa, Oryza sativa
MGDWYEQFSQSFKDAAKEMLAKTDIDPNVKCFTRKQMKRISNNYRTILGEGGFSVVYKGRLNDGRAVAVKKYNWKTQKKEFTKEVIIQSQFSHKNIVRLLGCCVEADAPMLVTEFVPNGNLSNLLHSNSSQFPVSLGTRLQIALDVAEALVYMHSSQNHPILHGDVKPSNILLGDKDVAKLCDFGISRLLCMDSDEYTGFVIGSRGYVDPVFCQTGRLSLKSDVYSFGVVLLELITKKKGIDDKKVCLAETFARISRKGNGHELFDMDVVTNENMEFLQGIGRLALECIKFEVEERPEMKEVLERLWSLKRSRDRRIREMQVMVRSEIEVLWRRCGFGRFMISKERMDDMTYYFKTVLKECASGKAYIGRFCNAQLLVIKMSISVLDQWKNIVWNELNVQSRIKHWNDAKLLGYCLDLWEGLVLVYEYGAMSLYDVLFHDARKVSPFICGLRLKIAVGAAEGLAHLHSLGIVHGNVSTVNILLDDLSVLKVISRNYPVKIAGYGTSGLPDIDKAQHTGFFMEDSLVTSHGKEHDVYCFGLVLLTLFTWKKVSLQEADTVFEQLWDIGPPHDVNSEPEKPGQQLKEAILRCRHLEEVKSLVSRCLTSEVTKRPSMVEVAKHLKNINDLHDSTACHELAIYQSRMLSG

SEQ ID NO: 47833 - protein, 398 aa, Oryza sativa
MDATDPPPPPPPLTRKRGREARKSKEAAPPREPRRARSRSHVPPPPGAGDGRGGDGEEDVGFDLISRLPDAVLGDIISRLPTKDGGKTRALSKRWRPVWRTAPLNLDAGDLAPDANGAALAVLVTQILLVHAGPVRRFCIPAQQIHERPAMVEGWLGSRRFKNLEELEFTVPEDPFYGRSFLLLPPPPSTFRFSATLRVAAISQCSLPDCTATLALRFPQLRLLSLQEVIVSEHSLHSIIAGCPALEGLLLKRSFGFRCLRINSPTIRSVAFHSPCCGDHCVWKVGFHLEEVVIEDAPCLERLIHIERAMGLGVNVTVIAAPKLEACVLDDLDDGYYRLDFGKVVFKGFAVINYTTPVSSIKILALIRDNLRLDRVIELMRCFQCLEKLYITVKYFFC

SEQ ID NO: 47834 - protein, 689 aa, Oryza sativa; identical to SEQ ID NO: 45629

SEQ ID NO: 47835 - protein, 91 aa, Oryza sativa
MTATKLHYLAAVFLDLGTALSWPCAGGAELRSGRDARPPPAGMLPLPLALVAAAAAAAAFVLASRCLSSVQLRVQPVHLVPCYQQQQDNEV

SEQ ID NO: 47836 - protein, 152 aa, Oryza sativa
MPVRRRQPRRRETGAAERYREMGISAALSRPWDYPTACGEIAALLRIGYGDLPKAAQALVAGDVLLAFRLLPDVQTGYALSAANGLLQAVDGSLPKQKKAQAVSEFKRSVVAHKRRARVQQDPGVPHIPYDVLVHIFSFLDMRSLVAAGLVC

SEQ ID NO: 47837 - protein, 690 aa, Oryza sativa
MAISTWSTRLLLSPSASASSHRPNPTRRLAFPSPISGPGRQAPRAYISAPASGPDAYPSPALDAAAAAADVAAAIASSDAVTWAGVWALLSPHRARIAVSLAALLACTTCTLSMPLFSGRFFETLIGRGSEPLWRLLSKIAVLYTLEPIFTIVFVINMTVIWEKVMARLRSQIFRRILIQKMVFFDRHKVGELTGLLTSDLGTLKSVVSDNISRDRGLRALSEITGTLCILFTLSTELAPVLGLLMVSVSVLVALFKRSTVPTFKSYGIVQARISDTASETFSAIRTVRSFGGEKRQISMFDNLALAFQNSGTKLGVLKSANESLTRVVVYVSLMALYVLGGSKVNAGKLSVGTMASFIGYTFTLTFAVQGAVNTLGDLRGTFASVERINSILSAEDIDDSLAYGLAKELEDSNGAVHENGTANKHYMSALKSSSSCSNLAWSGDIHLEGVHFSYPLRSDVEILNGLDLTIECGKITALVGPSGAGKSTVVQLLARYYEPTHGRITVAGEDIRVFDKREWSRVVSLVNQDPVLFSVSVGENIAYGLPDDVVSKDEIIKAAKAANAHEFIVSLPQGYDTLVGERGSLLSGGQRQRIAIARALLKNSPILILDEATSALDTTSERLVQEALNHLMKGRTSLVIAHRLSTVQNAHQIAVCSDGKIAELGTHAELVASGGRYASLVGTQRLAFE

SEQ ID NO: 47838 - protein, 227 aa, Oryza sativa; identical to SEQ ID NO: 37304

SEQ ID NO: 47839 - protein, 205 aa, Oryza sativa
MRLSVSVAAVLVVLAALRPPRVAVAQKYAAIFNFGDSLVDAGNLVVDGIPDYLATARLPYGMTYFGYPTGRCSDGRLVVDFIAQEVGLPLLPPSKAKNATFHRGANFAITGATSLDTPYFQGRGLGHTVWNSGSLHTQIKWFQDMKASSASPLKSAGTCSGDLCSSWGSSAATTTTRRCSRSGHWRRCTPSSPTSLTPSARASRS

SEQ ID NO: 47840 - protein, 439 aa, Oryza sativa
MVTKNVQQQQQHRVDVVVPVPAMVVAAMASPCPANKLLRGAIQLAFGFALGIAVAIYLIGSATPAAVPGGSSLELFFPLPPPAAASTANLSAVRQKQPPTPSPEAEKTTTAIKSQSWPADDASGGNSTADQAGGGFVDISDEELMKLAAAAPREVRTGGGGGPRPKVAFLFLTRWDLPMAPLWEKFFEGHRGLYSVYVHTDPAFNGSDPGEASVFYRRTIPSKEVKWGEISMVEAERRLLAHALLDQANARFILLSESHVPLFDFPTVYSYLINSTTKIYLESYDLPGVTGRGRYKRSMSPVVTAAQWRKGSQWFEVDRGLAADVITDDVYFPVFARHCSRNCYADEHYLPTFLGIRHPSRVTNRSVTWVDWSHGGPHPARFTRMEVTPDFLRWLRAGAGTTCDYNGATTTVCFLFARKFLPNSLTRFLRFAPKVMGFG

SEQ ID NO: 47841 - protein, 407 aa, Oryza sativa
MEARLRLLVVVVVVAGHCAAVASAAGNSSVVGYHGDPTFNVRNYGAKGNGQTDDSKALMTAWKAACAATGAVTLVLPPGTYYIGPVQFHGPCSKATTMTFLMQGTLKAATDLKRFGNDWVEFGWVNHLIVSGQNGAAFDGQGAASWPFNKCPIRKDCKVLPTSVLFVNNKNMVVQNVASVNSKFFHMALLQCSGAKISGVKISAPESSPNTDGIHIERSNGVSIADTTIATGDDCISIGQGNDNIDVARVHCGPGHGMSVGSLGRYVGEGDVTRIHVRDMTFHGTMNGVRIKTWENSPTKSNAAHMLFENLVMNDVQNPIIIDQKYCPYYNCEHKFVSGVTIKDVQFKNIKGTATTQVAVLLKCGVPCQGVVLQDVDLRYKGNGVSSSKCENVRAKYAGFQNPKPCP

SEQ ID NO: 47842 - protein, 364 aa, Oryza sativa
MGAKKHTLQVLPWLLLFAQHTAASACDCANTTDGADRQGAMKLKLIAIASILAAGAAGVLVPVIGRSMAALRPDGDIFFAVKAFAAGVILATGMVHILPAAFDALTSPCLKRGGGDRNPFPFAGLVSMSAAVSTMVVDSLAAGYYHRSQFRKARPVDNINVHKHAGDERAEHAQHINAHTHGGHTHSHGDIVVCGSPEEGSVAESIRHKVVSQVLELGILVHSVIIGVSLGASVRPSTIRPLVGALSFHQFFEGVGLGGCIVQANFKVRATVIMAIFFSLTAPVGIVLGIAISSSYNVHSSTAFVVEGVFNSASAGILIYMSLVDLLATDFNNPKLQINTKLQLMAYLALFLGAGLMSMLAIWA

SEQ ID NO: 47843 - protein, 475 aa, Oryza sativa
MAFPDWVMLDPYVFRDGPFPDDDPTAAIGHNSRGDKVGVRFLLRAPPEPSSIFLDWEAGTGDCDDFSVVAAHRDAVLFQMGYLVSLGPSNAYKAFDYLLYRAAGAGGSSPSLDLLAPFGGSVDELKARMEADGLIRLTNQHLRRLKCLDIGVLCRDGEEFAVAELQITRSEVGPELHVLRSSTSSRKWELKRPPITPANGGSLDLEKFLWDWDADTVIPFGSYLCWVDYCLGILFCDMFDENPQLHYLEFPADVRGACFGGCCQAVGVTNGVMKLVSLVPDDGLIAENYTPESGFTIVCWTLRMDEMDKMVWEKDAVLKSDYLWSMLKPDFLWPLDEFPFITTNRFPRVQFPLISIDDSSVMYLVLAQNGMVEEAGYNYDETWLLAIDMSKMTLKMSFPYINDEMGDPSPEMLAFAEDKFWRFEPFLAADFSRHFNLRCPRLSKQICMESALLPQKRKFGCAEYLPLDGPSLAIF

SEQ ID NO: 47844 - protein, 408 aa, Oryza sativa
MEAQATHRRAGDRGGGGDGGSSSASIAKHLANQSQVLKWLQDFSDKVEERAKGAAAEVNVLLDEAGALELDMKTAMISFNNLTRQRFIEHKISDEDSMHLKTTESMHGSLQSQVPAQDYERDILPRYKEALHIGLSSCKDHFRSKGRSTTSVFRAMSAYGPLPHIIGSEEYIHDNSCGLADDMQPLSDDFSWLREFQSESSDSRTADISESQIFGAQRGYEKGETDSVVSAAREFKAMLEAALVNPYKFYDDATITAQDASVEKKISTSEDQVMLTGTSEAPSGRSAQEDNSEQTGLFASLQSADANPHDIYSALVREGLFDTGDEILSMDRGESADTPISGLASGLANLGTADPAERGYSINETTNEEGYLIEGDDPSPSNKDEQDDQTDAHGVSSPEPEDGVSRPS

SEQ ID NO: 47845 - protein, 475 aa, Oryza sativa
MAAAADLYGRLNRSSTRGFLAYVAAGAACAAVLACFVIPAAEPRAGDANGGLRLSSRSARVWPDLAFNWRVVVATVVGFLGSAFGTVGGVGGGGIFVPMLNLLVGFDTKSAAALSKCMIMGASASSVWYNLQVSHPTKEAPVIDYKLALLFQPMLMLGITIGVELSVIFPYWLITVLIIILFIGTSSRSFYKGILMWKDETRIQMETREREEESKSSCAARDVVIDPSCEEPLLCQPQPKEKSALETFLFNLRWKNILVLMTVWSSFLVLQIFKNNSQSCSTFYWVINILQVPVALSVFLWEGVQLCRESRARRMDGNWECVCEASIEWSPAQLIFCAFCGLLGGTVGGLLGSGGGFILGPLLLELGCIPQVASATATFVMMFSSSLSVVEFYFLNRFPIPFAVYLICISILAGFWGQSLVRKLVHVLKRASLIVFILSSVIFASALTMGVVGTQKSISMINNHEYMGFLDFCEK

SEQ ID NO: 47846 - protein, 231 aa, Oryza sativa
MGSCASVHKDLGFPKKLFLASSPTKEKKAANGKGGGGGVSVDLKRKEQQQAAAAGVGVRSPGSGSKDEMFFDSRAWLDSDCEDDFYSVNGDFTPSRGSTPNYQPRTQTVMSNVFVPDNVQNSKSPEPSPTGRRKLAELLQEAMQNGSEDSTDASVPDISKNEKQQFQPVSAAVKPVSESSSTCSTEPTPIREAKNRKEKAWYTGRCCLPAFVHTLDLDERRQKMTPGPCAV

SEQ ID NO: 47847 - protein, 432 aa, Oryza sativa
MAASYSCRRTCEACSTRAMAGCVVGEPASAPGQRVTLLAIDGGGIRGLIPGTILAFLEARLQELDGPDARLADYFDCIAGTSTGGLITAMLAAPGDHGRPLFAASDINRFYLDNGPLIFPQKRCGMAAAMAALTRPRYNGKYLQGKIRKMLGETRVRDTLTNVVIPTFDVRLLQPTIFSTYDAKSMPLKNALLSDICISTSAAPTYLPAHCFQTTDDATGKVREFDLIDGGVAANNPTMVAMTQITKKIMVKDKEELYPVKPSDCGKFLVLSVGTGSTSDQGMYTARRCSRWGIVRWLRNKGMAPIIDIFMAASSDLVDIHAAVMFQSLHSDGDYLRIQDNTLHGDAATVDAATRDNMRALVGIGERMLAQRVSRVNVETGRYVEVPGAGSNADALRGFARQLSEERRARLGRRNACGGGGEGEPSGVACKR

SEQ ID NO: 47848 - protein, 55 aa, Oryza sativa
MLVVHQVSVQVLGNQIKPLLQYQLLLLMASSVEHPFHATTRNQIHDPVEAHPHGS

SEQ ID NO: 47849 - protein, 450 aa, Oryza sativa
MGQGTPGGMGKQGGLPGDRKPGDGGAGDKKDRKFEPPAAPSRVGRKQRKQKGPEAAARLPAVAPLSKCRLRLLKLERVKDYLLMEEEFVVSQERLRPSEDKTEEDRSKVDDLRGTPMSVGSLEEIIDESHAIVSSSVGPEYYVGILSFVDKDQLEPGCAILMHNKVLSVVGILQDEVDPMVSVMKVEKAPLESYADIGGLDAQIQEIKEAVELPLTHPELYEDIGIRPPKGVILYGEPGTGKTLLAKAVANSTSATFLRVVGSELIQKYLGDGPKLVRELFRVADDLSPSIVFIDEIDAVGTKRYDAHSGGEREIQRTMLELLNQLDGFDSRGDVKVILATNRIESLDPALLRPGRIDRKIEFPLPDIKTRRRIFQIHTSKMTLADDVNLEEFVMTKDEFSGADIKAICTEAGLLALRERRMKVTHADFKKAKEKVMFKKKEGVPEGLYM

SEQ ID NO: 47850 - protein, 178 aa, Oryza sativa
MGMSTESGMLRGAGVGVVSGAVFSIEAVESCIEIWRSSESGKYSIIFVLDIISSLFSGRIVWEKVSPALQRAVQSQMSLLSTPFIDNNDLFETGNTGGMSRDLINRIPKTTFSAATNPDQETDNCCAVCLQDFGASQFVRVLPHCQHTFHARCIDNWLFRHASCPLCRAGVHIDHIHM

SEQ ID NO: 47851 - protein, 226 aa, Oryza sativa
MSCNGCRVLRKGCSEGCVLRPCLQWIDGAEAQGHATVFVAKFFGRAGLMSFLTAVPEPQRAAVFQSLLYEAAGRTINPVGGAVGLLSGGSWHLCQAAVDTVLRGGGIQPLPDQVDAAAAGGRDVFASTARRAMGGCSTFSTAKRSTTTTTTKNPGTPHDAAAAAPQPEPSCDLGLWLSPGSPPAPGDRRSGGRRADTPSMNSEGSVTTCGVVGDGEREPELLNLFV

SEQ ID NO: 47852 - protein, 208 aa, Oryza sativa
MVNTAAVAAAKGSRGSGLPLASLNHISIVCRSLQESLTFYTDVLGFFPVRRPGSFDFDGAWLFNYGIGIHLLQAEDPDSLPGKTEINPKDNHISFQCESMVAVERRLKELGIPYIQRCVEEGGIYVDQIFFHDPDGFMIEICNCDNLPVVPLGADQPLVMAACKRAAVIKQQQQASSSPATAAAAAQCAVPSSTKAIHVGEEAHISCA

SEQ ID NO: 47853 - protein, 348 aa, Oryza sativa
MFGFGHHGHHGQDQPPQHHGGGGGGAHQPTFKIFCRADEGYCVAVREGNVVLAPTNPRDEHQHWYKDMRFSAKIKDEEGNPAFALVNKATGLAIKHSLGQGHPVKLAPFNPEYPDESVLWTESGDVGKSFRCIRMLNNIRLNFDAFHGDKDHGGVHDGTTIVLWEWAKGDNQCWKILPWGDEAYAGGSANAPRGGNEPTVRIFCKADEGFSVTVRGGSVCLAPTNPRDEYQHWIKDMRHSNSIKDEEGYPAFALVNRVTGEAIKHSQGEGHPVKLVPYNPGYQDESVLWTESRDVGHGFRCIRMVNNIYLNFDALHGDKDHGGVRDGTTVALWKWCEGDNQRWKIVPW

SEQ ID NO: 47854 - protein, 918 aa, Oryza sativa
MHADKNKTGFLGRPEFFNALRLVTVAQSGRQLTPDIVQSALYGPAAARIPAPKIAGGGQAPPQMAAAGAPRPQVNAAVSPAPGQAGAPQPQMNVAGAPRPQGSGMMPGSAQIGGSQQVNAGAVPRPQGVNSMMPAASQGGALQPTQFATQRGMQSQPPSMGFNQQPPPSSTGFMRPTQPGAPAASLQGQGPGINQVPLGGGSMGAPAGWRGGNVGSVGGLPQATPGATAPQQATPGGFGLTLSSTMGMAPGQQAQGTPPSSMPPQSNGAVSAQDSKALVLSGNGSAGGLGASNDIFSALTQPKSNVSTLSFPTSMAPNSSSFMSTPSGSQNLSNLAQFGSQQGIPTVSSGGSQPQLTHPITKPSVPAPTVSGVSAGVSNSASQWPKVTQSDIQKYTKVFADVDRDRDGKITGAEARTLFLSWRLPREILKQVWDLSDQDNDGMLSLREFCIALYLMERHRAGTPLPPALPDSLKYDEVLLRATGLPSTAYNGPSWQQNQGLPHKGPGAAGMPATGVRQPLPPHLQAQMDGANRPGQPRPHMPGMDNHAAPQANKDDGSGANSAVQEDAPKKVEVEKQVLDSREKLEYYRTKMQDLVLYKSRCDNRLNEITERASSDKREVESLAKKYEEKYKQVAELASKLAVEEHAFRDVQERKVELHDALVKMVQGGSVDGLLQVRADRIQYQLEEMEKAFSERCKHFGLQFKPSASVELPFGWEPGKQEGAIEWDEDWDKFEDEGFGFVKDNGTIVENPVASENVKVPSLWNDMDESPVASSNGHIKAERHYRAGDHAAESDLGYDFGEESVRSPSSAGRSASGSPFVSSNFAMHDSSPSKKETYSDHGGSESIFGDKYADETSWNFDDQDTESVWGSNAMNNESDHHGSAHNSFFGSDDFGVNPVRVGLSKWCQYLWKEEKFIL

SEQ ID NO: 47855 - protein, 289 aa, Oryza sativa
MEDIWQNFAMEYRAKFVVWRLAFQVFTDKSLAINCDTGVDDQLNLMITKYHRKGGKIAVGKPEYKTIIEANLGISCLYDEFVMEVMWGLTNLMHSLVPEENSQLSKEDRLQMSQGLKMLLNRYGFDVKPGMVNKRILEAASDLYDCDDCEKKNNWSLRRAGRNLMDISSINSEDWGLLKLSTALMIVCYPEEKIIACLLKHSTDLLIASYPRREVIEYSQKMFSPDVLSKLVTDAPKYGIWIKKRTSKRIHEEMVFLYQQRIEKRKLLATLIGEATKVYEAEQAELLTN

SEQ ID NO: 47856 - protein, 562 aa, Oryza sativa
MDPPMAPAPPPSTHSTAPFATPEVRSVAARRPRPAAASISARLRDVARRRKDRPRRCRAQVAPRGGDRISALSDDVLLLILRRLATRAALATAMLSKRWARLLRWLDTLDFMVGEILPPRYRRCIQLHQAAGFAAYPVDVKVLVASIKRHERLAMRNIAASINSLLDADGSDECAGQARRRARVLRVEFFATHYTDLMNRLITKALDAWEVEDLEVFAKPAYWSEWSLPPIVHRFPHHGLCIEPHKSRLRSLKLGGCIIPPLQGFHALTKMTLQDLRNSVAKASYEDVFKSCPQLQVLHLKSCRWADRGILVIDFPKSGIKQLIVEFCSAIALHSLGMLESIAIRETWVRYKHCSFSHLMHMNLNLRHGYRNRLRDLCIGWDLNIQQFLGFTKNITNLVLRFTGYGRWFVPSCPSLLLANLRRLLIADVPSSWDVSWPRLLLEAAPCLESLHIHIIPWDDDSFDEIIWQPSTLQHEELKELVVIGFEGTERQIYFVNFVMEVSTTLQLVALFRYGHVQEMGRWDWKIVRQQHHWNDEEKAQILNQFADRDSCSITPVQVVVE

SEQ ID NO: 47857 - protein, 372 aa, Oryza sativa
MSMVVQQEQEVVFDAAVLSGQTEIPSQFIWPAEESPGSVAVEELEVALIDVGAGAERSSVVRQVGEACERHGFFLVVNHGIEAALLEEAHRCMDAFFTLPLGEKQRAQRRAGESCGYASSFTGRFASKLPWKETLSFRYSSAGDEEGEEGVGEYLVRKLGAEHGRRLGEVYSRYCHEMSRLSLELMEVLGESLGIVGDRRHYFRRFFQRNDSIMRLNYYPACQRPLDTLGTGPHCDPTSLTILHQDHVGGLEVWAEGRWRAIRPRPGALVVNVGDTFMALSNARYRSCLHRAVVNSTAPRRSLAFFLCPEMDTVVRPPEELVDDHHPRVYPDFTWRALLDFTQRHYRADMRTLQAFSDWLNHHRHLQPTIYS

SEQ ID NO: 47858 - protein, 400 aa, Oryza sativa
MAMRQGALRGPSDYSQEPTRHPSLRINAKEPFNAEATRRDLVASYITPVDLFLKRNHGPIPILRDIDSYYVTVAGLIERPAKLYLNDIKKLPKYNVTATLQCAENRRTEMSKSRKVRGVGWDVCALGNATWGGAKLSDVLQLIGVPYHTEITPSGGKHVEFTSVDQCPEEKGGPYKASISLGHATNPAADVLVAYEMNGEVLKRDHGYPLRVVVPGVIGARSVKWLDRIDIIEEECQGFFMQKDYKMFPPSVDWDNIVWSTRKPQMDYPVQSAICSLEDTNAIIPGEVTVTGYALSGGGRGIERVDISTDGGKTWFGAVRYQKEGVPYVAGDISSDKWAWVLFKTVIDVKGDTEVIVKAVDSSANVQPESVETIWNLRGILNTCWHRVRLLTIHNLRSLL

SEQ ID NO: 47859 - protein, 75 aa, Oryza sativa
MHWNKFGVHVMIAKKTDNFRLNRSMHIFLQGVLWATSLARRSKVREVPATITGMMQMTAARRRRTKRVSIMVNLF

SEQ ID NO: 47860 - protein, 331 aa, Oryza sativa
MQFPFAAGDYPADQVDPDYLYFLRHIRPDGDSYTLELPSDGVSPPSLVKYEAPADTGSTDGECVSDPSPGRASTNRPPEEKESSVEVDAEPPAPSWIDSLVDIDEDYRLFLKHTRVVNDNMVLEIDGAVVTYPCAASSESSSEVEDAREKEVAMDSDEPVVILPDPKVCDWVAVGDASVRTLDSKKKRKMSSSNSNNAGPSIPPGSQGVIWPAHINSRPDSDFKQRLLDALSKPFSRKEYIKLFDMASIRTPLVKLRQVRNDVKFYPTQEMGNSYFDHYPDLVDQVMHTSFPNGLALMRGFFFWLQNNAHEDQFRPWVDVSKDHEVIPLID

SEQ ID NO: 47861 - protein, 620 aa, Oryza sativa
MSYDRVTTFEDSEKESEYGYVRKVSGPVVVADGMGGAAMYELVRVGNDNLIGEIIRLEGDSATIQVYEETAGLMVNDPVLRTRKPLSVELGPGILGNIFDGIQRPLKTIAIKSGDVYIPRGVSVPALDKDQLWDFEPKKLGVGDAITGGDLYATVFENTLMKHHVALPPGSMGKISYIAPAGQYSLQDTVLELEFQGIKKQFTMLQTWPVRSPRPVSSKLAADTPLLTGQRVLDALFPSVLGGTCAIPGAFGCGKTVISQALSKYSNSEAVVYVGCGEGGNEMAEVLMDFPQLTMTLPDGREESVMKRTTLVANTSNMPVAAREASIYTGITIAEYFRDMGYNVSMMADSTSRWAEALREISGRLAEMPADSGYPAYLAARLASFYERAGKVKCLGSPDRTGSVTIVGAVSPPGGDFSDPVTSATLGIVQVFWGLDKKLAQRKHFPSVNWLISYSKYSKALESFYEKFDQDFIDIRTKAREVLQREDDLNEIVQLVGKDALAESDKITLETAKLLREDYLAQNAFTPYDKFCPFYESVWMMRNIIHFNTLANQAVERAANADGQKITYSVIKHRMGDLFYRLVSQKFEDPAEGEDVLVAKFQKLYDDLTTGFRNLEDEAR

SEQ ID NO: 47862 - protein, 1004 aa, Oryza sativa
MASSSSALVVVVAVLALAEAAVAFSGYNTSAGAVAGKLNVHLVPHSHDDVGWLKTIDQYFVGTNNSIQGACVMNTLDSVVDALILDPARKFVFAEQAFFQRWWAEKSPKIQAIVHKLVDSGQLEFINGGWCMHDEAAVHYIDMIDQTTLGHRVIKKQFNKIPRAGWQIDPFGHSAVQGYLLGAELGFDSMHFARIDYQDRAKRKGDKGLEVIWRGSRAFGSSSQIFTNAFPVHYSPPDGFGFEIFDDFVPVQDDMLLFDYNLKERVNDFVAAALKQANVTRTNHIMWTMGDDFNYQYAESWFRNMDRLINYVNKDGRVHALYSTPSIYTDAKHASNESWPLKYDDYFPYADAKNAYWTGYFTSRPTFKRYIRMISGYYLAARQLEFLVGRSSLGLFTSSLEDPLGIAQHHDAVSGTAKQHTTDDYSKRLAIGVSQVEKGVNTALSCLTSSKGTCTATKFSQCQLLNISYCPSTEEGISSAKSLVIVVYNPLGWERSDFVRVPVNDANLIVKTSDGTSLESQLVEVDIVTARLRKLYIKAYLGITSDKPPKYWLVFQASVPPLGWNTYFISKSTGTGSNGMGYVSTMVSPSNDTIEIGPGPLKMSYSSKSGQLKRMFNSISAVDLPIQQSFLWYASSTGDSEDSQASGAYIFRPNRTTPTIVSGMAPLKVIHGPLVDEVHQQFSSWIYQVTRLYKNKEHAEVEYTIGPIPVDDDDDIGKEVVTRLTTNMATNKIFYTDSNGRDFLERVRNHRDDWDLNLSQPVAGNYYPVNQGIYVADGKYELSVLVDHAVGASSIQDGQIEVMLHRRLSADDGRGVGEPLNEVVCVDQKCDGLVARATYYINVNKKGHGAHWRRTYSQQVYSPFLVAFAHEDERSWKSNNIAKASTVEGNYSLPDNVAIITLQSLDDGTTLLRLAHLFQAQEDTQYSVMAKVELRKLFGKRIIKDLTETSLSANQKKSEMKKLNWRVTGESKTDPAPLKGGPVDSHALVVELGPMEIRTFLLKF

SEQ ID NO: 47863 - protein, 153 aa, Oryza sativa
MSSTPLGNPTNLEEILTIDIKPGWKKGTKVTFPKKGNEKPNIIPSDLVFIIEERSHARFKRDKDDLIYTHRISLVEALTGCTVQLTTLDGRNLTVPVKSVINPTSEEVVKGEGMPITKEPSKKGDLKIRFQIKFPTNLTSDQKSGIQQLLPKP

SEQ ID NO: 47864 - protein, 182 aa, Oryza sativa
MATAADGVAVARQAELRRIEGNSCFNKARLGAAIDCYTEAIALCPDVAVYWLNRGLCHFKRKEWAKVEEDSRRALALDDTLVKVTSSQCPLFIHKSSDCYRSSTLVQGHYLLGCAMLEKEQCALAIKEFNKALDLLKSSNLGDKMAEDIWQVLAKAKYQDWEIHSTKRVWKMQSLKYVMHEK

SEQ ID NO: 47865 - protein, 267 aa, Oryza sativa
MQIAAINLEKGDQKECKKLLDEGKSTLDSMTDVDPTVHASFYWISSQYHKACQEFAEFYKNALLYLAYTTVESLSESFKLDLAFDLSLAALLGDNIYNFGELLAHPIINSLIGTKVEWVYHMLQAFNTGNLALYQELCKVHNAALSAQPALVQNERKLLEKINILCLMEIIFTRPSEDRTIPLSVIAERTKLSISDVEYLLMKSLSVHLIEGIIDEVDSTVHVSWVQPRVLGIPQVKALRERLDAWVGKVHTTLLSVEAETPDLVAA

SEQ ID NO: 47866 - protein, 220 aa, Oryza sativa
MLGGGKMKGGETMGGGGGSGSSSISPLVSFVLGAAMATVCILFVMSASPGRRLADISAWSNADDSPPLPLPLQDAAVDSNDSLAAAAAANVTVVAAPAPAPVQAPAPASPYGDLEEVLRRAATKDRTVIMTQINLAWTKPGSLLDLFFESFRLGEGGVSRLLDHLVIVTMDPAAYEGCQAVHRHCYFLRTTGVDYRSEDVHEQGLPRDDVGSQQVSADHP

SEQ ID NO: 47867 - protein, 576 aa, Oryza sativa
MSGIGGMIASSVANRVASRLSELVVEEATLLWRFKDDVDDMEEKMRDLEAVIQDVDGKARQGGKDGEAERRWLNKLKSVAYDVEDVLDELDAAQLIKNHQPKLKLFLSRNNPLLRKMTIARNMKNSREKIVSIKKDSIKLHHVHRELVAEGSRDNETFADDGDVDIGMLGRDAETKKIINLLLNTEAKEDISIIPIVGLGGLGKTTLAQAVFADKRVNVFDLRIWVYVSKEFDLLKIGKAIIRGANRSINLDNCNLQFVNNNLKKELANRRYLIVLDDLWEEYGENLEKLKQMLQHGGKGSKIIATTRSGSVVQVLYTGYLANERKVCPVPEPDHINLGVLSPYDCWSVMKRRVFGPDDGQNGLEEIGRQIAEKCGGLPLVANALGQVMSEHRTVEAWTDIRDRKIVLDFKADHQQDTIERLMLSYYYMKREFKMCFTYLAAFSKGFVMDTDRLIQQWIALGYIEARDNGQRCVNYLLRMSFLQISKSSMVSPMHTKAPRKLTMHDLVHDLATIIAPDEFLVMDATMPNTWSKANNKRYCRHAQLVNYQKQPKFFKDLPSKEQKVCLIRLGPLKSV

SEQ ID NO: 47868 - protein, 277 aa, Oryza sativa
MELAMDFALRLRDAANHHLSRYEPLVLLAAPLLALLAARTLHAAAAAVADRGLRTVLLALAMTAIKLLPGVSAYINAEKRKVVDQLQSGGTSTKSTLRTELPTVGLSNQVINDLETLKARDVNWQGKCSGTVYIAGSESEGHFALINKAYSMFSHTNPLHQDVFKSVAQLEAEVVAMTAALLGIKEKSSGGQICGNMTSGGTESILLAVKTSRDYMRTKKGITKPEMIIAESAHSAYDKAAQYFNIKVRRVPVNKEFLADVKGFKRCINGNTIMNYI

SEQ ID NO: 47869 - protein, 707 aa, Oryza sativa
MEVLQKCNGVPFIAASLGHRLHQKDKSKWVAILQEEICDANPNYFIRARQLSYAQLHSHLKPCFAYCSIIPREFQFEEWLIKHWMAQGFIQSKPDAVATGSSYFRTLFEQSFFQRELVHHSGERHRYSMSRMMHELALHVSTDECYILGSPGEVPEKVRHLTVLLDEFASQNMFETISQCKHLHTLLVTGGNAGYELSIPKNLLNSTLKKLRLLELDNIEITKLPKSIGNLIHLRCLMLQGSKIRKLPESICSLYNLQTLCLRNCYDLEKLPRRIKYLHKLRHIDLHLDDPSPDIHGLKDMPVDIGLLTDLQTLSRFVTSKRNILDNHSNIKELDKLDNLCGELLISNLHVVKDAQEAAQAHLASKQFLQKMELSWKGNNKQAEQILEQLKPPSGIKELTISGYTGISCPIWLGSESYTNLVTLSLYHFKSCTVVPSLWLLPLLENLHIKGWDALVKFCGSSSANFQALKKLHFERMDSLKQWDGDERSAFPALTELVVDNCPMLEQPSHKLRSLTKITVEGSPKFPGLQNFPSLTSANIIASGEFIWGSWRSLSCLTSITLRKLPMEHIPPGLGRLRFLRHLEIIRCEQLVSMPEDWPPCNLTRFSVKHCPQLLQLPNGLQRLRELEDMEVVGCGKLTCLPEMRKLTSLERLEISECGSIQSLPSKGLPKKLQFLSVNKCPWLSSRCMVLGSTISSLWIDGELIRY

SEQ ID NO: 47870 - protein, 141 aa, Oryza sativa
MASGGVVKKEIGGNHDVLRFGVNDSVKGDLAPPHPLQASVHKDAKFWADKKRFGAEAIYGSAFNIRKDLDAQILSKFQRPPGALPSSMLGYEALTGSLDDFGFEDYLNLPQDSESFRAPDMHHGMEVRLGLSKGPVCPSFN

SEQ ID NO: 47871 - protein, 501 aa, Oryza sativa
MPPQRLATATAHHPAGPSRRRLHHRRGAMFSVSCWRIGAIASLVAAAAATTVLLNFSLPSSPHVPATDFTGKLSAAISPPPPPSSPPPAPATPPPPPPAPPPPAARPRRREPSYWRMAPEEALRYAKKEIMAAGPVIDDPDLYAPLFKNVSQFKRSYELMERILKVYIYQDGRRPIFHTPPLSGIYASEGWFMKLLKESRRFAVTDPAKAHLFYLPYSSQQLRISLYVPDSHNLRPLAAYLRDFVKGLAAKYPFWNRTRGADHFLVACHDWLQGSYTTTAHGDLRRNTVKALCNADSSEGIFTPGRDVSLPETTIRTPRRPLRYVGGLPVSRRGILAFFAGNVHGRVRPVLLKHWGDGRDDDMRVYGPLPARVSRRMSYIQHMKNSRFCLCPMGYEVNSPRIVEALYYECVPVIIADNFVLPLSDVLDWSAFAVVVAEKDVPDLKKILQGITLRKYVAMHGCVKRLQRHFLWHARPLRYDLFHMILHSIWLSRVNQIELHE

SEQ ID NO: 47872 - protein, 119 aa, Oryza sativa; identical to SEQ ID NO: 47511

SEQ ID NO: 47873 - protein, 362 aa, Oryza sativa; identical to SEQ ID NO: 31425

SEQ ID NO: 47874 - protein, 867 aa, Oryza sativa
MAGAGAVGGSNWEEMVRRMLPPGTTIPEAPANLDYSIALEYDGPPVSYELPRIDPVDLPAIPTAQPVSGPLVPGRSNGVVAPVVRPVFMPPVHRKQDAHRAEPPPVAAQGRRRRSSESVDSAPQNEGFSDDDDSCSVSQESAHNFHGQRGGRTAAQEGRRAQVVTFGVTEDSRYESKEFDDVSEQYVAVTKKEKRGRTCSRCGKRKWESKESCIVCDARFCSYCVLRAMGSMPEGRKCITCIGQPIDESKRSKLGKGSRILSRLLSPLEVRQILKAEKECQANQLRPEQLIINGFPLNPDEMASLLSCQRPPQKLKPGRYWYDKESGLWGKEGEKPDRVVSTNLTFNGKLQPNASNGNTQVYMNGREITKIELRVLKIAQVQCPRDTHFWVYHDGGYEEEGQNNIKGKIWESPVTRFACALFSLPVPPANSDEPKDEAPYSARTVPDYLDQKRIQKLLILGSPGAGTSTIFKQAKLLYDTRFTQEELDSIKLMIQSNMFKYLGILLEGRERFEEEALAGSNNPSSEDENTQHDGNKSNGSDSCIYSINAKLKKFSDWLLDIIAMGDLDAFFPAATREYAPIVEEMWKDPAIQATYKRKDELHFLPDVAEYFLSRAIEVSSNEYEPSEKDIIYAEGVTQGNGLAFIEFTLDDRSPMSEMYTDNHEPHSQTLNKYQLIRVSAKGMNEGCKWVEMFEDVSMVIFSVALSDYDQLGAPSSGGNSPLVNKMIQSRDLFEATIRQPCFRDMPFVLVLNKFDLFEEKIGRVPLSTCEWFSDFCPLRTHHNNQSLAHQAFYYVAMKFKELYAACTDRKLFVWQARARDRLTVDEAFKFIREVLKWEDEKDGGGYYPDESFYSTTELSSSRLIRQE

SEQ ID NO: 47875 - protein, 269 aa, Oryza sativa
MGSLTTNIVLAVAVVAALVGGGSCGPPKVPPGPNITTNYNAPWLPARATWYGQPYGSGSTDNGGACGIKNVNLPPYNGMISCGNVPIFKDGRGCGSCYEVKCEQPAACSKQPVTVFITDMNYEPISAYHFDFSGKAFGAMACPGKETELRKAGIIDMQFRRVRCKYPGGQKVTFHVEKGSNPNYLAVLVKFVADDGDVIQMDLQEAGLPAWRPMKLSWGAIWRMDTATPLKAPFSIRVTTESGKSLIAKDVIPVNWMPDAIYVSNVQFY

SEQ ID NO: 47876 - protein, 70 aa, Oryza sativa
MLRVELTLLWRKQRILSFGPEYVCTIWLGFPGRQQHSVVSWSLCFGTSATTVHGHLKMDLLCVYCWTCNC

SEQ ID NO: 47877 - protein, 321 aa, Oryza sativa; identical to SEQ ID NO: 38074

SEQ ID NO: 47878 - protein, 395 aa, Oryza sativa
MTAAASWSRSVTETVRGSHQYTVKGFSMAKGVGAGRYVSSDTFAVGGYHWAVYLYPDGKNPEDNANYVSVFVALASDGADVRALFELTLLDQSGRGRHKVHSHFDRSLQAGPYTLKYRGSMWGYKRFYRRSLLESSDFLKDDCLVMNCTVGVVKNRLETPKNIHINIPPSDMGRCFNNLLNLRIGCDVSFEVGDERVQAHKWILAARSPVFKAQFFGPIGNPDLHTVIVEDVEPLVFKAMVNFIYSDELPSIHELAGSVSTWTSTVVVQHLLAAADRYGLDRLRLLCEEKLCDELTAETVATTLALAEQHHCTQLKSACLKFTAVRENLGAVMETEGFNYLEETCPSLLSDLLATVAVVDDDAASFNRKRGVGGNEGANPVESVEASDRRIRRRV

SEQ ID NO: 47879 - protein, 353 aa, Oryza sativa
MAGASFLSTVRQPPAPPPPLLAPRGSASSVSSPARRHAHILVCCHATAQEEPVRFRRRDLIGGCLTTAIGLELVEGSTGFTGVATAADLIERRQRSEFQSSIKSTLATAITAKKELIPSLLTLALNDAMTYDKATKSGGPNGSVRLSAEISRPENSGLSAAVDLLVEAKKEIDSYSKGGPIAFADLIQFAAQSALKLTFVDAAIAKCGGNEEKGRTLYSAYGSNGQWGLFDKLFGRQDTQEPDPEGRVPDWSKASVQEMKDKFVAVGLGPRQLAVMSVFLGPDQAATEERLIADKDCRPWVEKYQRSRETVSRTDYEVDLITTLTKLSSLGQKINYEAYTYPKQKIDLGKLKL

SEQ ID NO: 47880 - protein, 277 aa, Oryza sativa
MALLRAAAAADLLRRHRRAPLPLLLSALSPPPPTTPESCPDGPSPVAPYFAPPPPPLCRRRRSWPPPPPPPRVSSSSYVGRGILLPATFSIYSPLSTSSSASPDGSPDEDSSPPHPSPAAAPPSSWVDRWLPQAARPYAMLARLDKPIGTWLLAWPCFWSISMAAMPGELPDMRMLALFGCGAVLLRGAGCTVNDLLDRDIDNKVERTKSRPFASGILTPTQGVGFLGLQLLLGLGILLQLNNYSRILGASSLFFGLLLSLDEEIHILASGVSWLDL

SEQ ID NO: 47881 - protein, 442 aa, Oryza sativa
MSTRSKSVPVPAGGGAATVPLAVLLRREVVSEKTAAERPELQVGLFSQAKKGEDYTFLKPDCERLPGVPSSSFSAFGLFDGHNGNGAAIYTKENLLSNILTAIPADLNREDWLAALPRAMVAAFVKTDKDFQTKARSSGTTVTFVIIDGLFITVASVGDSRCVLEAEGSIYHLSADHRFDASKEEVDRVTESGGDVGRLNVVGGAEIGPLRCWPGGLCLSRSIGDQDVGQFIVPVPYVKQVKLSTAGGRLIISSDGVWDVLTAEVAFNCSRTLPPEAAAEQIVKEAVQQKGLRDDTTCIVVDILPDKANLTMPHTKKQPGMGVFKNMFRKKTPSDSSSHTDREYMDPDIVEEIFEDGCAFLSKRLDSEYPVRNMFKLFICAICQVELKPSQGISVHEDSSQPGNLRRWDGPFLCQGCQEKKEAMEGKRRSRDSSSRNSGSSE

SEQ ID NO: 47882 - protein, 80 aa, Oryza sativa
MAAGNLTAADIESATAFVIVMIFLVNLLVCLMTDALNNYWIRSAKEEEASPPAGHVRGNVAAVKAAQIVPTQYADQRIAV

SEQ ID NO: 47883 - protein, 298 aa, Oryza sativa
MASNNSRTNSRANYSNEIHDLSTVQNGTMPTMYYGEKAIADFFPPHLLKKVVSEVVATFLLVFMTCGAAGISGSDLSRISQLGQSIAGGLIVTVMIYAVGHISGAHMNPAVTLAFAVFRHFPWIQVPFYWAAQFTGAICASFVLKAVIHPVDVIGTTTPVGPHWHSLVVEVIVTFNMMFVTLAVATDTRAVGELAGLAVGSAVCITSIFAGAISGGSMNPARTLGPALASNKFDGLWIYFLGPVMGTLSGAWTYTFIRFEDTPKEGSSQKLSSFKLRRLRSQQSIAADDVDEMENIQV

SEQ ID NO: 47884 - protein, 337 aa, Oryza sativa
MADKPSRGLVLYAAGHAALLPPASGGGGGAGGGGGGSHLDAFASLASCGFLSLRSPPLASGEEKRDSTILELAQLLDVYDDLFPAKTEKTGQETAQVDPLQLAVPKLSERFMGIRAAMVTNCPLVSSFAANLGFHVSGTEDLVAQSGSSAASKEAGIISQALSLLGFSEGNVQETSEFDLVFLHVAMENTNSKLGKLGMKTDLNRLDKLVGAIMEAAPISSAIASRILVSVMLSYGSAAENKDEFSISKSSTEIDSDLNLLRPRQSYTMKAGNTLDDVRNHHPILLAQWQEGVTRSDLTEGFSFEEFIKRGGNLAMLAERFLHEVAFKLWKAPKYGA

SEQ ID NO: 47885 - protein, 585 aa, Oryza sativa
MAEEAKQETPAAAEVVVVEKADEVVAVEKAVEVEAEEKKLAEQEEEEEKKAEEAEEAAGGDEAAVIEGTGSFKEESNLVSELPDPERTALAQLKELVAAALAAGEFDLPPPPPPPPAKAEEPAKEEEPKAAEAPAAEEPKAEAEAEAEAAATEEPKTEEPKTEEPAKEEEPKAAAAAAAEEPKAEAAAGEAKPAEPETEEKTVVVTEDEGTSKTVEAIEETVVVAAPAAAAEAEAAAPKEELIWGVPLTGDDERTDTVLLKFLRAREFKVKEAMAMLKAAVLWRKRFGIDAVLAADLGLPELENVVFYRGADREGHPVCYNVYGEFQDKDLYEKAFGDEEKRERFLKWRIQLLERGILDQLDFSPSGICSMVQVTDLKNSPPMLGKHRTVTRQALALLQDNYPEFIAKKIFINVPWWYIAANKMVSPFLTQRTKSKIIFCTAAKSAETLFRYIAPEQVPVQFGGLYKEDDTEFSTSDAVTELPIKPSSKETVEIPATENSTVVWELRVLGWEVSYGAEFTPDAEGGYTVIVQKTRKVPANEEPIMKGSFKVGEPGKIVLTVDNAASKKKKQLLYRFKVKSSSESA

SEQ ID NO: 47886 - protein, 223 aa, Oryza sativa
MRGGWNQRRLPSSQIRCRRLRRMEAAWRVDTAAAPPGGQWRRPSPPDLAPSDPNPILPNARPPPHPHGAQDSPRHLPPSPTRHRRRPPSTRRRRSHPSSPALCCPSSCLRRSTSIPHAVGKGESVGARTAAQRSAPLSSGATVARGSIGLCPLELLGSSGKDGGMRIHRPPSSGALAAHGSSGLRPQEWHGGSGRAGSMLIFLPPSSRAAAAGLDERERGRLA

SEQ ID NO: 47887 - protein, 142 aa, Oryza sativa; identical to SEQ ID NO: 29854

SEQ ID NO: 47888 - protein, 969 aa, Oryza sativa
MEAARVGAQSRHLYGGGLGEPDMDRRDKRLFGWDLNDWRWDSDRFVATPVPAAEASGLALNSSPSSSEEAGAASVRNVNARGDSDKRKRVVVIDDDDVEDDELVENGGGSLSLRIGGDAVAHGAGVGGGADEEDRNGKKIRVQGGSPSGPACQVEGCTADLTGVRDYHRRHKVCEMHAKATTAVVGNTVQRFCQQCSRFHPLQEFDEGKRSCRRRLAGHNRRRRKTRPEVAVGGSAFTEDKISSYLLLGLLGVCANLNADNAEHLRGQELISGLLRNLGAVAKSLDPKELCKLLEACQSMQDGSNAGTSETANALVNTAVAEAAGPSNSKMPFVNGDQCGLASSSVVPVQSKSPTVATPDPPACKFKDFDLNDTYGGMEGFEDGYEGSPTPAFKTTDSPNCPSWMHQDSTQSPPQTSGNSDSTSAQSLSSSNGDAQCRTDKIVFKLFEKVPSDLPPVLRSQILGWLSSSPTDIESYIRPGCIILTVYLRLVESAWKELSDNMSSYLDKLLNSSTGNFWASGLVFVMVRHQIAFMHNGQLMLDRPLANSAHHYCKILCVRPIAAPFSTKVNFRVEGLNLVSDSSRLICSFEGSCIFQEDTDKIVDDVEHDDIEYLNFCCPLPSSRGRGFVEVEDGGFSNGFFPFIIAEQDICSEVCELESIFESSSHEQADDDNARNQALEFLNELGWLLHRANIISKQDKVPLASFNIWRFRNLGIFAMEREWCAVTKLLLDFLFTGLVDIGSQSPEEVVLSENLLHAAVRMKSAQMVRFLLGYKPNESLKRTAETFLFRPDAQGPSKFTPLHIAAATDDAEDVLDALTNDPGLVGINTWRNARDGAGFTPEDYARQRGNDAYLNMVEKKINKHLGKGHVVLGVPSSIHPVITDGVKPGEVSLEIGMTVPPPAPSCNACSRQALMYPNSTARTFLYRPAMLTVMGIAVICVCVGLLLHTCPKVYAAPTFRWELLERGPM

SEQ ID NO: 47889 - protein, 432 aa, Oryza sativa
MMERSLMEALATAAQGGTVGTSVFDMLKYAVLPIAKVFTVCFMGFLMASKYVNILQPNGRKLLNGLVFSLLLPCLIFSQLGRAITIEKMLQWWYIPVNIVVGAVSGSLIGFVVASIIRPPYPYFKFTVIHIGIGNIGNIPLVLIAALCRDPTNPFGDSDKCNEDGNAYISFGQWVGAIIVYTYVFKMLAPPPGESFDSAEEDILPIKASGDNVVPEKGKYPTSTRTSTVPENEPLLSSEGDKNVSTSLGSKIMGIVRSMVKFLKDKQLLQPPIIASVFAIAIGVVPVLKNFVLTDDAPLFFFTDSCLILGEAMIPCILLAVGGNLVDGPGEGSNRLGVRTTVAIIFARLILVPLAGVGIIVLVDKLGFIPKDDKMFKFVLLLQHSMPTSVLSGAVANLRGCGKESAAILFWVHIFAVFSMAGWIILYLSLLF

SEQ ID NO: 47890 - protein, 123 aa, Oryza sativa
MALMLVQNSELNAKLQSVFITRVNMFLLKDLLGRRRSGLAISCRGGTSGGLLLLPGRLSNGGGRLDNRSSQPAVGVMEKRARGEKRRASMARARDDAERLTYRSRCHRVKIERVDGEAVGVNN

SEQ ID NO: 47891 - protein, 590 aa, Oryza sativa; identical to SEQ ID NO: 45519

SEQ ID NO: 47892 - protein, 355 aa, Oryza sativa
METPSAPAPGDGNSAPASSRVTFEDMLRSCDQSYYQMLGFPDAASYFEAKERNLLAQYSRQVFPLLWPILEKDSLTRFNRLCQGWSRLMGLRGFIYPEILSSIVANNALRCARVALQGSSPLRGRRADPNGLHPYGYTALHLAAETFSVEMVKLLLRHGASANHRTEGDYVIEGLLPLHVAVENASMHKYLEDNWADGHSPNNLISLLCLPEMKMYLDTTRLIAQHTHNIVDELWDYIDKKKFVQLAILLLASQKQLHGPINRSRGKANLNGFESIRRRTYEAISGLHLQMIAMVNEGKNGSALKKLKEKKEALLTADALVGIIDKAGQDLEDYIQTNSEVIMVVPRATYVASVI

SEQ ID NO: 47893 - protein, 347 aa, Oryza sativa
MSTIYMSQLSAALPLMEGEHHHHHQDHHQGHFQAFSLQPKDPPVLFPFVISRRSSSSSPSDSTTLSYGSDHHLTQQQQHQHQAMLEPQNMIGGSSAGIFATPFPTVKSIRDDMIERSQFDPYDTEKLQASCGLAKVVAGGKWSAVPAAKMKITRKMGEPSSGVTGGAATTVAPKKPRRRPAQAYEDHGHGGAMGQAFGVIRVCSDCNTTKTPLWRSGPCGPKSLCNACGIRQRKARRAMMASGLPASPNAAGPKAAAHSGATNAAAAAAMEETAESATVAPPPAPTTRGGTLVDSIGLSWSKTHAAATASCSFRPSPVAPGFAAAVQDEITDAAMLLMTLSCGLVRS

SEQ ID NO: 47894 - protein, 359 aa, Oryza sativa
MVAIEAAAAAAAAERGPIRAVAEAEAEAEAKVVDVEGKEEEEEAAKVEEEEEEEREYKSDMRKLEELMSKLNPRAQEFVPSSRRAPPAAAAQAAGGLSADAPVFVSAAEYFGGAGAGAGQLQVGGGGGRDSSSDGSSNGGGQPQNRRRRSGFNQGRRRTGGRTRRADREDSVRRTVYVSDIDQQVTEQKLAEVFSNCGQVVDCRICGDPHSVLRFAFIEFADDAGARAALTLGGTMLGYYPVRVLPSRTAILPVNPKFLPRTEDEKEMVSRTVYCTNIDKKVTEEDVKIFFQQLCGKVSRLRLLGDYVHSTCIAFVEFAQAESAILALNYSGMVLGTLPIRVSPSKTPVRPRSPRVMSN

SEQ ID NO: 47895 - protein, 267 aa, Oryza sativa
MASSCLLLACVVAAAMVSAVSCGPPKVPPGPNITAAYGKQWLEARGTWYGKPKGAGPDDNGGACGYKDIDKAPFLGMNSCGNDPIFKDGKGCGSCFEVKCSKPEACSDKPVIIHITDMNTEPIAAYHFDLSGHAFGAMAKEGKDEELRKAGIIDMQFRRVRCKYPGETKVTFHVEKGSNPNYFAVLVKYVGGDGDVVKVELKEKGSEEWKPLNESWGAIWRIDTPKPLKGPFSLRVTTESDQKLVANDVIPDNWKANALYKSEIQVD

SEQ ID NO: 47896 - protein, 258 aa, Oryza sativa
MESRPGGTNLVEPRGQGALPSGIPIQQPWWTTSAGVGAVSPAVVAPGSGAGISLSGRDGGGDDAAEESSDDSRRSGETKDGSTDQEKHHATSQMTALASDYLTPFSQLELNQPIASAAYQYPDSYYMGMVGPYGPQAMSAQTHFQLPGLTHSRMPLPLEISEEPVYVNAKQYHGILRRRQSRAKAELEKKVVKSRKPYLHESRHQHAMRRARGTGGRFLNTKKNEDGAPSEKAEPNKGEQNSGYRRIPPDLQLLQKET

SEQ ID NO: 47897 - protein, 357 aa, Oryza sativa; identical to SEQ ID NO: 29350

SEQ ID NO: 47898 - protein, 515 aa, Oryza sativa
MAEEPTLPRLPAVSWHSGTQTFGNTRKRLRGDGASTGSPLFSNSSDPAVFSSDDDPSLENYTEGRHRKKRYVGSWFQQHPASGDSAFSEEARPKPKGKRTFQRQLDSGVWMGSDASTDLDDAVPEMGQPVGSRLPQLNVAAVPAVQLLSPAEKEARRVIARSVDEGVEDVDLIGLGLAHVSNETIEPLAGLSCIPLVDEDVPFEHKDPALKLYLANNPLIRAPGALFNLEFLSVLSLRNTKIDELPPAIGNLRNLTTLNVSLNQLRYLPAELLELISHRGKLRSLHLVPNPFHEPKSFSPLEDVAQVEDEAAPPSPEVKPLQWQLRISGRSPVQFSNSHGDVVSQFRLPWPPADDDHSSPLLVEMDDLALAPLLPRSSRGNNSSVAEPSRVPSLMELALQSCSRTGLRRSALPSLLAAGGQPHLAKLTQCILDQGEANANAGTVPCSTCGRRMIVPLAQWLEWWALSPTNTQEGGVNNTAREGIMARVPFLKRACSSRCLPKPTARGAVHDRIST

SEQ ID NO: 47899 - protein, 313 aa, Oryza sativa
MAMKAPASSNSYLLLAPLALLLLAAVVFLLPSLNGARVGSDGGLGVLCARRSAGAEDYTVAAPAAPKEEEKPELSLLVGVLTMPKRYERRDIVRLAYALQPAAARARVDVRFVFCRVADPVDAQLVALEAARHGDVVVLGGCEENMNHGKTHAYLSSVPRLFASSPYDYVMKTDDDTYLRVAALADELRGKPRDDVYLGYGYAMGGQPMPFMHGMGYVVSWDVATWVSTAEEILARNDTEGPEDLMVGKWLNLAGRGRNRYDLKPRMYDLSWDMDNFRPDTVAVHMLKDNRRWAAAFSYFNVTAGINLHHLSP

SEQ ID NO: 47900 - protein, 463 aa, Oryza sativa
MGKRLAGAEKEVLVEIVRFTQKNGLKGAEGGWKDFLARNDKKFGASVSDPKKRSKDVLLAFLLTFSKDFQKYFGKLIRRLNERSAFEQFLKEFPDKISPQLKLVQLTAEHPEYRKNYNFPSYKEGWKVLREGKITNFMKSTMLAIDCEMVLCHDGTEALVRVCVVNSNLEVKLDELVNPLKAVADYRTSITGLSKKDLKGVTCSLVDVQKSLKKLLSKGKILIGHSLSKDLHALKFDYSRVIDTAYIFKYANLPTTASASLNSLCKSVLGYAVREEGEPHNCLKDAEAAMNLVLAKLKHGFNDPIEIARDSVPESDMMKLLAHKIPVYLPCQELLKLFSGNPSIDEKIDSRVRGDYYSTCISFGDRDEVEKAFDELDGQEAKDSSGRLQKNVLLKRDNGDVASFYVRKMAYGAQLNKSELSNKRPPPTEHVEPTKEDNDGDKQKKRKTGKKHEKKKAKISVAE

SEQ ID NO: 47901 - protein, 165 aa, Oryza sativa
MATMPAPVATCFVPATSGVRCRAFSTPITNYSARGVVADPPKLLSRPGNLQLTSGGARFSGRFRASAAAVHKVKLIGPDGAESELEVPEDTYVLDAAEEAGLELPYSCRAGSCSTCAGKLASGEVDQSDGSFLADEQIEQGYVLTCISYPKSDCVIYTHKEEEVH

SEQ ID NO: 47902 - protein, 346 aa, Oryza sativa
MGVSPPGCTCRRRARSGSCGHGGLHRSGGYQAMEEGVCGDSGGAAASFREVALAPCRIGVQYIHGLAARGVHYLHRPGPLLQDLGFMALPELGQDKGYVSESVFTFIFISFLLWSFHPFIYHSKRFYTVLLWRRVLAFLVASQFLRIITFYSTQLPGPNYHCREGSKMATLPPPHNVLEVLLINFPRGVLFGCGDLIFSSHMIFTLVFVRTYHKYGSKRLIKILAWLMAIIQSLLIIASRKHYSVDVVVAWYTVNLVVFFIDNKLPEMPDRTNGSSLLPVTAKDKDGRTKEELHKLEKDCKMKEEFHKLLNGNTVDSTDRRQRVQMNGKHGEDINHTLSDATPNGT

SEQ ID NO: 47903 - protein, 76 aa, Oryza sativa; identical to SEQ ID NO: 36470

SEQ ID NO: 47904 - protein, 653 aa, Oryza sativa
MQDISDENTNSNKDTGHEGLTLLNLDATLTSNENFAQSKIFVAPEDSESEGTISENLFEISNMKGNEENEENSPWDKENITPFVSGDIIVERSQLRLKPTTISQELMDSISPLNLEHNDFSDDESSILSIGEQMNSNELIAKNLIPLTSVDANMQKSHAGFMTIAHLDFKDSILTDEETSVLSPEKYDTISPVRQGNLFPDKENVTPASRDLKPIIGRKVLGPRVDNSLSVECTSKRRIHRQEPNELSAKSKVCHAVDDDVFYSDKENLTPISSGGIKARRCLPKSLTVDADQDQEAFYSDKENLTPVSSASRKTKDLSENRARMESTITKKRVVDRLPFQTLLSNSPLRHTSSLDSTQVNPRAVDVAMKLEGELNNVPHKGQESEKTKEGMKVWTMVTDMECLLDDESRKSIMLLRGLKGTQLVIPMIVIRELECLKKRERLFRMLSKATSMLQWINECMEKESWWIHVQSSTEMLPVAPTPPATPTALCNNGEREISAGTFNPIALFSPRSFSDIVSPKTEDRVLDCALLFNKLKGNQNIVILSNSVTLKIKAMAEGFPCEGAKEFRETLVNPCSSRFMWAASAPRGSAWSCLDETTLEENYYNSHHGARRRIPRPMEPAKGLKLILLHNSHYGQATNFVENRPLAPMASW

SEQ ID NO: 47905 - protein, 129 aa, Oryza sativa
MGFLRTRPAPLFLHKSYQVSKQENDIYLKQTVCSCMVVLAHQENMPFASLTKIKIGGWEEAYWKLNLRIDHLNAVMRDGQGMQVHREVLKVVSGGVCIFFIVVTIRHLKETFARRRAGLPSVISDGHKC

SEQ ID NO: 47906 - protein, 240 aa, Oryza sativa
MATATEEVAAAAAAAGEAPPPPPPAVVEEAKEALEAPKPEEAPKAEEGEEKKAEGEKEKEKAKKERKPRARKPRSAGPHHPPYFEMIKEAIMALDGNGKAGSSPYAIAKYMGEQHMGVLPANYRKVLAVQLRNFAAKGRLVKVKASFKLSAAEEKKATAAKAARSKAAKGVVGGAKRKRTPRPSAAAAKKPASSAEAKKAVPPARPARAKRARKAAPAKPMQPPKSIRSAISKKANKASA

SEQ ID NO: 47907 - protein, 153 aa, Oryza sativa
MYSHPTVAMRPNLPAPPTDDPISSLHLPAALTSILLPPLPPPPPRPFPLRGLAHFLQMNFSGTSSKSLIPEHLVCCQTPQTSHASILSPSSSLAPQVQSTVQFSNPLSILNCTILRLSPVHLPLTLTSWLEPSTCFTRVVSLKFGKSGSCSTW

SEQ ID NO: 47908 - protein, 121 aa, Oryza sativa
MSASFLEIQPSELSFPFELLKQSSCSMQLTNKTDHYVAFKVKTTNPKQYCVRPNIGVVLPGSTCDVTVTMQAQREAPPDMQCKDKFLVQSVAAENGATTQDISAEMFNKVAGKVVEEFSYV

SEQ ID NO: 47909 - protein, 164 aa, Oryza sativa
MRATRRARIVGAVLELYHGKLAIMPLSSKMEFCEFCVAWTGNRSKLDDKPRVAAASEPAAAEEKLRRVPLPWELFQPVLRIVAHCLLGPTNSDELKTQATRAAECMYWRAAETMDARSVLATRSLVRLSQMTEEPIPEPSFSGAVETNMAELEAMRANILSNKN

SEQ ID NO: 47910 - protein, 295 aa, Oryza sativa
MSSPMHVRKAIHFVSMKAKLQSFGGLRLLLVGCLAALLLLFAVRTLSFTTSSATATAAREAAEAGCGKLPAAVAQAMVHYATANVTPQQTAAEIGVSLRVLQLRAPCNFLVFGLGLDSAMWAALNHGGRTVFLEEDASWIASVKAGHPGLESYHVAYDTRVTDADELIALRHEPACTSQPDLAAAAAASCRLALRGLPPVFHEVEWDLIMVDAPTGWTPESPGRMGAIYTAGMAARARTPGAGATEVFVHDVDRHVEDTFSKAFLCDGYLVEQVGRIRRFVIPSHRDKDGTPFCP

SEQ ID NO: 47911 - protein, 436 aa, Oryza sativa
MGFTVTRTSRSLVAPSSPTPAETLPLSVIDRVAGLRHLVRSLHVFEAGGRNGGGEPARVVIREALGKALVEYHPFAGRFVEGDGGGEVAVACTGEGAWFVEATAACSLEEVKLLDHPMVIPKEELLPEPAPDVQPLDIPLMMQVTEFTCGGFVVGLISVHTIADGLGAGQFINAVADYARGLAKPRVSPVWARDAIPDPPRMPAPPPRLELLDLRYFTVDLSPDHIAKVKSAFFESTGHRCSAFDVCVAKTWQARTRALVAAAAAAGDDDQERRTVRVCFFANTRHLMLKGDGAAAAATGFYGNCFYPVAAVASGGEVAGADIVDVVRIVRDAKARLAADVARWAVGGFEEDPYELTFTYDSLFVSDWTRLGFLDADYGWGTPSHVVPFSYHPFMAVAVIGAPPAPKLGARVMTMCVEEAHLPEFRDQMNAFAAAN

SEQ ID NO: 47912 - protein, 144 aa, Oryza sativa
MGIDPATHQPLPNTKVVSQTRTSTLSTATTESAKSNGMAYPFDPEGGCSRDMSVPTDSMEQSSRNTSSHGLDPLVNWLLEAELPADEPWLNFTSSNEDDFSGIVKQSAWDGSTTDWLLDYQDFSMDDSSLIDGARVQNSDGLNF

SEQ ID NO: 47913 - protein, 241 aa, Oryza sativa; identical to SEQ ID NO: 30226

SEQ ID NO: 47914 - protein, 185 aa, Oryza sativa
MPRSRGDESGTNDDGKRGCRALPLAAFLLSDDVHDEGEFAGGRLIPTTTSLLVPSGSRAAIAVDLGGSEQRMAAWQSGSCSPSAARPYNPRCRPCAIEMLDLDLLLYAFLGLIFASVWDDPRNRLVVLASRKFPAAEGRSDLHPVLVMRGTCSSEASASYHLLSMFCILSFFLPRSSLLFRSRQW

SEQ ID NO: 47915 - protein, 317 aa, Oryza sativa
MSPAPQAASPAEDRRGGRAPVPPYVKAAAGSVGGVMEACCLQPIDVIKTRLQLDRSGAYRGIAHCGTTVVRSEGVRALWKGLTPFATHLTLKYALRLGSNAVLQSAFKDPGTGKVSAHGRLASGFGAGVLEALLIVTPFEVVKIRLQQQKGLSPDLLRYKGPIHCARTIVTEEGLFGLWAGALPTVMRNGTNQAAMFTAKNTFDIVLWKKHEGDGKVLQPWQSMISGFLAGTAGPICTGPFDVVKTRLMAQGRTGDIKYKGMVHAIRTIYTEEGLRALWKGLLPRLMRIPPGQAIMWAVADQVMGLYERSYLQPAHM

SEQ ID NO: 47916 - protein, 125 aa, Oryza sativa
MIPSMRGMMMVVLRRMAPRQVGERRMVTHTREIQRSMHLQQKRSTITPRRTLIDIAEEKMFLKIKISGLLKIEMVMIEKHFPDMIIVKLGALRSKGLMMINIKKSTRMIMKGIKDSKMTSVWMSG

SEQ ID NO: 47917 - protein, 213 aa, Oryza sativa
MEVKLWNDKRERELLESLADLYAIIKAKEKLERAYVRDLVSAADYEAECLKLISQFNSLSSSLAGVVTIPRFVEAYRLDCPAALNRLVQSGVPATVELRAAASSSAPASSAASAAAIAQCVQSFITAMDAVKLNMLANDQVRPLLHDLSTSMGKLGPVLPPDFEGKVKVSEWLAKLNKMGAGDELTEQQARQLNFDLDSAYSAFMASLPSTGL

SEQ ID NO: 47918 - protein, 157 aa, Oryza sativa
MEMEASAAEGGAAAAARTLRWAGRAGHLGGFPRAAVIAAVGAVAKAYASLLNTTTVHNADALLRLVSSRPPGTPLLTVSNHMSTMDDPLMWGFKGFPTTDAKLQRWVLTAEDICFRNVFMSYIFRLGKCVPITRGAGIYQDHMTEALEVLSTGDWEK

SEQ ID NO: 47919 - protein, 312 aa, Oryza sativa
MSPSPLLARPPAPSSPSTYPSLPPRRCAPAVASAALRVAPATASRAPFSRLVTKRNFAASDIREDYSTPIDVVADVKTEKIVVLGGSGFVGSAICKAAVSKGIEVVSLSRSGRPSYSDPWVDQVTWLAGDVFYARWDEVLVGATAVVSTLGGFGNEEQMKRINGEANVTAVDAAKEFGIPKFILISVHDYNLPSFLLNSGYFTGKRKAESEVLSKYPTSGVVLRPGFIYGKRKVDGFEIPLDVVGQPLEKLLSSVENFTKPLSSLPASDLLLAPPVSVDDVAYAVINGVIDDSFFGVFTIEQIKEAAAKVRV

SEQ ID NO: 47920 - protein, 354 aa, Oryza sativa
MAKEAFVNGFLSVFMHVGLTLVLLVYLPIAFACRALGRLLVRPFVSGEDLRGKVVLVTGASSGIGEHLVYEYAKKGACVALTARTEIALRAVAKTARDLGAPDVLVVPADITKVDDAKRAVEEAVAHFGKLNHLVANAGIWSSCFFEEITNITAFHNVIDLNFWGAVYPTYFALPYLKASRGNIVVTSSVAGRVPTARMSFYNASKGAVIRFYETLRAELGSHVRVTILTPGYVVSNLTMGKGIQKDGHVGIDEEARDINVGPLPVGKTETLAKVVVAAVRRGDYYVTWPGWYWPFHMVMCTAPELVDWFSRTFYVSKSSDHDGDALSKKILEAVGGKKFLYPKTIRSHAIAAS

SEQ ID NO: 47921 - protein, 529 aa, Oryza sativa
MAEEVYVASIDQGTTSTRFIVYDRHAKPVASHQLEFKQHYPEAGWVEHDPMEIMESVKICMAKAPDKAAADGHNMDVGLKAIGITNQRETTVMWSKSTGLPLYNAIVWMDARTSPICRRLESDLSGGRTHFVETCGLPISTYFSALKVLWLIENVDAVKNAVRAGDALFGTIDTWLIWNLTGGIGGTDRDGNKVFGHHVTDCSNASRTMLMNLKALDWDKPTLETLGIPAEILPKIISNSERIGVVANGFPLAGVPIAGCLGDQHAAMLGQLCQKGEAKSTYGTGAFILLNTGEEPTQSSHGLLSTIAYKLGPSAPTNYALEGSIAIAGAAVQWLRDSLGIISTAADIEKLADTVQDSGGIYFVPAFNGLFAPWWRDDARGICIGITRFTNKGHIARAVLESMCFQVNDVLSSMHKDAGEAGEVKSAEGEFLLRVDGGATVNNLLMQIQADLLGSPVVRPADIETTALGAAYAAGLAVGVWSKEQIFAGLHKENTRVFRPKLDEAHRRKRADSWYKAVSRSFDLADLSL

SEQ ID NO: 47922 - protein, 193 aa, Oryza sativa
MDKMMRSQGGGGVAGEYQYYYHGGTGAGGLVDQEMAVAAPATSDDDGVVLLMELLDGEEEMGDDYSPSPAATTDGDGDADQLSRVIRSLEAEIGGGGATGAVAAATATRDSDESMAAAGPASDDDGAAAAGIRRLEDMFSDDLDGYGGGAFGYGWPPELALPAAASWCVYDDEHLYYGDGSIDEQVYSPLWEQ

SEQ ID NO: 47923 - protein, 386 aa, Oryza sativa
MACSLLLTILPEELVVEILIRLTDLADLARAASACKPLRRLITSRAFLARLHALHAKPLLGLLLLERDRCGFLPAATAVAAAVARASDFAFSFLPDHAAGWRLRDVRHGLALLSSSSSSSYLSPLGDRGFFPDVVVCDPMRRRHVRVPPIPDDLTAGVRRIAVEHFDYLLAPAGRDGSSFRVVCRPKLPKQCDVTVFVFSSGAAFWRAAVLDACAATEKLFLPQSVHGYVYWRTHSSGTLLMLDTRDMDFFFVNIQTNKCVIGEAEEVGRLAVFNTIVDVGVHKVEILSKAIRGGADEPWRHDRTIPLLPGYKWRAARMAEGYLLLHGIVGNNSWSTPGIQLQHFTLDLKTLKLESLCDSISRGRHHHPQFDLYRSFPPPLSLSSI

SEQ ID NO: 47924 - protein, 438 aa, Oryza sativa
MNILERIRGGGDRAAVGEGPREPEPWVEISESISRLCSFDAGRVSVKVIQDSRPIHDKMIDSFLNKFFPSGYPYSVNEGYLTYTKFRALQHFSSAMLHVLSTQSLLFAAGLRPTPAQATAVSWILKDGMQHAGKLICSGMGARMDSEPKSWRILADVLYDFGTALEVISPLCPQLFLEVAGFGNFAKGMAVVAARATRLPIYSSFAKEGNLSDLFAKGEAISTLFNVMGIGAGIGLASTVCSTTQGKLIAGPLLSVVHIYGVVQEMRATPVNTLNPQRTAMIVADFIKSGKVSSPAELRYREDLLFPNRLIEEAGSVKIGQPVRRVLSPQRIEQLKATFSKEKFLLSRKDNSAYMVLEQSATGEDALRGWLVAAFASEMERSGVGSGDTVLNVAYERMENVFPMFVAEVKSRGWYTDQFLDGNRSRIAYANPISGSAL

SEQ ID NO: 47925 - protein, 426 aa, Oryza sativa
MKPTTGTAAAAAVDRRWLLPLAIGSALSLLLLVLLTTFPLPFPFPSSAASRPPNPTLFVEHKLAPSPPSTATPPRFAYLISGSAGDAAALRRVLLALYHPRNLYILHLDAEAPDSDRANLAADLADHPVIAAAANVHVIQRANLVTYRGPTMVANTLHAAAAFLYTNQHPHLEWDWFINLSASDYPLLTQDDLIHVFSKLPRGLNFIDHTSNIGWKEYQRAKPVIIDPGLYMKKKADVFWIPQRRSVPTAFKLFTGSAWMALSKPFVEYCIWGWDNLPRTVLMYYANFISSPEGYFHTVVCNAEEFKNTTVNHDLHYISWDNPPKQHPHYLTIEDLDRMVASDAPFARKFHADDPVLDKIDAEILLRGPDMLTPGGWCGGTRENGSDPCSVIGNTTHLQPGRGAVRLQRLMTSLLSEEKFHPRQCK

SEQ ID NO: 47926 - protein, 92 aa, Oryza sativa
MQDIQLARCSSQHHGSEAAVTARGDSAGGLEMCPALYLAASKGRAEEVMALLLQPRHGGVAQGHLDQVNDVVLSAVMARATGSFATSSQIHN

SEQ ID NO: 47927 - protein, 827 aa, Oryza sativa
MGGSAVNCAVQNVSLDTLFLIVIQGAAVIVLGKFIHLSLRRHNLPSAISQIVAGVAVSSLGLHDMVVHVEVQNVEDTYGWYVSEARIFYMFYVGLDADLAALWNDAHRCTVVTYASVATCLLLAAFVSGGIYGSMMHTPVRSPELLSAVLMLTLANTASVDVSRMAAELDLTATGGGRLAVSTAIATNIICIVGEGVFSCMKLASSRTPGYSASERLGMGVLALLKVGVTMALLRPVAAYMNRRNAGRHRIGNWELVLLLVAVSFVGNFPEHAGFDGVPASLLLGLAFPREGPVARSVMDAIAYPLHALALPFYFGAMGMRINFGAMSGAIVVPAVLLTLLGLFGKCAGTMAAARYLKMPLADAIRLGVLLNIKGHVNMIDMSFASSEGIWAEQALMAMVVGSIISTVVAGPVFAVLFRKEKEAYACSDQALEHMAPDKELRMLACVHGARGAPAMLSLLELLATTPRAQPTIHVLHLFDASRKHVGPKRYHQRVQDSDKHIDRRIDDATQVNWAVDVFTSVTGLAIRQFDVGDRGAAMKNAKNIHRRLEEVRAGLLLLPYHKEQRYDGKMVCRRDDRCELNRKVLELAPCTVGVFADRPFWRGGASFRLPTKISTSEETTAARNQGDQKAGTQIAAVFLGGPDDREAVAFACRLAKNDGAIRLTVIRLVLGVATNDDHRIPTTSAANHIGIYDDDDEDGGEEEVLSVVVQDDDPDERCVSELRREYVAKERAEYVERAVSGAVDVAAALRATAGAFALVVVGRGGRQPPELEVGLEGWVQMIEYPEVGPVGEMLASEESLEMGSVLVVQQRTAPPPPFHLNIPPAI

SEQ ID NO: 47928 - protein, 845 aa, Oryza sativa
MQMCGWLLKVVRWENLNCVHMEAHGNRRSSPTYLVMLWMISVASLLITCRGSIQKQVLFPGFTAAQMDYIDNDGIFLLSNGSVFGFGFVTSNVSDNTFYILAVVHMATTTTVWSANPNSPVTHSDDFFFDKDGNAFLQSGGGSNVWAANISGKGTATSMQLLDSGNLVVLGKDASSPLWQSFSHPTDTLLSGQNFIEGMTLMSKSNTVQNMTYTLQIKSGNMMLYAGFETPQPYWSAQQDSRIIVNKNGDSIYSANLSSASWSFYDQSGSLLSQLVIAQENANATLSAVLGSDGLIAFYMLQGGNGKSKFSITVPADSCDMPAYCSPYTICSSGTGCQCPLALGSFANCNPGVTSACKSNEEFPLVQLDSGVGYVGTNFFPPAAKTNLTGCKSACTGNCSCVAVFFDQSSGNCFLFNQIGSLQHKGGNTTRFASFIKVSSRGKGGSDSGSGKHNTIIIVIMLGTLAIIGVLIYIGFWIYKRKRHPPPSQDDAGSSEDDGFLQTISGAPVRFTYRELQDATSNFCNKLGQGGFGSVYLGTLPDGSRIAVKKLEGIGQGKKEFRSEVTIIGSIHHIHLVKLRGFCTEGPHRLLAYEYMANGSLDKWIFHSKEDDHLLDWDTRFNIALGTAKGLAYLHQDCDSKIVHCDIKPENVLLDDNFIAKVSDFGLAKLMTREQSHVFTTLRGTRGYLAPEWLTNYAISEKSDVYSYGMVLLEIIGGRKSYDPSEISEKAHFPSFAFKKLEEGDLQDIFDAKLKYNDKDGRVETAIKVALWCIQDDFYQRPSMSKVVQMLEGVCEVLQPPVSSQIGYRLYANAFKSSSEEGTSSGMSDYNSDALLSAVRLSGPR

SEQ ID NO: 47929 - protein, 314 aa, Oryza sativa
MEPMSVDGGGGCGGLDTQIEQLMQCRPLAEQEVKALCEKAKEILMEESNVQPVKSPVTICGDIHGQFHDLVELFRIGGKCPDTNYLFMGDYVDRGYYSVETVTLLVALKVRHPHRITILRGNHESRQITQVYGFYDECLRKYGNANVWKIFTDLFDYFPLTALVESEIFCLHGGLSPSIENLDSVRSLDRVQEVPHEGPMCDLLWSDPDDRCGWGISPRGAGYTFGQDISEQFNHTNNLKLVARAHQLVMEGYNWAHEQKVVTIFSAPNYCYRCGNMASILEVDDCNSHTFIQFEPAPRRGEPDVTRRTPDYFL

SEQ ID NO: 47930 - protein, 325 aa, Oryza sativa
MPATVSAAGVAAAGVGDGGGAGRAAVSAVTSVYRSRLSASGKDLVIDVTWSRAPDGPALSVAVHDAAAASRLRGGGGGAAGAAPRHLHRRKGSGTFTAGSCVVGVFWDFAAARYAAGPEPVSGYYVAVVADAEFVLLLGDMSRGYVERLHGGIPIAGSRMARRRERFVGCGCWSTRARFLESGAEHDIVVALDGDAEAWVTVDGRKVVQLRRLRWNFRGSHTLFLDGGAPVDMTWDLHGWLFHAADPSPASSCAAVFTFQTRGASETKFWIEDDGDGDDDLEQSQPPAAPRGPKQKLGGGGGGGAPSGQGFCLLIRGFRGASKIA

SEQ ID NO: 47931 - protein, 362 aa, Oryza sativa
MSAYCGKYKDELIRNAAYIGTPGKGILAADESTGTIGKRLASIGVENVEENRRALRELLFTAPGALDCLSGVILFEETLYQSTRDGTPFVDVLAAAGVLAGIKVDKGTVELAGTDRETTTQGHDGLGERCRRYYAAGARFAKWRAVLSIGRASSRPSQLAVDANAQGLARYAIICQENGLVPIVEPEILVDGEHGIEACAEVTERVLAACYKALSDHHVLLEGTLLKPNMVTPGSDAARAPPEVVAEHTVRALLRTVPPAVPAIVFLSGGQSEEEATRNLNAMNQVASRGKKPWSLTFSFGRALQQSTLKAWAGKAENVGKAQAALLARCRANSQATLGAYAGDAAAGEGVSENLHVKDYKY

SEQ ID NO: 47932 - protein, 325 aa, Oryza sativa
MADSKGSGGAAGDKPGADASPATNPAPPAAAVAVAAAAADAGGDDDVAAAAEARRPFTALSQVDADLALARVLQEQERAYMMLRMGGGVGEGSDYGSSDAGSYEYDDEAEEDYEEELEHHLRVHHHEHAVGEGRGEGERDGEGAEGSEFEEEGFDEEYDEEEVEPELDPAEYEDDEAYARALQDAEEREVAARLMALAGISDWRPVEPVEEHANDPQDAWQEVDPDEYSYEELVALGEAVGTGHRGLSAATLASLPSVTYKAEGVQDGNTEQCVICRVEFEDGESLIALPCKHSYHPECINQWLQINKVCPMCSAEVSTSDSNQA

SEQ ID NO: 47933 - protein, 753 aa, Oryza sativa
MPLTLRARASWSPQASVMPTWWKRSKSAFQRSSAVSSAPASPARASTSSCAAPGRRSAAGRCADDAGGLLLARRRQLTRQRKLRHVDDIGVGLESLGLVVANSSPPPRGRASTSAAVGHPVSIPIARSASSAEFRAVHQPPPRAATAASPVLLPLPLPSPKPVESDTSEPDVGGERATRVTSQIVQNFPDNNNNLPDNSSKRTTTSSHHRKVFREKFQDKSSTETANFRLNIPAKSAPSSGFSSPVCSPRRFSNAEYTTPTAQGPQAWSAPSVRSVDSMATSSPRISPEIYTGVTEQSTFSNSLRSPILMSKNSSAPPSPLHPKLFPENNMSRIEGNGNVSFHPLPRPPGAINSMQTSIVNQSAPKVEMPSVAGQWQKGRLLGSGTFGCVYEATNRQTGALCAMKEVNIIPDDAKSAESLKQLEQEIKFLSQFKHENIVQYYGSDTFEDRFYIYLEYVHPGSINKYVKQHYGAMTESVVRNFTRHILRGLAFLHGQKIMHRDIKGANLLVDVSGVVKLADFGMAKHLSTAAPNLSLKGTPYWMAPEMVQATLNKDVGYDLAVDIWSLGCTIIEMFNGKPPWSDLEGPAAMFRVLHKDPPIPDNLSHEGKDFLQFCFKRNPAERPTASELLEHPFIRNSSHYNKHGSIHSFAGIKSNDNNNGNGSRDKAASKSDSCVKGKITVGEPTNARPSESSAFRLTPLSIQEVAPNFSSRPLGLTSNPSPSANLVNTVYFPIANSQRSPLPRPNEKEALF

SEQ ID NO: 47934 - protein, 388 aa, Oryza sativa
MGNSSSSGSHRPPRPASSESALPPAAAAAEELSSYEAACRSDPELRTFDTTLQRRTSRAISTLAVGVEVRSLSLESLREVTGCLLDMNQEVVRVILDCKKDIWKSPELFDLVEDYFESSLHTLDFCTALDKCLKRARDSQLLLHVALQRFDDEEDNDAAAAGQEDAAPSARYARTLHELRQFKAAGDPFTEEFFSAFQAVYRQQLTMLEKLQQRKHRLDKKVRAIKAWRRVSSIIFATTFAAVLICSVVAAAIAAPPVAAALAAAASIPVGSMGKWVDSLLKGYQDALRGQKEVVSAMQVGTFIAIKDLDSIRVLINRVELEISSMIDCVEFAERDEEAVKFGVEEIKKKLEVFMKSVEDLGEQADRCSRDIRRARTVVLQRIIRHPS

SEQ ID NO: 47935 - protein, 519 aa, Oryza sativa
MAIGAFVEGGGSGYSGRVTPFVVLSCIVAGSGGILFGYDLGISGGVTSMEPFLKKFFPDVYHQMKGDKKKVSNYCRFDSELLTVFTSSLYIAGLVATLVASSVTRRFGRRASILIGGSVFVAGSVFGGAAVNIYMLILNRVLLGIGLGFTNQSIPLYLSEMAPPQHRGAINNGFELCISIGILIANLINYGVDKIEGGWGWRISLSMAAVPAAFLTVGALFLPETPSFVIQRSGDVDSARALLQRLRGTAAVHKELEDLVMASEVSKTIRHPLRNMLRRRYRPQLVIAVLVPLFNQVTGINVINFYAPVMFRTIGLRESASLMSAVVTRVCATAANVVAMAVVDRLGRRRLLLVGGVQMLVSQVMVGAILAGKFREHGEEMEKEYAYLVLSVMCVFVAGFAWSWGPLTYLVPAEICPLEVRSAGQSIVIAVIFLLTFLIGQTFLAMLCHLKFATFFLFAACLCVMTLFVFFFLPETKQLPMEQMDQLWRTHWFWKRIVGDSPQQQVVELHHHHQRSSSE

SEQ ID NO: 47936 - protein, 300 aa, Oryza sativa
MEERQAVNPACPNAANPFHRCADYCPVPAPAAATAKPPPPPPSSRPAQNGTAAPQNGTAAAQNGIAEQNGSTHSDGELQAKPRRRDRAGGSGGLPFYVFLREGADGDGKKVDPRCPNAPNPFHVCTEHCAAKMAEVSRSSEGGKSPMSLFSRHSRRSSSSEDGSVRSGSSKKVDPKCPNAGNPFHECTEHCAAKMKEVGQQNKTVKKSSSRKKGGKEISVVQNWKVDPRCPNASNPFHIRAQYCFDHLNETGQKDTSKPDSRKGKAVVKAEQTGEINPDCVNASNPYHKCGEHCKRKGDR

SEQ ID NO: 47937 - protein, 297 aa, Oryza sativa
MYGMGFDHSFGLWFVARWLKPDLMIESGAFKGHSTWVLRQAMPNTKIISLSPRHPEKYLKKGPAYVDGNCTYLAGKDFIDFGSVDWGKLLRNHGISDLSRVLVFFDDHQSELKRLKQASIVGFRHIIFEDNYDTGTGDHYSLRQICDQEHIRGGGHSCFWDSDEARLRSRRKSFWEKAVETDELCGKDDAWWGVRGYMRDNFNHSNKAISYKEHFQNSRLVESVLDLYWELPPVAGPSLTHQTRYDPARASDPIIEDGRFGMFQRIGLARLDASVFNGYTQMSYVQISGSMLSREDA

SEQ ID NO: 47938 - protein, 269 aa, Oryza sativa
MERRSSVRFAPSEIARMEKLVTHKKEQVLDEIFCRKLAEEFNCSPGRVGSKALQAVQVQEWFRQKFPASTVIPPCLPTGSEEKALASQASARVSEEKPPSSEENALAVDTSISNDIGEVSPDLPIDNIDKLPEIEDMQFEARSSKDFAWYDIATFLAYRKLSSGEFEVRVRFQGFGAEEDEWINVRKAIRLQSIPLESSECKLIREGDLVLCFKESNDEALHFDAHVLEIQRKQHDIRGCRCVFLVEYDHDGTQERVNLRRLSRRPKHS

SEQ ID NO: 47939 - protein, 42 aa, Oryza sativa
MVNADPFLVCPPDHAGNLEHAANVIGQSKMVMPMFWWMSVTP

SEQ ID NO: 47940 - protein, 166 aa, Oryza sativa; identical to SEQ ID NO: 30291

SEQ ID NO: 47941 - protein, 406 aa, Oryza sativa
MIRKKASPHCLHDVSGSCPHLSILLHSSRRPESAPVPCLLPMEAKIPLLTPHTMGRFHLAHRVVHAPLTRSRCYNNLPQEHVQLYYSQRATNGGLLIAEATGVSETAQGYPNTPGIWTKEQVEAWRTVVDAVHQKGGVFFCQIWHVGRASTNDYQPNGQTPIPCTDKKITPTVLKDGTVEEFSAPRRLREDEIPQIVDDFRIAARNCIEAGFDGVEIHCAFGYLIEQFMKDGVNDRTDKYGGSIANRCRFALEVIQAAIDEIGSDRVGVRLSPYSNCLDCWDSDPDALGLYMIQAMSKLGVLYCSMVEPEVVKVDGKVQIPYKLWHFRKVFAGTFIVTGGYNREEGNRAVSQGYTDLVAYGKWFLANPDLPRRFELNAPLNKYDRSTFYTSDPVIGYTDYPFLSPL

SEQ ID NO: 47942 - protein, 410 aa, Oryza sativa
MTGADEPSITRWTFEDFEVCYEVRLGIRREPGGDEDGDGDGGGGRGYAPLGSGSAGSTRPSAAHANGGADLAVFEQFERLERKVELRNGAIEAGPPQKSLLPSFESAEMRNLAETLLRDIIRGSPDVKWESIKGLENAKRLLKEAVVMPIKYPKYFKGLLSPWKGILLFGPPGTGKTMLAKAVATECKTTFFNISASSIVSKWRGDSEKLVKVLFELARHHAPSTIFLDEIDAIISQRGEARSEHEASRRLKTELLIQMDGLTKTDDLVFVLAATNLPWELDAAMLRRLEKRILVPLPEQEARHAMFEELLPSVPGTMNIPYDVLVEKTEGYSGSDIRLVCKEAAMQPLRRLMSVLEGRQEEVPEDELPEVGPVTTEDIELALRNTRPSAHLHVHRYEKFNQDYGSHVLS

SEQ ID NO: 47943 - protein, 203 aa, Oryza sativa
MAGKSGARTRKRVEATDSAVLKRARDGSAFTRCEACGKSVSVVLIDMHNCSLDDKIRISLEAQVVEQAVEVAASKKKSGKNNNNNGEGAKKGKRPPTAFFLFMSDFRKEYKAEHPDNKSVSAVAKEGGERWKSMSDEDKKPYLDKAAELKAEYHNGERSDENNVGGNAGEQEVDQPPKKGTDEDDQEDEDGAEEEKNELDDDI

SEQ ID NO: 47944 - protein, 562 aa, Oryza sativa
MAELAAGGDQRAALLAAATLFPPPPDGARFSYGTAGFRAEGAAMGPAVCRAGVVAALRSAKLGGAAVGVVITASHNPVRDNGVKIVDADGGMLSQDWEPFADALANAPNPDALLQIVLQFAKDEDIKLGGSHSAQVLLARDTRPTGEYLLDVAVKGVNAVIGAVAVDMGILTTPQLHWMVRSKNKGLKSSETDYFSQVIDSFRCLLELVPEDKEADVINNRLIVDGANGIGGLKLEEIKAKISGLDIHVRNSGKGEGILNESCGADFVQKEKVVPLGFGPEDVGFRCASFDGDADRLVYFRIVSSSDTRIDLVDGDKILSLFVLFIREQLDIINGKDNKGNEVLPTRFGVIQTAYANGASTDFLKNIGLEVVFTPTGVKYLHKEALKYDIGIYFEANGHGTVLFSDHFVSQLESLTSEFSSKAAGSSQHQAAMRLLATSQLINQAVGDALSGMLLVEAVLQYKGWSFQNWCDLYTDLPSRQLKVKVQDRNSIVTTDAERRVCQPNGLQELIDGEISNYSHGRCFVRPSGTEDVVRVYAEASSEEAADCLAKRVAQHVERILG

SEQ ID NO: 47945 - protein, 203 aa, Oryza sativa; identical to SEQ ID NO: 30390

SEQ ID NO: 47946 - protein, 216 aa, Oryza sativa
MAAAAAAAADADAAGERAAGAGLGSRSAAEERSLLHPSLFSAYSDEDLVERAFEPAQKIVVSISSDPDDPDADDEHLYYGGHAPPFSWRKLWLFTGPGFLMSIAFLDPGNLEGDLQAGATAGDTLLWLLFWATAMGLLVQLLAARLGVATGKHLAELCRDEYPDWTRRALWLMAEVSMVSADIQEVIGSAIAIKILSNGFLPIWVGVVITALDWLM

SEQ ID NO: 47947 - protein, 597 aa, Oryza sativa
MDTTIGSVPTASDAAAPAPAANSAPREATLGRHLARRLAEVGARDVFTVPGDFNLTLLDELEAEAGAGHGGVRLVGCCNELNAAYAADGYARARGGGVGACAVTFTVGGLSAINAVAGAFSENLPVVCIVGGPNSNDYGSNRILHHTIGLPDFTQELRCFQTVTCYQAVVNNLEDAHEQIDAAISTAIKESKPVYISISCNLPSIPHPTFSRHPVPFFLSPRLSNQMNLETAVETAAAFLNKAVKPVLVGGPKMRVAKACKSFVELADACGYPVAVMPSAKGLVPEHHPRFIGTYWGAVSTPFCAEIVESADAYLFAGPIFNDYSSVGYSLLLKKEKAIIVQPDRVVIGHGPAFGCVLMKDFLHALSARLKKNTAAYENYRRIYVPPGEPPLSEPGEPLRVNVLFQHIQKMLSANSAVIAETGDSWFNCQKLKLPEGCGYEFQMQYGSIGWSVGATLGYAKAAKDKRVIACIGDGSFQVTAQEVSTMLRWGQKSIIFLINNGGYTIEVEIHDGPYNVIKNWNYTGVVEAFHNGEGKCYTAKVRTEEELKEAIEEAQGPKKDCLCFIEVIVHKDDTSKELLEWGSRVSAANSRPPNPQ

SEQ ID NO: 47948 - protein, 674 aa, Oryza sativa
MAISSALSFLSYRKRPIVVSVFLFLLLSSLFLLFSPAPAALPFFSFPSSHLSSSSSSPIAATPPPLTPVSVPANASSPETPVDASGGSNAGATAPTRDAPQPDRSRSTPPAAVGVRGSAGTNGTSRGVSAGGDGAGAAAAAAAGVAVPSWEVCEVGKGVVAADYIPCLDNVKAVKALKSLRHMEHRERHCPTAPRPRCLVPLPTGYRSPLPWPRSRDMIWYNNVPHPKLVEYKKDQNWVRKSGNYFVFPGGGTQFKAGVTKYIRFIQQIMPNIEWGTHTRTVLDVGCGVASFGGYLLDRNVITMSVAPKDEHEAQIQFALERGIPALLAVIGTQKLPFPDNSFDVIHCARCRVHWYADGGKPLLELNRVLRPGGYYIWSATPVYRRGKRDEDDWNAMVTLTKSICWRTVVKSKDVNRIGVVIYQKPTSNSCYFERKQNEPPLCPSREGSHSPWYAPLDSCLLLPAVSSSGEGNSWPISWPERLNIKYSTISDNASTQFSQEKFDSDTKHWKDLVSEVYFNEFAVNWSTVRNVMDMNAGFGGFAASLIHKPLWVMNVVPFDHPEALPIIFNRGLIGVYHDWCESFNTYPRTYDLVHMSYLLQGLTNRCDIIEVAAEIDRILRPGKWFVLQDTEQVIRKMDPVLRSLHYRTAIVKQQFLVATKGFWRPYSAGSESR

SEQ ID NO: 47949 - protein, 201 aa, Oryza sativa
MSFTGTQDKCTACDKTVHFIDLLTADGVPYHKTCFKCSHCKGILSMCSYSSMDGVLYCKTHFEQLFKETGSFSKKFAPGCRSTDKELARAPSKICSAFSGTQDKCAACQKTVYPLEKLTLEGESYHKSCFKCSHGGCILTTSSYAALNGVLYCKIHFGQLFMEKGSYNHMKKKSESQEVLPEVVPEEQPAPPPPDENREDN

SEQ ID NO: 47950 - protein, 555 aa, Oryza sativa
MGGYEYATNGYHRGMEDDYEDEYYSEDPYDEEGEGAGQEYAEEDDEPPEGQQEFLQIRERLKEQIRRKAQAASASAAGRSSSSHDRKPQSTFGSFFGPSKPVISQRVIEERKSLKELQNTASMSRDRRPSAKEIPSSSKVQSKTNGHHHKQKIVNEAKRKAEALKDNRDYSFLLSDDADISPSPMEKPVARSSLSQKSDRESTHSAVKSRAPTGQTARLSNGYGLKNTLSSQRHTEGRVDSNRKVAGANRERVVLPDNGRMHSVVRNGSTQATTSKAASQKLPSKAPIANRPPIKSVSDQSLRANHSASKQLLSQNGRPQSSQSQRMQSTSHGQRPHQPVQSQWPLQSLQGRRPQQSPQNTRPQLMSKSQRPQQSLQRQRPQLSSQNERLESSERQRPPSQSYRPQSSQGQRPSSVQGRQYSEQRRIQANDRVKSAERQIRPPSKPMPSRQIPSNGMRDAHAKKKQPMKRRFNDLSEDEEDPLAMIRSMFRYDPSKYAGRDDDDSDMEADFATIEMEEQRSARIAKEEDDEQLRLIEEEERREQERKRRKMARGR

SEQ ID NO: 47951 - protein, 474 aa, Oryza sativa
MAKRMNPCHGKLVPKNKRAILQFDDIPEDVVFLIIRLLSLTNAARVSMVSQKWLQSWRLYPNLEFTSKALGLNKRVHKQGRRAKFVRCVNTIIRHHAGTGINSFTLKRNLNNHKYAHYIDRWIYFAVRSGANELTIDLSPRWYAHPRDVKYSFPSSNVAAPEPTSIEHLKLCFMNLRPLPTFSGLRSLKTLDLALVCITTEDLESLLSYTPALQQLKLRQCPMLEYLKITDVLAKLVYIDIVPCLWLKILEIHAQNLVAINTYNICHLKIVLSEALVLKGAHIELVLSSDVIEYAFTDLAPLMPDLESLFLSGCTEMIISRRPPSNRFHCLKQLELKLQDISTKYDLLFLAKFVDAAPVLEALVFHLEDIEEPFCYMEKEAELRSLEKHCPHKNLKLVKMTGFSAGRSSLELALYFVENSPALELLILDHRLDRSVCRITFGGDLDAKCSKGYEHTISKYVSNAIPRRVRLSYS

SEQ ID NO: 47952 - protein, 329 aa, Oryza sativa
MAFLKTLNPLLRRSPTPIPNPRSLLSLDAFLAASSPTAASHATAPAPFAAAAHHHVPIRSGGPLFLSSPPWMLSQSATPLTAAAAALRARLRRARALAGGGAQAVADAVGWEPRRISRDESEVAEAVTGGRERFLNLPNLVSIGRMASGPVIGWMIVNEWYLPAFGTLALSGASDWLDGFLARKMGINSVFGSYLDPLADKVLIGCVAIAMVEKDLLHPGLVGLVVVRDLLLVGGAVYKRASSLGWKWNSWSDFVNLDAIHREKVKPLFISKVNTVFQLMLVAAALLQPEFGTEETQNYITVLSWLVASTTIASTVGYGIKYRQIRPRR

SEQ ID NO: 47953 - protein, 423 aa, Oryza sativa
MARKKIREYDSKRLLKEHLKRLAGIDLQILSAQVTQSTDFTELVNQQPWLSTMKLVVKPDMLFGKRGKSGLVALNLDIAQVKEFVKERLGVEVEMGGCKAPITTFIVEPFVPHDQEYYLSIVSERLGSTISFSECGGIEIEENWDKVKTIFLPTEKPMTPDACAPLIATLPLEARGKIGDFIKGVFAVFQDLDFSFLEMNPFTIVNGEPYPLDMRGELDDTAAFKNFKKWGNIEFPLPFGRVLSSTEGFIHDLDEKTSASLKFTVLNPKGRIWTMVAGGGASVIYADTVGDLGYASELGNYAEYSGAPNEEEVLQYARVVLDCATADPDGRKRALLIGGGIANFTDVGATFSGIIRALREKESKLKAARMHIYVRRGGPNYQTGLAKMRKLGAELGVPIEVYGPEATMAGICKQAIECVMAAA

SEQ ID NO: 47954 - protein, 447 aa, Oryza sativa
MNGAGGNHQQQQQQQQRLRQQQQQQALLMQQALQQQQQYQSGVLAAAAAAAMTQMEPISNGNLPPGFDPSTCRSVYVGNVHPNVTESLLIEVFQSSGLVERCKLIRKEKSSFGFVDYYDRRSAALAIMTLHGRHICGQAIKVNWAYASTQREDTSGHFHIFVGDLSSEVNDATLYACFSAYPSCSDARVMWDNKTGRSRGYGFVSFRNQQEAETAITEMTGKWLGSRQIRCNWATKNNAEEKQETDNHNAVVLTNGSSSNPGMEASQDTGSKENPENNPDCTTVYVGNLGHEVNRDELHRHFYNLGVGAIEEVRVQQDKGFGFVRYSNHGEAALAIQMANGLVVRGKPIKCSWGNKPTPPGTSSKPLPPPLPSYQPVPMAGVPQGFSAADIVAYQRQLTLSQVAAGQIAGQHGLAGQVSAGLLAAGSQALYDGYPNQSSAQQLMYYN

SEQ ID NO: 47955 - protein, 235 aa, Oryza sativa
MAAAAEEAGLGHPSRYVQLTRDQDAPADEDIRPGELNLPAHFPQLEQRRCCECGQQLPESYEAPADEPWTTGICGCAEDTESCWTGSFFPCVLFGHNVEALREDIPWTTPCTCHAVCVEGGIALAILTVIFPGIDPSTSILIGEGLVFSWWLFATYTGIFRQQLQRKYHLKDSPCDPCLVHCCLHWCANCQEHRERKGRLADNNANRNTIVNPPPMQEMSVVGNHPSITPENGAA

SEQ ID NO: 47956 - protein, 418 aa, Oryza sativa; identical to SEQ ID NO: 32265

SEQ ID NO: 47957 - protein, 294 aa, Oryza sativa
MRKAAALASAAMAAAAVAVVSTVLHQRQRRAAKRSERAEAVLLRDLQERCAAPVELLRQVADAMAAEMRAGLAAEGGSDLQMLVTYVDSLPSGGEKGMFYALDLGGTNFRVLRVQLGGKERRIIKQDSEGISIPQHLMSSSSHELFDFVAVALAKFVASEGEDCHLPEGTQRELGFTFSFPVKQKSLASGTLIKWTKSFAIDEMVGKDVVAELNMAIRSQGLDMKVTALVNDTVGTLAAGRYVNHDTIAAVILGTGSNAAYIDHADAIPKWHGSLPKSGNMVCFFSPYFCSSVC

SEQ ID NO: 47958 - protein, 56 aa, Oryza sativa
MTPHRCPCLSCSSRAPVDLQIREKLKIKEGLFIDHVKDRYRRRCAGYGHGCAVLAQ

SEQ ID NO: 47959 - protein, 128 aa, Oryza sativa
MMSASPEFYKPAPVFSPCSSPLRLLQQQHGEDHQEEYGYGSSGGCCRTPTGGESNLKAPGTCPPAPRKPRAPAAPCRKRLFEVEVLSLRLEELERLFWRPPPPPPTTQPQPQPQQPPQKRRRVAKLGS

SEQ ID NO: 47960 - protein, 453 aa, Oryza sativa
MHSTGMEMEVEVAGDDEAVPEAPERSVVLISAGASHSVALLSGGVVCSWGRGEDGQLGHGDAEDRPVPTVLTAAFDDAPGGVASVVICGADHTTAYSDEELQLYSWGWGDFGRLGHGNSSDVFNPQPIQALQGVRITQIACGDSHCLAVTVAGHVHSWGRNQNGQLGLGNTEDSLLPQKIQAFEGVRVKMIAAGAEHTAAVTEDGDLYGWGWGRYGNLGLGDRDDRLIPEKVSSVNGQKMVLVACGWRHTITVSSSGSIYTYGWSKYGQLGHGDFEDHLVPHKLEALKDTTISQISGGWRHTMALAADGKLYGWGWNKFGQVGVGDNEDHCSPVQVNFPNEQKVVQVACGWRHTLALTEAKNVFSWGRGTSGQLGHGEIVDRNIPKMIDALSSDGSACKQLESSKAVPMSAKVWVSPSERYAIVPDEKAGKGIPAGNGTETHVPQGDVKRMRV

SEQ ID NO: 47961 - protein, 223 aa, Oryza sativa
MRGGWNQRRLPSSQIRCRRLRRMEAAWRVDTAAAPPGGQWRRPSPPDLAPSDPNPILPNARPPPHPHGAQDSPRHLPPSPTRHRRRPPSTRRRRSHPSSPALCCPSSCLHRSTSIPHAVGKGESVGARTAAQRSAPLSSGATVARGSIGLCPLELLGSSGKDGGMRIHRPPSSGALAAHGSSGLRPQEWHGGSGRAGSMLIFLPPSSRAAAAGLDERERGRLA

SEQ ID NO: 47962 - protein, 117 aa, Oryza sativa
MASMSSFRLAVAAAALLVIGSCATELTFKVAEGSSATSLELVTNVAISEVEVKEKGGKDWVGLKESGSNTWTLKSEAPLKGPFSVRFLVKNGGYRVVDDVIPESFTAGSEYKSGIQL

SEQ ID NO: 47963 - protein, 156 aa, Oryza sativa
MLMTTLQSQQIHPERPDNRSCTLSPVGFTTTAYYELITYHGILWRPAHFIWIKAIPNTCKIFLWLAFRGRLNTNDNRVKKCWASDPHCAVCPAIETANHIILRCKLATEIWNKLNLLDQAIQSADILQFTEHVLGILPTQLKLGWPICFAACSHSL

SEQ ID NO: 47964 - protein, 433 aa, Oryza sativa
MRIRKCASRLLGSSYSASAAAPPPPVTGAGAAAPGFELLPLALATPPPLPYPGSHESGAGATCFAAAAASGEPCELSRSPWDLIGELNISDPQEEDVVEKYFVHVASRASWLFPTSMPAAVKQKGLAAAGEFSTKIPNKKFAKKTAKKPSPATAKKKEAAAAAVKEEDEPTKKPKLKKEEDDSNSAISAAGGAQVWTCKKNDGKRWHCQRRVRQPNSLCDYHSDQKRGYYNPLYDDPTDETYAPPASPPSSVVPATASSKTSTSSSKARKKKVADSGEGFYYYAGFGPFRTKRHCRSSSSSNNYNMQDQPPPVEQEQHEEEEARSPEIADPHPSAGNKSRSGNGDDATTTTDRQTTLASTTTAVAARDDFSSSDDDDDDIAGIAGGDEESSDDAARIGRLRAGINGDARKNKSQQARKRWRKPVKARSLKSLM

SEQ ID NO: 47965 - protein, 126 aa, Oryza sativa
MAASSSSAAAAALSPAISLHLLRPLPCRAVLLSRQRRPFPSPRAGCLAAVRAQRRWLRSPEIGRWRRRGGYACLSFNSGNKPPPPSSENSDEWPILRRWDVPWEWQTVVLTMVGCGVRQLCSDRIG

SEQ ID NO: 47966 - protein, 387 aa, Oryza sativa
MAQARWVVLPYPPPPPPMVAAPPPPPPQYAKHFAAGPPPAAAAGRRTPTPPAPAGSGGNGCEENKTIWVGDLQYWMDENYLHSCFGPSGEVVTIKVIRNRQTGQSEGYGFVEFYSHGSAEKALQNFTGHVMPNTDRPFKLNWASYSMGEKRSEVASDYSIFVGDLAADVTDEMLMELFANKYRSVKGAKVIIDANTGRSRGYGFVRFGDDNDKSHAMTEMNGAYCSTRPIRIGPATPRRSSGDSGSSTPGHSDGDSTNRTVYVGGLDPNVSEDELRKAFAKYGDVASVKIPLGKQCGFVQFVSRTDAEEALQGLNGSVIGKQAVRLSWGRSPSHRQSRADSGSRRNNMYYGTPFYGGYGYASPVPHPNMYAAAYGAYPVYGSQQLVS

SEQ ID NO: 47967 - protein, 414 aa, Oryza sativa
MEIISPSSSSNNNSPVLATFLVVLVVLLASSRPASSQNQQSFTINPGGAAAARPGGGKGGGGGGGPGSFSDFLTQNVQHYVLSEQKYAGKVKALDAELSAAEAGAARYVVSGDGKGKFRTITEAIKAVPEYNKKRVILDIRPGTYKEKLLIPFTKPFITFVGNPRSPPTIMWDDRAATHGKDGQPMGTMLSATVAVEADYFMASSIIFKNNAPMAAPGAHGGQAVALRVFGSKVAMYNCTIDGGQDTLYDHKGLHYFKNCLIRGSVDFIFGFGRSLYADCTIESVTKEVAVVTAQQRSKNIAEAIDTGFSFLRCKISGIGQIYLGRAWGDSSRVVYSYTTMGKEVVPIGWDGWEVQKPEHSGIYYGEYKCSGPGALPSKRIGWSLVLSDIQAKPFTGSHFVYGDSWILPPPKSM

SEQ ID NO: 47968 - protein, 437 aa, Oryza sativa
MMGAEKAEGMEELELEEGGGSPSPSPMTAAGKMQALDFEHIGSLAAVAESLSTGSKWRRALTSVRVVILQAKINVLLPFGPLAVMLHYLSANHQGWVFLFSLIGITPLAERLGYATEQLALYTGPTIGGLLNATFGNATEMIISLYALKNGMIRVVQQSLLGSILSNMLLVLGCAFFAGGLVHPSRDQVFNKASAVVNSGLLLMAVLGLMFPAVLHFTHSEVQYGKSEVSLSRFSSCIMLVAYASYLFFQLKSQRSLYSPIGEQEEEVTEDEEEEKEITQGEAICWLFVLTIWISILSGYLVDAIQGASESLNMPVAFISVILLPIVGNAAEHASAIMFAMKDKLDITLGVAIGSSTQISMFVIPFCVVIGWIMGQQMDLNFQLFETATLFITVLVVAFMLQEGTSNYFKGLMLILCYLIVAASFFVHVDPDSSNNK

SEQ ID NO: 47969 - protein, 248 aa, Oryza sativa
MRILRRFPRLLRRSNAAARSPAPMHRLISSPSLIASAAASWCWWSPLLARGGPVVRRVSRFPWEPRNMTTISRVKGDESYRRLPSQEKKHTAITQGMKTIDTRGTILEARAGDEKSNRDAASSEVSYIKYDVLGQSAKQDGCDEDDRRSETEEHVEEDEVLDPEEYTVNNILPKSRHRDGSIYRDIMDTPWKREFHIADRNETRLEAMRFSNPTNCVIRSNGTCMSHVHCNMLQILSLELAKITLDGG

SEQ ID NO: 47970 - protein, 407 aa, Oryza sativa
MACKKGGIARDYNKKVDRILKKHSGTGMKKFEIEFYGPSNANTYYHLNNWLEIAITSGIEELTLRLTPDVTKYNFPCSLLSDGRGDLIQSLHLSHCSFRPTVEVVSLRSLTSLDLCLVRITDRELGILLSNSLVLEKLGIKYCDKINCLKIPCVLERLSSLEVFECYSLQMVESKAPNLCSFCFGGEQVQFSIGEPLQMKNLQVIFPNSISFGRAELPFSMPNLETLNISSRCEMSHTPTAPGKFLHLRYLGITFAGWRFSRAYDYFSLVSFLDASPLLETFILCILQKGKHDLTLRDPIYPRQMSERQHDSLKNVKINGFSSTKSLVELTCHILQNTTSLECLTLDTTRIEFRCSDSSVDVCLPSDRDAIKGAHKALLAIRTYIEGIVPATVKFSVLEPCRRCYAW

SEQ ID NO: 47971 - protein, 584 aa, Oryza sativa
MNSMLLRPLPSAGASGGRGSPGRGRVVGSAVSFGGRGRWRRGVAVVAAGAGAEASWMEEAGVAVLEEGVRRNPAVSDSYRPPGMPRPNATVLEAQARVCTGPEQTRPLGEEQAMRVLDTILRSGMGELKDEPVSSAQLGAFFAGMTIRANSFPEATQWSEGERRAMSLFWPRLVNVLPPEVKFIADPEGTIMGANGLTGPRYVGQSTAEMRLVSALREVLAGGHLGYEEVQGVLKDVLPVELASANSTMVNEALLAAFLIGQRMNRETDRELKGYCLAFDDELVADVKSLTHYGEPYDGNTRFFRSTLFVAAVRACYGEACLLHGVEWMPPKGGITEGQMLKFMGANTHLSTLQAKTLLEDENTGFAYLGLQEACPPLYSIIGLREHIKKRPPLATSEKVQQFVRARGRESMVAGFYHVGYEDPLLMLMRRRTVHAGLVVKGEEGALSMTTKERSAHASKGLPVNHCSGFRIPNSTDFSETDGISREGFSVIVNAQELGFESTETPRTDRSVLKNLELGLAALSGEKGPAYDRIVLNAAMVDHLLGCTGAEDIKSALDRAREAIDSGKALSRLMNYIKISHKVS

SEQ ID NO: 47972 - protein, 564 aa, Oryza sativa
MGSMEQQQPESAAPATEASPEIIFRSKLQDIAITNTLPLHRYCFERLPEVAARPCLIDGATGGVLTYADVDRLSRRLAAALRRAPLGLRRGGVVMSLLRNSPEFVLSFFAASRVGAAVTTANPMSTPHEIESQLAAAGATVVITESMAADKLPSHSHGALTVVLIDERRDGCLHFWDDLMSEDEASPLAGDEDDEKVFDPDDVVALPYSSGTTGLPKGVMLTHRSLSTSVAQQVDGENPNIGLHAGDVILCALPMFHIYSLNTIMMCGLRVGAAIVVMRRFDLAAMMDLVERHRVTIAPLVPPIVVAVAKSEAAAARDLSSVRMVLSGAAPMGKDIEDAFMAKLPGAVLGQGYGMTEAGPVLSMCLAFAKEPFKVKSGACGTVVRNAELKIIDPDTGKSLGRNLPGEICIRGQQIMKGYLNNPEATKNTIDAEGWLHTGDIGYVDDDDEIFIVDRLKEIIKYRGFQVAPAELEALLITHPSIADAAVVGKQIEPEIGEIPVAFVAKTEGSELSEDDVKQFVAKEVIYYKKIREVFFVDKIPKAPSGKILRKELRKQLQHLQQEA

SEQ ID NO: 47973 - protein, 87 aa, Oryza sativa
MAGAAKASWMVAMSVGAVEALKDQAGLCRWNYALRSIHRAAKANARAGVSRGKKLPASAAAVAERRRAEKAEEGLRTVMYISCWSTN

SEQ ID NO: 47974 - protein, 179 aa, Oryza sativa
MSKKIVVKLNVHDKAEKQKAMKAVSALIGIDELSMDMASQKMTVIGMVDPVNVVSKLRKSWAATIESVGPAKEPEKKEEKKDGGGDGKKDGGGDGKKEGEAGDKKDGDAAKKDGDKDGEAKKEDGDKKPAAPTEQQLFAELMNQYYHRPAAYGYNPYMSVPPHYVVQSMEENPNSCAIC

SEQ ID NO: 47975 - protein, 202 aa, Oryza sativa; identical to SEQ ID NO: 28987

SEQ ID NO: 47976 - protein, 475 aa, Oryza sativa
MEFVHFLKNPKKYEELGAKIPKGALLVGPPGTGKTLLAKATAGESGVPFLSISGSDFMEMFVGVGPSRVRNLFQEARQCAPSIIFIDEIDAIGRARGRGGFSGSNDERESTLNQLLVEMDGFGTTSGVVVLAGTNRPDILDKALLRPGRFDRQITIDKPDIKGRDQIFRIYLKKLKLDNEPSFYSQRLAALTPGFAGADIANVCNEAALIAARSEETQITMQHFESAIDRIIGGLEKKNKVISKLERRTVAYHESGHAVAGWFLEHAEPLLKVTIVPRGTAALGFAQYVPNENLLMTKEQLFDMTCMTLGGRAAEEVLIGRISTGAQNDLEKVTKMTYAQVAVYGFSEKVGLLSFPQRDDGFEMTKPYSNQTASIIDDEVREWVGKAYKKTVELITEHKEQVAKIAEMLLEKEVLHQDDLVRVLGERPFKASEPTNYDLFKQGFQDEEDSKNQEAAKTPQPDDDGTPSLGEVVPT

SEQ ID NO: 47977 - protein, 237 aa, Oryza sativa
MTKIIPRNTTLPTSKSEVFSTAADGQTSVEINVLQGEREFVRDNKSLGSFRLDGIPPAPRGVPQIEVKFDIDANGILSVAAIDKGTGKKQDITITGASTLPKDEVERMVEEADKFAQEDKEKRDAIDTKNQADSVVYQTEKQLKELGDKVPAPVKEKVDAKLNELKEAIAGGSTQSMKDAMAALNEEVMQIGQAMYNQQPNAGAAGPTPGADAGPTSSGGKGPNDGDVIDADFTDSN

SEQ ID NO: 47978 - protein, 294 aa, Oryza sativa
MTSNNSTNEELGGGGRKAADKPSGGGGAAAAVASSRHWSASTESRIVRVSRVFGGKDRHSKVRTVKGLRDRRVRLSVPTAIQLYDLQDRLGLSQPSKVVDWLINAAQAEIDKLPPLQFPPHDHDLVAAAASSMAPPPFANGGDGHHGASASSMLEDGDKAAGGGGMKAFMSLSNSLGLLNAATMPATLAAHHHHHHHAAAYYAAAESWGNGGNGGHHHDVSHGVSPSAHNSPFPSLLSLAPGSHHQFVFYSPEGGGFAVKEAAAEQFPVDSLDHSQGQLTLSSARSFLHSGSQG

SEQ ID NO: 47979 - protein, 46 aa, Oryza sativa
MKSRRKRRRRIRGLRGEEGTIWIGTMMMTRRTKKTRVRTNMRRMAS

SEQ ID NO: 47980 - protein, 224 aa, Oryza sativa
MSRSSSSMATVLVVLMVVSAGGLSPPCAAAAKEEKPVVVLPPAAAPGEAPSADAAAFVRSCCDTALQADRDGSSFCYYHLLPYAAFFEGNQVKVAEVAATILSTNLWVYVDQLRKVQGGAGKGDPNLNACVDDFSVAAGENITREALQSLGRLAAAGNGKRSKEDLENAQKWIKGVEKPYNGGIGKASGCEIGYLFTYSDDLPAQKTLGYTFDTASSLINHIKL

SEQ ID NO: 47981 - protein, 280 aa, Oryza sativa
MALLSVSSSHHAIHPGSSRSMQCICTRVTPSRSVGEISRSRSRNDLPLGVSPSSRMLTTCTLKTPSYGNKSKSKEKINPRDMFTFSYRFNTDIPMTETPGASIDEYLQNRPRIVGAVFPDKRKRTKLSDEEWSVQLLPIQFLFLSASPVIVMRFVSKSGGKEYPPHVPVKATSLLLMEVTDYKLDGLDSNAMPSHLALTVRGSLYPRPEGRKSLRGHVEMSVGFNLPPVLALVPEGVIRGVGETVLRQLALQMKQDFDNGLAADFKRYRREKLTEKKTTP

SEQ ID NO: 47982 - protein, 426 aa, Oryza sativa
MQATGSGSWVAQASVLGCGGGGGGVVVVRRPSWDGGAAVGGRAKGFGVVRCCVQEKKPRVRKTKEERREMVESFVNTYRVSNDGKFPSVNLTHKEVGGSYYIVREIVRDIIQENRVLGPGGLNATALSFEDCPDSVESPVTHELGQDSVEILDMSDDNQAGMDTVTDMSTQQLLGSSNLLDAGILNGALRNGNIADMACLETNSEKQDEVPCAQSAEIDPSSSEKLPPSFSHAPDSESEFEMDSRVVAHETTSSLTNGVISSGPSAVITNESLLQDHDDTTDNAVDEAVLCLQTNGSSQANETILQEHETRPESVMSNDVQTIDSQSNSRVDTFNSNTSEDTTKSIEVSEVQRLHPDEEEKAENLVSHAELDTKVFSHVEGKNGMVEEDNSELKQSISIITMEEHDSKPEHGDSTTTAISSACVTT

SEQ ID NO: 47983 - protein, 590 aa, Oryza sativa
MKRKRGRKMGKKGKLKASITADASPMSPSSPSTVDASSKSPSSPSTEENGTSPAHHQADNAPVIAPPPVPEPAPPEPEKPAVSTDVQNAKPKVYSRVRLKFKSAKVLETHQGPSEAKAPVDGGGGKPASAAPEASKEVAEKAIVSPDGQKDAQAAELSGSDKDKMARKVASINIKSVGLSSVEDKNQDRKADSVSEPLPSKQETVLENVESETALEPRSSQELEVKQATPERQRDDRELTAALEAIKKVMKMDAAEPFNTPVDPVALGIPDYFDIIDTPMDFGTICQNLERGDKYMNSEDVCKDVQFIWDNCTKYNSKGDYIIELMKRVKKGFMKNWLAAGLYSDAQENGGNDNTGDEDVKGSKGKSKQKRRRLGNDRHKNDCACAVCQVTRRKKEKDEILAVIENDTAAVNSNISDQQIMEVDSGINNAGSHDTTSSQEQPPQTDMYRRTVVADDSGTLIENHVKFFNNQPLPHDYEDEGSRPYFDEKEEVDYTDLISQEEHTSSQPNDGSEIAQHQHKEPTETSQEIEMEDYPIQKENQSFLQLCARLFPSNQSSVFRGRHSLFRQQQRQVSMKGSPLHAAITAIMKR

SEQ ID NO: 47984 - protein, 323 aa, Oryza sativa; identical to SEQ ID NO: 47225

SEQ ID NO: 47985 - protein, 458 aa, Oryza sativa; identical to SEQ ID NO: 35337

SEQ ID NO: 47986 - protein, 227 aa, Oryza sativa
MATAMRSTTFLRLGFRQVSSLLFHGPSSPAPTVGLALGVGRGALVRLRCSAAEAGDDGGRKVSARLALTQQVLRDAEERAASAGSDPAPKITLDHVTLNFARSGGAGGQNVNKVNTKVDMRFNVKEAQWLGERIKERILQTEKNRINKDGELVISSTKTRTQKGNIEDALQKIQAIIDAASYVPPPPSEEQKKKVEKIAAAAERKRLQKKKVLSQKKEFRRNRTSWD

SEQ ID NO: 47987 - protein, 240 aa, Oryza sativa
MATAATASATAATRFTRLAGVGLRRTARLPTAVRFQRRVLATTALLRTAELRPKEQGLPETLDYRVFLVDGGGRKVSPWHDVPLRAGDGVFHFVVEIPKESSAKMEVATDESFTPIKQDTKKGNLRYYPYNINWNYGLFPQTWEDPTLANTDVEGAFGDNDPVDVVEIGERRANIGDVLKVKPLAALAMIDEGELDWKIVAISLDDPKASLVNDVDDVEKHFPGTLTAIRLVQGLQDTRR

SEQ ID NO: 47988 - protein, 179 aa, Oryza sativa
MGGAIVLMLHRKEPTNWDGAILVAPMCKIVEDMKPRPIVITILSKLSNVIPTWKIIPTEDVIDKAIKSEEWRQEVRNNPYCYKGRPRLKTGYELFMASLDIESTLDKVTLPFIIVHGGDDAVTDPSVSEELYTSAQSKDKTLKLYPGMCHALTSGEPASNIDIVFLDIIKWLDERVSVS

SEQ ID NO: 47989 - protein, 695 aa, Oryza sativa
MALLALRLGHHHHHLGLSAPRDPRLLLRRRLVVASSGAVKAPAAAAVVWFKHDLRVDDHPGLAAAVAAEPRRPVLPLYVFDRRILDGYSDTMLELLLFALEDLKMVLKSQESDLLIGLGNAEDVVLKLVNEVQAGLIFTEEEVEYRVRNVLASVESSLSNASFLSGNPPEIVVWSASLYDYKNPRELSTSHNQFLKEKLPMNTPLAAPSLPALNIEIETGSLHTLEELKGFLKESRTSENNWVPLKGTSARSILKKTLSQINVKTGVASSGSDGGEDTTAYYAMSGRKIQNSMFTSESSTEVRGGTEITLDALAAYLKYLEGTGKASWQELHDKVRLTETRDGASFCTLFGPALQLGVISKRRVYHETIQYERDRNAGFISPFGYSTPTVTAAVDAICSMEWYWLLALKSQVCIEGNYPVRIWRWKGHLIQYTSVGHEGPSVLLVHGFGASLQHFRDNIGAIADQGCQVWAITLLGFGKSEKPNINYSELLWSELLRDFIVDVVKEPVHLVGNSIGGYICSITASLWPSLARSLILLNTAGSVVPSYSFIPLSEEGRTSWLSSLQARLLLLFLRSRAGGILKEYYPTRTERVDKPLVDEIIRASYDPGAATVIESIFSFNLSIPLNFLFDSFGGKILIVQGMKDPLTKSKSFVSMLREHCSKVHIRELDAGHAPHDEVPDEVNSLLCEWIKETGA

SEQ ID NO: 47990 - protein, 482 aa, Oryza sativa
MAIKLTKYQFFSSRATALHLRRRELKLLPFPSFPCSSSSAPNTCSQQSHLLLVSSAGPREQTLLPADSRSSLPHGITDNGTRKEGRRRRRGRKRKETAKDEGECVPSAEEVSIRVNTLYESGDPIGKKELGRCVVQWLKQGMHSMAIKYASTEMQNDGATFLLDGGSSEDNLGFVMLAQPYLSAIPMPKGQEALCLKASTHYPTLFDHFQRELRDVLLKQQNQGLISDWRTTQSWMLLKELANSAQHRAAARKPKAPTTHSTLGISLDKTRLMQTKIEDFVKKMSDLLHIERDAELEFTQEELNATPVMDGNSKKPLKPVEYLVTHGQSQQEQCDTICNLNVISSSTGLDGQHLVLFRVKDNHRLPPTTLSPGDMVCIRTCDNRGEITTSCMQGFIYNLGEDGCSITVTLKSRRGDPTFSKLFGKNVRIDRIQALADALTYERNCEALMLLSKERFTEKEFFHWSSSHSVWGQGRHDDDGAE

SEQ ID NO: 47991 - protein, 373 aa, Oryza sativa
MEPQPGSPETAELPAPMVLEPPPPPSDEAAAEEEEAGVKPDRQSSSSSSSSSSEEEKEVSKDVAVETSVVVPSVVAASPDDEAAAVASGDGGDVIKHDDEAVVRPDDWASWPQQPAQTVDDVAAAATTTPQAAPEIQTMSLQPAAVAGFDPERIPKSIFQAKPPGSSSQAEWSVASNESLFSIHHGARPSGDLCGFYAGESRSHFDYFYDEAMAGAAGDHTSDWKLATVAEGSPGGSARSDATDGGGGAAKQKAAIDFRRHESGSAGSSSNFSFAFPILAETTTSQRKRDYGGMYHPLKKEAEQQQAASPASAFEEMTPEEERRRRRSWWCCCCGECCGCCWFACSWSSCCCCCRWRWCSRCSCSCPTFCRRN

SEQ ID NO: 47992 - protein, 558 aa, Oryza sativa
MALNAPVLVLKDSLKRESGTKVHHANIQAAKAVADIIRTTLGPRSMLKMLLDASGGIVVTNDGNAILREIDIAHPAAKSMIELSRTQDEEVGDGTTSVIVLAGEMLHVAEAFIDKHYHPTVICRAYTKALEDALAVLDKIAMHVDVNDRAAMLGLVKSSIGTKFTGQFGDLIADLAIDATTTAGVDLGQGMREVDIKKYIKVEKVPGGQLEDSRVLKGVMFNKDVVAPGKMRRKIVNPRIILLDCPVEYKKGENQTNAELMKEEDWQVLLEMEEEYIKNLCAQILKFKPDLVVTEKGLSDLAIHYLSKAGVSAIRRLRKTDNNRIAKACGAVIVNRPEELQESDVGTRAGLFEVKKIGDEFFTFIVDCKDPKACTVLLRGASKDVLNEVERNLQDAMSVARNILKNPKLLPGGGATELTVSAALKQKSSSVEGVEKWPYEAAALAFEAIPRTLAQNCGLNVIRIMTQLQGKHANGENAWVGIDGRSGDIVDMKERKIWDSYSVKAQTFKTAIEAACMLLRIDDIVSGIKKKQAPGASAPKQPQIEQEGDADNEQMIPE

SEQ ID NO: 47993 - protein, 217 aa, Oryza sativa; identical to SEQ ID NO: 30495

SEQ ID NO: 47994 - protein, 142 aa, Oryza sativa
MGCCSSRSADSPASRVTRWRSTGIVALRDARLKVVPNEVLQVGNSLRILDLTNNKIAEIPQEVGTLVNMQRLVLAGNLVESIPANIGYLRNLKILTLDRNKISVLPEELGSLSNLQQLSISQNSLSRLPKSVGDLRNNQINS

SEQ ID NO: 47995 - protein, 235 aa, Oryza sativa
MSGIDGNKPPSEVLIDENDDWVIVKKQRITILIPPPSPAAASLQDDMQKISSEQACIAKKSMENCDAARKKHPKQMTTNKAQEPLLEGIKVSANIKKAQEIATSSHHPVAPVVKANHASIQGLFHENIEKAGNSFGNIYKEELPVISSQVTNRIMRARLLERRVAGFGGLKNWLFTCGFGWFVDILDSEKLGMYQIVSLTMNQLKDMGLDAVGPRRKLIHAIECVSQPNEFEMFS

SEQ ID NO: 47996 - protein, 214 aa, Oryza sativa
MNPMAPMLPAPAPMAAGPTEPVVVVGPQYCAPYVVPLTVTKKSISLTDGDFTVTDANDNVVLNVKGTLFSVRHRRVLHDAVGQPLLSMQEKILSMHNRWEVYRGDSAHSCDKLFTVKKSSMLQLMKTEMDIFLAGNTAEQVCDFKIKGSYCDRSSAFYLGKSNTIIAQMNRKHTAASVVLGRDVFSITVFPQVDYVFIAALVAILDDVHRDRKE

SEQ ID NO: 47997 - protein, 521 aa, Oryza sativa
MGEDLVTTLSMENGGGGGGGGHHSLCTLLSMDPAGHLDDRAVGVMVQPRIGDGAGRAHAVSLSGAHPPDINQPWQTDLCDMLDVSLGPQIQVYDAEALAVLSSAPKAGNRKAAKRGDSIWGAWFFFTFYFKPLLADKCKGKVTRDANGVSGFDKTDLRLDMFMVQHDMENMYMWVFKERPENALGKMQLRSYMNGHSRPGEPQFPFSVDRGFVRSHRMQRKHYRGLSNPQCIHGIEVVRSPNLASITEVDRRRWVELTGRELNFAIPQEACDFGTWRTMPNTEIELDRPHPVMKGNVHQHPKKLLNGSGLNLSSPSNHSGEDGMDLSPVSSKRRKEVFPHAMDEECFLPLNSCGERTQQDVEMHSVVQPSWQHEFSGVMKKARGPVTAAKSIYEDDQGYLIMVSLPFVDQQKVKVSWRNSLTHGIVKILCVSTAQTPYIRRHDRVFKLADPMPEHCPHGEFVREIPLATRIPEDAKLEAYFDEAAAVLEIMVPKRGNEPEEHEVRVSMRPPHLAANDLLLT

SEQ ID NO: 47998 - protein, 475 aa, Oryza sativa; identical to SEQ ID NO: 29953

SEQ ID NO: 47999 - protein, 347 aa, Oryza sativa; identical to SEQ ID NO: 33064

SEQ ID NO: 48000 - protein, 186 aa, Oryza sativa
MQHTVETAENAEECLKINYHGNKKTIQALLPLLQSSPDGRIVTVSSVFGQLSFFSGEKLKEELNDFSKLSEERIDELAELFVRDFKDGELESRGWPARADAFAAYKTSKALQHAYTRVLARKHASSSSSPLRVNCVHPGYVKTDMTLGTGELTVEEGAAGPVALALSPPGGATGVFFIQTEPASFV

SEQ ID NO: 48001 - protein, 88 aa, Oryza sativa
MWTGIVRLHRRRSICQTAASVTASRSPTTRLHRQLQPRTHVLPTTIAGVTSRRGSQIIVAPVDEDAAASFNELLVFFYAKVVLGESVS

SEQ ID NO: 48002 - protein, 218 aa, Oryza sativa
MGNGLSPCMHLPATAAAGVKLVYWGGQTRMLDDDGGVCAVAGDVTAELPGDHVVCAADSFYVGLPIPVVSAGEELMAGRTYFVLPAERFSCFKVLTAAALASLSPAPSKKVSVAGPGQCPFEYVKGEGGATLIRVLPEFIEKVISCDENGGGARRRKPSTTATATATELCSTPELKRHYALLMGRRNQPWSPRLETISECNKTRKLLLRTLARLLSSR

SEQ ID NO: 48003 - protein, 485 aa, Oryza sativa
MAGATAAAVSSSFLALALLSLCAAAAGGSPQLDAEAARQQEADRVTRLPGQPAVRFAQYAGYVTVNETHGRALFYWFFEATAAADKKPLVLWLNGGPGCSSVGYGEAEELGPFLVQKGKPELKWNKYSWNKEANLMFLESPVGVGFSYTNTSSDLQQLGDKITADDAYIFLLNWFKRFPQYKSHDFYIAGESYAGHYVPQLSEKIFDGNKQGPKENYINFKGFMIGNALMDDETDQTGMIDYAWDHAVISDRVYADVKKYCNFSMENVTDACDSALTEYFAVYRLIDMYSLYTPVCTEVSSSAAFGQRQVAVHGAAPKIFSKYHGWYMRPAGYDPCTSDHAEVYFNRADVQEALHANLTNIGYNWTHCSDVIGKWRDAPFSTLPIIRKLVAGGIRVWVFSGDTDGRIPVTSTRLTLNKLGLKTVQEWTPWYDHQQVGGWTILYEGLTFVTIRGAGHEVPLHAPRQALSLFSHFLADKKMPPTAFP

SEQ ID NO: 48004 - protein, 354 aa, Oryza sativa
MTPAADGDDDETTCIRALELIFTFVVPMTLKATIKLGLLDALTGGGHALTADELAAAAQLPAEAASSVDRMLRLLASLDVVKCAPTDTGGERAVRRYTPAPVCRWFAGERSLAPLAMFLLDDDYLSTWNQLPAAVAGGDGQVAFEKARGMPMFEYMGTNRRLNTLFNQAMVQQSTVVIGKLLERFQGFDGVSVLVDVGGGTGATLEMITSRYKNITGVNFDLPHVIAQAPSLPGVKHIAGNMFESVPNGDAIFLKSMLHLHNDEDCIKILKKCHQALTHNGKVIAVEILLPAIPEPVPTAQNPFRMDMIMLNNHWGGKERTEPEFAKLAVECGYTGVFQATYIFANYWALEFSK

SEQ ID NO: 48005 - protein, 81 aa, Oryza sativa
MLGLLLHLKHLKQENFYQDCFDPELKLFSVKLTIVCFVLHRIGGTSGMLIKSTGSCTIAVLEASSSIISYQGILLLKCICT

SEQ ID NO: 48006 - protein, 882 aa, Oryza sativa
MSGAGGGFLADANDPWLKPRLLRAVVGERLPRPGTDLPPAELASILDAVRTHGLLTERQPGPHDPKLAEAWRAAVDAWVERIGELMQNNLPYSCWLGTCFLGLTFQECCNERFAESYSSWFEKILSNLQEPSTVQLVIIVSCTSMSDLFVRLARFLNLKKEASSFAGRLVEPVLLLLNGNGQVADEAVDLLRTVIKLYPSSLNRHYNKVESAIATNVMSSEVNIKLKEKFARALASLPSVRVSEESWSLMIQKILIVVNNLLNDAFIGLEEEKKGHEILMLLVPPGNDPPLMLGDQTKWSGGNVHVTKKFRVYTVPTISVLIHCCCVMLTSYYPVQVNVPVRALIALTRRVLSVDGSLHKKLFPSTTSLHQELICFELPSLHSTFLDLLSATIKGMRSQLLPHAANIVRLITKYFEIAKLSTMRTKVYGIVQQLLTSMGVGISMHLLEAIVSNSVADLDDSCGQDMTSLSTKPTIATNESSSKSYSKKRKQETDSQNLHVSGSDKTVISPKKRKSSSMSTTSETTADVRMLTPLSVKLAALETLEILLNVGGSLRTDHWRAEVDLLLINIARSACDTGGRYEYKLSSAVGETSIADFQLASLKALLASFLSSHARPPYLAQGIELFRRGKLEIGTKLAEFCSHALLALDVLTHPRALSLESAAPSGPGLTYGAPEKAIFGTEKYRFSLSGNQSQALEDDDPYDDWLTSTKVSEPTGSPAKDSPVGKEKAIEKSQGEKQITPVEEHQQIDLAVVPAAIQDVPTSGKTDIEMADAATTETVNLKATDNPSSSNDGLTQVRTLLPDLNQQVAAPVSDEGHTDIVDHLRNKTSAFDASLSKTVTGGEAPQSGSGSSHFMQSSKTDDSDVESEDSMPGIVDGDPDSD

SEQ ID NO: 48007 - protein, 113 aa, Oryza sativa
MDGERRLVSGGGGGAGGGGVMAVGMVVVGVGVPRFSQWSSASACPASPSGRRRRHGGRCCRHSGGLSGDRCGGQRAACRRAGPGDGGQRAACPTTAAKEAQQSAEARRLQAER

SEQ ID NO: 48008 - protein, 856 aa, Oryza sativa
MAEAVDGGSWEDMLRRILPPGSPIPEAPPNLDYSIALEYDGPPVAYDLPRVDPVEIPTAEPVSGPQRLGNGGGLPVVEPIPLPVSRIARCAEPVSAQVGGGSSDSVNSVLQNEEFDDDDDDSRSLSHDSAQSSPGPQDRSRRTQEGRRGATVTFGFTPDSKCESKEFEEMSEQYVVVTKKEKRRRACYRCGKRKWESKEACIVCDARYCGYCVLRMMGSMPEGRKCVTCIGQPIDESKRSKLGKNSRTLSRLLSPLEVRQILKAEKECQANQLRPEQLIVNGCPLGPDELTDLLSCSRPPQKLKPGKYWYDKESGLWGKEGEKPERIISSNLSFTGKLQANASNGNTQVYINGREITKIELKILKVANVQCPRDTHFWVYDDGRYEEEGQNNIKGKIWESALTRFACALFSLPVPPGNSNETRDEVHYSARTVPDYLDQKRIQKLLLLGPDGAGTSTIFKQAKYLYGTRFTQEELENIKLIIQSNMFKYLGILLEGRERFEEEALSRSNCTISEDEETQQDENKANGSNSCIYSINPRLKKFSDWLLDIIAMGDLDAFFPAATREYAPFVDEMWKDPAIQATYKRKDELHFLPDVAEYFLSRAIEVSSNEYEPSEKDVIFAEGVTQGNGLAFIEFALDDRSPMSEPYIENPEAHSQPLTKYQLIRVSAKGMNDGCKWVEMFEDVRMVIFSVALSDYDQVGPPVYGSSRPLLNKMMQSKELFEATIRQPCFCDTPFVLVLNKYDLFEEKINRAPLTTCEWFNDFSPVRTHHNNQSLAQQAYYYVAVKFKDLYYEHTGRKLFVWQARARDRQTVDEAFKYVREILRWEDEKEENLYGGGEDSFYSTTEMSSSPFIRAE

SEQ ID NO: 48009 - protein, 613 aa, Oryza sativa
MDSSARSGGGGTGGYTSTRVWMVAGVAIAGAIVFVEAARRRRRWLRDRSEVPPDFGAFCYRFEIAPAPQPPPPAARQLLSGLTFAASDNFEIEGYVAGFGNPDWKRTHKAATRTAVPVTMLQKQGGTYVGSTVMDELGFGVSGGNLHNGTPINPASPSLFPGGSCSGSAVAVSAQLVDFALGTDTTGDVRIPACFCGVLCFKSSHGVVSTLGTIANSQSLDTIGWFARDPSVLHRVGDVLLPAATGGLTQTRQLFFADDCFQLLKVPNEKTVNVIENAIQTLPGYQPPKHINIGEYISSHVPSLKDFCEPTVEMLEGMSALKALSTVMLLLQRYEFKTNHEDWVNTVKPKLGLDTSTRVLQAVNSKSDNIKSLYIVRNELRAALKNLLKDTGILVLPTTAGYPLKRNARQRLSPGFEDRMSAFVGIATLSGCCQAVIPLGSHNDHPISLSLLAAHGSDKFLLRNVLYMFSSIKEQVVLASKLVTAPVINRDADFGAAELLKEKGNSAFKGRKWSKAVEFYSDAIKLNGTNATYYSNRAAAYLELGRYKQAEADCEQALLLDKKNVKAYLRRGIAREAVLNHQEALQDIRHALALEPQNKAGLLAERRLQKKLR

SEQ ID NO: 48010 - protein, 464 aa, Oryza sativa
MAAAAASSCGGAGCGPHCSSSASAAAVEDAAAAAAEKVGRLSLSRECGKCGGGAAAVAVAGGLGLCGECFRANLLGKFKLAVTSNAMVRPTDSVLLAFSGGPASRVALQFIHEMRCKAIESWDVSNSQALPVFGVGVAFVDESVLCSKPRDEIEMAIEDIRSIVSSLSTGVKAMHIARLEDVFSTESEDGERRLREAVDMIGDDTGREDFLRCLRMLSLQKIAMENGYAKIMLGSCASAIACHVLSATVKGQGYSLPADVQYVDTRWEIPVVLPLRDCLAQELTLLCELDSLKTQQHLDRPSNGINSLVASFIKRLREENPSREHTIVRTAQKLKPFSFNKFSADGYHDFLPSRLRPKFQKFDSDESTFSEILCLMCGSPFSESELQNLESTKHKAQKKIDLYTAHCCQSCYFQILPAGENLNEHFFSLLPKLWTGKMDTISDSHSLLRDQIEEYLLEENDDGN

SEQ ID NO: 48011 - protein, 384 aa, Oryza sativa
MAAVFFHHVVGDLTVGKPEVVELHDTDTPRAAPDEPPSGARFLGMISALDIATFVAASGVGDRAMAAVVGEVVQPNPGLLREVDPGTRLIDALDLMKQGVKRFLVRKNGAWRGISKRFSVLYNGKWLKNMEATSPTSASSSRELSSSTSSTYKFCCLSREDILRFLIGCLGALAPIPLSPISSLGAINPHYCHVDASVPAMEAIQKVPPDPSAVAVVETTPDGTRKILGDISAYKLWKCDYVAAAWALINLSAGQFVIGADDNESTPISAIPVPPISSSLVEEIGPGRSPRAKKFSSRSIGFLNSQAHQMAFGRMRSMYRGRSAPLMCKSTSSLAAVMAQMLSHRATHVWVTDAESEEDGVLVGVVGYTDIFNAVTKSVYPAAS

SEQ ID NO: 48012 - protein, 537 aa, Oryza sativa
MALATNSAAVSGGAAAAASSAPQPRLAATFLPMRRRTVSAVHAADPAKSNGPVQAAAKASSPSTVAAPEKKPVGLGKWTVDSWKAKKALQLPEYPSQEELDSVLKTIETFPPVVFAGEARHLEERLADAAMGRAFVLQGGDCAESFKEFNANNIRDTFRILLQMGAVLMFGGQMPVVKVGRMAGQFAKPRSDSFEERDGVKLPSYRGDNINGDTFDEKSRVPDPQRMIRAYAQSVATLNLLRAFATGGYAAMQRVTQWNLDFMDHSEQGDRYRELAHRVDEALGLMTAAGLTVDHPIMTTTDFWTSHECLLLPYEQSLTREDSTSGLFYDCSAHMLWVGERTRQLDGAHVEFLRGVANPLGIKVSDKMNPRDLVKLIEILNPSNKPGRITIITRMGAENMRVKLPHLIRAVRNSGQIVTWITDPMHGNTIKAPCGLKTRPFDSILAEVRAFFDVHDQEGSHPGGIHLEMTGQNVTECIGGSRTVTFDDLSDRYHTHCDPRLNASQSLELAFIIAERLRRRRMRSGVNSNLPLPPLAF

SEQ ID NO: 48013 - protein, 388 aa, Oryza sativa
MKIMVSVLVVVIFCTLLYCVYCWRWRKRNAVRRAQMERLRPMSSSDLPLMDLASIHAATDSFSKANKLGEGGFGPVYRGVLPGGGAEIAVKRLSARSRQGAAEFRNEVELIAKLQHRNLVRLLGWCAERDEKLLVYEFLPNGSLDAFLFNEGKSAQLGWATRHNIIVGIARGLLYLHEDSLLKVVHRDLKASNVLLDDKMSPKISDFGMAKIFEDECNEVNTGRVVGTYGYMAPEFALEGVYSVKSDVFSFGVLLLEILSGQRNGALYLEEHQQSLIQDAWKLWTEGLAAEFMDPALGRGYAAEEAWRCYHVGLLCVQEDADARPTMSNVLLALISDHMNLPEPSRPPMFTRLRRALLLAPPLMTTKTDSTASPVSVNDVSITVIEPR

SEQ ID NO: 48014 - protein, 157 aa, Oryza sativa
MKSKLYRFDKEGNQWKERGTGTVKLLKHKETGKVRLVMRQAKTLKICANHLVATTTKMQEHAGSDKSCVWHALDFADGELKEEMFAIRFGSVENCKKFREMVEEIAEQQGKNEEKENEEVSSTAGLVEKLSVTETKKEENAEKEETPAEEDKKDAKE

SEQ ID NO: 48015 - protein, 50 aa, Oryza sativa
MTLVLSKATRSDGTVQRKIMEIRMESRRQSLLPVSCVTTYTTRHLCFLIP

SEQ ID NO: 48016 - protein, 473 aa, Oryza sativa
MSLRPGRAHPLAASPLHTPLPARPRPQLRLSTSTSCAAMKSYRLSELSDAEVGGLKARPRIDFSSIFGTVNPIVEDVRMRGDAAVKDYTVKFDKVALDDVVVRVSDLPDVELDPAVKEAFDVAYDNIYAFHVSQKLPEKTVENMKGVRCKRITRCIGSVGLYVPGGTAVLPSTALMLAVPAQIAGCKTVVLATPPSRDGSICKEVLYCAKKAGVTHVLKAGGAQAISAMAWGTVSCPKVEKIFGPGNQYVTAAKMILQNSEAMVSIDMPAGPSEVLVIADKYANPVHVAADLLSQAEHGPDSQVVLVVAGDGVDLGAIEAEVSKQCSALPRGEFASKALGHSFTVFAKDMVEAISFSNMYAPEHLIINVKDAEQWEDLVENAGSVFLGQWTPESVGDYASGTNHVLPTYGYARMYSGVSLNSFLKYITVQSLSEEGLRSLGPHVAKMAEVEGLEAHRRAVTLRLQDIEATVTV

SEQ ID NO: 48017 - protein, 107 aa, Oryza sativa
MSSSGRGGKRQGAPPPAPFGAAAKRAQPHGGHLADDSIRASGDLSSPIGSAPNGRCLLFHSSLPHYDQQRRKLIQFPSASGPWSLISYQFARVLDFPSFDTGQSSLL

SEQ ID NO: 48018 - protein, 197 aa, Oryza sativa
MTRALEWEGCVVSPVPTATADEAWALLSDFLAFHRWHPRVAKCRPASPSAAASTAAAPPGSVVRYCEGTPRGDGAPPDWAHETLLEHDAARRFFRYEMNDNNMGFGVFVATFRVVPDAGGGDADAPGCELRWEFEGDPVRGTPKEALVARLQAGLDGMAARVQEHLMSARAADAAVIAAGGVEAADELNRDKYSIAV

SEQ ID NO: 48019 - protein, 366 aa, Oryza sativa
MALLCFLLDMRNIPPPLLHLLKQCLLHLANLYAAIPSADLPDRLALCYVHPAASSSPPQLKVVYRPGEKFNLRDFHHAVNNLPLDAFRPNQHGSLHTTGDVSLTNLFSNRAIYSWATDDTSKKVIALCMSAQNTQALRRSLMDAAEQCITVEFVLLETGAAFVCDGVSENSNGFIDTICDLENCVVRRYSPETQVLHGLVKRWLEELKDDKEEALQAVFVFRVPIISTVNQISCSMYASANHIIDGFPSCQICRCHGRPIDLANTNKAKWMCPITSRQLTASDVTDTAVKIGEQTVLFLPDSEGVSSLRRASSSISFDVIERTNLASLNEGLIIGTPHIVIPSSNDVEVALDDECSSEHPTFLWSM

SEQ ID NO: 48020 - protein, 501 aa, Oryza sativa
MDPTPQSHPILAYVLSRLPSLLPVSPSLSTPRARDIEQPSPRAPSGAAEFDLVSRMPGLRHPSVLSAMTRAVADVSSARDALRLLGPRPDHELVDSARAFLRSHAAEEAEEEEEDEKVAKSREVVRLDEAHESYGGLLREAEERLDRVYRTAMRGRDMQVVAAAHGGGGEEEAGVVDDEVVRVLRDAEEGKAVERLLLADRQLRHLPEQLGRIRGLLVLDVSRNQLKNVPDAIGGLEHLEELRLASNALVSLPDSIGLLTSLKILDVSGNKLRSLPDSISKCRSLVELDVSYNVLSYLPTGIGQEMARLEKLWVHLNKLRSLPSSVCEMRSLRLLDAHFNQLRGLPAGIGRLAALESLNLSSNFSDMRDLPASFGDLLGLRELDLSNNQIHALPDCFGRLQRLERLRLDQNPLAVPPKEVVAGGVGAVKEYMARRWRDARAEEERRGSAVAESPRVSTPKEWLVRSVSSLGSWVSDVTRYGAGQDKAAAEEEEDAYLQQNL

SEQ ID NO: 48021 - protein, 806 aa, Oryza sativa
MLDRRLAPALPYVKSLFLGWFEPLRDAIARDQEVQRRKRVKHVYAKYLLLLPADKVAVIVMHKMMGLLMSSKDGVASVRVVQAAHCIGEAVEREFKVQTFFQKTRKKSAGENDLALEKEQAKCRKRVKSLVRRRKLTEAQKIVQQEIELEEWGTESQVKLGTRLIELLLDSAFVQSPADQTPESSPDIRPAFKHVLRQPIVENGRLKKKHWVIECDPLVHEGFESTARHVEIPYLPMLVTPKKWKGYDTGGYLFLPSYIMRTHGVKDQKEAIKSVPRKQLRKVFEALDTLGSTKWRVNRRVHNAVETIWSRGGGIAGLVDKENIPLPERPETEDPDEIQKWKWSLKKAKKANRELHAERCDTELKLSVARKMREEDGFYYPHNLDFRGRAYPMHAHLSHLGSDLCRGVLEYAEGRPLGKSGLRWLKIHLANKYGGGIEKLSHEDKVAFVENQLPDIFDSATNPVDGNCWWMNAEDPFQCLAACMDLSDALKSSSPQCAVSHLPIHQDGSCNGLQHYAALGRDYMGAAAVNLVPGDKPADIYSEIAARVLDVVREDSMEDPATNPTASLARVLVDQVDRKLVKQTVMTSVYGVTYIGARQQITKRLQEKGLITDDKLLYEVSCYATRVTLDALGQMFQSARGIMAWLGDCAKMIASENHPVKWTSPVGLPVVQPYKKYKNYMIRTSLQCLALRREGDAIALQRQKAAFPPNFVHSLDSSHMMMTAIACKKAGLHFAGVHDSFWVHACDVDKMNQILREQFVELYSMPILENLLKEFQTSFPTLEFPPCPSQGDFDVREVLASTYFFN

SEQ ID NO: 48022 - protein, 259 aa, Oryza sativa
MPVSRGGKAASSKADPFDSDSDSDLVPKKKPGAYTAPSGAAKARYKDDFRDSGGLEQQSVQELENYAAYKAEETTDALGGCLRIAENIREDAANTLVTLNKQGQQISRTHEKAVEIDQDLSKGESLLGSLGGFFSKPWKPKKTRQIKGPAHVSDDSFKKKASHIEQREKLGLSPSGKSANRSYAEPTTAMEKVQVEKQKQDDALDDLSGVLGQLKGMACDMGSELDRQNKALDDLQGDVDELNSRVKGANQRARKLIEK

SEQ ID NO: 48023 - protein, 74 aa, Oryza sativa
MVPGEDALGSIGDGTFDIRIIALRPTISSCKESRRGFAWNISSHREMAHSISLLLCNWSERSCTKLSEEVSEQA

SEQ ID NO: 48024 - protein, 403 aa, Oryza sativa
MRKLCPNLDRNVVGSPLIPCPVPHDRAFSRSIRDSSIVSHRSPARVARARVHACSAAGWFLTRSSPSSCVCARVWSASVDGQVHHAAVHRGDGRAGGVAGAAEHVRRGKGADVRVGVPPRRPERDRRAGPRRGRRVRALAEVPRGLVLRAHHGRPQDERRQRRQGRLAPVRRRELPRLPRPSPPPPPLPPGAGPEVDREPVLRRGVHRREDHHRGGVLHPEAGGERGDAARPERGGVRHHPPHGVGLLQPAHGPAHPVGGLAPPPHEVRQGRPPQREHLLGDHHGVHHLRLPPHRWHQHRPRRPHRRHALPLRRGLRQPQAEAGGDVDGGGGRLQPVRSHHRLLPAALRPQEGHRREARRLTRPARIRSHAGLNFGRGGHRCMGFVLDSLTFFFFFFSCLIAK

SEQ ID NO: 48025 - protein, 447 aa, Oryza sativa
MASLSRVPPPARGSRRRPPPSSPVPLSPRQEMLLEAASDGDLGFLKRVVRSLDGGRGRPAEAVEAVRKCGAGALHLAAGAGKLAVCRYLVEELRVDANAIYDQGETPLAYAVNGANVATVRYLLDHGAHPEKADNKGFTPLHFAAEEGYCNVVELLLAKGAQVDSMSVRGTPLHLAATNGQHRVVKILLDHNADCNKIVSAVYTPLLVAIYGSSLKCVKLLIKAGADVNGVGNITPLIASVGSTEIMKCLLEAGADPNVPDEFGRMPIEFAVRCGTLKDVNILFPLTSPMPTVPDWSVRGIIRHVNTLPGQKDYESGLEKEVAGLKLQGVEALKRQDYLAASDLYTKALCLDFNDATLYSNRSLCFLHMGDGDKAYGDAYTCRMMRPDWPKACYRQGAALMLLKEYQKACDALLDGFKMDPGNSEIENALREAMESLKISDGAKLTT

SEQ ID NO: 48026 - protein, 405 aa, Oryza sativa
MQRNGVVECSVCRSRLVVPSPRSVSRAYDKHRSKISSKFRALNVLFVVGDCILVGLQPILVFMSKVDGKFQFSPISVNFLTEVTKVVFAIVMLIIQSRKQKVGEKPLLARSTFIQAARNNALLAVPALLYAINNYLKFIMQLYFNPSTVKMLSNLKVLVIAVLLKFIMKRRFSVIQWEALALLLIGISINQLRTVPAGNTAFGLPVTAIAYIYTLIFVTVPSLASVYNEYALKSQYDTSIYLQNLFLYGYGAIFNFLGILGTALFQGPESFNILRGHSRATMFLICNNAAQGILSSFFFKYADTILKKYSSTVATIFTGLASAAFLGHTLTINFLLGISVVFISMHQFFSPLAKAKDDKPAELLELEDTQNHRSSESSFVNMTAGAAEDASHRIGTDERQPLLPT

SEQ ID NO: 48027 - protein, 532 aa, Oryza sativa
MNSMSYNKLSITNDRMDFNTRGNAVPNGKLDRNQSGVSANRSSASKPTARSKKKPDQADKTTPNPAQNSASSATRSEAATVTTTTKSPAISVDRSSIARSNSLDSFSYGQAKRHTGGDSRWDAVRSASSVDCPLGLVHFRLLKRLGYGDIGSVYLVELRDTDAFFAMKVMDKESLISRNKLVRAQTEREILGLLDHPFLPTLYTHFETDKFYCLVMEYCSGGNLHSLRQRQLNKHFNEQAARFYASEVLLALEYLHMLGIVYRDLKPENVLVRDDGHIMLSDFDLSLRCSVCPMLVKSSSVHAGANGVVKGLAAGGGGDGEGVGVGCMQPSAFLPRILPKRSRKTSKSDLGLLHGSPLEFNAEPTDARSMSFVGTHEYLAPEIIRGEGHGSAVDWWTFGVFLYELLHGMTPFKGSSNRATLCNVVEQPLRFPDGGAFPAPAAASGVARDLIRGLLVKDPGKRIASRRGATEIKQHPFFEGVNWALVRSAHPPSVPDPVDFSQFGVREKPAAAPTKVAKPAASDSSSGDFEYF

SEQ ID NO: 48028 - protein, 361 aa, Oryza sativa
MAGATAATPMDIDAAAPPPGAAAKGKAPLSSTPGGRAAPWVEKYRPQSLGDVAAHRDIVDTIDRLTNENRLPHLLLYGPPGTGKTSTILAVARKLYGSQYGNMILELNASDERGIDVVRQQIQDFASARSLSFGAKQSVKMVLLDEADAMTKDAQFALRRVIEKHTRSTRFALICNHVNKIIPALQSRCTRFRFAPLDGTHVRERLKHIIQSEGLDVDDGGLTALVRLSNGDMRKALNILQSTHMASKQITEEAVYLCTGNPMPKDIEQIAYWLLNESFSTSFKCISDMKMRKGLALVDIIREVTMFVFKIQMPSDVRIKLINDLADIEYRLSFACNDKLQLGALISTFTGARTAMVAAAH

SEQ ID NO: 48029 - protein, 362 aa, Oryza sativa
MAMVPSGSGGGPPVIAEVEMNGGADSGAATVRATVVQASTVFYDTPATLDKAERLIEEAAGYGSQLVVFPEAFVGGYPRGSTFGFGANISIGNPKDKGKEEFRKYHAAAIEVPGPEVTRLAAMAGKYKVFLVMGVIEREGYTLYCSVLFFDPLGRYLGKHRKLMPTALERIIWGFGDGSTIPVYDTPLGKIGALICWENKMPLLRTALYGKGIEIYCAPTADSRQVWQASMTHIALEGGCFVLSANQFCRRKDYPPPPEYVFSGLGEEPSPDTVVCPGGSVIISPSGEVLAGPNYEGEALITADLDLREIVRAKFDFDVVGHYARPEVLSLVVNDQPHLPVSFTSAAEKTTAAKSDSTAKPY

SEQ ID NO: 48030 - protein, 671 aa, Oryza sativa
MARSSSTSTILILKKLTFPSRREVRLKEARALLGKVENQHGHAEEALRVFSGINMPALIPKVKMSIIRKVDLQKAQLHSSSPSLPFHAAILLLEIIYFKATALRNLGKIEEATKECSSILDVVESALPEGLPDIFGDDCNLKPTLCRAVELLPELYKLGGFHFEAISSYRRALWSNWNLDEKTIGRIQKEFAVLLLYSGCETCSPNLLSQLDGSFVPRNNLEEAILLLMLLLRKFNLKRLERDPTVMHHLTFALSMSGQLKPLAIQFEELLPGVLHNREWSYNVALCYLAEEDDLIALNLLKRILVSGEDSNNLKELLLVSKICCENSVQGEEGTLYARRALTNLHGGCDQIEVTADLLLGISLSNQARFATTNTKRASQQREALEVLSISEKKMHGIDFRVLYNLSLENAKQRKLDTAARYAKKLLKLEAGSELKTWLLMARIMSAQRRFEDAESIVNAALDQTGKWFQGDLLQIKAKMQAAQGKFKKAVETYTQLLAVIQLRTKSFNAGISVLKGSKDDRSLEIETWYDLVLLYIRMSQWRDAELSISKIKAISPYSALAFHATGKLHEAKGFLKEALRAYSTALDLEPRHVPSLISTAIVLRRLGERPLPAVRCFLTDALQLDRTNHIAWLNLGLLYEDEGGSSALEAAECFQTAALLEETNPVEPFR

SEQ ID NO: 48031 - protein, 864 aa, Oryza sativa
MSDASSDLGGARPGAVERDIEQAITALKKGAYLLKYGRRGKPKFCPFRLSNDESILIWFSGKEEKQLRLSHVSRIIPGQRTAIFQRYPRPEKECQSFSLISHDRSLDIICKDKDEAEVWFAGLKTLITRSHQRKWRTESRSDMLSSGTTSPRTYTRRSSPLSSPFSSNDSVHKDGVENYRLRSPFGSPPKVGLEKAFSDIVSYAAPPKPFFPSDSNAGSVHSVSSGQSDNTNLHSRGIPMDAFRVSLSSAVSSSSHGSGHDDGDALGDVFIWGEGTGEGILGGGNSRVGNSSGVNMDCLIPKPLEFAVKLDVQNISCGGRHATLVTKQGEIYSWGEESGGRLGHGVDCDVPQPKLIDALANMNIELVACGEYHTCAVTLSGDLYTWGNGTSNSGLLGHGNEVSHWVPKRVNGPLEGIHVSAISCGPWHTAIVTSAGQLFTFGDGSFGVLGHGDRQSLSVPREVESLKGLRTVRAACGVWHTAAVVEVMVGNSSSSNCSSGKIFTWGDGDKGRLGHGDKDTRLVPTCVAALVEPNFCQIACGHCMTVALTTSGHVYTMGSPVYGQLGNPQADGMLPVRVEGKLHKNFVEEISCGAYHVAVLTSRTEVYTWGKGANGRLGHGDTDDRSSPTLVEALKDKQVRTVVCGINFTAAICIHKWVSGVDQSMCSGCRLPFNLRRKRHNCYNCALVFCHACSSKKSLKASLAPNPNKPYRVCDSCYSKLNKGPETDRYSSAKRGSVIQGFNDSVDEELETKSNAQLSRLSSLESFKHMDSRTSKKNKKFEFNSSRVSPIPNGSSHWSGLNISKSFGSSKKFFSASVPGSRIVSRATSPVSRRASPPRSTTPTPTLGGLTSPRVVDGVKPMIA

SEQ ID NO: 48032 - protein, 336 aa, Oryza sativa
MGSEEEPSQMRRALVDALAGAISGGISRTVTSPLDVIKIRFQVQLEPTTSWGVLRRDVYGPSKYTGLLQASKDILREEGLPGFWRGNVPALLMYMPYTAIQFTVLHKLKTFASGSSKTEDHLHLSPYLSYVSGAIAGCAATVGSYPFDLLRTILASQGEPKVYPDMRSAFLDIMKTRGFRGLYAGLTPTLVEIIPYAGLQFGSYDTFKRSMMTWNRYRYSHLNSGSEDDSVSSFQLFLCGFAAGTFSKAACHPLDVVKKRFQIEGLKRHPRYGARIESSTYKGMYHALKEIVAKEGFGGLYKGLFPSLVKSAPAGAVTFVAYEYISDWIGSKAGVE

SEQ ID NO: 48033 - protein, 407 aa, Oryza sativa
MAVTMDNVIRFMFILSVVYGAAYAKKSEAKVASAPGLAAAVNTVFDITELGAVADGKTDSTKAVQDAWDAACGLAGSQKVVIPKGEFMTGPLNFSGPCKGYVTVQIDGTMFGSNDIPKYNKGNWIEILHIDNVLVNGSGTLDGQGAAVWKDECKILPNTLVLDYVKNGTVSGLKLVNAKFFHINVYMSKGVTIKNVTITAVANSPNTDGVHIGDSSEISVSDATIATGDDCISVGPGSSRISIQGITCGPGQGISVGCLGRFKDEKDVTDVTVRDCVLRNTSNGVRIRSYEDVLSPITASRLTFENIRMDGVANPVIVDQKYCPEKDCPEKKGSKTVTIKNVTFRNITGTSNTPEAVSLLCSDQLPCSGMELLDVNLKYDGKDNKTMAVCTNAKGISKGSLQALACL

SEQ ID NO: 48034 - protein, 681 aa, Oryza sativa
MSFMLLLLLLLSLILNLASPTTAASGDGNGDQFIYSGFHGSNLTVDGAASITPDGLLQLTDGAAYLKGHAFHPSPVRLRRDVSTSTTTTTVRSFSVTFVFGIVSVYPDFSAHGMAFVVSPTTNLSSSLPAKYLGLTNVQNDGNASNHMLAVELDTIQSVEFRDINANHVGVDINGLQSVRAYNAGYYDDVSGEFRSLKLISRQAMQVWVDYHGGEKKQLDVTMAPLRMARPVKPLLSVTHDLSTVLADVVYLGFSAATGRVNSRHCVLGWSLGINGPAPAIDIDKLPKLPRAEPKPRSRVLEIVLPIVTATIVLVVGGAIVMVVRRRSRYAELREDWEVEFGPHRFSYKELFRATDGFADKHLLGSGGFGKVYRGVLPKSKLEVAVKKVSHESRQGMKEFVAEIVSIGRIRHRNLVQLLGYCRRKGELLLVYAYIPNGSLDKYLYSEEDKPILSWAQRFRIIKGIASGLLYLHERWEKVVVHRDIKAGNILLDKDMNGQLGDFGLARLYDHGTDSQTTHVVGTMGYLAPELIRTGKASPLTDVFAFGVFLLEVTCGQKPIKEKNPQGSHIALVDWVLEHWRDGSLMDTVDGRLHGEYDAGEAALVLKLGLLCSHPFAAARPGMGQVTCCLAGEAPLPELTPADMGFDVLAMMQDKGFDTSVVSYPDLMTSFGTISSLSGGR

SEQ ID NO: 48035 - protein, 428 aa, Oryza sativa
MASPRQNPAPAPPPPPPVILTDDLLEEIFIRLDTPADLARASSSCPPFRRVITDPSFLRRYRALYPPPLLGILPRDADAFLPAEPPHRSAPAAGAVDLSCAFLPDRHTWRRRDVRDGRILFSREEEYYAPDDDGADVLLMDLAVCDPFSGRYAILTEIPQDLIDPLDLEGQSFLCFEPFLAPATAADDDEDEVGGASFRVMYMARGLTKLMAFIFPWEAGEWRAVEYDGWAALINGTSTWLAEMFWRFHVHGNICWLLDWANKLLILDTTTNQLSTIEMVPGSWKKDIVFLETEEGQLGLFVLINNFYTSFDLYYAIWQDNDKGVKQWRVIEAIQLPLNYWYENLLGIDGGYVLLQGIPKGSKSSWQASSRQNGSSQASESSSEVPEHVCFSVEVKTFRVERFCGTNHAIKTANLFTSYPPSLSPPRL

SEQ ID NO: 48036 - protein, 203 aa, Oryza sativa
MFRHLAALILSAVVLAASTSSGVVDARPVHTGPYHVVIRTAAKPSRRLIGLGGNAAICQEVHYKALCGTLTTLPGVMTPQQLLDAALRVAESKAMMAEKRLADVMKSRAVKAEGTSMSSTLDTCKGAYSSLADALQKARDTIKSGGSHDDLMTELSSASTFSTDCGEAFDEFPDLTSPIPGAQRHVNRLVSNCLDLAATIKEN

SEQ ID NO: 48037 - protein, 365 aa, Oryza sativa
MASSAAAAAATDRIALVKAFDETRTGVRGLVESGVSAVPVIFRHPDPYASVPLAPPGVSIPVVNLSLPAPLAAEAAAGAARDWGFFYLVNHHALVPSGFTAGLLAAVRAFNELPAAERAAHYGRSVDGGVSYSSNVDLYRSGAASWRDTIQVVLGPSRPDAERIPAACRAEVVGWDAHATAVARAVMALLCEGLGLRGETLEEASCLEGKLMVCHYYPVCPEPERTMGIVPHTDPGVLTVLAQDGVGGLQVKHTNEDGESYWVDTKPVPGALVINVGDLLQIMSNDKYKSVEHRVVMKSHEEARVSSAIFYNPGKRGDSVFYGPLPDLISSGNPPKYRNFTMSEFLGAFFKRDLASKALIEHFKI

SEQ ID NO: 48038 - protein, 642 aa, Oryza sativa
MATYYSSPGNERDSQAMYPADSGNSSYPVPSAIGNMLYPGNGSSGPYTEFSGIIQHQQNFMELPGHPTAISQDSSSREPNMVASYMDQRSFGPAKDMRNEMLMHLMDGAHNAGADLIHNDTHSSAQIEFGLLNNHNSMSVAPAPGQGLSLSLNTHILAPSYPYWSAKTELLTPHSYHGDDNRMKNMQSEASQAIRNSKYLKAAQELLDEVVSVWKSIKQKAQKDQAEAGKSDNKEAEGGSKGEGVSSNPQESTANAAPEISAAEKQELQNKMAKLMAMLDEVDRKYKHYYHQMQIVVSSFDMVAGSGAAKPYTAVALQTISKHFRCLKDAINDQINVIRKKLGEEESSSGKEGKLTRLRYIDQQLRQQRAFQQYGLLQQNAWRPQRGLPENSVSILRAWLFEHFLHPYPKDSEKLMLARQTGLTRSQISNWFINARVRLWKPMIEDMYKEEIGEADLDSNSSSDNVPRSKDKIATSEDKEDLKSSMSQTYQPSQLGESKANIGMMSLGGAPAGFHNEGNQDDSFMNLMLKDQRPGEAEGSLLHDAVAHHSDENARFMAYHLSGLGRYGNSNVSLTLGLQHPDNRLSVQNTHQPGFAGAGEEIYNSTASLGVAAASSSDYESTNQIDQRQRFEPSPLMHDFVA

SEQ ID NO: 48039 - protein, 471 aa, Oryza sativa
MLKVRWLPFKKTHLARSNASDASSPTSAAAATATAVTTHRLYQVWRGRNRFLCGGRLIFGPDASSIVLTVSLIMTPLALFVAFVSFHLAALIGKPLGQAVPAVAIAVGVFDVIVLVMTSGRDPGIIPRNVRPPEPEDIGVSSPAFGGGGSLPPTRDVYVNGVVVKVKYCHTCFLYRPPRCSHCSVCNNCVDRFDHHCPWVGQCIGKRNYRFFFMFISSTTFLCLYVFVFCWVNLAMTARQFGCSMGRAVVESPVSGILIVYTFVTAWFVGGLTAFHSYLVCTNQTTYENFRYRYERKANPHNRGVAKNVAEIFLSPIPPSRNDFRSRVAVEHYYAAGAGAASGQYFYSYSIGPLSSESKAASFNTRGSLSFDMATASFDLGGVGVGGGVGGYSAKRTSVDVCSNSSDFGDIYGGEQQPPRHSIFGGDGGGGRTSVRKADDVPTEFGHYGAAAAAAAGGGGGRPRGREFEAV

SEQ ID NO: 48040 - protein, 387 aa, Oryza sativa
MAPASDRNGHEGRRRVLLLPLPYHGHINPMLRLAAALHDRGLAVTVVHTETRAPDRRSLPAGCELVTVPDGLPPELAASGDIPSFVFALNRNCAAPFRDLLAGALRQEEEEEDGGGVACVVADVDWFAPLAAARELGVPALALMTSSAARFRVYLAYPRLCEKGYLPVQESNLDMPVDKHPPLLVRDLHIMMDTSRHVAYASLLAHIVAGVRQSSGLILNTFNAIERTDVEQIRRDTAIPVFPVGPLHMLSPPATVATQKSSLLLEDRSCLEWLNTQLPGSVLFVSFGTLVSIDADELLEVAWGLAASNRPFLWVVRPRLVRGRDSVELPSELLEETRGRGRIIRWAPQEEVLSHPAIGAFFDTLWVELDAGEHIQDRADDMQAMWR

SEQ ID NO: 48041 - protein, 227 aa, Oryza sativa
MAAATEEQLRITGSVVPGVGEVEEVDEATEGGRLGRGDDDEILRFMDSVDGYLLLMDSLSSVLRPGWLDLASARHSMGTSRVSSTLFDHKEQSAASKLQVVDSADSQSSEPNPHFILSKWCLQEKSNSNDAVGVRDTTKPKLRYRGSAATPDGSHDSDATPAESATSVDTSSHVQKARSKALSTFGALVSPKLRSAQMSFETALELIVELANSRSDMLSSFSQIKGE

SEQ ID NO: 48042 - protein, 256 aa, Oryza sativa
MVNLPEHGESTLEAMISLSLLLEWLDLRSVCTDGNQMDEWVIRAPNLKHLTIESDYDYLWRVEELPSLQTATVKVDDDSTDRDFVQLLTCFAQVSMLELHLLATEDNALDGLSCSLEKLKSLTLHANFRSVSSILCIFSLLMRCPNIGVLDIEIMGSEFPQNDEIDAEFFNTLETNDLFTNLDDITLRNAPCLSNDMHFIEFVLSRVRLLSKFWVFRDDSNSLSKPSEEAVIEIAKYRRASPKSRVFFRSMEDYYI

SEQ ID NO: 48043 - protein, 60 aa, Oryza sativa
MHDDNEVCTRAGRQQALETLATQSRHGDGGQDRWMDGCQFVAVGCLSRCSWVMDICRWET

SEQ ID NO: 48044 - protein, 339 aa, Oryza sativa
MLVRSASTPVLGALLPSGSHSPAVSSPAVHFFADSSPTVSYHPPTISCRLTPGGSDAHDRSLGGLRRACSDGNLAALGASGDDDHHHHLPPSGKCAPRSKPTTLETIQSFTQRGGASTDEEEEEDDDDGDHESAEQELSFGKFRFSGSSTFAQVEHPLFLARGLGIDRLGSGLLSADGGSGGSDGGGGGGAGGSYLVTSDNGGNRSDIEMHYKKMIEEDPCNGLFLRNYAQFLYQIKGDSRKAEEYYSRAILADPNDGELLSEYAKLVWDVHRDEDRASSYFERAARASPQNSHVLAAHAAFLWDTDDGDGPEGSSSDALGYAGFAAAAAHSSLASATT

SEQ ID NO: 48045 - protein, 258 aa, Oryza sativa
MPIEAVAVASLPMASRSAALCFSSAAAARSRSRSRHGRMAVSCDAGASDLLYSSLAAKLLGPPTSFDAGKLTVEFAHSHGNSSSGFPRAYTLTHCDFTANLTLAVSDTIAADRRLRADDVFAEWKQQQQQEGMALHVHCFVSGANLLHGLAAGFRCGCTSTPAPTLSTTGSSAGVLSGRLQTPRRRTRGMRWSNCTTQSPKAQEGVGGSGLARTPSSAPCSPFSFDAYGEPHTLSFFLLCLVRINSNSFIHRTLDMYV

SEQ ID NO: 48046 - protein, 85 aa, Oryza sativa
MRGCIPGRLPLACEHLAVRPSGQAATGKTVIKQNKMNLWHGSRSTCGSHKGSPGQKARGRCSRICTKSSFRRRSMEGPVWYSSNS

SEQ ID NO: 48047 - protein, 487 aa, Oryza sativa
MDPNSLKTGGLLLPTIERQCASPPSVIVIGGGISGVAAARALSNASFEVTVLESRDRVGGRVHTDYSFGCPIDMGASWLHGVCNENSLAPLIGYLGLKLYRTSGDNSVLYDHDLESYALFDKAGHQVSKETVAKVEETFERILDETVKVRDKQEHDMPLLQAISLVLERHPHLKLQGIDDQVLQWCVCRLEAWFAADADEISLKNWDQEHVLTGGHGLMVNGYYPIIQALAQGLDIRLNQRVTKIARQFNGVTVTTEDGTSYSADACIITVPLGVLKANIIKFEPELPSWKSSAIADLGVGIENKIAMHFDTVFWPNVEVLGMVGPTPKACGYFLNLHKATGNPVLVYMAAGRFAQEVEKLSDKEAVDLVMSHLKKMLPDATEPTKYLVSRWGSDPNSLGSYSCDLVGKPADVSARFAAPVENLYFAGEAASADHSGSVHGAYSSGIAAADECRKRILMQKGIPDLVQVKAYEEMAGVIAPLQICRT

SEQ ID NO: 48048 - protein, 196 aa, Oryza sativa; identical to SEQ ID NO: 43723

SEQ ID NO: 48049 - protein, 106 aa, Oryza sativa
MMCAKSAEADDLGIRQIKLLRNQRCAHNFGIASPMRVGRHGGFLQLPHPSPLHVPPDLSLPSLWRGNSHGRSCFDVKNYLVDLEKKKSQFMCMLFVFRLLHFFLVN

SEQ ID NO: 48050 - protein, 295 aa, Oryza sativa
MAASPAMPSLLLLLLLAVLVSAADAYDSAASANTNAGAIPDPNILYMEAMCPKTTDVKACQQLVKNMPSNIVAGKKDARSIARGCIATAWFVARDGAKDCTAAVDECKDKVDQCLDSCRHAFAAVNDALEPQGTGDDAVKVPEDEKLLAIHASLTQLLRGPTGTRRPPLCNTCCQDGSCTEEKKRNVVALFVQLWSLLDFADAVLEDLYPLTKLPGDKAAGSDTSAAAAGSTADKETSAAAGSTADTATSAAAGSTSAKETSPVAGSTADKTYAAAGSAPPVVDTAPAPPVTTYD

SEQ ID NO: 48051 - protein, 218 aa, Oryza sativa
MAAVAATSPALTLAVAAAVIAAACLLLCAEAVWLDLPQSGTKCVSEEIQSNVVVLADYALMYESHPSSHPTVAVKVTSPYGNTLHHNENATVGQFAFTTSEAGNYLACFWIDSAEKGSGISINLDWKIGIAAKDWDVIAKKEKIEGVELELRKLEVAVQSIHQNMIYLKAREAEMRTVSEKTNARVAWFSILSLSVCIVVSILQLWHLQGYFQKKKLI

SEQ ID NO: 48052 - protein, 317 aa, Oryza sativa
MGECSEHRCWDELLPDALGLIFRKLSLKDVLTVVPRVCKSWGRVVAGPYCWQEIDIQEWSQQQSKPDQLKRMVRMLVARSGGSFHRISVSGLPGDPLFTFIGDHARSLKTMELPRSDISDSLVENVAPRLSNVTFLDISSCTKIGARALEAFGKHCKSLIGLRRVMHPTDVVGRASQHDEARAIACNMPKLRHLEIGYMLIATKAVVEIASQCHDLKFLDLRGCWNVDDKLLQESYPGLKVVGPYVDDCYENSFWEECSDDSDDSIYWELMDDDYYAAGSDDEGIWDDGQGLEGLEVRFYGGGFSESHAGFDWPPSP

SEQ ID NO: 48053 - protein, 582 aa, Oryza sativa
MVRPTQDAIDTFVGITGADEAVAARKLEEHHGDLNEAVNAYFNEGDRTSTRANENPIPTGYDDMELDEPFGPVPTFHMPLGNPFSLLDQGFLERAAAVYGEGPHITHPREVRRIDVEVKDNNTPAGSSGHGPVIEDVTGHEFSHGPEIRGTVLIDEDDDDDNLPSAQDTRLPSNPSTSNYSVPRAPPIANVSDYNNDIEEEMVRAAIEASKRDADGLTNGLRSGERENASRGRDDDEIARAVSMSLETAEQERVLRQVGAHVSDHSDLSDKEDIEGATGTVERQVPTSGKVGTSDQLVDEENFQDDDVEEHSFVRQHSRRVPSGNDESTEALERANSHPSSLLPHNIENNQQFNGVFPSEWGGISSEEHDEAVMLEAAMFGGIPGRAAYPFSLPYHQNSSRYPTVAHPPSPTLTAQRLLREQQDDEYLASLEADREKELKAEQEAELRRLEAAAEREAAIAKQKQEEEEKRRKQLEEEELESKLAAKQASLPKEPLPDDVGAVTVVVRMPDGRRQGRRFMKSDNLQVLFDFIDISRTFKPGTYRLVRSYPRRAFTDSESQMSLSDLGLNSKQEALFLEQISG

SEQ ID NO: 48054 - protein, 660 aa, Oryza sativa
MPSCFTLDSASDDGRSTAQGQGWPAGVGGFLSGFFSAGAARADGGKPSPVWDAHGLAASALPVPLSRLDGKKRYKVSDLTFLNCRTRAAAAAAAEAPLFDALRPGGVYTRAQLRDELDALATSGMFDHVTLQTKPCVLPEKLQRELQGMVKRQRKVSSGLLKRMAGRIERWYHDEGFHCAQVVSYHGNLDAGEVVCEVVEGDITKVEYQFLDKLGNVVDGNTSIPLIDRELPQQLRPGHIYNNGAGKQALKNIDSLGLFSTIEVQPRPDETNQGGVIVAIKLKEHDPKSAQVITDWSIVPGSQGRPTLASIQPGGTVSFEHRNICGLKRSLIGSVTSSNLLNPEDDLSFKLEYAHPYLDGIDNLSRNRTFKISCFNSRKLSPIFVAGPNMYEAPPIWVDRIGFKANITESFTKQSKFTYGLIVEEITTRDENNNICTHGSRQLPSGALSMIGPPTTLSGTGVDRMAFLQANITRDNTEFVNGATIGDRCIFQMDQGLGIGSKNPFFNRHQLTVTKFINLNKQEKGSRKPPPAVLALHGRYAGCVGDLPSYDAFALGGPHSVRGYGMGELGASRNLLEVATELSVPITVKNRHTQVYAFAEHGTDLGSSKDVEGNPTEFFRRVGHGSSYGVGVKLGAVRAEYAVDHNAGTGAFFLRFGERF

SEQ ID NO: 48055 - protein, 68 aa, Oryza sativa
MSIIFIVLSIVALEKFQSLSCENMWENRRSIANEYNGFSSISRSWSCCFISIWSLDRATGATGKCKSQ

SEQ ID NO: 48056 - protein, 102 aa, Oryza sativa
MLVFHKPQCLSTWFQNTHVNGSKVQKTPSLSSLGHLNLPTWFMHDPLSVAALVAIVEAWSRRVRGCNFRRDGVLSHYITSLSPLSHSSSPIRAPAQRCGRCH

SEQ ID NO: 48057 - protein, 91 aa, Oryza sativa
MGSSEHMGASENEMESAIEGDPLHTSTGWNCFFFFSPSIKIKFPTEMTPIRERFVCRCRAREVVPDYPRQAYCPATTRMCLQIPIPTSATP

SEQ ID NO: 48058 - protein, 511 aa, Oryza sativa
MTSTAYSRPSKLPGGGNGSDRRLPPRLMRGLTTKIEPKKLGVGLLAGCCLALLTYVSLAKLFAIYSPVFASTASTSALMQDSPPSSPETGPIPPQETAAGAGNNDSTVDPVDLPEDKSLVEAQPQEPGFPSAESQEPGLPAALSRKEDDAERAAAAAASEIKQSEKKNGVAAGGDTKIKCDENGVDEGFPYARPSVCELYGDVRVSPKQKTIYVVNPSGAGGFDENGEKRLRPYARKDDFLLPGVVEVTIKSVPSEAAAPKCTKQHAVPAVVFSVAGYTDNFFHDMTDAMIPLFLTTAHLKGEVQILITNYKPWWVQKYTPLLRKLSNYDVINFDEDAGVHCFPQGYLGLYRDRDLIISPHPTRNPRNYTMVDYNRFLRDALELRRDRPSVLGEEPGMRPRMLIISRAGTRKLLNLEEVAAAATELGFNVTVAEAGADVPAFAALVNSADVLLAVHGAGLTNQIFLPAEAVVVQIVPWGNMDWMATTFTGSRRGTCSSGTWSTTSARRRRA

SEQ ID NO: 48059 - protein, 475 aa, Oryza sativa
MATTPAPVSLSAAASTVPARLLVGRGAAAAPVARRRARMVVVRAKIREIFMPALGSTMTEGKIVSWSAAEGDRVAKGDAVVVVESDKADMDVETFHDGIVAAVLVPAGESAPVGAPIALLAESEDDLQAALAKAQELSKAHPQQAPPPSDAAAPPPPPPPPAAAPAAPAPVAAGTKGIATPQAKKLAKQHRVDLAKVAGTGPFGRITPADVEAAAGIEPKPKVVPAASAAPVPLSAPAIGAVPQAAELPPVPGATVVPFTGMQAAVSKNMVESLAVPAFRVGYPIVTDKLDELYEKVKSKGVTMTVLLAKAAAMALAQHPVVNASCRDGKSFTYNTNINIAVAVAIDGGLITPVLEDADKLDIYLLSQKWKELVKKARAKQLQPNEYSSGTFTLSNLGMFGVDRFDAILPPGQGGIMAVGASKPTVVADKDGFFSVKSKMLVNVTADHRIVYGADLAAFLQTFAKIIEDPESLTL

SEQ ID NO: 48060 - protein, 162 aa, Oryza sativa
MAAPDVEYRCFVGGLAWATDDRSLEAAFSTYGEILDSKIINDRETGRSRGFGFVTFSSEQSMRDAIEGMNGKELDGRNITVNEAQSRRSGGGGGGYGGGGGGYGGGRGGGGYGGGGGGGYGRREGGYGGGGGYGGGRGGGGGGYGGSRGGGYGGDSGGNWRN

SEQ ID NO: 48061 - protein, 91 aa, Oryza sativa
MDPLPLARRSNGATRLPAMSPGASRSSATSPMAAAPVRRWPGAALPSSSLHWLVKKLGEEGPGQDLHASCLSMIGAMFQEVIPKLQCLFQY

SEQ ID NO: 48062 - protein, 512 aa, Oryza sativa
MSGGSLLNSGGMADYGGGGGSGGGLTFPVVVTCLMAASGGLIFGYDIGISGGVSEMESFLEKFFPGLLKGTAHASKDVYCIYNSQALTAFTSSLYAFGMVGTLVASRVTRRTGRQAVMLIGGSMFLVGALVNAAAVNIAMLIIGRMLLGLGLGFSGQATPVYLAEMSPPRWRGGFISGFPLFISVGYLIANLINYGTSRIPVWGWRLSLGLAAFPAAVMVAGAAFIPDTPSSLVLRGKHDLARAALQRVRGKGVDVDAEFNDILAAVEHDRRNDEGAFRRILRREYRPYLVMAIAFPVFLNLTGVAVTAFFSPILFRTVGFESDAALMGAVILGLMNIFGIVGSGFAMDRYGRRLLFMIGGALMFTCQVAMASIVGSQLGHGSKMAKGYAVTVLVMTCAFSASFSWSWGALYWAIPGEIYPVEVRSAGQGVAVALNLGLNFVQAQCFLAMLCCFKYGTFLFYASWLVVMTAFAVAFVPETKGVPLESMGHVFARHWYWGRFVKDHKFGDVST

SEQ ID NO: 48063 - protein, 681 aa, Oryza sativa
MAAAEENSSLFLIFILTMIALPLVPYTIMRLCRAANVKAKTIHCRCSGCHRSGKYRKSIYKRISNFSTCSNLTILLLWIVMIFLVYYIKHVSREVQVFEPYSILGLEPGASESDIKKSYRRLSIQYHPDKNPDPEAHKYFVEFISKAYQALTDPVSRENYEKYGHPDGRQGMQMGIALPKFLLNMDGASGGIMLLGIVGLCILLPLMIAVIYLSRSSKYTGNYVMHQTLSTYYYFMKPSLAPSKVMDVFIKAAEYMEMPVRRSDDEPLQKLFVAVRSELNLDLKNIRTEQAKFWKQHPSLVKMELLIQAHLTGESFALTPALLKDYRHMLELAPRLLDELVKIALLPRSPHGFGWLRPAIGVIELSQNIIQAVPLSARKASGGNSEGIAPFLQLPHFTETVVKKIARKKIRSFQEFCDMPVEERATLLTQVAGLSDEGAQDVELVLEMIPSIEVDIKCETEGEEGIQEGDVVTMYAWVSLHRRNGLTAALPHAPSFPFHKEENFWLLLADAASNEVWLSQKVSFMDETTAITAASKAIQETQEALGASAKEIGIAIREAVDRVKKGSRLVMGEFQAPAEGTHNLTSFCLCDAWIGCDTKTSLKLKVLKRSRAGTRGHVAEEGPVAEDGIEEEEEEEEEEYDDYESEYSDDEEDEKSKGKGKVANGVAHQKANSDIDSGSDD

SEQ ID NO: 48064 - protein, 410 aa, Oryza sativa
MKFRKGTKVEVLQKGGAPLGSWRPAEIVSGNGHTYLVSYGSCPTQGSVAAERVPRKAMRPLRPPLDGIVCWVKGEIAEVFDSYTWKVAEVVRLLGFSYYLVRLLGSSLELKVHASNLRIRQLWEDGKWVAIPKDSARFPGDSPRSQLRCGKVGHELVHTSRDNRLLLKKKKVYEGNTSQGLKRKSSALSAFPMQYSEVSKRFQTSHRDGRCLPVVPGGSLHLMDKVDAVDSQCLELGEKYMHDSLSKRANGFHKTNLAAVKANFDYLDPAVTTQDSDTDSVVSSVGSCNPCGSPYGSTHPQEYDCADICSRTDDAEVSVSGRESFSRTDDAEASVSGRESPAPVNDGLKEKTHLLELHAYRATLMALYASGSISWEQEAMMTNLRLTLNISTDEHLSELRSLVSSEVHSR

SEQ ID NO: 48065 - protein, 209 aa, Oryza sativa
MCWECPWEDTQFGDAFSTYQTGLQELPMVVPIINYWWPSFPAELSRQAFKRLIVPEQRTLWIAHNMPSLLYQWMTQKWLPSSAAAMRHPEIFSKHDLEVLQKMMAMPLIENKSRQQGIYESTHRDLLVAFGKWEFDPMNITNPFPQNEGSVHIWQGYEDRLVLVELQRYIAQRLPWIQYHEFPEGGHMFMLVDGWTDKIIRALLVGEQL

SEQ ID NO: 48066 - protein, 394 aa, Oryza sativa
MDSNEGSHRITRSGIVRAKPAVTADGKIEPAGEGLPHGWLKEYRPRKNQSGSRVKGDTFYIDPTNMYEFRSQKDVQRYLESGDVTNCVMIQNKRKMEDLHTARNQSHHTRRPSDHRQLDAGEGATQCDLPIARGNSARSDFLVNANSSDNSEDMSSSVPKGVSEGKLTRLKLQKARVPNQSVEHESSTGEVANMEHKPKEKKQKTKPVKQISTPLRASPRLAALKINQEGNNEPKDEALSTNTDTANQSQPKLTKSPKAKANSSVLPEKSDGAHTSNASEIPQNKYPSATEQMQGSSVHPQQAGTADAMPGSALSSLLRSIWSDPCLKFAIKTLAGDIPALDFIPSQDMNKGTTPNCSSSAYDGSRNHAQVDHVGMPMPRPSDKFYGSGWFPPQ

SEQ ID NO: 48067 - protein, 151 aa, Oryza sativa
MQDNEMKRRKLESINKRKLVLLSEVKFLQKKLNSFKKNDSQQVRLKKKAPRVPSHVGINDASAFYGASTEVPSTSKRTDLDLNQDSAMNDELSDFPGHHNHLELKKAEQAGVDEVIMTADVNLSACRDTGNSPASDDKRSVSWQDRVALKV

SEQ ID NO: 48068 - protein, 472 aa, Oryza sativa
MAPPLLPRGAALLLLLRSAARRPAAASSRGFLSSAAAGGREGALAAAAVAVVGSGLGLWLVPPSLADSGEAVADAPAVQISVGSGSGAVGAVEERGRKRRFLLGDSFRRRVFFNYEKRIRLLSPPEKIFEYFASVRNPEGEVFMLPADLMRAVVPVFPPSESNIVREGRLRGERNPGELHCAPSEFFMLFDTNGDRLISFAEYIFFVTLLSIPESSFSAAFKMFDVDHSGEIDKEEFKKVMALMRSYNRQGANHRDGLRTGLEVGQPVENGGVVEYFFGNDGNEPLHYDKFTNFLKGLHDEIIRLEFSHYDVKSSNTIPAKDFALSMVASADMNHINKLLDRVDNLGNDPDLKGVRITFEEFKSFADLRRRLEPLAMAIFTYGKVNGLLTKQDLKRAAHHVCGVDLTDRVVDIIFHVFDTNHDGNLSSEEFVRALQRRETDVRQPATPGSMGLLSYWLNFNKCSSLTQMLLK

SEQ ID NO: 48069 - protein, 406 aa, Oryza sativa
MSCLGWFKKRRSSKSKESSGRRGSTTTTVSAVSTSRSDDSGAVRPASKSTGSTSSHRSISSLYEERGHGQLRDFDYDELQAATNGFSRAQKLGEGGFGSVYKGFVRSSPADGKAADRLAVAVKCLNQRGLQGHKQWLAEVQFLGVLEHPNLVKLLGYCAVDGERGPQRLLVYEYMPNKSLEDHLFVRAYPPLSWNRRLQIILGAAEGLAYLHEGQVQVIYRDFKASNILLDKDFRAKLSDFGLAREGPTGANTHVSTAVVGTHGYAAPDYIETGHLTVKSDVWSFGVVLYEILTGRRTLDRHRPQGEQKLLEWVAQFAPDSRNFRMIMDPRLRGEYSVKAARDIAKLAESCLLKNAKERPTMSEVVDVLRRAVQSQPDPPPPPAAAAAASGKGKRVDVAPQPARRR

SEQ ID NO: 48070 - protein, 383 aa, Oryza sativa
MAPSSSSCHDAAASMLLCAEDNSSILWLEDEEGEVGERRSGGCRSMVGDLAAGGGGGSGGGGVEEEEDMFPRQSEECVASLVEREQAHMPRADYGERLRGGGGDVDLRVRSEAIGWIWEVYTYYNFSSVTAYLAVNYLDRFLSQYELPEGRDWMTQLLSVACLSIAAKMEETVVPQCLDLQIGEPRFLFEVETIHRMELLVLTNLNWRMQAVTPFSYIDYFLRELNSGNAAPRSWLLRSSELILRIAAGTGFLEFRPSEIAAAVAATVAGEATGVVEEDIAEAFTHVDKGRVLQCQEAIQDHHYSMATINTVQPKPASTRRGSASASSSSVPESPVAVLDAGCLSYKSDDTDAATIASHGGGRRKSCFDSSPVTSKKRRKLSR

SEQ ID NO: 48071 - protein, 678 aa, Oryza sativa
MAGSVVAAAAAAGGGTGSSCDALYRELWHACAGPLVTVPRQGELVYYFPQGHMEQLEASTDQQLDQHLPLFNLPSKILCKVVNVELRAETDSDEVYAQIMLQPEADQNELTSPKPEPHEPEKCNVHSFCKTLTASDTSTHGGFSVLRRHAEECLPPLDMTQNPPWQELVARDLHGNEWHFRHIFRGQPRRHLLTTGWSVFVSSKRLVAGDAFIFLRGENGELRVGVRRLMRQLNNMPSSVISSHSMHLGFLATASHAISTGTLFSVFYKPRTSQSEFVVSANKYLEAKNSKISVGMRFKMRFEGDEAPERRFSGTIIGVGSMSTSPWANSDWRSLKVQWDEPSVVPRPDRVSPWELEPLAVSNSQPSPQPPARNKRARPPASNSIAPELPPVFGLWKSSAESTQGFSFSGLQRTQELYPSSPNPIFSTSLNVGFSTKNEPSALSNKHFYWPMRETRANSYSASISKVPSEKKQEPSSAGCRLFGIEISSAVEATSPLAAVSGVGQDQPAASVDAESDQLSQPSHANKSDAPAASSEPSPHETQSRQVRSCTKVIMQGMAVGRAVDLTRLHGYDDLRCKLEEMFDIQGELSASLKKWKVVYTDDEDDMMLVGDDPWPEFCSMVKRIYIYTYEEAKQLTPKSKLPIIGDAIKPNPNKQSPESDMPHSDLDSTAPVTDKDC

SEQ ID NO: 48072 - protein, 550 aa, Oryza sativa
MPSPLPCNLLTRRRALTACAAVAALTAAAALFLLATPPTEDPTHPYLLASLLHNNTSNQPDSAAASQPPLPSTSILQLQTNLPSGFTTVPSMFLVPSPSPAENLDDGSMEETDPPDLKENPPAESAPFLQEPISSGSPIRRSDIYNKGHDMKDHAMLPPRPEVPIPLWSTAADEELIYAKKEITIAPLVSNDPDLHAPLFRNVSVFRRSYELMERLLKVFVYHDGAKPIFHSPELKGIYASEGWFMKLMEGNQHFVVRDPNRAHLFYLPYSSRQLEHNLYVPGSNTIEPLSIFVKKYIDFISTKFPYWNRTKGADHFFVACHDWGPYTTKLHDELRKNTIKALCNADLSEGVFIHGRDVSLPETFLRSPRRPLRGIGGKPAAERSILAFFAGQMHGRVRPVLLQYWGGKDADMRIYDRLPHRITRRMNYIQHMKSSKYCICPMGYEVNSPRIVEAIYYECVPVIIADNFVLPFDDALNWSAFSVVIPEKDVPKLKQILLAIPDDQYMAMQSNVQRVQKHFIWHPNPIKYDIFHMILHSIWYSRVNQIQIE

SEQ ID NO: 48073 - protein, 544 aa, Oryza sativa
MEAPSAKPRSRRATHGYMVLDRIVRCWSGVGGDDDPTASEIAYTCSGHPIRVSLRVADPPRRLPPLRPPPRLVARLRPGRRRGHRRPPRLHPPLGARPFRRPRHHRAGPIPPGLLRLHGQARRGVAAVAHAAAPLLHRRILLPEVDRHFKPHRCQQQRVMVEQNVGFFCHSDDAGDFTVADINIHKGKAVELCVLNHYADCPQQPQWKVQILEMQQQPNQNHHLRGWWTDAVLPLHDSYLACVDCYHGIILIDVKTQRYFNYIPLPAEAMRGRRVDKYNPDPARSVSINIAGDITLVCIDDNAAAGGRNNSSAGSAFIKSWCLVDIHESRWIRYFTMEAGKFWDICSAANQPLLPHAPPTFPLVSMANPFAISFLLYDKANNFLLEDKGNGLYWMIEVDMRNQALLSPATLYISEEEEAEFLLPPATFFINGKEEDDERYLPMKYFYGHNFVPSWFPSYLKGGDTTSRMRSLMMQQAKQESAIEKIGREMMQKEKQERAMQKNGLEMGSNSWELSKMKGKQQMATESRGMEAHLSRPLAGLKIA

SEQ ID NO: 48074 - protein, 430 aa, Oryza sativa
MVSEQSIRGVSGVEMKWESAGGQRNCQQLGGGVFGGDAHHLFDEMSTCPRGDSAAVLRVTVSQIIYPVTSEVLHQVYNTYGAVAVQVLAVSTWQVKALVSFMSSHDAERARSATHGRDIYDGGCLMDVQHVQMFPGDDATTTHTTCLTMVPSSATARPAAKSTAATPERVFPATTASSIPSITSAAMVTSVPFNETKKAETDMDKAVENLDKTIQDLCTKIDRMLEAFRHTKVDLSLSKDSTRDVAALSANTDPTSIALEVSTEAGSTNHVDTAKLGMGTTIECSMKCENQLADDDGGKDMAKEEWMELMEVDTKFTTMYLCFRDPLLIINAIPPRNWSWCLSRDYFGVVGLSFVSLKLEVLYGCFDRSSEYTASPPPVPPWRAAIPRNKAEMTSGSRPLPWLDPQLCQGSGGVVVKLLQPWPPLIQTSV

SEQ ID NO: 48075 - protein, 237 aa, Oryza sativa
MDGDGAHHNGGDRLRRAVAGVERGALGWVGGPAAMVLFAGVTLVQSSLLADCYIFHDPDNGVVRNRSYVDAVRFYLGEKSQWFCGFFLNINFFGSGVVYTLTSATSMRAIQKANCYHREGHDAPCSVGGDGYYMLMFGLAQVVLSQIPGFHDMAWLSVLSAAMSFTYSLIGFGLGVAKVITNGVIKGGIGGIAMVSATQKVWRVSQAIGDIAFAYPFASVLLEIEDTLSRRRRRARR

SEQ ID NO: 48076 - protein, 355 aa, Oryza sativa; identical to SEQ ID NO: 47892

SEQ ID NO: 48077 - protein, 519 aa, Oryza sativa
MASRLKEDERNERIIRGLLKLPANKRCINCNNLGPQYVCTNFWTFICTNCSGAHREFTHRAKSVSMAKFTAQEVSALQEGGNERAREIFFKEWDAHRNSFPDSSNADKLRNFIKHVYVERRYTGERSADRPPRGKDDKDEYSENRRSDGNWGGSRSPPYNESYSDRRSYSGRSDDRNSRYSYGERSPGYEHNDYKKSPRYFEVDDRNREDRSGKTTPVQRFEDRRPSEPQRPDNGSPNYQKETDGSSPVVRPVRDILGDNAPQLRVGEPPKPNVARTIDPPRPIDPPRPIDPPRPIDPPRPIDPPRPNGTRTIEPPPQMQRTSTASSIGSSEGTSEQIKVASTISLIDFSADPEPSASVPPPQSTPTSQQQPASAQPVQPVNAPAQQPAVEQGKNVSSVSSGGGDWASFDSFGQQQTPQTGNSVDPLESALAQLSFSETPSAPNSSAFPASVMPTSVPNDGGSSMMGQSHSSFFWCTPWSLRSPGLNRNVYPWIFSSTNWSSCSGSWTSVPGLCEFPSN

SEQ ID NO: 48078 - protein, 411 aa, Oryza sativa
MAQQLSAPFRAAAAAGSRASAAAADPAKVLRLRSAGSAQFTSIAASSSFARNIEPLRAIATQAPPAVPQYSSGEKTKVGINGFGRIGRLVLRIATSRDDIEVVAVNDPFIDAKYMAYMFKYDSTHGPFKGSIKVVDDSTLEINGKKVTITSKRDPADIPWGNFGAEYVVESSGVFTTTEKASAHLKGGAKKVVISAPSADAPMFVVGVNEKSYDPKMNVVSNASCTTNCLAPLAKVVHEEFGIVEGLMTTVHATTATQKTVDGPSMKDWRGGRGAAQNIIPSSTGAAKAVGKVLPELNGKLTGMAFRVPTPNVSVVDLTCRIEKSASYDDVKAAIKAASEGALKGILGYTDEDVVSNDFVGDARSSIFDAKAGIGLSSSFMKLVSWYDNEWGYSNRVLDLIAHMALVNAKH

SEQ ID NO: 48079 - protein, 42 aa, Oryza sativa
MVCKILHKQQEGPSRECFTCDGFCIEKGDSLFAEGVLKVACR

SEQ ID NO: 48080 - protein, 197 aa, Oryza sativa
MASERVKGTVKWFDATKGFGFITPDDGGEDLFVHQSSLKSDGYRSLNDGDVVEFSVGSGNDGRTKAVDVTAPGGGALTGGSRPSGGGDRGYGGGGGGGRYGGDRGYGCGGGGYGGGDRGYGGGGGYGGGGGGGSRACYKCGEEGHMARDCSQGGGGGGGYGGGGGGYRGGGGGGGGGGCYNCGETGHIARECPSKTY

SEQ ID NO: 48081 - protein, 463 aa, Oryza sativa
MKMRAAVADGDGDDDGAGAPVQVSVDPAAYRDWSALPADLLLTVMESLAIPDLFRAGTACASWYAAYSIARRARIPIRDSAPCLLYSGEGDDDPSKATLYSPSSGDCFRVRLPDPPLRSRNLVGSAHGWLVTADEQSNLHLVNPLNGAQVALPPVTALHHVESFVDEEGNIVYSVDESLGPDDPEANLPEFEELADREVPVEYPAEKLRLFMYNRVILSCSPSVGRECVALLVHRPDGMISFARPGDERWTHINRTTSNGSLKWDTGYTDALYNKNDGLFYLLSFDGSICALDLSGSSPVARNIVKKNTQWDNPSKYIVLAPWGDLLEVWRLRDFDEPDETPECSSAEFEDRSDKWLTEEIMLYKVDIDKQKLVKISSIGDYALFLGFNSVVCLPTENFPMLKPDCAYLSDEFYEEICVKRHNWREIGIWDLKNCKLQSLGDVESLHAWRNWPSPIWITPSLS

SEQ ID NO: 48082 - protein, 584 aa, Oryza sativa
MGEVAEDIYTQDGTVDVKGNPATKKNTGNWRACPYILANECCERLAYYGMSTNLVNYMKTRLGQESAIAANNVTNWSGTCYITPLLGAFLADAYMGRFWTIASFMIIYILGLALLTMASSVKGLVPACDGGACHPTEAQTGVVFLALYLIALGTGGIKPCVSSFGADQFDENDEGEKRSKSSFFNWFYFSINIGALVASSVLVYVQTHVGWGWGFGIPAVVMAVAVASFFVGTPLYRHQRPGGSPLTRIAQVLVASARKWGVEVPADGSRLHETLDRESGIEGSRKLEHTGQFACLDRAAVETPEDRSAANASAWRLCTVTQVEELKSVVRLLPIWASGIVFATVYGQMSTMFVLQGNTLDASMGPHFSIPAASLSIFDTLSVIVWVPVYDRLIVPAVRAVTGRPRGFTQLQRMGIGLVISVFSMLAAGVLDVVRLRAIARHGLYGDKDVVPISIFWQVPQYFIIGAAEVFTFVGQLEFFYDQAPDAMRSMCSALSLTTVALGNYLSTLLVTIVTHVTTRNGAVGWIPDNLNRGHLDYFFWLLAVLSLINFGVYLVIASWYTYKKTADSPDDKAEHAGANCATR

SEQ ID NO: 48083 - protein, 168 aa, Oryza sativa
MASSMAPAAAMAILLLALLMPATLCSRSGPPSSKHGHGGHAKRARRRRRPWCRWRLRPRRWCAPPATPPPTTTCACRRSPPTRRAPRPTCAGSPPSPCPWPRRTRPARRRRRRRWPTARRPSPPLPPATAPCRRCSARAPASTATRATRWRRRRSRWGSRTTTWRRCT

SEQ ID NO: 48084 - protein, 378 aa, Oryza sativa
MSSSPPTSAMAAGTSSSSGGGSGPLVVSNGVLLAAVIFLFMVVVFVFLLYLYAKRYLGANPLLAPVSPSSRFLFLDASPFPRRGLPAAALRALPVTVYAKPRRRAARRRSSARCACPRWPTARRCGCCPSATMDSTSSASTCGSIPTTPARSAARPWGPTPAARGCRACRGRSRLPWTSPCSPPTSSSGAPPTTTSPTPVTATRSTPRRRRRLSWPRPPRAPRRPRAGRRASSSTSRRALRAAAAADSVTSSSASTPLPASRMADDMRSPVSARLRSLRRLLSRGKQAVVGPSFSPRGGGDIEQGLAGVRRRRPRRPAGELILLPGAPRCIGSPRRSPERTHVFILSFLLFFSDIFFYISKKKKKEEILMRNSHVKRR

SEQ ID NO: 48085 - protein, 292 aa, Oryza sativa
MLGHLRRSSQRLPVANLAVYSIQSSHIEFIAGWCRNHSTRNFSVDTSNKVSNDRGYQSRELKPSLVKDDVAIIKHIQNSTKELKQGPVGKNLSSAEKRKFLVNTLLDLEDSKEGVYSTLDAWVAFEQEFPVASLKQALVALEKEEQWHRIVQVIKWMLSKGQGKTIRTYEQLVCALEKDNRADEACRIWELKIAHDLQSVPWRFCRLMLGIYYRNNRLDTLVKLFKNLEACGRKPPSKDIVRKVEDTYEMLGLVEEKKELLEKYKELFDKPSSNDRKKGRQFKKAEKNTKTG

SEQ ID NO: 48086 - protein, 485 aa, Oryza sativa
MALASLPKVVMGSVAFGVFWMLAVFPSVPFLPIGRTAGALLGAVLMIVFHVISADDAYASIDLPILGLLFATMVVGGYLKNAGMFRHLGRLLAWRSQGGRDLMCRVCVVTALASALFTNDTCCVVLTEFVLELAAERNLPAKPFLLALATSANIGSSATPIGNPQNLVIAFNSKISFISFLLGILPAMLAGMGINMLMLLCMYWKELDGGACSPDEVAAGKQMEAIEEGRRTALNNNKKDDGDAATPASPEDDDGGDAESMMSENISTKHRWFMQCSEHRRKLFLKSFAYVVTVGMLVAYMLGLNMSWTAITTAIALVVVDFRDAEPCLDKVSYSLLVFFSGMFVTVSGFNKTGLPGAIWNVMAPYSKINHVTGVTVLSVIILLLSNLASNVPTVLLMGDEVAAAAATISPAAVTRSWLLLAWVSTVAGNLSLLGSAANLIVCEQARRATRNAYDLTFWNHVIFGLPSTLVVTAIGIPLIGKINI

SEQ ID NO: 48087 - protein, 402 aa, Oryza sativa
MATKRSVGTLGEADLRGKKVFVRADLNVPLDDAQKITDDTRIRASVPTVKFLLEKGAKVILASHLGRPKGVTPKYSLKPLVPRLSELLGVDVVMANDCIGEEVEKLAAALPEGGVLLLENVRFYKEEEKNDPEFAKKLAAVADLYVNDAFGTAHRAHASTEGVTKFLKPAVAGFLMQKELDYLVGAVANPKKPFAAIVGGSKVSTKIGVIESLLAKVDVLILGGGMIFTFYKAQGYAVGKSLVEEDKLELATSLIEKAKAKGVSLLLPTDVVVADKFAADAESKTVAASAIPDGWIGLDVGPDAIKTSSEALDTCNTIIWNGPMGVFEFEKFAAGTDAIAKKLADLTTTKGATTIIGGGDSVAAVEKAGLADKMSHISTGGGASLELLEGKTLPGVLALDEA

SEQ ID NO: 48088 - protein, 478 aa, Oryza sativa
MRHLLLLRCGMAPLYGSSSSAAATKALLLNPAAAHAFVPSSPGPRALRRGGASLRCYAAAAAAVAEQHRIKVHNPIVEMDGDEMTRVIWKMIKDKLIFPYLELDVKYFDLGLLNRDATDDKVTVESAEATLEYNVAVKCATITPDETRVKEFKLKSMWRSPNGTIRNILNGTVFREPILCKNVPRILSGWKKPICIGRHAFGDQYRATDTIINGPGKLKMVFVPDGAEPVELNVYNFKGPGVALSMYNVDESIRAFAESSMAMALSKKWPLYLSTKNTILKKYDGRFKDIFQEVYEEKWKEKFEENSIWYEHRLIDDMVAYAVKSEGGYVWACKNYDGDVQSDFLAQGFGSLGLMSSVLLSSDGKTLEAEAAHGTVTRHFRLHQKGQETSTNSIASIFAWTRGLEHRAKLDKNDRLLDFTKKLESACIETVESGKMTKDLALLIHGPKVTREFYLNTEEFIDAVAQQLREKIQIPAVV

SEQ ID NO: 48089 - protein, 244 aa, Oryza sativa
MKEKVDASAVDLEAGTGETLYPGISRGESALRWGFVRKVYGILAAQLLLTTAVSALTVLHPTLNATLSSSPTLALVLAVLPFVLMVPLYHYQHKHPHNFVYLGLFTLCLSFSIGVACANTQGKIVLEALILTSAVVASLTAYTFWASKKGKEFGYLGPILFSALVLLVVISFIQVFFPLGSGPVALFGGLGALVFSGFIIYDTENLIKRHTYDDYIWASVELYLDILNLFLYILNMIRSMQSDN

SEQ ID NO: 48090 - protein, 236 aa, Oryza sativa
MAMATSISAGFGGELGAVLAPSASVLPAPRRRNPATSSKAQFSSFPRGRSCNIMLTPKHLGIEHQSCSKSSIQTFALSRNDFSPIAQEVEGFLHNIVNMGFLDRLKLAWKIIFPAPSIKENSNANIAKQRLKMILFSDRCEVSDEAKKKIVENIVEALSEFVEIESRDNVQVDISTDAGLGTVYSVTVPVRRVKPEYQESEEQYRGKIVGVDFKDTGETSGSVDVTFDFFVPNKNY

SEQ ID NO: 48091 - protein, 169 aa, Oryza sativa
MSVQFTSEHVCYVNCNYCNTILVVNVPNNCSYNIVTVRCGHCTMVLSMDLAPFHQARTVQDHQVQNRGFQGNNFGSYDIASRNQRTSTAMYPMPTSQQQVSPIRPPEKRQRVPSAYNRFIKEEIQRIKTSNPEISHREAFSAAAKNWAHLPRLHFGLSVADGGGGGGSN

SEQ ID NO: 48092 - protein, 1386 aa, Oryza sativa
MLDAGLPPETSAPVFGERVVSTAPPPLIDFSLGMESLRIRRGLGDNLWTDDGQPQAGNHAAAVAQALEHHFITELNVSTFLNNAIPYTGNRVLDMQPDQTGDDVDDDLPSQDDDISEHVTTDSPALPTSSPQQFGTTNQANGNVCPMNDLICQQSADVADVRTEEEMHQIADDMNVIPQSNEDTADRQHVAHPDRDSLSGNLQSYDHVMQDEVEIPQRGQIGNDIRDPSDLESSCHALLTSTSAAPELSDAHVDSTTMNTDVDMNSIDISENQVENSAPGLYGNVVSVRLDEGAPQETMQPDQLNANNEASSTNEIDPTFLEALPEDLRAEVLASQQNRAAPTASYTPPAAVEIDPEFLAALPPEIQAEVLAQQRAQRIAHSQPIGQPVDMDNASIIATFPPDLREEVLLTSSEAVLSALPSALLAEAQMLRDRELSRYRARGSLFGGSYRLGARRLPTDNQTAVMDRGVGVTVGRRVISTVSAGAKGKDVEGTPLLDSSALKALIRLLQLAPPLSKGLLQRLMFNLCAHSVTRATLIGHLLNIIKPEAEGLNGWDCMTTYRLHGCQWNIVYAQPQSANGLPPLVTRRLLEVLTYLASNHPSVAGLLVYFDPSTSSNCMILKHGKELSQEGLQSDMMKTSSEGYTPILLFLKLLNKPLFLRSRVYLEQVMCLLEVVVSNAASKVDYPPHSGQMVSTSVDENRAPIETHGEPSTMEQVPIQENSQNKDVVVPASGPQQSINVHDILTQLPDSELHNLCNILALEGLPDKVYTLAAEVVKKLASVAVSHRKFFSMELASAAQSLSSSAVEELVTLKNTQMLGLNSCSMAGAAILRVLQVLSTLTSDMSGNSQDQAVGQEEQSILWDLNISLEPLWQELSDCISTTEAKLVHNSSFNPQVPLMDAIEVGASSSTSPPLPPGTQRLLPFIESFFVLCEKLQTSQAVVPSDSNVTATEVKELAGGSSSPSLKTGGVCNITFVRVAEKHRRLLNVFIRQNPSLLEKSLSMMLKVPRLIDFDNKRAYFRSRIRQQHDQHLSAPLRISVRRAYVLEDSYNQLRLRRSQDLKGRLTVQFQGEEGIDAGGLTREWYQLLSRVIFDKGALLFTTVGNNATFQPNPNSVYQTEHLSYFKFVGRVVAKALFDGQLLDVHFTRSFYKHILGVKVTYHDIEAVDPDYYKNLKWMLENDVSDIPDLTFSMDPDEEKHILYEKNEVTDYELKPGGRNIRVTEETKHEYVDLVAEHILTTAIRPQINAFLEGFTELVPRELISLFHDKELELLISGLPEIDFDDLKANAEYIGYSPASPVILWFWEVVNGFSKEDMARFLQFVTGTSKVPLEGFKALQGISGPQRFQIHKAYGAPERLPSAHTCFNQLDLPEYSSKELYPLPYM

SEQ ID NO: 48093 - protein, 815 aa, Oryza sativa
MAVASASALFSAKNLPHKPWEDPSFFRWRKREAHVPLRSHDTPEGALKYWHERRNVNYLNSDSAVWNDDAVRGALESAAFWSKGLPYVQTLSGYWKFLLASSPESVPEKFYDAYFNDSDWEALPVPSNWQMHGFDRPIYTNVTYPFTMNPPFVPNDNPTGCYRTVFRIPKEWKGRRILLHFEAVDSAFFAWVNGVPVGYSQDSRLPAEFEITDFCHPCDSEKENVLAVQVMRWSDGSYLEDQDHWWLSGIHRDVLLVSKPQIFITDYFFKATLDEGFRVADIEVEVEIDSQKQDREHVSTLSIEATLYDNYGPADVLTSDMSAASVANLKLKPASRPKHCYGFHGYVLGGKVENPKLWSSEHPNLYTLVVVLKDSNGKLIECESCQVGIRNVVLAHKQMLVNGCPVVIRGVNRHEHHPRVGKTNLEACMIKDLVLMRQNNINAVRNSHYPQHPRWYELCDIFGLYVIDEANIETHGFDESSHFKHPTLEPFWASAMLDRVVGMVERDKNHACIIVWSLGNESSYGPNHSAMSGWIRGKDPTRPIHYEGGGSRTSSTDIVCPMYMRVWDILKIAQDPSENRPLILCEYSHAMGNSNGNIDAYWMAIDNTVGLQGGFIWDWVDQGLLKEDADGSKNWAYGGDFGDTPNDLNFCLNGIVWPDRTIHPAVHEVKYLYQPIKITMMDNMLKIENVHFFETTEALDFSWLLQGDGCALGSGSLNVPSIAPQSTHLINMKSSPWFTIWSTCVVKEIFLSINVKLRYQTQWAKDGHILASAQICLPPKKGFVPHAIALPRSSLVPNVLVIMYSSAKVMPGKSK

SEQ ID NO: 48094 - protein, 74 aa, Oryza sativa
MAFVQELMDRDPLLVFGEGEYGVTDMFYAAARGGNAEVFKLLLDHAMSPRCSTNCPNREGAAAVVAAPRCSGWK

SEQ ID NO: 48095 - protein, 209 aa, Oryza sativa
MVRPYHVHSKDPCSFDAGSIVDAWWNSGWWEGIVLQQGNDRRLQVYFPGEKQIADFCEDDLRHSREWAGGKWNSLGERKDITHLLPPTSVHEEGGLLSKPVSQEGNPSSKLESDKRCDDKSLGTKISHDQKHQKRVLADLTNALKFDNLKWGQESGAEDLVPKGSQTLAVAVAAAARATWRSPAPAEVLQCLIQRPMKKYARAVENLFS

SEQ ID NO: 48096 - protein, 436 aa, Oryza sativa
MTLRLGTVTTVVASSPGAARDILQRHDAAFSARSVPDAARACGHDGFSMGMLPPSSALWRALRRVCAAELFAPRSLDAHQRLRRDKVRQLVSHVARLARDGAAVDVGRAAFTASLNLLSSTIFSADLADFGDARAESSVGDLRDLISEFTIVVGVPNVSDFFPAVAPLDPQRLRRRVARVFERLQAVFDGHIERRLRDRAAGEPPKNDFLDALLDYRSPEDGRGFDRPTLQFLFTDLFSAGSDTSAVTVEWAMAQLLQNPPAMAKAREELARVIGSKQEIEESDISQLKYLEAVVKETLRLHPPAPFLLPHQAETTTQVGGYTVPKGTRVLVNVWAIGRDSKVWSDPDKFMPERFLQSEVDLRGRDFELIPFGSGRRICPGLPLAVRMVYLMLASLLHRFEWRLLPEVEKNGVDMAEKFGMILELATPLRAVAIPV

SEQ ID NO: 48097 - protein, 118 aa, Oryza sativa
MALVSASSSTTAVAALPGAARASSFLGGAGRSGRLLLRQAESSSARASFAVRAAAPDRPIWFPGSTPPPWLDGRSVYPSYLSCSTRSHTLSLSTDIVYLPLILAQPPRRLRLRPPGSR

SEQ ID NO: 48098 - protein, 231 aa, Oryza sativa; identical to SEQ ID NO: 37264

SEQ ID NO: 48099 - protein, 453 aa, Oryza sativa
MASTAARRLRELQGQAGNKTCVDCAQRNPQWASVSYGVFMCLECSGKHRGLGVHISFVRSVTMDSWTEAQLRKMEAGGNDRLNAFLAARGVPKETPHVAKYNSNAAAAYRDRIVAVAEGRPWTDPPVVKETPGSGAPAPTRKPPLPAGGGGGGGGGWDDWDDDFRPDMRRNQSVGSFGESGAESGRQPPRSKSTQDMYTRQQLEASAANKDSFFARRMAENESKPEGIPPSQGGKYVGFGSSPAPSANRNGAAAQGDVMQVVSQGIGRLSLVAASAAQSAASVVQVGTKEFQSKMREGGYDQKVNETVNVVANKTAEIGSRTWGIMKGVMALASQKVEEYAKEGGNGWGDDWQRREQGSEPYHRFERETNGNGWNSSSHDGSSKNYNSNSWDDWDEPVKKDEPAKERQSSDSWAGWDDGKDDNFDSYNHSTPSKGSNQNGTTGGSYWTEGGFR

SEQ ID NO: 48100 - protein, 418 aa, Oryza sativa
MIQVTKSYKCFSSIRDGHEDADVALRARLCWATLHSLLNSQISSYRHHGYIWLVELLLSEISEETDGSIWSKIQKLQDEIEVAGSQDLSSSEVSLPVCLLCGLLKSKHNFIRWGFLYVLDKFLMRCKLLLDDNDMQEHTVADHSKHRLDKAFAVIDIMNSALLLVVQNNETDHINILKMCDMLFSQLCLRLPSSNVMHMGGLQSLGQLFGCTTKNIESHLETLASHQNVGNKNFCRSETLQDISVNQTAQTTLLSETSMAALLLRGLAIAPMQLVARVPTSLFFWPLMQLEGAASDDIALGIAVGSTGRGNLPGATSDIRAALLLLLIGKCTADQEALKEVEGNEFFRGLLDDTDSRVAYYSAAFLLKRMMTEEPDTYQRMLQSLISKAQQCNNEKLLENPYLQMRGILQLSNDLGVQ

SEQ ID NO: 48101 - protein, 220 aa, Oryza sativa
MDAMAVLARTSRPAPTLLAATSPAVSRRPAAVSFAAAASPGSRGRVALSAAWGGRAARGRVSAAGRIVASSVEQSYIMIKPDGVQRGLVGEIISRFEKKGFVLKGLKLFQCPKDLAQEHYKDLKEKPFFPGLIEYITSGPVVCMAWEGNGVVASARKLIGATNPLQAEPGTIRGDLAVQTGRNVVHGSDSPDNGKREIALWFKEGELCEWESVLTPWLVE

SEQ ID NO: 48102 - protein, 205 aa, Oryza sativa
MTPANPTPLLSSPRPNPSLPLPRRARRPHPPPAANTTGAASTPDWFRPRAPPDADPSTSGGRVAARDPGVRVRAREGAEEEKKGRGRGRRRWWDWWSGDRESYLVDDVEPLPLPLTVPDTEPMSREELDRRLSCDVEIEDCKTVSYEWTGKCRSCQGTGLVSYFRKKGRETICKCVPCAGIGYVRKITFRQDIENMDELDNGKPP

SEQ ID NO: 48103 - protein, 334 aa, Oryza sativa
MARRQGVASMLTIALIIGAFASAPTTVQSIGVCYGVLGNNLPSRSEVVQLYKSKGINGMRIYYPDKEALNALRNSGIALILDVGDQLSNLAASSSNAAAWVRDNVRPYYPAVNIKYIAVGNEVEGGATSSILPAIRNVNSALASSGLGAIKASTAVKFDVISNSYPPSAGVFRDAYMKDIARYLASTGAPLLANVYPYFAYRGNPRDISLNYATFRPGTTVRDPNNGLTYTNLFDAMMDAVYAALEKAGAGNVRVVVSESGWPSAGGFGASVDNARAYNQGLIDHVGRGTPKRPGALEAYIFAMFNENQKNGDPTERNFGLFYPNKSPVYPIRF

SEQ ID NO: 48104 - protein, 139 aa, Oryza sativa
MNFGADTSRELGARSSEKAARWIRTMESALKPPRKDELVSCSHTRWQAFRLSRCSNRMHSIGWTVFSSVHNDPMASDVIAPSPWTIFDCKNGKRWWFRGEGNSCMKQRLHILLMTILARSVLPWVPWSLIICLILSMLV

SEQ ID NO: 48105 - protein, 226 aa, Oryza sativa
MPNGSLGDVLHSSKAGLLDWSTRYKIALDAAEGLSYLHHDYVPAIVHRDVKSNNILLDAEFGARVADFGVAKVVEATVRGPKSMSVIAGSCGYIAPEYAYTLRVNEKSDIYSFGVVLLELVTGKPPVDPEFGEKDLVKWVCSTIDQKGVEHVLDSKLDMTFKDEINRVLNIALLCSSSLPINRPAMRRVVKMLQEVRAEATRPRLEKDGKLSPYYYEDTSDQGSSV

SEQ ID NO: 48106 - protein, 131 aa, Oryza sativa
MAGLRMVWLLDAQLATSHLQVARRYRRHSLRRHVVPQPPAAVLVLAAIREGAGELTGEISLQGRRLVLLVSPHGCLLMASFSVDAVACGSRRLVDGCVHGGWRILHTVPLVWSAVDGRIYISRQIKLPNGV

SEQ ID NO: 48107 - protein, 362 aa, Oryza sativa
MAPFMACASPPVLTLALLASCGALLATSMLPARATAGSCLDVGDMVMMDRFRAWQGAHNRSYPSAEEALQRFDVYRRNAEFIDAVNLRGDLTYQLAENEFADLTEEEFLATYTGYYAGDGPVDDSVITTGAGDVDASFSYRVDVPASVDWRAQGAVVPPKSQTSTCSSCWAFVTAATIESLNMIKTGKLVSLSEQQLVECDSYDGGCNLGSYGRAYKWVVENGGLTTEADYPYTARRGPCNRAKSAHHAAKITGFGKVPPRNEAALQAAVARQPVAVAIEVGSGMQFYKGGVYTGPCGTRLAHAVTVVGYGTDASSGAKYWTIKNSWGQSWGERGYIRILRDVGGPGLCGVTLDIAYPTLTL

SEQ ID NO: 48108 - protein, 621 aa, Oryza sativa
MPPTPPPELDLLDTEPEFAEVDPTARYGRYTEVLGKGAFKTVYKAFDQLEGLEVAWNQIKVGDILRNNDDLERLRSEVRLLKTLKHKNIIKFYNSWLDKKNNNINFITEVFTSGTLRQYRIKHKKVDVRALKKWSRQILSGLVYLHSHDPPVIHRDLKCDNIFVNGNQGEVKIGDLGLATILDNARSAHSIIGTPEFMAPELYDEEYNELVDIYAFGMCLLELVTFEYPYCECSNAAQIYKKVSDGEKPSSLAKIEDPEVRFFIEKCIAKASQRLSAQELLMDPFLRDDGEKIFYPLLSNTKASDGAGSSNSSMGYKYDRDASSMAIREHTGSFAEEHPSDRYIHSTMDPQAAAGRIITVESQMKDLNTIFLKLRIADSTGHAQNIHFPFDIEADTSISVATEMVVQLDLTDQDVTAIAEMIDAEIRAHIPDWALEESVENQGDERAHSETDSSEADDETSELRNEPNATHNGFVQEHLPSGHKYWSDSPRRNIEMSHSAVEPHIGGNMPNGILKKNDTDDTVSNLGTSVDLPNPSMINRKSGVASVSTSPQSFDDEHIEADVSERLVNLLAQQQEELNVLRRKHKADIEVILKGVPEEHREETLTRCRLKADERNRSDKP

SEQ ID NO: 48109 - protein, 424 aa, Oryza sativa
MAYSGLRHGGVGSSSRPGHGFKGPASSVECLGREMLEMQLRDSKPDVGDEKNTERDVVDGSSAEAGHIIATTIRGRNGLPKQSVTYIAEHVVGTGSFGVVYQAKCRETGEIVAIKKVLQDKRYKNRELQIMHMLDHPNIVGLKHYFFSTTERDELYLNLVLEYVPETVNRIARQYSRMNQRVPLIYVKLYTYQICRALAYIHNCVGICHRDIKPQNVLVNPHTHQLKICDFGSAKVLVKGEPNISYICSRYYRAPELIFGATEYTTAIDLWSTGCVMAELLLGQPLFPGESGVDQLVEIIKVLGTPTREEIKCMNPNYTEFKFPQIKAHPWHKVFQKRLPPEAVDLVSRFLQYSPNLRCTAMEACMHPFFDELRDPNTRLPNGRPLPPLFNFRTQELNGIPPEAIERLVPEHARRQSLFMALRT

SEQ ID NO: 48110 - protein, 73 aa, Oryza sativa
MEAASWPPGGRRSGLGDGVSCAAGTHLSLAIFLRHHCPSSSDDELDGGGARASQGQSFLTPLAFAPHSRQMAS

SEQ ID NO: 48111 - protein, 1043 aa, Oryza sativa
MSFIRKKSMEFLKSFEVPAKNPSEEAQRRWRDAVGTLVKNRRRRFRMVPDLDKRSQAETQRRKIQEKLRVALFVQKAALQFIDAVRKTEHPLPELARQCGFSVSAEELASIVRGHDTKSLRFHNGVDGIARKVAVSLADGVKSDDAGLRAEVYGANQYTEKPPRTFWMFLWDASQDMTLLLLAFCAAVSVAIGLATEGWPSGMYDGVGIMLTILLVVMITAASDYKQSLQFRDLDKEKKKIDVQVTRDGYRQKVSIYDIVVGDIVHLSIGDQVPADGLFIDGYSFVVDESNLSGESEPVHVSTANRFLLGGTKVQDGSARMLVTAVGMRTEWGNLMETLSQGGEDETPLQVKLNGVATIIGKIGLAFAVLTFTVLMARFLLGKAGAPGGLLRWRMVDALAVLNFFAVAVTIIVVAVPEGLPLAVTLSLAFAMKKLMQERALVRHLSACETMGSASCICTDKTGTLTTNHMVVEKIWASGAAQTMSNAKGFDQLTSSMSETFAKVLLEGVFHCSGSEVVRGKDGRHTIMGTPTETAILEFGLAVEKRARIEHTGAGKLKVEPFNSVKKTMAVVIASPSAGGRPRAFLKGASEVVLSRCSLVLDGTGNVEKLTDAKAKRVASAIDAFACEALRTLCLAYQDVDGGGGDIPGEGYTLIAVFGIKDPLRPGVREAVATCHAAGINVRMVTGDNINTAKAIARECGILTDDGIAIEGPEFRNKDPDQMREIIPKIQVMARSLPLDKHTLVTNLRGMFNEVVAVTGDGTNDAPALHEADIGLAMGIAGTEVAKENADVIIMDDNFSTIINVAKWGRSVYINIQKFVQFQLTVNVVALMVNFISASFTGSAPLTIVQLLWVNLIMDTLGALALATEPPNDAMMKRPPVGRGDNFITKVMWRNIVGQSIYQLVVLGVLLLRGKSLLQINGPQADSLLNTFVFNTFVFCQVFNEVNSREMEKINVFSGIFSSWIFSAVVGVTAGFQVIMVELLGTFANTVHLSGKLWLTSVLIGSVGLVIGAILKCIPVESGSDASDRHDGYRPIPTGPSAV

SEQ ID NO: 48112 - protein, 158 aa, Oryza sativa; identical to SEQ ID NO: 36260

SEQ ID NO: 48113 - protein, 187 aa, Oryza sativa
MAKPSGGGLLDLEHHFAFYGAYHSNAVNVFIHTLFVWPIFLTALLLLHLAAPSAHAAAAGAAVYGAFYLLLDRRAGALAALLCFLCWAASAALAARLGFSAGWKVVLVAQLFCWTMQFIGHGVFEKRAPALLDNLVQAFLMAPFFVLLEALHKFVGYEPYPGFHAKVQKLIDEARKEWEDKKAKKMT

SEQ ID NO: 48114 - protein, 261 aa, Oryza sativa
MTTTTTRFVQLAACAAASLLAVAASGAAAQGVGSVITQAVFNSMLPNRDNSQCPARGFYTYDAFIAAANSFPAFGTSGGSAELIRRELAAFFGQTSHETTGGTRGSSDQFQWGYCFKEEINKATSPPYYGRGPIQLTGQSNYQAAGNALGLDLVGNPDLVSTDAVVSFKTAIWFWMTAQGNKPSCHDVILGRWTPSAADTAAGRVPGYGVITNIINGGIECGVGQNDANVDRIGYYKRYCDMLGAGYGSNLDCYNQRNFAS

SEQ ID NO: 48115 - protein, 422 aa, Oryza sativa
MIPLDATNTISVTEEFVSEFQQHQQTYEAQYCFQSLDKVLMRLRGRSNGHGNTSYYMWDSFAAGVALSSMRNGEVDGENEFSELEYMNITVITSNKPYGKRDGSNPFFDGRATPKLGLKEGGVHSGHVQTGIRDSFCLVPGSNRGRCEDGYTREVSGPEGVRVRVATRAKPNTDKNSSLEKEFSKSFLEVLNRPEQTGLFNINTQFPYYREVLYKPVFRNVSRGKPVIFDMDMSPGDFVSLIYLLKTPIEVIDLKAVLVNGNGWANIASIDIVYDILHMMGRDDIPVGLGNTTALGIPTLGCNNSYAIPHGSGGFIDSDTLYGLARSLPRSPRRYAPESLDHPEDRQPLALEVWQSVRKQLDPGEKITVLTNGPLTNMANISLSDRDASSVIERVYVVGGLIKDGGDENGNLFTVPKQTCRV

SEQ ID NO: 48116 - protein, 172 aa, Oryza sativa
MASPRALSLLLILLGMALASFPSAASASRDLRPRRAGFVVRGRVWCDTCLAGFETPASTYIAGAKVKVECRSKSTGAKTCSFEGQTDHTGTYNIPVNDEHEHELCESVLVSSPDAKCGKIVAGRERAPVFLTNNNGVTSNVRLANALGFQKDAPLAACAQILKMYEEVDDRV

SEQ ID NO: 48117 - protein, 170 aa, Oryza sativa
MDTMEQLNRLVRMVARGFYEDVSLEEDQSKPNGSGSCGIVVVVLDALTRQQWVREEDLARSLMIPFNRLRQITHFLEQQKLVRRYYRKEAIHDASISTASPSHVSHDAHLVPTNVAGKLKMIMQPYCCLHYGQVYDVTLYRIHEMKKKLKDELDGNYMIQNYVCPNCERR

SEQ ID NO: 48118 - protein, 362 aa, Oryza sativa
MRILALVVAAAALLAAAATAHEHHGEAPTCAGGGSGRVLAEFRPGEVTLDGHPADWDGVEASEFALLPALDPDEDKAYAGGKVFVKAVHDGVNIFFMLKVDGDYTYTKGENKKCPSVALMFQIGEKATYYNMGGCKDMPGSCTSKSCRGQEVDIMHFSVGNAIPGRLYGGNHIDNADGNGGDRFGHLVDLYSWNPHCRYLDGIGPKENNSNAQNDWHGAWWHSSLTFHSGFVDDDSPYGKQDEKGTYYFEFSRPLRTMDRLQQDAQFTIGGPNSMAVAFWYPNDGKPWSKSEHYSASCDWLVLDIQPSMEAAHYRPAPNRSWDAATAFALLLSVVAICISVFVGYGASKNRSSVQFTPLEQI

SEQ ID NO: 48119 - protein, 53 aa, Oryza sativa
MQVVEEFHQRRSRALSASTAAPPPPTRTGVLSGSSEGGQVIGLVFIFSFWIGF

SEQ ID NO: 48120 - protein, 109 aa, Oryza sativa
MVRKARQFFLALINQHLVCLSFRPDSMLSMEAFQTLQCIWLSSSSCTVPAAVLSATGKNFRQSTTASPPPETANTSSGPSTNNRVQASSPTSRTKINTLVASSSAGSCR

SEQ ID NO: 48121 - protein, 759 aa, Oryza sativa
MPEPRKTPLLLTASADESNKKSSLQTKSKEKRKVLLVEHPNRKAAGKNVNPVRSTSTNNSRPLSADDIQKAKMRAMFMQEKYGKVDTSKVIEKPHMMEIQKPSGLVDSNVPLVPRTPLTSIIKQPVDPSPSTSKQSTLSPPDKPEIAVSLKLNVTAKENFIEKLDSKRVIWQIPPEVWIDPAWSLGAGENSKEFEVQTQRNRREKETFYASLKDIPLNPKGPWDVEMDFDDSLTPEIPIEQPPDADAMETDSVSTAPPNIVVPVVDKQIGSTSSVSPAVAAGANGATSEPDLELLAVLLKNPQLVFALTSNQGGTLPSEQTVALLDMLKQTGLGLSELVNSLANNSGVQKEPESGPEAIPASLPSPTPPKDLIARDGWSSEFPSQVRTQNLQHAHLPNRANAPPVASSVQQSFSNVVSSLPSQPYASASALPAQTRTNMTSLPQSMISVNPSTQHVAPMNNLLSRATVHQHTQSYALTSDPVAVAVHHQPAVNKLAHEVQSISHPAVSHSSVAESHASYTSYTWQSSVATIAATGRNATPDRWAAPARTTNSFNAAPSNSNHVTYPNQNAYSNHSTQATTYNSYGSAPVSSHSLHPGQGLDRNGYTHAAEYQTTMARDALWRNSRSPELGAGAVYGSSSQGYVPEPSRQWNYGQQSYNPEPYSRQWSSGQQSYNTVTAEPSRQWSSGQQSYSNPAEPSRQWSSSAHARPSYNPEPSRPWNSGHQSQNPEASRQWSHHHGKQERYNPTDGRNSYDQHWRR

SEQ ID NO: 48122 - protein, 89 aa, Oryza sativa
MEVEMGHGEEVAAAMEEEELQGWETPRREECRIPVVPPQCPAPPRKRPVALPELGKERREPPKGGYFQPPDLESLFVLAPPRRQASSCA

SEQ ID NO: 48123 - protein, 142 aa, Oryza sativa
MNVALTRARRALWVVGNAGALMQSEDWALLIADAKARKCFMDLDTIPKDFLAMKISNTPGRNTSNNIRNMRTGGPRPRHLEMLPDSRVSMRPDEDERSNSVPRNGSYRNLDDLGRPGDRSRDNLPFGMPRRPNSSNGSRREV

SEQ ID NO: 48124 - protein, 520 aa, Oryza sativa
MGTSFMLCLLGGFVADSFLGRYLTIAIFTAVQASGVTILTISTAAPGLRPAACAAGSAACERATGAQMGVLYLALYLTALGTGGLKSSVSGFGSDQFDESDSGEKSQMMRFFNWFFFFISLGSLLAVTVLVYVQDNLGRPWGYGACAAAIAAGLVVFLAGTRRYRFKKLVGSPLTQIAAVVVAAWRKRRLELPSDPAMLYDIDVGKLAAAEVELAASSKKSKLKQRLPHTKQFRFLDHAAINDAPDGEQSKWTLATLTDVEEVKTVARMLPIWATTIMFWTVYAQMTTFSVSQATTMDRHIGASFQIPAGSLTVFFVGSILLTVPIYDRLVVPVARRATGNPHGLTPLQRIGVGLVLSIVAMVCAALTEVRRLRVARDARVGGGEPVPMTVFWLIPQFLFVGAGEAFTYIGQLDFFLRECPKGMKTMSTGLFLSTLSLGFFVSSALVAAVHKLTGDRHPWLADDLNKGQLHKFYWLLAGVCLANLLVYLVAARWYKYKAGRAAAAGDGGVEMADAEPCLH

SEQ ID NO: 48125 - protein, 272 aa, Oryza sativa; identical to SEQ ID NO: 38082

SEQ ID NO: 48126 - protein, 394 aa, Oryza sativa
MYDDIANNILNPRPGVIVNHPQGEDVYAGVPKDYTGDEVTAKNFYAVLLGNKTAVTGGSRKVIDSKPNDHIFIFYSDHGGPGVLGMPNLPYLYAADFMKVLQEKHASNTYAKMVIYVEACESGSIFEGLMPEDLNIYVTTASNAEESSWGTYCPGMEPSPPSEYITCLGDLYSVSWMEDSETHNLKEESIKKQYEVVKKRTSDMNSYGAGSHVMEYGDRTFKDDKLYLYQGFDPANAEVKNKLSWEGPKAAVNQRDADLLFLWRRYELLHDKSEEKLKALREISDTVMHRKLLDSSVDLVGKLLFGFGNGPSVLQAVRPSGQPLVDDWDCLKRMVRIFESHCGPLTQYGMKHMRAFANICNNGISGASMKEASIATCSSHNSGRWSSLVQGYSA

SEQ ID NO: 48127 - protein, 644 aa, Oryza sativa
MLTSSLPPPTVPGSKPRPAAATSVSTAATADAAVAGGRSGSGSGSGIGRLSALIRSLCSAGRTAEAARALADAGDAAGVVAYNAMVAGYCRAGQLAAARRLAAAVPVPPNAYTFFPVVRGLCTRGRIADALEVLDEMSFKGCAPIPPMYHVILEAACRSGGFRNSVRVLEAMHAKGCTLDTGNCNLVLNAICEQGCVDEAVGLLRKLAFFGCEADIVSYNAVLKGLCMAKRWGDVEELMDEMVRVDCAPNIVTFNTLIGYLCRNGLFERVHEVLAQMSEHGCTPDIRMYATIIDGICKEGHLEVANEILNRMPSYGLKPNVVCYNTVLKGLCSAERWKEAEELLSEMFQKDCPLDDVTFNILVDFFCQNGLVDRVIELLEQMLSHGCMPDVITYTTVINGFCKEGLIDEAVMLLKSMSSCGCKPNTVSYTIVLKGLCSAGRWVDAEELMSQMIQQGCPPNPVTFNTLINFLCKKGLVEQAIELLKQMLVNGCSPDLISYSTVIDGLGKAGKTEEALELLNVMVNKGISPNTIIYSSIACALSREGRVNKVIQMFDNIKDTTIRSDAVLYNAVISSLCKRWETDRAIDFFAYMVSNGCMPNESTYTMLIKGLASEGLAKEAQELLSELCSRGALRKHLMRHFGIV

SEQ ID NO: 48128 - protein, 488 aa, Oryza sativa
MSTASGDGGDGGGGGDGASSAAGGGGRRIPPASSMPWVRNLRRFVGTGAGLGSEALMELETKRILLEIFKERQRKSMEAGAIPSFYKKKPEDGSISNRVQKLAKYRFLKKQSELLLNADDLDAMWVCLRENCVIDDATGAEKMNYEDFCHIATVCTEQIGQKCKRFFSPSNFMKFEKDDSGRIAILPFYLYVMRTVSLTQARIDMSELDEDSDGFLQPHEMEAYIRGLIPNLAQLRDMPSAFVQMYCRIAARKFFFFCDPHRRGKACIKKVLLSNCLQELMELHQESEEEVTDTEQAENWFSLTSAQRICDMFLALDKDTNGTLSKQELKEYADGTLTDIFIERVFDEHVRRSKVGGGNSREMDFESFLDFVLALENKDTPEGLTYLFRCLDLNGRGFLTTADIHTLFRDVHQKWIEGGNYELCIEDVRDEIWDMVKPADPLRIALTDLLSCKQGGTIASMLIDVRGFWAHDNRENLLQEEEEQVEEA

SEQ ID NO: 48129 - protein, 170 aa, Oryza sativa
MSLPVAKLGTLALRTLSKPIASRLKNQAAVHPKFRNFIICIAQINHRVTTRIQRRIYGHATDVEITPLNEEKAVQAATDLIGEGFIFSVAVAALIFEVQRNARSEARKEEARKQELEELKQREESLSKDLEDLKLRLAEIEHLAKGRGLSGILNFKGVHGAESSKAATPA

SEQ ID NO: 48130 - protein, 483 aa, Oryza sativa
MGVGKGDVVMSLLRNCPEFAFSFLGAARLGAATTTANPFYTPHEVHRQAEAAGARVIVTEACAVEKVREFAAERGVPVVTVDGAFDGCVEFREVLAAEELDADADVHPDDVVALPYSSGTTGLPKGVMLTHRSLITSVAQQVDGENPNLYFSKDDVILCLLPLFHIYSLNSVLLAGLRAGSTIVIMRKFDLGALVDLVRKHNITIAPFVPPIVVEIAKSPRVTAEDLASIRMVMSGAAPMGKDLQDAFMAKIPNAVLGQGYGMTEAGPVLAMCLAFAKEPFKVKSGSCGTVVRNAELKIVDPDTGTSLGRNQSGEICIRGEQIMKGYLNDPEATKNTIDEDGWLHTGDIGFVDDDDEIFIVDRLKEIIKYKGFQVPPAELEALLITHPEIKDAAVVSMKDDLAGEVPVAFIVRTEGSEITEDEIKKFVAKEVVFYKRINKVFFTDSIPKNPSGKILRKDLRARLAAGIPDAVAAAAADAPKSS

SEQ ID NO: 48131 - protein, 487 aa, Oryza sativa
MSFLRALADSLSSLLYSAAAKGGDMDGAAAAPSPAAVVGERVAVKLRGYFELAKEEIDKAVRAEEWGLPDDAAAHYRNALRVMLEAKAARVPDAVSSSERGQVRVYQEKIAKWQTQVEERLRVLGQRSGAAAPVPKKVVTNNPVNRNDRAASTSFHRPTSQPSPTFNRGGQASSHQKSSSGGAKPVQRAGANYDDKLVEMINTTIVDRSPAVKWEDVAGLDKAKQALMEMVILPTKRRDLFTGLRRPARGLLLFGPPGNGKTMLAKAVASESEATFFNVSASSLTSKWVGEAEKLVRTLFMVAVDRQPSVIFMDEIDSVMSARLANENDASRRLKSEFLIQFDGVTSNPDDLVIVIGATNKPQELDDAVLRRLVKRIYVPLPDPNVRRLLLKTQLKGQSFKLSSHDLERLAADTEGYSGSDLRALCEEAAMMPIRELGPQNILTIKANQLRPLKYEDFKKAMTVIRPSLQKSKWDELEKWNEEFGSS

SEQ ID NO: 48132 - protein, 359 aa, Oryza sativa
MGSCGNGRSSEYDDPASLEKMEELVLPLKLMPLHTNGRLYDMRLSSPTATCVINSSSGSFDPIYRAWTKKYPSALNAFDHIVAYGKGKKIALFLDYDGTLSPIVDEPDNAIMSDQMREVVRNAALHLPTAIISGRSRDKVFDFVKLTELYYAGSHGMDIMGPVGEHDSVTNHRSSINSNRKQGKGVKIFQAGTEFLPMINEVFRLLIDKTKAIDGVKIENNKFCVSVHYRNVEEKNWQLVSQCTNDVLKVYPRLRLTHGRKVLEIRPVIDWNKGKAVEFLLDSLDLASCKNVLPIYIGDDCTDEDAFKVLRDDKRGFGILVSSVPKDSHALYSLIDPSEVMEFLKRLVMWKNEEASHNK

SEQ ID NO: 48133 - protein, 45 aa, Oryza sativa
MVRGYLFIIISVEKHCMMYYMKGRNWMVHYHGMLASKLLLVQQRP

SEQ ID NO: 48134 - protein, 361 aa, Oryza sativa; identical to SEQ ID NO: 32765

SEQ ID NO: 48135 - protein, 160 aa, Oryza sativa
MSLEPASPSADSGVTSLTSTANNVAVVVRGGDSDDSDDSDSSDGVGYDSDDLMDDMMDDIFEQFIEKDELLDRIGARLVAPLLPAATRAQRRQVLEQREQARAAREELRRGVARSRELTRKIRRLKRMANADVSGYPAARREAHERETRRLAREIFGSDA

SEQ ID NO: 48136 - protein, 76 aa, Oryza sativa
MMAARRFSAATPSSPLLLRRRLLSSQPQPTAAAAEADAGAGEWVRRAGALSLLGLTGAVAASAVSDLSVFLSCSRR

SEQ ID NO: 48137 - protein, 149 aa, Oryza sativa
MADQLTDDQIAEFKEAFSLFDKDGDGCITTKELGTVMRSLGQNPTEAELQDMINEVDADGNGTIDFPEFLNLMARKMKDTDSEEELKEAFRVFDKDQNGFISAAELRHVMTNLGEKLTDEEVDEMIREADVDGDGQINYEEFVKVMMAK

SEQ ID NO: 48138 - protein, 187 aa, Oryza sativa
MLRNILCQSWRRGAYALQEGNHPGALHACWSRFHSGQMLSSSRSFFGVEDFMDEDNSKPYTYKKEKRSKNPHKHISFKQRTIAYMEPFTLDVFISKRFVSASLTHRTTCRQVAVAGTNSKDIKAALKSRSDIPACLAVGRFLAERAKEADVYTCTYTPRERDKFEGKIRAVVQSLIDNGINVKVYLD

SEQ ID NO: 48139 - protein, 217 aa, Oryza sativa
MMGALRWLLVLFTGIPDPVAPDRQPSRIWIIGGAGHHHHLRSDLLHHHRRSGRTATSSPRHILRSYLRDPVACRRRPHHLQIHAVRSPAPPPDHGRRPGGRAPVRRLHAARPAIRQGAGLAASTSLLEPVVWTQVDGRPVEDAEASAIGGQEPRPPPRPPGCTGPVSYGPSSPALSTTSTSSRSTCVRLPWSVIKLPALICFVSICYDLARGKQVRR

SEQ ID NO: 48140 - protein, 329 aa, Oryza sativa
MPPSVATHASLLLKAAAAAAHLHPKPFFSPRAAPPRIPSAPAPPAAGGSRYRPTTTTTAAATATSATAACRWFRWPPPAQAPVRGLCSLPHSGGGGGGGEGMGSEGVGRRRRVVAPAVNGVAKDGAPQPPPPKLLTLPTVLTIGRVAAVPLLISTFYMEGPWAATATTGIFLAAAVTDWLDGYIARKMQLGTPFGAFLDPVADKLMVAATLVLLCTKPLEISLLRDGPWLLTVPAIAIIGREITMSAVREWAASQNTKVLEAVAVNNLGKWKTATQMTALTILLASRDKSLPAQDALVTSGIALLYVSAGLAIWSLVVYMRKIWRILLK

SEQ ID NO: 48141 - protein, 698 aa, Oryza sativa
MATDDNPLLADFDFPPFDRVEPIHVRPAVRTLLARLEGELTDLEKGVQPTWGKLVEPLERIVDSLEVVWGTVDHLKAVKDSSDLRAAVEDVQPDKVKFQLRLGQSKPIYQAFNAIRNSSDWETLSEARKRIVEAQIKEAVLSGVALEDEQREKFNQIEQELEKLTQKFSENVLDATKKFEKLITDKNEIDGLPATALGLAAQTAASKGHENASAENGPWIITLDAPSYIAVMQHARNRALREEVYRAYLTRASSGDLDNTNIISQILKLRLEKAKLLGYKNYAEVSMAQKMATVDRVEELLEKLRAASWDHAVKDMEDLKAFAKESASPEANDLAHWDLSFWSERLRESKYDINEEDLRPYFALPKVMDGLFSLANRLFGVSVEPADGLAPVWNSDVKFYCVKDSSNSPVAYFYFDPYSRPSEKRGGAWMNVVFSRSRVLARNGSPVRLPVAHMVCNQTPPVGDKPSLMTFREVETVFHEFGHALQHMLTKQDEGFVSGIRGVEWDAVELPSQFMENWCYHKNTLLSIAKHYETGELLPEEIYAKLVAAKNFRAGTFSLRQIRFASVDMELHTTYDPNGSLSIYDVDRRVAERTQVLAPLPEDKFLCSFSHIFAGGYAAGYYSYKWAEVLSADAFSAFEDVGLDNEKAIEETGRRFRETVLALGGGKSPLEVFVSFRGREPSPEALLRHNGLLPVAAL

SEQ ID NO: 48142 - protein, 201 aa, Oryza sativa
MAAAPGRGGGEAFRLSADAGAGALKLQKGDITLWSVDGATDAIVNAANERMLGGGGVDGAIRRTAGPELVEACRKVPEVKSGVRCPTGEARITPAFKLPVSRVIHTVGPIYDMDKQPEVSLNNAYTNSLKLAKQNGIQYIALPAISCGVYRYPPKEASKIAVSTAQRFSNDIKEVHFVLFSDELYDIWRETAKEFLSQFEK

SEQ ID NO: 48143 - protein, 597 aa, Oryza sativa
MASSNETYRVELRAAARQLGERGLYSAAKWAAELLVGIEPDATPAPSSVMDTPSSSGSAASGGRLLHLHRSGGSSFRRRLRPGAAEAGTPLGGVSYVSTPIPDDDAFDVGGDRYLLAKTYFDCREYRRAAHVLRGQTGRKAVFLRCYALYTAGEKRKEEETVELEGSLGKSNAVNQELVALERELATHRRTGAIDSFCLYLYGIVLRDKGSEALARTVLVESVNSYPWNWSAWLELQSLCTSSDILNNLNIKNHWMKDFFLASAHLELKMHEEALKRYERLMGVFRCSDYIQAQIATVQYSMRDLDEADMIFEELLRTDPFRVDSMDVYSNLLYAKESSTALSFLAHRVFLSDKYRPESCCIIANYYSLKGQHEKSVLYFQRALKLNRKYLSAWTLMGHEFVELKNTPAAIDAYRRAVDINPRDYRAWYGLGQIYEMMGMPFYAVYYFRKSSYLQPNDARLWNAMAQCYESDQLQMIEEAIKCYERSANNNDTEGIALHQLAKLHGMLGQSEEAAFYYKKDLERMEVEERQGQNFVEALLFLAKHCKSIGRFEEAEHYCTRLLDYTGPERETAKSILQGLKRAQSVLPLMDIDHFAM

SEQ ID NO: 48144 - protein, 65 aa, Oryza sativa
MSPWLTASVTTLHLSCTETKYSTQASTPSHLVSSSMRWLKEHTLYMGSHQRNLATQFDMMGCVHR

SEQ ID NO: 48145 - protein, 496 aa, Oryza sativa
MISERPPDDFPMPPPPPPPLPPMQHVPPRQRRTPRRRLREDGGGGGGGSSGDSSGGEGTSAAPKREWWGGATLGEELPTPREMCRRLDEFVIGQGKAKKVLSVAVYNHYKRIYNATVQKGCSTNSGWLDAASDDQNNIEIDKSNVLLMGPTGSGKTLLAKTLARIVNVPFIIADATSLTQAGYVGEDVESILQKLLVAAEYNVQAAQQGIVYIDEVDKITKKAESANVSRDVSGEGVQQALLKILEGTVVSIPEKGSRKNSRNESIQIDTKDILFICGGAFVDLEKTISERRQDSSIGFGAPIRINMRSSEVTDPMVTSSLLESVESGDLARYGLIPEFIGRLPILVSLTALNEDQLVQVLTEPKNSLSRQYRKMFSLNKVKLHFTDGALRIVAKKAIARNTGARGLRAILESLLLEAMYEIPDEKTGSERVDAVVVDEEAIGSIDRPGCGAKILRGDGALEQYITNTNMKNSMEANEGLAGELEDAYMMSRFVSL

SEQ ID NO: 48146 - protein, 460 aa, Oryza sativa
MDDEPINAHKLLKEQFVSNLTGSSLLEIAALSTVVPAVVVLRKWSCGDNTRKNSLKKNDDALPGHKGFVHYFSTLAIDYLSIVLPVLLIFTVLAEWACACALSLVMLISILTMFKRSRSHLKAGPNELPLLRADISSYRVSVVLVTCLCILAVDFKIFPRRYAKAETYGCGIMDLGVGSFVVANALVSRQARNFTAMTWNKALMSISPLIFLGFARLISTSGVDYQVHVGEYGVHWNFFFTLAAISILTSVIRIHPKYCGLAGLLVLTGFQTWLSFGLNEYLISNERNGGIISQNKEGVYSIFGYWGMYLIGVSLGYNLFFDNSSKGKSRSSQVVKVWVLAASFWIMAIILDSYVERVSRRMCNFAYVMLVFGQNFQVISILTLAGFISYEKNLVLEDAFNQNMLGSFLLANILTGVVNLSVDTLSASSGTAFMILLVYSFTLCMIAALAQFCGIRMKFW

SEQ ID NO: 48147 - protein, 239 aa, Oryza sativa
MGTPARAPREAAGHLPCILQDAVSRVSTAQILHSSGYTAAEPAALRALSDIAGRYVASLGRAASAIAEARGRTEPNLADLTLALEDHALGGFPGASDPARPVLRSGALSELAGFVRVVREVPFPKPVPRRGGAPRGKAWESFAAAGKEPPPKHVPRWLPRFPDKPEPEPEPKAAYDEATARWEARVRHEEEANAEEAVVLKPSVDGGGERRGVVPEKRGKVSFRVRAERKKRRVGLDQQ

SEQ ID NO: 48148 - protein, 477 aa, Oryza sativa
MNTNYSSLPLTSIELQSNQRTSEVANGVGYNGHAKISKQDSFLVDGENDDLPLIGDGPAGPPEGSGVPAAVFNLATSIIGAGIMALPATMKVLGVAVGLVSILVMGILSEVTIELLVRFAVYCRALSYGEVVHKALGRPASIVAQMCVIINNAGVLIVYLIIIGDVMSGSLKHIGVMDQLIGHGEWDNRRLLILVVLVIFLFPLCALEKIDSLSLSSAASVALAVVFVVVSCIIALVKVVEGKISMPRMGPDFSSRAAMLDLLVVIPIMTNAYICHFNVQPIYNELKEKTPHNMYKIGRITTVLCVVVYALTAVSGYLLFGEDTESDVLTNFDKDLGIRFSSILNFIVRIGYVIHLVLVFPVVHFSLRQTVDSLIFGELAPHSRKKMLTLTVVLLALIYLGSTMIPNIWVAFKFTGATTGLALGFIFPALIALRLDKEGKSLGKGERLLSIVMLGLAMVVSIIGVIGNVYSLRSKSA

SEQ ID NO: 48149 - protein, 238 aa, Oryza sativa; identical to SEQ ID NO: 30619

SEQ ID NO: 48150 - protein, 179 aa, Oryza sativa
MLLVTMVFAVLGFLSPSNRGGLMTAMLLLWVFMGLLAGYSSSSLYKLFKGAEWKNIALRTAFTFPGSVFAIFFFLNSLIWGQKSSGAVPFTTMFALVLLWFGISVPLVFVGSFLGFKKPAIEDPVKTNKIPRQIPEQAWYMNPIFSILIGGILPFGAVFIELFILTSIWLHQFYYIFGF

SEQ ID NO: 48151 - protein, 711 aa, Oryza sativa
MAAEVTQNYFAWSQEESPVQDSSQGTPQVFDHGSISFGRFELESLAWEKWSVFANDRRHEEFGKFNGLVAKKKAYFEEYFKRIRELKALQQQNQQTELNLDYSGDGSDSSQTGEDVPTADQASPSGSGTLLDSMVQTGVQTIFENDLECYDDNDKEMLDKDISPSVGGTCQIEQEFRESASGGNHPDRMVDVLQQNTNCGPDDLGRPMESMMTPKRTVKKDSLVGQAAKTMPKTVNMTSSNIPGHAVVNKGTDSGKSSVVNRRAKPETIQQRLKAVTGNIVDIVGRSKLVVKEVPGIMGVRRPSSPALQRPSTRERRPVTRDSSRKAPEVATMCRPSTAERRPATRELAPKQANTVVPCRPSTPNRRPMTRELAPVHSSIATPRRPSTAERRPITRGMAPMHPSIATPVRPSTAERRPTSKQMAQKHVGMATPSRPSTAERRPITREAARKNADVAILHRPSTAERRPITRETPQKHANVVALHRPSTAERRPVVREIAPKHADVTLTPARRPSTSERRPVTRETALRHSNFTGSCWPLTPQRHISRGSAQIHADVSTTPRHPSTGERRPITKESNIKLDEKTPIKLRGMLANPKGAMATVVTPQKAITRKLVKSSKPEMKSCAKERTELQAVGKHKASSVNLPPREMFTSNVRANRVPESFRKPNKVTCPSLFFVPCCLSKLHSLSTVVTYAVLAPLAIFIAVWRLLQLD

SEQ ID NO: 48152 - protein, 267 aa, Oryza sativa
MLPLLNMQAEAAGGDGGDAEKKSGNNKQMMVAAKVSISILVMSLPVLYVSFLRIPPATLFRDTTFWFLMSNSIIIVIAADSGMLFFAARPASSSGELQAMVVTDVSLSHALVVAPPRGGQEDDDGVVVAGEPAEEESTMMLVPYYGGEVVQAAARPTRLTASSEAERTTTMARRRRRSRSHSSHHALMMTPPVVQEKSIVVVREEKLRRTATERPPEPEEEMTTTSSSEYSRLSDEELNRRVEEFIARFNMEIRLQLEKEQEQAAAA

SEQ ID NO: 48153 - protein, 283 aa, Oryza sativa
MADVSLLPSNVRLSSGRRPVAMAVGTVDRHYAHAPSPSKQLLVVVTSGWSVMCFDHNLKKLWEANLQDDFPHAAHHREVAISITNYTLKHGDAGLVIVGGRMEMQHHSAELFDEFMVSEHNREEHRRSASEKQASETGNTDLRHFALYAFAGRTGELRWSRKNENIPSQPSDASVLIPQHNYKLDAHALNSRHPGQFECREFRESVLGVMPHHWDRREDTFLQLAHFRRHKRKALKKTPGKAVVNNVHKPSEHNPPGKDVSNRLANVIGKAADMANSNKIKKV

SEQ ID NO: 48154 - protein, 364 aa, Oryza sativa; identical to SEQ ID NO: 36996

SEQ ID NO: 48155 - protein, 193 aa, Oryza sativa; identical to SEQ ID NO: 30979

SEQ ID NO: 48156 - protein, 219 aa, Oryza sativa
MASFTPNCSTLFFFLVFLAAVFVSAAAASEHGRVLEEDQNIRYRVEDSELPDLYYEICMYAREHRPCRRVMATIPDLKFKLSGQVDLALLLSHVIANRSAEAKALADPLLAAAAAKKGGDELPKCLASCAASLDDVSKAMSGLPADIDVERYPKVQSFLRNKFESGAAPPLCKSGCPDKTSTADEAAIADKFHAIWALMDCAETLAQYYVLPPPPPPKR

SEQ ID NO: 48157 - protein, 97 aa, Oryza sativa; identical to SEQ ID NO: 35088

SEQ ID NO: 48158 - protein, 492 aa, Oryza sativa; identical to SEQ ID NO: 29422

SEQ ID NO: 48159 - protein, 724 aa, Oryza sativa
MDEPSPRGGGCAGEPPRIRRLEESVVNRIAAGEVIQRPSSAVKELIENSLDAGASSVSVAVKDGGLKLIQVSDDGHGIRFEDLAILCERHTTSKLSAYEDLQTIKSMGFRGEALASMTYVGHVTVTTITEGQLHGYRVSYRDGVMENEPKPCAAVKGTQVMVENLFYNMVARKKTLQNSNDDYPKIVDFISRFAVHHINVTFSCRKHGANRADVHSASTSSRLDAIRSVYGASVVRDLIEIKVSYEDAADSIFKMDGYISNANYVAKKITMILFINDRLVDCTALKRAIEFVYSATLPQASKPFIYMSIHLPSEHVDVNIHPTKKEVSLLNQERIIETIRNAIEEKLMNSNTTRIFQTQALNLSGIAQANPQKDKVSEASMGSGTKSQKIPVSQMVRTDPRNPSGRLHTYWHGQSSNLEKKFDLVSVRNVVRSRRNQKDAGDLSSRHELLVEIDSSFHPGLLDIVKNCTYVGLADEAFALIQHNTRLYLVNVVNISKELMYQQALCRFGNFNAIQLSEPAPLQELLVMALKDDELMSDEKDDEKLEIAEVNTEILKENAEMINEYFSIHIDQDGKLTRLPVVLDQYTPDMDRLPEFVLALGNDVTWDDEKECFRTVASAVGNFYALHHPILPNPSGNGIHLYKKNRDSMADEHAENDLISDENDVDQELLAEAEAAWAQREWTIQHVLFPSMRLFLKPPKSMATDGTFVQVASLEKLYKIFERC

SEQ ID NO: 48160 - protein, 571 aa, Oryza sativa
MDAKVDEMSKAYQELVAAAQAILEARRQPGGENTAAMDAAREAFEQRRKLFAVACDDADALVQSARQSIVSDPGRFVDVVTTPDEDSVRSPTRSSAESSSSSGFGALPDEVLRHILLRLPSAAAAARTSLISRRWRNLWSTLLPKLRFPGVTDLARVGAALRLRVAPVRLLRIESSDRAPDKIVAVLHLAAPLLEGKLCFDVITPAAAAAGAAGTGGAIQIPCFEKATEITIRLRGRLGIQLPPSGVFARLTALSLSHCRFDDQGQRDLGDARSSEGCPSLRELRIRDADVVSNLAIRSESLRLVQLSRLEGIRQLTISAPALTELDLYACLLWGMPMVDIFAPALETLHWVDFFSSSSVRFVEKPNVHRLSVYGMVYGRRNTPGSLQLVQHFTEARDVHLSLVYPSIMDMSCELLVQAVKKLPAVEILSLRLLTIGHTFGPCVYHLLKMSTGIRELKLKLEDHIADGEVPCSSGCVCYEPQAWKKNNISLNFLQKVEINNLSGAERQIYFVKRLLRWTMPELKTITLSFDPLVTVSEKVSRKLLSFSTPGICMEIYLHRNGTRVKYSAAN

SEQ ID NO: 48161 - protein, 94 aa, Oryza sativa
MKDLLDAKEKEAKLKEERWKKTKEIQERKLLFAERKLVWDQQHKIMFFDVSTLAMRAHIVASNVAALNDGFDGSSGFGGEFGGGNGESLSTSME

SEQ ID NO: 48162 - protein, 583 aa, Oryza sativa
MGMDMLVSAALEEVCARLSLGLPVTEMWTALSSVFNMAGLPMDLAVKRVLFARLIALPVISLVVEGVLAHPPRMDMEEAERYGARLLASRPLRDNFLGIYDHRCSASKLSDIQRKTLELIGASRTSGLTQRSLSKEAEIKGNNFHYVVKTLKSQGLIVGKQAIAKINTQAKRKAVSQDKHVISTNSLYLSRYAKNLNMNSYQRIEVTKPKLECNEETNIDALQEDETLSVDYKNDVSIHDYLPAMKAICDKLEEASGKVLAVSDIKKDLSYRMQPGHRAWRNVLHRLLGAQLVEKIAANLDDKIVHCLRLLKRFNPDEFKPKGTISNYKLGKKGLETDQVMELPLDNCIYDMIDAQGPKGITLIELGKRLGGKYNNSKELHDRVSSMHDRFNLTVEVEVVGKSKQGRVWTSKNFSLYNATLRNCDVPDDHDYCSVWPLIPSEEPTSVSPYGFVVNNKLLFEEDCHDEPPVHRLLNSHEACVGVSQPVEQDKVAFQRKRHCWPTSISDDRRQKRIIHILKKHSFVLMVELHKWLERVEKENRKIFDRKTLIHTLDKLQQEGTCKCIKVNVPVVTNYAGSRSILM

SEQ ID NO: 48163 - protein, 191 aa, Oryza sativa
MSSSSASAVPPEDDVCSVCHDRFRIPCQANCSHWFCGECIIRVWNHGPSVQPCKCPICRRLINLLVPANVSIDNDDDPQIQHVLGEVQHYNRIFGGTPRNLTQRLQDLPFFIRRLFRELLDPQRTLPLVFRARMVMMVALSAIYVLSPIDILPENVLGLFGFFDDFLVLLIVFLHLAAVYRSLLLYRHGGH

SEQ ID NO: 48164 - protein, 341 aa, Oryza sativa
MAKVDDKNDLCRMNQAKFEPSIWGDFFLSYCNPLAYSDNQRSMEERAEYLKKEVAKLIVNSRTDSLPEKLHLIDVLERLCVDHLFEEEINAVMDEISDADVSDCELHTVALWFYLLLKHRHRVSPDVFLKFRDEDGIFEAEDARDLLSLYNAAHLTTHGEGILDEAISFTKRQLRSLMPKVVEGSLAHDINSALEIPLPRRVRIYEAKYFMSTYEKGASVNEMIMELAKLSYNIMQIHHQQELKIITRWWKDLQLETRLSFARDRVVECYFWIAGVYFEPCYSRGRIILTKVLAIVSILDDIYDVYGSPEECEQFTKCIESLSFPSFRRFASALEVFKKIN

SEQ ID NO: 48165 - protein, 85 aa, Oryza sativa
MKAGSTMTGDRCSPPTVSTGIPSDATTLPAPTLADLLHPSHRDAAPPASLAFGSPPPAPSLCDPLAIFDTVAASRSLGSPSHHRP

SEQ ID NO: 48166 - protein, 369 aa, Oryza sativa
MATAACGESPSRLGSASAIVADTETRYHLLKIGCYSRTKATTPTGSFLSSGQFTVGGHRWRINYYPNGESADSADYISLYLLLDDKATNSSVKVQAQFKFQISSTDQVKNTPSLASTNVNTYGEDSSWSWGHRKFIKREDFEKSNDLRDDSFTIRCDVAVIGEIRTEKTTEIPSATTFVTVPPSDLNQQLVDLLETEKGADVVFEVSGETFAAHRCLLAARSPVFSAELYGLMKEGDTAGVVRIEDMEAQVFKLLLRFMYTDSLPKMEEEDVMWQHLLVAADRHDLQRLKLICEDRLCNYIGVSTVLNILVLADQHHCDGLKKACFSFLGSLENLSAVVTGDGLEHLSRSYPSLMKELFVVMALPPNHG

SEQ ID NO: 48167 - protein, 163 aa, Oryza sativa
MAELGLLPSVFARRGPGRSATPWVAVAASAAVSVAVSFLGFDDVVATANLLYSLGALLEFAAFLRLRAREESPSSLKRPYRVPLPLPALAAMCLVPSAFLAYVVAVAGWRVSAVAAALTALGVGWHGAMRVCRSRKWLRFNTAVAADHRLQLQDAPPPPAGRV

SEQ ID NO: 48168 - protein, 336 aa, Oryza sativa
MAPLGDGAAAAAAAEPNLVVSFGEMLIDFVPDVAGVSLAESGGFVKAPGGAPANVACAISKLGGSSAFVGKFGDDEFGHMLVDILKKNGVNAEGCLFDEHARTALAFVTLKSNGEREFMFYRNPSADMLLTEAELNLDLIRRAKIFHYGSISLITEPCRSAHVAAMRAAKSAGILCSYDPNVRLPLWPSEDAARAGILSIWKEADFIKVSDDEVAFLTQGDANDEKNVLSLWFDGLKLLIVTDGEKGCRYFTKDFKGSVPGFSVNTVDTTGAGDAFVGSLLVNVAKDDSIFHNEEKLREALKFSNACGAICTTKKGAIPALPTVAVAQELISKAAN

SEQ ID NO: 48169 - protein, 228 aa, Oryza sativa
MARERREIKRIESAAARQVTFSKRRRGLFKKAEELSVLCDADVALIVFSSTGKLSHFASSSMNEIIDKYNTHSNNLGKAEQPSLDLNLEHSEYAHLNEQLGEASLRLRQMRGEELEGLSIDELQQLERNLEAGLHRVMLTKDQQFMEQISELQRKSSQLAEENMQLRNQVSQISPAEKQVVDTENFVTEGQSSESVMTALHSGSSQSQDNDDGSDVSLKLGLPCGAWK

SEQ ID NO: 48170 - protein, 324 aa, Oryza sativa
MAERQVAELGAGAACVGWNHCGRRLAAGAVDGFVSVYDSQSQPSPSSKWQAHKHAILNIVWLPPDYGDAIACVCADGTLSLWEEVSEDDQLPTWRKCKVFESGNSHILHVQFGLQLSSLKMVTAYSDGQVKVYELLDSLELDKWQLQAEFQNITDPVSRSGKPACTSASIAWSPRRGESQQASFAIGFNSDSPNFNSCKIWEFEEAHQRWLPLVELGSPQDKGDIVHAVAWAPNIGRPYEIIAVATCKGIAIWHIGLSAESDGSLSTENVAVLSGHDGEVLQLEWDMGGMTLASTGGDGMVKLWQANLNGVWHEQAVLDCNVSH

SEQ ID NO: 48171 - protein, 466 aa, Oryza sativa
MGGGRKRRRRDGSEAPAIHPRNRYAAAAPDFASLASLYPSFAPFVSVSRGGRASIDFTDFAATRELTRVLLLHDHGVNWWIPDGQLCPTVPNRSNYIHWIEDLLSSDLIPPISSSNKTVRGFDIGTGANCIYPLLGASLLGWSFVGSDVTDVALEWAKKNVESNPQLAALVEIRNANKMSCSSESEAVDGEAARENTSKPVDGVLRSKPSILLGVVKDSESFDFCMCNPPFFESIEEAGLNPKTSCGGTAEEMVCPGGEQAFITRIIEDSVSLKNSFRWFTSMVGRKANLKILVSKVREAGVSVVKTTEFVQGQTARWGLAWSFIAPRKMVIRSSTPGKANYSFMLQGLRREYGAFQVLKSAESFFHASNLSCKTDSSLFSIDVTLSDEQAQAAMLHDESGSVEGNSTKLHSGVTGTSFRISVFEQMPGTLLVRGSLLNKALSGIFSSTFSQLEDTLKMEFLSKAR

SEQ ID NO: 48172 - protein, 284 aa, Oryza sativa
MRAVSMAATHRRHRRTDGRLQHNTVTVTEEAGATIPAANMLAAAASVKLSTAGTATAPKMALFKPLHLPPLFAAAAAAAGPRPLSLSARPLYRQQDPLFLASRVASPAPPPPSATADGARPVEAAPAGAAPEEAARRAKIGVYFATWWALNVIFNIYNKKVLNAFPYPWLTSTLSLAAGSAIMLASWATRIAEAPATDLDFWKALSPVAIAHTIGHVAATVSMAKVAVSFTHIIKSGEPAFSVLVSRFFLGEHFPAPVYFSLLPIIGGCALAAITELNFNMIGE

SEQ ID NO: 48173 - protein, 212 aa, Oryza sativa
MYEEEDDYKKKPSSGGGGGYGGGRYEEEDEYRKKPSGGGYGGGRYEEEEDDYMKKPSAGAGGYGGGGRYEDEYKKKPGGGHGGGRYEEDDEYNKKPSGGYGYGASSGGGHGGRYEEDDYKKKPSAHSGGGGGRYEEEEGYKKPSGHGGGRYGKEEEEDDKKKKKHGEGSEGGMGDYLKLAQGLMKKQGGEGESGGGGMGDYLKLAEGFLKKR

SEQ ID NO: 48174 - protein, 48 aa, Oryza sativa
MTMSWGLAAHIVDMVWMVLAGWVSTCLVIAGEIARGMRNGEISPFVVG

SEQ ID NO: 48175 - protein, 581 aa, Oryza sativa
MYRAAAAAASSISRSSSALRKQLSRGGCGEQRLWARGYAAKEVAFGVGARAALLQGVNDLADAVKVTMGPKGRNVIIERSHRAPKVTKDGVTVAKSIEFEDSAKNVGANLVKQVAEATNKVAGDGTTCATVLTQAILTEGCKAVAAGVNVMDLRNGINKAISSITTHLKSKAWIINSSEEINQVATISANGEKEIGDLISKAMEKVGKDGVITITDGKTLDNELEAVQGMKLSRGYISPYFVTDQKTQKCEMENPLILIHDKRISTMNSLLPVLEMSIKNRRPLLIIAEDVEGEALSMLVLNKHRAGLKICAVKAPGFGENRRANLDDVAVLTGGEVVSEDQGLDLGKVELQMLGTAKKVTVSLDDTIILDGGGDKQQIEERCQQLRESMDKSTAVFDKEKAQERLSKLSGGVAVLKIGGASEVEVGEKKDRVTDALHAARAAVEEGIVPGGGVALLYATKELDKIITANEDEKIGVQIIKNALKAPLMTIAANAGIDGGVVIGKLIEQDNLNMGYDAARGEYVDMIKAGIIDPVKVIRTALQDASSVSLLMTTTEAAVAEPPAAKARMASRMPQMSGMDF

SEQ ID NO: 48176 - protein, 603 aa, Oryza sativa
MEGSCGGGGGGGAGQMAAWQGRVGATNIGRLRHGKTSSSSAAAVAARGGGVTAWHLRVFAGVVGVMGCLLLVASLMMSAVHQVQFRNAAISRSFRGLQELKQNSVRTEKAEQIMHPRLLQMATSVVTKNESDSDSVKFSLWEEPYKQARKWKPCAAKHSLPDEVPEENNNGFILISANGGLNQQRVAVCNAVVVAALLNATLVLPRFLYSSVWKDTSQFGDIYQEDYFVNYMKSDVHIVKDLPPHLQSLDLEAIGSQITDMDISKEAAPSEFIKAVLPILQQNGVVHFLGFGNRLGFDSVPVHLQRLRCRCNFHALKFVPEIQRAGSLLVQRLRRAGAMRTEMDKQLFGSNMLDVPALLAGGEPSRYLALHMRFEEDMVAYSLCDFGGGDAEREELQAYRETHFPTLAMRLRNTSVSPEEQRSLGRCPLTPEEAGLVLTALGYDRGTFIYVAGSQIYGGAARLRPLTRLFPNLVTKEDVLSSAELAPFKNFSSRLAALDFIACASADVFAVTDSGSQLSSLVSGYRVYHGRGRAPTLHPNRKRYAQILGEEEGIGWGGFERRVRNMVEEYKRVSARPRGRSVYRQPRTPGCMCRAAGDGSVDF

SEQ ID NO: 48177 - protein, 321 aa, Oryza sativa
MVGRMERQSASSSASCSPSSSAAGTSSSSSACGGKKRPDILNMIRSATCLDSSSTDTGKGRSKQSSNKVTHGFHLVEGKSGHDMEDYHVAEYKYDKSHELGLFAIFDGHLGDSVPSYLKANLFCNILKEPIFWTNPQEAIKNAYRSTNKYILENAKQLGPGGSTAVTAIVVDGKDMWVANVGDSRAVVCERGAANQLTVDHEPHTTNERQRIEKQGGFVTTFPGDVPRVNGQLAVARAFGDQSLKAHLSSEPDVRHVPISSSIEFVILASDGLWKVMKNQEAVDLVKSIKDPQAAAKRLTTEALARKSKDDISCIVIRFRC

SEQ ID NO: 48178 - protein, 442 aa, Oryza sativa
MAQYRQSGGFFDYRGGHHHALPEYHRPLPHASKPSRIRRPGKPARRRSPAAAAAVASALLLAGVFLLSRRLSRQPAEISQDLGGGGEGLPEWNRSKELKFGHGGGGRSAQDSRYWDRDDRRRDEDYSEDEKEKISGASGNNAGVSDKVVTSDPAVEEKGLTMDTGGAADKEAAEVAEGGKGGTLYNEGGRKELEQYEAAAMGAAGTGIREVDPDDEYDDGIDAQDDLDDAQSHSSDGGRKLGDSSHESTESKENIAHDSTGNKESIALERRTETGAGISDGVDVIDAANVNQKKVSATGDKKHASKKKSKRKKTGSTCEMRFLNSTAQLVEPAKNEKFASFNLEYVEVEDKPLGSEYWEPRFAGHQSLQEREESYLAHDQQLNCAFVKGPNGTSTGFDISEENRKYMSKCHIAVSSCIFGNSDRLKTPFGKTVCSFSVPTNS

SEQ ID NO: 48179 - protein, 254 aa, Oryza sativa
MAALSSASLLPPPSTFVPVLSPLRKPPPQHLAIRGSPHRRRGRRLSLAASSAASPDLEKEPSQSPSPSPQEKSPGDLSAVAESVKVLKEAAKTRKVPSPELLAALAKIKKAKLDTSTFFETLGGTQSPGRTWMLIFTAKGRLEKGQYFPVTAVQRFDAAGKRIENGVYLGPVGSLTFEGRLSWKRKILAFIFERVRIKVGPFGPLEISLGGGNDGREPSTKDPFFVWFYVDEEIAVAQGRGGGVAYWCRCKRVP

SEQ ID NO: 48180 - protein, 129 aa, Oryza sativa
MAPGKQRGKAKGAPPPPAAPNAAAAGGFPACLRLMPPSTVAISIQAKPGSKLATITEIGDEAVGVQIDAPARDGEANAALVDFISSVLGVKKREVSIGSGSKSREKVVLVQDATLQGVFDALKKACASA

SEQ ID NO: 48181 - protein, 263 aa, Oryza sativa
MARRGHVFAVVAFVSYALLAAASTTVEAFAASGWSKGTATFYGGSDASGTMGGACGYGNLYTQGYGTRTAALSTALFDDGASCGQCYALTCDARADPRWCRAGASVTVTATNFCPPNYALPSDDGGWCNPPRPHFDMAQPAWERIGVYRGGIVPVAFRRVPCRRRGGVRFTVAGRDYFELVLVTNVAAAGSVRSMEVRGSRRGAGWMAMSRNWGANWQSLAYLDGQGLSFRVTATDGQTIVFAGVVPPSWRFGQTFASTQQFM

SEQ ID NO: 48182 - protein, 167 aa, Oryza sativa
MMLTHQFIEYCIWGWDNLPRTVLMYYANFLSSPEGYFHTVICNVPEFRNTTVNHDLHFISWDNPPKQHPHYLTLNDFDGMVNSNAPFARKFGREDPVLDKIDQELLGRQPDGFVAGGWMDLLNTTTVKGSFTVERVQDLRPGPGADRLKKLVTGLLTQEGFDDKHCL

SEQ ID NO: 48183 - protein, 233 aa, Oryza sativa
MVRGRTELKRIENPTSRQVTFSKRRNGLLKKAFELSVLCDAEVALIVFSPRGRLYEFASAPSLQKTIDRYKAYTKDHVNNKTIQQDIQQVKDDTLGLAKKLEALDESRRKILGENLEGFSIEELRGLEMKLEKSLHKIRLKKTELLEQQIAKLKEKERTLLKDNENLRGKHRNLEAAALVANHMTTTTAPAAWPRDVPMTSSTAGAADAMDVETDLYIGLPGTERSSNRSETG

SEQ ID NO: 48184 - protein, 516 aa, Oryza sativa; identical to SEQ ID NO: 28588

SEQ ID NO: 48185 - protein, 422 aa, Oryza sativa
MLHHSNSRHQRNRGSRVKTLLQATLLLGVVVWLMYQVKHSYDKKNEYLEDAENQLAHDDRSMFQGRKERGGSYGDGILEKGGENPDVVSKPDEENIGETVFEKDNTDSHDDDIRNTDRSKAGEGHGSSADGNTEANSNDEDGTTNHSEGEKSDAESNSSDAESKGEDHSTGDDMPQSNTVLEESSAETNRMPHEEVAHGDESTNEDQSNVKSDGSNEEEAEKKEAVDSQNASESLSDDAKGGTDDEHSSGTLPDETGNLPSGQNENSQSDATSTTSDASSEAVHIETGSENEDAAKSSGTASGDDDKGSANEASDSNETKSDEGNVAAEVSNDQAANTEAGNSQEASAAEAANGSSEETKPVENQNDGNTESSNNGEQVDIKMETSASTNAEQKESQVGDGSSGSNGSNDSGAKQTGTTETQ

SEQ ID NO: 48186 - protein, 110 aa, Oryza sativa
MENVTGGGGGGSPRRVVVAVDESEESMHALSWCLSNVVSAAAKSPAAAPPPAVVLVHARPARPLYYPVIDGGGYVLTQEVMDSMDRYMATAADSVVAKARDICTAFPNVT

SEQ ID NO: 48187 - protein, 317 aa, Oryza sativa
MQCFIRRDKSTQTYYLYLSLGSAVLVDNGKFLLSAKRNWHATCTEYVISMNANNLSRSTNTNIGKLRSNFLGTKFVIYDTHTPYNATSDSQSGKTSRRFSNKGTAKHPCSTYSIANISYELNVFGTRGPRRMCCLMHSIPASSLEAGGTVPSQPDSILAHSLNESSFRSVSFSKSSVMDHSMHFSSAQFSDISIGDGPRIGGRVLSDDEECKETPLILQNKAPRWHEQLQCWCLNFRGRVTVASVKNFQLIAATQPAAGAPTPSQPVPPPPPEHDKVILQFGKVAKDMFTMDYHYPLSAFQAFAISLSSFDTKLACE

SEQ ID NO: 48188 - protein, 274 aa, Oryza sativa
MVPSVLPMEPGLGRVGEHHLGPCRVARSHPLAAPAARHGARPLVRHQRRLDRLGDAAARRPDRHALHRRHGGVGAGAEPGRAGRPERPAAAGMEQGGGEPGAGAAAGHRADGLPRPDDGVAQPGRLGVADHHRVQGPRPRGAGARVQDGGHPALRPAAHAAARRQGHRHVGVRGLVPGVHLAGRRGRARDVHPAGARREARTQGQPRRRQKRLLRHRHLRRRDRYLDAGQRRHRRRDRAPVRLRQVLRVQDVLRPRRAASRAMGVDWRDRQRAG

SEQ ID NO: 48189 - protein, 164 aa, Oryza sativa; identical to SEQ ID NO: 31847

SEQ ID NO: 48190 - protein, 333 aa, Oryza sativa
MRTTYMTQVDGKISIPSSCYRFTEISRQRDMSFGKDVWPAVCTAMEYMEQFDHDDDGMIENDGFPDQTYDAWTVRGVSAYCGCLWLAALQTAAALARTLGHHDYAERCMLKFAKAKPVFEAKLWNGSYFNYDSGTSYNSRSIHADQLAGQWYTASSGLPPLFDEGRIKCTLQKIFDYNVMRVKGGRMGAVNGMHPNGKVDETCMQSREIWTGVTYSLAATMLLHGMDDQAFTTAEGIFTAGWSEEGYGYWFQTPEAWTIDGHYRSLIYMRPLAIWAMQYALSPPRTILEAPKVNTMDRTSYISPSTLQFLQDSVRKMTPKNSCFGSSTSNCEC

SEQ ID NO: 48191 - protein, 480 aa, Oryza sativa
MAAPQASPSPSAQVVGNAFVQQYYQILHQSPDLVYRFYQDASRLGRPPADRYGDMVSVTTMEAINEKIMAMDMSRAEIKTVDSQESLGGGVTVLVTGHLTVRDGVCREFSQSFFLAPQEKGYFVLNDMFRYVGDGPTPAAAAAAEVQPEADAVAPPLANGTATAPLQPAAPDYDAMPHEEPDVVENVAVPPEEEEEVYNPPLEEVEGGAVEEEQSVPEVINEVPNNVVPVVAPADAPVSHEEAPKKSYASIVKVMKEAPVPAPIPATRPAPAARPAPPKPEKQSPAPPAPAPVADATPFSSNAESSNTHEPEVDAHAIYVRSLPLNATTTQLEDEFKKFGTIKPDGIQVRSHKIQGFCYGFVEFEEATAVQSAIEASPVMIGGRQCFVEEKRTPGSRGSSRGGRFAPGRGNNNFRADGMRGRGNYSGGRSYGRGDFSYRSDYGGRGGGRGGSARGPDVGYQRVDGGRGGRTSAGPGAPAK

SEQ ID NO: 48192 - protein, 80 aa, Oryza sativa
MFDQRTVGAENLPMPAQWHRISVHNEQLGAFAVQKLVKNSAVYVEGDIETRVYNDRINDQVKNIPEICVRRDGMYANLKF

SEQ ID NO: 48193 - protein, 74 aa, Oryza sativa
MARPTRPPTPRPSSSRPSSMPPATRFTSTTSTSSSSYSRRSSRRSPPRRCASMEIACFAPCALAMICTWEAAAW

SEQ ID NO: 48194 - protein, 325 aa, Oryza sativa
MARNKEALVLLLDVGPSMHGVLQEVENICSTLVHKKLVYNRSDEIGVVLFGTKETSNELAKELGGYKHVVVARDIKVVDEETTNALQNLPRGTSPGDFLDAIVVGLDMLIRKFGNIKGKQRMCLVTDAQHPLRDPPQGTKKDQVDTIADQMKRHEIKMDCIIFRESGVRHNAVMDENDQLLYHFRERSVTKVVHVDSPTSLLGALRTRNVLPVTVFRGDLEVSSSFKIKVWVYKKTSEEKFPTLKKYSDKAPASDKFASHEVKVDYEYKSVLEPDTVVPPDQRIKGYLYGPQVVPISSAEWEAVKFKPEKGVKLLGFTDRSSISR

SEQ ID NO: 48195 - protein, 342 aa, Oryza sativa
MPRRRALPPHRRATATATAMPPANLSISAPSAAAAPPPPLYLRRLPLIAAAALLFLLVIVVLAAAHPYGYAPWLANAAPAALLRRPVSTTFYSFDLLREYPHDPYAFTQGLLYGGNDTFFESTGLYHRSSVRRVDLKTGKVLVQHEMDGRLFGEGLTLLNDKLFQVVWMKNQGFIYDRHNFSKRESFTHKMSDGWGLATDGKVLFGSDGTSRLYQLDPKSIQVMKTVTVKYQDNEVPYLNELEYINGEVWANVWQTDCIARVSHEDGLVVGWIFLHELRQHLWNSGNTEIDVLNGIAWDEENQRLFVTGKLWPKIYEIKLRPVDGPQDGSVEKLCPKASFYR

SEQ ID NO: 48196 - protein, 289 aa, Oryza sativa
MSSQVDNRSQSAGKRARTDGGRREDDWVCPSCQNVNFAFRTTCNMRNCNQSRPTDYTKDMQKPMQTPPPHFPMSGGYMSPGTPPSMYLGGGAPPYGTSLYGGPALPRYGIAQFPGGSGYPYGYGGRLPMGSPYGPPMHMAGPPYSAGSMMGPGGMYGMPMDRYSLGLPAGPGPMGARAGSYSEEGSQKKPAGAGRDNDWKCPNCNNINFAFRTVCNMRKCNTPRPENQGSKPDGARGPKPKMPEGSWKCEKCNNINYPFRTKCNRPSCEAEKPFQTNNANESSADQDNQ

SEQ ID NO: 48197 - protein, 384 aa, Oryza sativa
MAWQLLAGVLLLQLAASAAGQQQCLSATFQNGQTFLKCNPLPVLGASLHWTHHAENGTADVAFRAPQQSSGWVAWGINTRGTTMPGSSVFIASQDGSGSVSVLMTVLENTSPSLTNGSLSFDVLSPPTADYTNGVYTIFATIALPNNSTTQNTVWQAGPGSTGNVGQHATSGPNVQSMLRLDFSSGQSTGTASNSRRHRRNIHGILNAVSWGILIPMGAMIARYLRVFEAADPAWFYLHITCQLSGYILGVAGWALGLKLGSESKGITYSAHRNIGIAIFCLATLQVFALLLRPDKKNKYRFYWNIYHHSVGYSAIVLAAVNIFKGLDILKPASGWKRSYIAILATLAGVALLLEAITWVIVLRRKKSDKSSSPYGATNGNGRA

SEQ ID NO: 48198 - protein, 160 aa, Oryza sativa
MVKGGKPVMLVGIDDSDHSYYALEWTLKHFFALGQPQQYHLVLLTSKPPASAVIGIAGLGTTELLPTLELDLKRGAARVIEKAKEMCSQVIDASYEVLEGDARNILCEAVERHHADMLVVGSHGYGAWKRAVLGSVSDYCSHHAHCTVMIVKRPKHNTHS

SEQ ID NO: 48199 - protein, 192 aa, Oryza sativa; identical to SEQ ID NO: 46775

SEQ ID NO: 48200 - protein, 165 aa, Oryza sativa; identical to SEQ ID NO: 29387

SEQ ID NO: 48201 - protein, 243 aa, Oryza sativa
MADDAGGGRREYSIIVPTYNERLNVALIVYLIFKHLPDVNFEIIVVDDGSPDGTQDIVKQLQQIYGENRVLLRARPRKLGLGTAYLHGLKHASGDFVVIMDADLSHHPKYLPSFIRKQKETGADVVTGTRYVQNGRVHGWNLMRKLTSRGANVLAQTLLQPGASDLTGSFRLYKRNVLEDLISSCVSKGYVFQMEMIVRATRKGYHIEEVPITFVDRVFGTSKLGGSEIVEYLKGLVYLLLTT

SEQ ID NO: 48202 - protein, 330 aa, Oryza sativa
MFPSSVNMREQNNIIIISIAMSILLLVVFFCRMLGNMAGKNKRKKQPKLPPGPATMPVLGNIHQILMNKPVFRWIHRLLDEMDTEILCLRLGSVHVIAIASPEMAREALRRNDAVLTSRPVSFAWRAFSFGYKNTVGSTGDQWKKMRRMLASEILSSAMERRMLGQRVEEADHLVNYIYRNCNNGTVDIRHVTRHFCGNIIRKLVFGRRHFAFGAGNIGPGRDEEAHIDALFTALDYLGAFSISDYFPSLVLNGLMSTFRRLHDPIIMERMEEWRAPRRNGDERREVADFLDVLISLDDAQGKPLLSLDEVKAETLVISSITPSYIYISN

SEQ ID NO: 48203 - protein, 347 aa, Oryza sativa
MGSLRRVVHLVTALNGSANLRHIDTSRFFSRRPPPPFSPSSMAVVTEESSLPEPSMSFYPAPAPPEGNGDIGVMLFGRARDRLLVTDQSDSAAIYDAGTHALLAETTPLKPKYWPVSVPVGDDIYLFDLYPRVPCGGRHCFEAVTAVDSSSSSYYSRALPPPPFLFAPGYSPKPIESYTVVGGSEVWISTARAGTYAFDTVSCSWSKQADWPMPFAGLAEYVPEHKLWFGLSSSRRDKHPLCAVDLAAAASPETGPELTNVWMELSVPREWIPVEAFLVHLGSSRFFVARFFQELVEVRCDFSQRFDRFAVFTGVELERTSRGELRMIKHKSERYSIAHKVLCHSVP

SEQ ID NO: 48204 - protein, 168 aa, Oryza sativa
MVNIEGDLHMTSGEGEGSYAKYSRRQTIVIDETKPVIEKAIIEVYKAILPKTMVIADLGCSAGPNTMFFMSNVINIIADHCTKLDEHDPIELQFFLNDLPGNDFNQLFRSLEKIKTSTTMYHKGDSLPSYYISGLPKSYYSRLFPRQSVHLFHSSYCLHWRSQVRLLI

SEQ ID NO: 48205 - protein, 809 aa, Oryza sativa
MRGVESGGGGGGASSSSPAAAGNFDAGQYAFFGKEPLEGLELSCLEDGGGDGNGGGFSGPEDGLYRLSSVGEEIDNLSNLSEIDDLASTFAKLNRSISGTRNPGVIGDRRSISRGSSLTVDWAEDAEFPNWVDQDILEGEELQESKRWWSQSRSLGQQGDAKPLSRTSSYPQQPLQHRASEPIIAPQSPPFTSFPPPGARSPYTAQGLTRHGSIPSVGAGLQMGSPSMSLPSSSYHMAGLSHGLPYGGSVSFGSPNLPGSNPIQNDWPNQANPYAVDQFNLLPNMLQKQISLPNSPMSSLLFSQQQQRLAQVQVQPSHQNYLNLPPHLFYQHHSPELTGRFDSISNVPSLRDKRSRSGRGKHSTRFSQPLTDTGSQNGDSGGLKFRSKYMSSEEIESILRMQHSASHSSDPYVVDYYHQACIAKKGASSRQKANFAPTSMKDLPSKSRSSSDHHAYLQVDALGRVSFSSIRRPRSLLEVDLPSSGDGSHDQKSSLRPLEKEPMLAARVTVEDAICLLLEVDDIDRLLQSSQAQDNSFQLRRRRQVLLEGLATSLQLVDPLGPSKSSHSSGLAPKDDLVFLRIVSLPKGRKLLSRYLRLLTPGSELTRIICMAIFRHLRYLFGGLPSDSSAAETTVALAKTVSSCVLHMELGALSACLAAVVCSSEQPPLRPLASSAGDGASLIIKSVLDRATELLTDHHAAASYTVSNRTLWQASFDAFFGLLTKYCLSKYESIKQMFVMQSPCSVTGSEVSKATSREMPVELLRASLPHTNDQQRQLLLDFAQRTMPVTGINPTGANGGYITSESVPG

SEQ ID NO: 48206 - protein, 217 aa, Oryza sativa; identical to SEQ ID NO: 47189

SEQ ID NO: 48207 - protein, 395 aa, Oryza sativa
MASEEGEEANAASSAEEVGRKKPPRHKGKHDKPKPWDDDPNIDHWKIEKFDPSWNEGGMLEVSSFSTLFPQYREKYLQEAWPIVKGALKEFGVACELNLVEGSMTVSTTRKTRDPYIIVKAKELIKLLSRSVPAPQAIKILNDEMSCDIIKIGSIIRNKERFVKRRERLLGPNLSTLKAIEILTGCYILVQGNTVAAMGSWKGLKQVRRVVEDCIKNIKHPVYHIKELLIKRELAKNPALANESWDRFLPKFKKKNVKQKKPITKEKKPYTPFPPPQQPSKIDLELESGEYFMSDKKKSAKKWQEKLEKQSEKAEENKRKREAAFVPPKEDTATPYESAKSTSNNDEIADMAKSLKKKAKEFRKSEAQENVRLESYVASNEGSRPKKKHKSSKSK

SEQ ID NO: 48208 - protein, 481 aa, Oryza sativa
MLPSTAMAFHVFLIAALLLLPLPAAFSKAVRTQSLLANPLSPDPITQEQQLSLAAPRTNASTLHFRLAHREHFALNATASDLLAHLLARDAARAAALLAAPNNATRPRRRGGFAAPLLSGLPQGSGEYFAQVGVGTPATTALMVLDTGSDVVWLQCAPCRHCYAQSGRVFDPRRSRSYAAVDCVAPICRRLDSAGCDRRRNSCLYQVAYGDGSVTAGDFASETLTSARGARVQRVAIGCGHDNEGLFIAASGLLGLGRGRLSFPSQIARSFGRSFSYCLVDRTSSVRPSSTRSSTVTFGAGAVAAAAGASFTPMGRNPRMATFYYVHLLGFSVGGARVKGVSQSDLRLNPTTGRGGVILDSGTSVTRLARPVCEAVRDAFRAAAVGLRVSPGGFSLFDTCYNLSGRRVVKVPTVSMHLAGGASVALPPENYLIPVDTSGTFCFAMAGTDGGVSIIGNIQQQGFRVVFDGDAQRVGFVPKSC

SEQ ID NO: 48209 - protein, 195 aa, Oryza sativa; identical to SEQ ID NO: 30452

SEQ ID NO: 48210 - protein, 562 aa, Oryza sativa
MVGRSSLPEGSLFLGFDSSTQSLKATVLNNELIIVASDIVNFDSDLPHYKTEGGVYRDPADDGHIFSPTIMWVEAFELLLEKLKPKINFSKVVAISGSGQQHGSVYWKKGSHAVLSSLDPTKSLLSQLKDAFSTMDSPIWMDSSTTKQCREIESVVGGALELSKLTGSRAYERFTGPQIRKIYRTVPQVYDDTERISLVSSFMASILVGNYASIDETDGAGMNLMDINQRTWSKTVLEATAPGLEEKLGKLAPAYAVAGRIAPYFVERLQFDKNCLVIQWSGDNPNSLAGLTLNTPGDLAISLGTSDTVFGITAEAKPSLEGHVFPNPVEPDGYMVMLCYKNGSLTREDVRNSCAEKSWDVFNSYLEKTPPLNGGKLGFYYKDHEILPPLPVGFHRYIVENLNDVTSNNLVEREVEEFDPPSEVRAIIEGQLLSMRGHAERFGMPNPPKRIIATGGASSNERILHSIAQIFGCPVFTVQRPDSASLGAALRAAHGWLCNEEGSFVPISCMYQGNLEKTSLGAKLAVSTGEGVEDKELLEKYTVLMRKRMEIERRLVEKIGRA

SEQ ID NO: 48211 - protein, 579 aa, Oryza sativa
MEAAESLEYELQKEVSNIMIQSYITSMRREFETKLWENQNCISTLNKNWKEKISKIAALRDELSTIYSVVSASESGVFSSHGSHEKVEELNFLKMKDDNESSITERTTDSGELMFDIPDFSLLKHMPSEEVTNFLKSEWLKLRRQHESELHEKTEELFRLKREFAKDIALLPSRKERELEIIKSKLLQSISKLDEITLREDNPYCDNYDGAEVCGFEDRIGSLLHENEQLQGLLADKKMVAKHLSLQVLDAERKMAQHSLSELKLVKQVEKLSHELEDLKIESHIKDLLELSTLREVFDNYENHIDDANQEETFLRELLIEKEEQLSIMYEDRQKLKYENNQLVAIAGSTLMQHHEQVNLVNDLTNFREKVCEQELLILESKSESNSMKSSLYEALQQINVCKQEIHGLTDNLTAMSIALEEAKEQNASLDATIQEMKKTSAPSINSHKGQAGHLEYALVSMEKLSKSYSDFESRLAQSMKRNEIRLTNIICQFNPLVQQVAVLKKKEFWYKQILEIKCSNLQKAEAEVDILGDEVDALLSILGKIYIALDHYSPVLKHYPGVTEILNLVQKALKGESI

SEQ ID NO: 48212 - protein, 147 aa, Oryza sativa
MSFAIRSSEPEFWFLIPSEEAAVAVAAHRLVVMDQRRSGSAYRPKRTHMAAAEDEHRRPGTSSRRRVAPTPTTQTQTQTAPGYFTVELVMAFVCVTASLVLLPLVLPPLPPPPSLLLVVPVCLLAVLVAMAFVPLDAQSNVVGSSCL

SEQ ID NO: 48213 - protein, 184 aa, Oryza sativa
MKGGRKSQTALAQFKGLASSISGEKAKKSFSKMQPAQVLLMLIQHGANGLNLLEAQHVILVEPLLNPAAEAQAISRIHRVGQDKSTFIHRFIVKNTIEESIYKLNRGRAVCSTIHRKSKNFKDELVLTLKDIESLFPVATLDQPSEQENKNYGGAGGHMRSLPPSVAAGLAAERRLLEQHDNQH

SEQ ID NO: 48214 - protein, 384 aa, Oryza sativa
MSNIPLNGHQKLHHTFLQKKGTKFWSIYLNLTNFRTTSLAGPLNSEGHPDSGRCAYLSTPHSSLDEAIAYLDFHVKSKKAKGYEEVPAIKVEEDIVKIDFNSIIYDEKLGKRVNSLEHISDYSAEDSADEDAQDIHQSRDGVGNFPSLRPEPQSSKFEFNNNNDYQNSNRINEKEEDQMQSSTEEVDEELLNFPLGQPIREMKDQKLSVEKLRSANVKGLYMTPYVSGVRCLWSGFEVFLNASKQYVPPSEFRKYLPGGPIEGEFVMGKNSSKRIKDALKCKSMDEWKYLKFIAYDAPQVKAPFEERVKKLRKVLKKKKNPYVVLQEPILCQSLDHLNEEITKQLRAGNKGVLLRQSQGNVTQFLRKATKVLTAEEEKPLSQLI

SEQ ID NO: 48215 - protein, 186 aa, Oryza sativa; identical to SEQ ID NO: 33811

SEQ ID NO: 48216 - protein, 518 aa, Oryza sativa
MEDNKLILALGLSVLFVLLSKLVSSAMKPRLNLPPGPWTLPLIGSLHHLVMKSPQIHRSLRALSEKHGPIMQLWMGEVPAVIVSSPAVAEEVLKHQDLRFADRHLTATIEEVSFGGRDVTFAPYSERWRHLRKICMQELLTAARVRSFQGVREREVARLVRELAADAGAGGDAGVNLNERISKLANDIVMVGSVGGRCSHRDEFLDALEVAKKQITWLSVADLFPSSKLARMVAVAPRKGLASRKRMELVIRRIIQERKDQLMDDSAAGAGEAAAGKDCFLDVLLRLQKEGGTPVPVTDEIIVVLLFDMFTGASETSPTVLIWILAELMRCPRVMAKAQAEVRQAAVGKTRITENDIVGLSYLKMVIKEALRLHSPAPLLNPRKCRETTQVMGYDIPKGTSVFVNMWAICRDPNYWEDPEEFKPERFENNCVDFKGNNFEFLPFGSGRRICPGINLGLANLELALASLLYHFDWKLPNGMLPKDLDMQETPGIVAAKLTTLNMCPVTQIAPSSAEDAS

SEQ ID NO: 48217 - protein, 375 aa, Oryza sativa
MAITVSIYLVKMPIYLETRGTSRISLVVHHIRRRTHSSSSSRLRFQRGGGAEQRRGMAAAQGSGVPAALALSSGHTMPSVGLGVWRMDSPAIRDLIHSALRIGYRHFDCAADYQNEAEVGDALAEAFQTGLVKREDLFITTKLWNSDHGHVVEACKDSLKKLRLDYLDLYLIHFPVATRHTGVGTTASALGDDGVLDIDTTISLETTWHAMEDLVSMGLVRSIGISNYDIFLTRDCLAYAKIKPAVNQIKTHPYFQRDCLVKFCQKHGILVTAHTPLGGSTANTEWFGSVSCLDDPVIKSLAEKYGKTPAQLVLRWGLQRNTVVIPKTSKEERLQENFAVFDFAISDEDMEKMRSIDRKYRTNQPAKFWGIDLFA

SEQ ID NO: 48218 - protein, 177 aa, Oryza sativa
MASQSTKPAQAAAEPSPPAATAAAGEAPPAPNPASAATPAQNPTAAAGAAAGGATDLEKKMRRAERFGTAVVMSEEEKRSSRAERFGTGSSNEKAEEQKRKSRAERFGLASSSADEDAKKKARLERFGQSTNVDKGEEEKRKARALRFAETSSGPSQENGKDCSKPTQDAATVAGTA

SEQ ID NO: 48219 - protein, 339 aa, Oryza sativa
MALVRQRRHLPHLTLPLDHFALRPPPAPQQQQQPAVAPSTSSDVRLSDFERISVLGHGNGGTVYKARHRRGCPAQQPLALKLFAAGDLSAAREAEILRLAAYAPHVVRLHAVVPSAAGGVEEPAALALELMPGGSLAGLLRRLGRPMGERPIAAVARQALLGLEALHALRIVHRDLKPSNLLLGADGEVKIADFGAGKVLRRRLDPCASYVGTAAYMSPERFDPEAYSGDYDPYAADVWSLGVAILELYLGHFPLLPVGQRTDWAALMCAICFGEAPEMPAAASEEFRDFVSRCLEKKAGRRASVGELLEHPFIAERDAADAQRSLAALVAEAEQSGDL

SEQ ID NO: 48220 - protein, 212 aa, Oryza sativa; identical to SEQ ID NO: 32024

SEQ ID NO: 48221 - protein, 779 aa, Oryza sativa
MAVSTSRRGGGVLAAVVTAVAALAMLGGVAWGGNPGFTCGPASAQKGFAFCNAALPAEQRAADLVARLTTAEKVGQLGDQAPGVPRLGIPVYKWWSEALHGLAISGKGIHFGNGPARTATSFPQVIHTAAAFDDGLWFRIGQAIGKEGRAFYNLGQAEGLAMWSPNVNIFRDPRWGRGQETPGEDPATASKYGAAFVKGLQGSSLTNLQTSACCKHITAYDIEEWKGVSRYNFNAKVTPQDLADTYNPPFRSCVVDGKASCIMCAYTLINGVPACASSDLLTKTVRGEWKLDGYTASDCDAVAILHKSEHFTRTAEEAVAVALKAGLDINCGVYMQQNAASALQQGKMTEKDVDKALKNLFAIRMRLGHFDGDPRGNKLYGRLSAADVCTPVHKALALEAARRGVVLLKNDARLLPLRAPTVASAAVIGHNANDILALLGNYYGLPCETTTPFGGIQKYVKSAKFLPGCSSAACDVAATDQATALAKSSDYVFLVMGLSQKQEQEGLDRTSLLLPGKQQALITAVATASKRPVILILLTGGPVDITFAQTNPKIGAILWAGYPGQAGGQAIADVLFGEFNPSGKLPVTWYPEEFTKFTMTDMRMRPDPATGYPGRSYRFYKGKTVYKFGYGLSYSKFACRIVSGAGNSSSYGKAALAGLRAATTPEGDAVYRVDEIGDDRCERLGFPVMVEVQNHGPMDGKHTVLMFVRWSSTDGGRPVRQLIGFRNQHLKVGEKKKLKMEISPCEHLSRARVDGEKVIDRGSHFLMVEEDELEIRFQD

SEQ ID NO: 48222 - protein, 844 aa, Oryza sativa
MAAIVLLLFLVVGLMPVSNGQTTPFSPRFSVYLACGAGGNVVVTSDSPQRTFVPDDGELSGKSARFSNPDASPPSPLYAAARAGTSGFSYRLSYAADAAPDGNTTLVLRLHFFPFASQSGDLLSARFSVSAMGRYVLLPPSFSPPRAGVVREFLLPSDGSGEFDVAFTPESGGLAFVNAIELFPAPQELLWKFPLTAVNTDVSPSHQALETLYRLNVGGPTVTPTGDTMWRTWLPDDSYLSPATVSAVASIQGQIIFDRAQGYTQMVAPDAVYKSQRTTNSTTSNVTWTFAVDGNSSYVVRLHFCAFEELSSVIGEGVDFNVYLMQAMGTRELKAKDYATLSSPTQAFYMDYVAVVPTAGENLTVSIGRAASSDSKKTILNGLEIMKLRAVDMTPASSSGKTSKVVVVAVTAAVLGAAVLAGVALCVLLVRRRQRRATLPVPEEEEKESVGTPWSPFTPDGEGSFGSAVVTPRRMNMKLHIPLAEIMVATGDFDDANILGVGGFGNVYRGVLRDGTRVAVKRAKRASRQGFPEFQTEILVLSSIRHRHLVSLIGYCNERSEMILVYELMAHGTLRSHLYGSDAAAATPPPLSWKQRLEICIGAAKGLHYLHTGHSDNIIHRDVKSTNILLGDGFVAKVADFGLSRVGPSTGQTHVSTAVKGSFGYLDPEYFKTRQLTDRSDVYSFGVVLFEVLCARPAIDQSLPPDEINLAEWAMQWSRRGRFDKIVDPAVAGDASTNSLRKFAETAGRCLADYGEQRPSMGDVVWNLEYCLQLQESQPSTETALDLDDSGAHLPRDIVVARRVAPLAPDASADAAGDDMSWSETASFTATGSVFSQIMSRDGR

SEQ ID NO: 48223 - protein, 1021 aa, Oryza sativa
MTTHHDPAAAASAPIVRMLLLVLLQIQLVAALSLLPPASAPPPAALPCRPDQESPLLRLKSSFSATDMSTAAFRSWRPGTDCCRWDGVRCGHGDGRVTSLDLGGRQLESRGGLDPAIFHLTSLEYLSLADNDFNGSPLPSSGFERLTELTHLSLRSTNITGVVPAGIGRLVNLVSLDLSTDFEIIDTFDDVYVFKMNSSLDAQQLAVPNLESLVANLSNLRELNLGLVNLSENGARWCNALVDSCPKLQVLRLSCCALSGPICATLPRLHSLSVIDLSFNSLPGLIPDFSNFPNLTALQLRRNDLEGFVSPLIFKHKKLVTIDLYHNPGIYGTLPNFSSDSHLENIYVGGTEFNGIIPSSIAELKSLKNLGLGATGFSGELPSSIGNLRSLKSLEISGFGLVGSIPSWVANLSSLTVLQFTNCGLSGSIPSSVGNLRNLGKLLLYNCSFSGKIPSQILNLTQLEILSLHSNNFIGTVELTSMWKLLDLFVLDLSDNNLVVVDGKGNSSTASIPKLGALRLSGCNVSKFPNFLRFQDEIEYLDLSYNHIDGAIPQWAWENWVKMDILSLKNNKFTSVGHDPFLPLSDMKALDLSENMFEGPIPIPRGYATVLDYSGNRFSSIPFKFTNYLSDVSFFKAGRNNFSGRIPPSFCSAMSLQLLDLSYNSFDGSIPSCLIEDVDKLEVLNLKENKLRGEFPDNIKESCSFEALDFSGNLIEGKLPRSLAVCKNLEVLNIGSNQINDSFPCWMGTLRKLQVLVLKSNKFFGHVAQSLGEEKGTCEFQSARIVDLASNKFSGILPQEWFNKLKSMMIKDSNLTLVMDHDLPRMEKYDFTVALTYKGMDITFTKILRTLVFIDLSDNAFHGSLPEAIGELVLLNVLNISHNSLTGPIPPQLGRLTQLESLDISSNELSGEIPQQLASLDFLTVLNLSYNKLEGEIPESPHFLTFSNSSFLGNDGLCGRPLSKGCINITSLNVIPSKKNSLDVLLFLFAGLGFGFGFALSIVVIWGIPIRKRSRVRQRAL

SEQ ID NO: 48224 - protein, 400 aa, Oryza sativa
MKAMGYNNPYDSSGTDDDLPPTQNRGLRVRSFSANGRASVMPFSYIRPHGDLESEIHQVEQEAYTGVLRAFKVQSDAISWEKESLITELRKELRVSDDEHRELLNKVNEDVAIRRMREFRQGGGSLSAQHRGSRIFHDTEPGPAAKRQRTPLSIPSHSAGLQSPAMPSPSVPSSTKWGPFSGTKGKKTRTNTPLAVPSADPTSLINRKIYTRWPDDNNFYEATITDYNPATGKHALVYDMGTVAQTWESVRLSDLAPEDIIWDLDDQGISNRDGWGPHPGMRRHPGNNGTMAMASRGGGRFSRNEPTKDSAPPQNGINRNIGHIDVPNTRSVVIEVERVLSNPNMGEIEKAKKLLQDQEQSLLDAIARLDDASDSESEDMAVGAQMVSAGDHMGRNGVAC

SEQ ID NO: 48225 - protein, 135 aa, Oryza sativa
MATMTLSVIPSPPLPEDVHGALLMTAEGGGLGFAAVLERSNLHLWSKSMDQWEHLEDVRDLKTLLPRGSISMMNNVLIGFADGGVRVVVVRSYHGPFIVELGSTGPARVALRRSGIYAVFPYTSFCTPAAATTTE

SEQ ID NO: 48226 - protein, 229 aa, Oryza sativa
MEGEDESPSPGENELPLWGHVKILDGFAPRCGTNMRFLCDYCSCVFRGSYSTVKAHLLKISKQGVPACPGVTFNILMKLSSEVDAAEDSILIQVRKKRNVTESCSSDYSGDEPESCSSDYSGDAPCMGKVIVQAKRKKGRAECRDNFDAQFARMFYSSGYYLKLKNLYIFLLGTCISLHITGYSVYVVSIALHFLFYLSRLVLQLCKGPILPEFIFFYFEEYYSWLCSS

SEQ ID NO: 48227 - protein, 428 aa, Oryza sativa
MAGPTPPPPEEEPSSPSLRLRCAVQHYEWGRRGEASLVARLSDANADDHGPDPARPYAELWMGTHPSAPSSLLADGLLRDWLARHPAALGPAVAARWGGDLPFLFKVLSVAKALSIQAHPDKDLAEVLHALRPATYKDGNHKPEMAIAVTEFRVLCGFAGIQELKDVLRTVPEVEDLVGPEDAAKLLSVKEYHGVNEVKSCLRSAFTKLMTASKEAVSEAITKLIFRLNAESKVRTLTEKENLVLSLEKQYPEDVGVLSAFFFNYIKLSPGEALYIGANEPHAYLSGECIECMATSDNVVRAGLTPKYRDVQTLCSMLTYKQVFPEILRGVPVQPYVRRYTPPFDEFEVDCCSLPPGELVVISPVSGPSVYLVMAGEGEIQVDSMPNGEKSKQGDVFFVPAYTEVKFSASGPECMQLYRAGVNSRFFN

SEQ ID NO: 48228 - protein, 581 aa, Oryza sativa
MADEPLDAAAAAAEAETPATAAAAAAASPALLLRPRRVAFEHGLLPIPKLVFPEGTLTQTLAQTKERLIAAAGGDGDASAAPRVGAAALAEALQIPRELAALVLGTLAAVLPAEEEAEDADLRDVLLFLYIQSYKRLVPRAHKDSPAVTDVWPSTSAFDGYLSALSPIQLVRSNSRRFMPSQADEEAHQLSYLQKHMVNILSLLADSVDGEGDESMVLTAETFEHLGFLFQFSEGTPLSQVATFFANSDPDMPAAPVPAAQVHDWILQNIAASLENTAEKLTAKENSQQSASDPDVTMAEAVTNSRIHSSSPTGTAVPNNQGHYRNTTFLEGFSKTSVVKQASDIKGHSIKVLNCHDSVIYILAPVKYATVYGCSDTTIVLGAVGKVVKVEHCERVQIIAASKRICIANCRECIFYLGVNHQPLIVGDNHKLQVAPFNTYYPQLGEHLVQVGVDSNINKWDQPFVLGVVDPHDSLSHPAGVSDVQAESATCLDPDLFTNFLIPSWFEAQGPTKYNPFTLPEVYWASQRKKHVSLEDIQKNIRELELDDTRKKELASALHAQFKDWLYASGNIRQLYCLQGE

SEQ ID NO: 48229 - protein, 232 aa, Oryza sativa
MAPGLQRFTDIAGDGGPRLDAASGEELLRMDRAASVALGRRAPEPPGTLFVTTRRVIWLSETEKGQGYAVDFLAITLHAVSRDLEAYPSPCIYTQIDAEDGSDEEAGGSDFEANGDLQLAKVSEMRIILSDPGQLDALFDVFCHCAELNPDPNAVRNEENGWSGGENMAEGGWIHGDEDMIDGNDLEAHMFFTNLIGQNGLHDLGRSVRELQIDDQRFEDAEEEDEIQENGH

SEQ ID NO: 48230 - protein, 711 aa, Oryza sativa
MLPTPRRVKNKAPAPVQLTAEHLIREARELHGDGSVTVCLPAESKKRRIVDADELAEHRLERRARFEAIVRRAGSGRGGCGDASSEWMRYARWEESPGGGGGDPARARSVYERALAGGAPAYRDHGVWIKYAQFEARGGRVGHARNVLDRAVAILPRADRIWSEYLRMEDLLGATDNARVVFDRWTSWRPGADAWAAYAAFELRHGELDRARAVHERHVAALPCADAFILFAEFETKLKNLDRAPRVYEHAGSLLAAAGDNDDTAVLLAAFADFEERCGEPDRARAIYQHALRGEPPEPRAEELREKLLSLEKRFGDRHGVEDSIVTKRRSQYERAVTTNPLCYDAWFDLIRLEESANTGDANRIRDLYRRAVANVPPAAAAAEKRHWRRYIYLWINYALFEELDAEDVARARGVYRECLRTIPHKKFSFSNICVMAAELEIRDKNLAAARRLLGNAIGVAPRPKLSRRYIEIELQLGNVGRCRILSQKFIEHAPSSSHVWRSYAALEKKLGETDRARSVYDLAVSQPALDAPELVWTDYIQFEIDAGELDRARQLYERLLGKTQHLNVWVSYAEFEATACSGGAAIAGNAAEKAERVRRCRAVCRRADEHFRGCADDPAMKEARAMLLQQWLAKEAAFGDLGEVEPVEKKTPRRVKRKRSLLADGNGGGGGCEEFFDYIFGDEEDATAAAGFKLMKAAYEWKNSGHVITY

SEQ ID NO: 48231 - protein, 571 aa, Oryza sativa
MEGALLCAANHAPLTPITFLDRAALVYPDRPAIVASSSGLTRTWRETRDRCLRLTAALAALGVHRHHVVAVFAQNIPAMCELHFGIPMAGAVICTLNSRLDAAMASVLLRHSEAKLIFVDCALLDVAHDAIRRISQSGATPPVLVLISELLDDPSDAKLPSGRVDYEYEHLVGNAGSSPEFAVRWPADENEPIALNYTSGTTSRPKGVIYSHRGAYLNSLAAVLLNDMASTPVYLWTVPMFHCNGWRMAWGVAAQGGTNVCVRRVTAATIFDAVARHGVTHMGGAPTVLSMIVNATAEEQRPVARRVTVMTGGAPPPPKVLHRMEEQGFLVIHSYGLTETYGPATVCTWRPEWDALPAEERARIKSRQGVHHHGLEVDVKDPATMRSVPRDGKTMGEVMLRGNTVMSGYYKDGAATAEALAGGWFRSGDLAVRHEDGYVKVLDRSKDIIISGGENISTIEVEAALFSHPAVEEAAVVGRPDDYWGETPCAFVKLRPGAAAAAKAGVVEEELMAYCRARLPRYMAPRTVVGVEEGLPKTATGKVQKFELRARAKAMGTVPAAAAAKSKRSKL

SEQ ID NO: 48232 - protein, 136 aa, Oryza sativa
MWSAARGLRPSGGSDVGDGRAGLMWWQGRADEDRRSGINTAAAVAGALGTGHGHVNPMWQQLPRRRRPCKFVLRKGSMRCRLHICENDGGWLCCKVCAIHSTIHSTMHILQLGIMIFLLNNYHYVSQKKVCSIYCQ

SEQ ID NO: 48233 - protein, 129 aa, Oryza sativa
MGDRHRCLLSAPPSPSTATVAAATGSQNRRRRHRNRFDFSPFLLSCIFRPPKTLSLPKKSPNRRRLLGLREVAGCWVYGRARPAGDLDCRIGRGSRPAVGGSGRAACRSSSRPWLSRGRPSCCMLWLWL

SEQ ID NO: 48234 - protein, 167 aa, Oryza sativa
MEDLQGWSGHRRFIRVMPNTRSAVGQAASVMCLGEMATENDENRVRSLFSAIGKVWTAEEKYFDAVTGLSGSGPAYIFLAIEAMADGGVAAGLPRDLALGLASQTVLGAATMVNKTGKHPGQLKDMVTSPAGTTITGIQELEKGAFRGTLINAVVAATKRCRELSQS

SEQ ID NO: 48235 - protein, 160 aa, Oryza sativa
MFFTYIIWYCESDCTLDLPIFYSFNSHFSLEILNINCYLSSYVKNVIGIYCITLYYICASIFLKLSFVHKSDRRLKLFQAMVYLISLVAILVSLIAFSVTRHNIYLYMGLSSVLLIAIYTGYFRRRIRKQFNIRVRISWHYHFSFKALKQVVIVQPSISA

SEQ ID NO: 48236 - protein, 198 aa, Oryza sativa
MPTVRRRHPDVHVKALEGIVSANTFFTVAVFIGITGTITPSSSIPPNCVAGDDIASNFFLFEILSFGFYLLSSLVAQGMKLAVTLLATDDFYGDGEQKPPPSDDCEEMPAWRAAAPRERRRAVLRFARPMMLLAAGCSIMGTFFLLLSMVDAIQLKFGLVSCNIPLAVGTTFALAVLVVAGLVFYGATVAYALTHYLP

SEQ ID NO: 48237 - protein, 269 aa, Oryza sativa
MGSLTTNIVLAVAVVAALVGGGSCGPPKVPPGPNITTNYNAPWLPARATWYGQPYGSGSTDNGGACGIKNVNLPPYNGMISCGNVPIFKDGRGCGSCYEVKCEQPAACSKQPVTVFITDMNYEPISAYHFDFSGKAFGAMACPGKETELRKAGIIDMQFRRVRCKYPGGQKVTSHVEKGSNPNYLAVLVKFVADDGDVIQMDLQEAGLPAWRPMKLSWGAIWRMDTATPLKAPFSIRVTTESGKSLIAKDVIPVNWMPDAIYVSNVQFY

SEQ ID NO: 48238 - protein, 192 aa, Oryza sativa
MVVRRLGGAGRALLSRQALSLPNLRRRASNSWAAVRDTFFSTKEVFESHRVVFTVGTSIASVLTAWAGYSLRHMQQSRIDKRLNSIEQSLKDTHKVEHEEIKKIVTSSNISTPACVATALTTSVVGYALGWRGGAWYARRGFRREQQKLMGQINSHHRWHWRPFSKLKNRLRRNRPAAKTVEAPRLTGESTI

SEQ ID NO: 48239 - protein, 287 aa, Oryza sativa
MNDPMMRPPAQQPPLQYQMWPPPPPPVMELPVVFVGVKPVRPAWKRVARQPGWKQRKAAASAAAVGARWGGAAAPRNTTSYLIRAKRAGGVASLVSPCPVTPAVLPTPQLSPAREVVVEMAKEKWGVDGYGSMKGLIRLRSQAADAGGLPGEDSGSGESDVEEHVEVERRLDHDLSRFEMVQLPVAAGDCEDDEDDDDGDEARTARLEEENLTLRERLFLMERDMDDLRRRLLAVETLCRDRHRDGCVVDAAGVVAEGTVLSESVAGADLAGVGDDDGDTAADAMKA

SEQ ID NO: 48240 - protein, 515 aa, Oryza sativa
MPGAAVHAVDPRGGASPPPVAKAEAATAAAAAAGGCEPARKAGAVTMEHVLLALHETEAEREARIREMFAFFDVDGRGQLDYAQIEAGLAALQIPAECKYARELLRACDRDRDGRVGYDDFRRYMDDKELELYRIFQAIDVEHNGCILPEELWDALVKAGIEIDDEELARFVEHVDKDNNGIITFEEWRDFLLLYPNEVTIENIYHHWERVCLVDIGEQAVIPEGISKSVNASKYLIAGGIAGAASRTATAPLDRLKVIMQVQTTRTTVMHSIKDIWSQGGMLAFFRGNGLNVVKVAPESAIRFYAYEMLKEYIMKSKGENKSEVGPSERLVAGGLAGAVAQTAIYPVDLVKTRLQTYSCVDGKVPSLGALSRDILMHEGPRAFYRGLVPSLLGIVPYAGIDLAVYETLKDVSKTYILKDSDPGPLVQLGCGTVSGALGATCVYPLQVIRTRLQAQRANSESAYRGMSDVFWRTLQHEGVSGFYKGILPNLLKVVPAASITYLVYEAMKKNLSLD

SEQ ID NO: 48241 - protein, 168 aa, Oryza sativa; identical to SEQ ID NO: 29296

SEQ ID NO: 48242 - protein, 118 aa, Oryza sativa; identical to SEQ ID NO: 30163

SEQ ID NO: 48243 - protein, 687 aa, Oryza sativa
MKPLGAHGADLLCGPRVLRAAALAFACAAAFLVGYHWSDSSPRLLFFSSTASSSSSPLLSTGSPSVAVSPNANLSFDPSLIPTPAASTPPASPTANASPPPSLPPPPPPLRPPPPPARLGIVGEDGAMRDDFDVVVGGANDTDLAATDEALPQEPTDAGPAVGSRVRIGRFPVCPESMREYIPCLDNEEEIRRLPSTERGERFERHCPAKDKGLSCLVPAPKGYKAPIPWPRSRDEVWFSNVPHTRLVDDKGGQNWISKAKDKFRFPGGGTQFIHGANQYLDQISQMVPDIAFGSHTRVALDVGCGVASFGAYLLSRDVLTLSIAPKDVHENQIQFALERGVPAMAAAFATHRLLYPSQAFDLIHCSRCRINWTHDDGILLLEVNRMLRAGGYFAWAAQPVYKHEEAQQEAWKEMEDFTARLCWELVKKEGYIAMWRKPLNNSCYMNRDPGVKPALCDPDDNPDDVWYVNLKACISRLPENGDGLTPFPWPARLMEPPKRLEGVEMDAHSSKKELFKAETKFWDDIVEGYIRVFKWRKFKLRNVLDMRAGFGGFAAALINRKLDCWVMNVVPVSEPNTLPVIYDRGLLGVAHDWCEPFDTYPRTYDLLHAFSLFSKEQKRCNISSILLEMDRILRPGGRAYIRDLKQVVQDVKEITTAMGWRSIMRDTAEGPYASRKVLMCDKPMVR

SEQ ID NO: 48244 - protein, 432 aa, Oryza sativa; identical to SEQ ID NO: 47889

SEQ ID NO: 48245 - protein, 534 aa, Oryza sativa
MRGAIAAAVCAVLLLLVGGNGGGWSAMAAATMEEDRIVALPGQPNVSFAQYSGYVTVDAARRRELFYYFAEAELDPATKPLVLWLNGGPGCSSVGVGAFSENGPFRPSGNVLVRNEYSWNKEANMLYLESPAGVGFSYSTDPSFYGGVGDSRTARDNLRFLQGWFAKFPQYKGRDLYITGESYAGHYVPQLAQRMVEFNKKEKLFNLKGIALGNPVLEFATDFNSRAEFFWSHGLISDSTYHSFTTVCNYSRYVSEYYHGSLSSACDTVMTQVARETSRFVDKYDVTLDVCVSSVLMQSKSLAPQRGSRELDVCVEDETMGYPEPEGRAGGDARPPRRRRAQVDGLQQCSGVQAAGPADPDHQHRRRPRQVGRPGAGVQRRPGLGDPADGEQDGGAAAGGVAAAGDDGGGVQGVVRRAAGGRVDAVVRRRRAVVRHGEGGVARGPLLPARALARPLRRLPRRPPPSRLLPVTSSRTTMITSHVKRGGALLLRCKCVRAISCAPPLYIVLRIVAGNRIVSRRKSHLENADVGWGR

SEQ ID NO: 48246 - protein, 332 aa, Oryza sativa
MEESRLSHCRSKTFQLKYRTASFSEVSTMVHSGITEASDAGQRVILPSSYIGGPRYLYQNYLDSVALCRKYGCPDLFITFTSNSLWSEVTQALAIIPGQHSADRPDIINRVFHVKLHLFMDDIVKKKFFGPVTAVVYTIEFQKRGLPHVHIILWLDKSGPLTPADIDRLISAQLPDPSIDRVGYDAVAAFMMHGPCGDANPHCSCMVDGKCSKNYPKEYSEKTTILPNGHVRYARPKNDIIVAKNRISLDNRHVVPHNIDLLVKYEAHINVERVNRDGMEKYLFKYVAKGFDCSRVSLKRKRACAGTNEIHDYLECRCIAPNEAAWRLNVDV

SEQ ID NO: 48247 - protein, 290 aa, Oryza sativa
MEDERNTESHQGGEAAEQVEVKDRGLFDNLLGRKKDDQPEEKKHEEELVTGMEKVSVEEPKKEEHHAEGEKKESLLSKLHRSSSSSSSSSDEEEEVIDDNGEVVKRKKKKGLKEKIKEKLPGHKDHAGEHAPPPAATGFPAPAPPASVVTAAPTPAPAPVVTHGDHHHDTAVPVEKIEGDHAKTEATLPRAPEEEKKGFLDKIKEKLPGGHKKPEDATAVPPPAASPAAPATTPAPAHPPPATEEVSSPDGKEKKGILGKIMEKLPGYHKGSGEEDKTAAAATGEHKSSA

SEQ ID NO: 48248 - protein, 304 aa, Oryza sativa; identical to SEQ ID NO: 32873

SEQ ID NO: 48249 - protein, 414 aa, Oryza sativa
MTSEENKAVAHNEPLPMEQTLSSGAKRKRGRPRKYEYGMHELPYSVQHIQSVPPLHSTQDSSNIRQDGIQINHTSGGSFGPNIGTIQALPTKQGPANRSSGPRDSVNLVKTSLSQASIYTSAPLQGNSVKDDIVGKYFVGKMSKKFPGFSLITVKVKDNQVLKGWIPDENNLRPITPKDDLAPDLPMLRPSQVRKRPSTVYRQASGPIPVPLEDVTFAKPLQMRRPVEKSFTKHTVPSVPRPHMGSGVVAAVPISVSPSNAESRIFSEQGTEHVNPQPLSAVVPIKSGQPVLASCKEVAGGKTVNEIQTVSESSKHTEESSGERHLLNVPVMDAIKESLGPKEQPNATNSKQQTFMEPPESTEQAVQLDTERDISKGADDSKSEASGGTAPPVEASTAVHNPQDDSHEMKVDNK

SEQ ID NO: 48250 - protein, 250 aa, Oryza sativa; identical to SEQ ID NO: 30970

SEQ ID NO: 48251 - protein, 281 aa, Oryza sativa
MSAAAAAAASSPAPRLESKVALVTGGASGIGEAIVRLFREHGAKVCIADIQDEAGQKLRDSLGGDQDVLFVHCDVSVEEDVARAVDATAEKFGTLDIMVNNAGFTGQKITDIRNIDFSEVRKVIDINLVGVFHGMKHAARIMIPNKKGSIISLGSVSSVIGGLGPHSYTATKHAVVGLTKNVAGELGKHGIRVNCVSPYAVPTALSMPYLPQGERKDDALKDFFAFVGGEANLKGVDLLPKDVAQAVLYLASDEARYISALNLMVDGGFTSVNHNLRAFED

SEQ ID NO: 48252 - protein, 257 aa, Oryza sativa
MGSLFQAGSSFYGDYILDFNANCERCVVSLSFYKDNDEEKKETYFATGIIFASGKRSCCVLTTIDDASKRKDESCVVKFFDGTSKIIDWKRIKVRPEFKCATIYIHNIDMIHGATVTFSDQEIDHSQKVFTVGYNTNQRDRTFISGNLVNGVGIRNKDAIVFVHGCSTGNSGHLGSAVFNENKNLVGMNVSYTRSRGTHYISSSSTSTSDYGGIVSALNLQSIQLGLSLLYKKEGETIGEIVRHVNAVLLNSEKEWA

SEQ ID NO: 48253 - protein, 838 aa, Oryza sativa
MGKHSAESGTSMLLHGDLDIQIVEAKCLPNMDLMTERMRKCFTGYGACSTECGKSDPHTDVRKIITSDPYVSVCLSGATVAQTRVIANSENPKWDEHFYVQVAHSVSRVEFHVKDNDVFGAELIGVASVPVENITPGDTVSGWFPISGQYSNPMKASPELHLSIQYKPIEQNPLYKDGVGSDGCQSIGVPNAYFPLRKGGMVTLYQDAHIPDDFCPKIEIDGGRVYEQNKCWEDICHAIAEAHHLIYIIGWSLYHPVKLVRESTKPVPNGSPPTLGGLLKTKVQEGVRVIVLLWDDKTSHDKFLLKTDGLMHTHDEEARKFFRHSGVHCVLAPRYASNKLSIFKQQVVGTLFTHHQKCVIVDTQVIGNNRKITAFIGGLDLCDGRYDTPEHRLFKDLETVFKDDFHNPTFQVNKSGPRQPWHDLHCKIEGPAAYDILTNFEQRWRKSAKWKVSVRRAVSWHHDTLVKINRMSWIVSPSADELNARVCEQDDPENWHVQIFRSIDSGSVKGFPKLVQEAESQNLVCAKNLQIDKSIHNAYVKAIRSAQHYIYIENQYFIGSSYYWSSNRSAGAENLIPIELAIKIARRIKARERFAAYIVIPMWPEGNPTTAAMQEIIFWQGQTMSMMYKIVAEALQKEGLDDTHPQDYLNFYCLGKREVSNDVSTTSQSNENSPQRLVQKFKRFMIYVHSKGMIVDDEYVLIGSANINQRSMDGSRDTEIAMGAYQPHYSWAGRKKAPRGQVYGYRMSLWAEHLGTVEECFRWPHSVECVRQVNEMAEENWARYVSPEMVNMRGHLMRYPINVERDGRVGPVHGYECFPDVGGKVLGTHSSLPNALTT

SEQ ID NO: 48254 - protein, 65 aa, Oryza sativa
MAGLLKRLLVALALAVLMFTATAVAGHPAPAKKHGHTPAHHHPAKKHGARKHGGHGGHTKPHHRM

SEQ ID NO: 48255 - protein, 266 aa, Oryza sativa
MMSSAPETFSLDHLSQHQQQQPPPLAEQEQLCYVHCNFCDTILAVGVPCSSLFKTVTVRCGHCANLLSVNLRGLLLPAAASTANQLPFGQALLSPTSPHGLLDEVPSFQAPASLMTEQASPNVSSITSSNSSCANNAPATSMASAANKATQREPQQPKNAPSANRTSEKRQRVPSAYNRFIKDEIQRIKASNPDITHREAFSAAAKNWAHFPHIHFGLMPDQGLKKTGIQSQDGAGECMLFKDGLYAAAAAAAAATAASSMGVTPF

SEQ ID NO: 48256 - protein, 122 aa, Oryza sativa
MPCSAAPSSDACPGPDTAVRRRMSSTASLSLSFLPVPLSSSSSSMVRGSVRRQRVGRSNIQSAIGSGEGRRSARRCRLEVGCWRRPQRGGVGRWAQEANASSLREDGVGTEFSKARSRSGGA

SEQ ID NO: 48257 - protein, 295 aa, Oryza sativa
MSQIQSFSRQNCVLLAVLCGKHAEKRAQARSGLEAKRLRPSYPFPELSSSGRLEVHTLFNPTPEQFLEAQRVVQPNFLYIQGQQLEDEKEIGSLVWGDNDVSDPQAFSCLISPPFPTIVYLEVPIGEKLAQAVHSKGIPYVIYWRNSFSSYAASHFRHALMSVVQSSVSHTWDAFQLAHASFRLYCVRNNHVQSVKLGPRLLGDAPKINITPPENEMVEEEGSSDVFPAIKIYDDDINMKFLLCGVPSTPDPCLLGSLEDGLNALLNIEVWNKALQLYCTLIIFYGPWSKFYTIS

SEQ ID NO: 48258 - protein, 262 aa, Oryza sativa
MMSGVGGGRSGGRDAEGEWEVRPGGMLVQRRDGDTGPAVRLRVSHGASFRDVAVPAHSTFGELKGVLTQATGVEPERQRLFFRGKEKSDNEFLHTAGVKDGAKLLLLEKPAPANVEQRAEPVIMDESMMKACEAVGRVRAEVDRLSAKVCDLEKSVFAGRKIEDKDFVVLTELLMMELLKLDGIEAEGEARAQRKAEVRRVQGLVETLDKLKARNANPFSDQNKSVSVTTQWETFDNGMGSLNAPPPRVSSTQINTDWEQFD

SEQ ID NO: 48259 - protein, 1066 aa, Oryza sativa
MGVISRKVLPACGSLCYFCPGLRARSRQPVKRYKSILAEIFPKTQDEEPNERRIGKLCEYCSRNPLRVPKITVSLEQRIYKELRSEQYGFAKVVMLIYRRLLVSCKEQMPLFASSLLSIVHTLLDQKRQDDMRIIGCETLFDFAVNQVDGTYQFNLEGLVPRLCELSQEVGEDEQTIALRAAALQALSAMIWFMGELSHISSEFDNVVQVVLENYRPQKMQNDGQVTKDSSDQLEQEAPKTEDSKAEDSKTEDSSPFVISAVPLWENIVNVKGGVNLTVEEAKDPKFWSRICVHNMARLSREATTFRRILESLFRYFGNNSSWSPENGLALCVLLDMQLLVENAGQNMHLMLSLLIKHIEHKTMVKQQEMQLSIVEVAATLAEQSIAQASAATIGAISDLVRHLKRTFHITLGSKDSELVKWNEKFRKAIDDCLGQLAKKVTDAGPVLDMMAVMLENIASTPVVARSTAAAVYRTAQIIASVPNITYQNKVFPEALFHQLLLTMIHPDHEARVAAHRIFAIVLVPSSVAPSIQASVSGQAKKHDMQRTLSRAVSVFSSSAAIFDKLKKDKHSDNSQGDSSGLHSISEESSNAKRSNLPVSQSRRRSMKIPNFSMKRGPSMAMRAPSVALRAPSISLRVTSMSLRAPSMSIKADHGSSSHPEDEMESVLLKLSSRQITLLLSSIWAQATSPENTPANYEAIAHTYSLLLLFSGAKASVFEALTQSFQVAFSLRGYSLTEPDSLPPCRRRSLFTLATAMIIFSSRTFNVLPLIPICKQMLNERTGDPFLRLVDECKLQAVKDSVDDPSKIYGSPEDNTNALKSLSAIELSESQSRECIVSTIMNNITNMLEAELNSVKNQLLSDFSPDDMCPTSTHFFEATGDNSSPGSHDNDHHPEAVLIDLGNDHDIFGEASESTAASANAVPVTDLLSIDQLLETVVTDPAPHTERVSVSTDMPFKEMSSQCEALTVRKHQKMASFMSFSQDMTMDPMATNQPFQTDLSLFHDPYPPQVGVPNTNPFVDDNLYGYPQYMNMNEANPQPTYEQAQQHFLRLPASSPYDNFRRAAGC

SEQ ID NO: 48260 - protein, 148 aa, Oryza sativa
MRASFEAFLMVLLAGGGDRSFARGDHAMVEEDFRSLRRAFCTCGEGLVPEEVVAREAEAAERVVELMARPTDALIDAFGVATSESIVAAVGRGGDDGDGGYGGVTPVPPTSRRWDAADANTILRVLCHRDDEAASQFLKRTFQLAKRR

SEQ ID NO: 48261 - protein, 420 aa, Oryza sativa
MDRASENRRLAAVGKPVPGIGEMGNRRPLRDINNLVGAPPHPSAIAKKPMLEKSGKEEQKPALVVSHRPMTRNFAASLTRKEQLDHQVSVADAAVVCTDPQKNPIPDGTVDDDVESCESNDYIAVDECNDTDEDESMMDIDSADSGNPLAATEYVEELYKFYRENEEMSCVQPDYMSSQGDINEKMRAILIDWLIEVHHKFELMDETLFLTVNIVDRFLEKQVVPRKKLQLVGVTAMLLACKYEEVAVPVVEDLVLISDRAYTKGQVLEMEKLILNTLQFNMSVPTPYVFMRRFLKAAQSDKQLQLLSFFILELSLVEYQMLKYRPSLLAAAAVYTAQCALTRCQQWTKTCELHSRYTGEQLLECSRMMVDFHQKAGAGKLTGVHRKYSTFKFGCAAKTEPALFLLESGAGGYNLQKQPC

SEQ ID NO: 48262 - protein, 137 aa, Oryza sativa
MFDNDLSLGNIVVTFNLGKPQIENKWTSSAIKVYREAISTGLLPSSDVLSQVLGCLRFPHDNTLTNTFIENMGISCDIPHHPNVNSLLEGFGEYDIRAFSILEEAASLGAVESISMKDTRILVDARKSKIYTAEVFC

SEQ ID NO: 48263 - protein, 237 aa, Oryza sativa
MSTLDATRAELGLVVLYLNKAEARDKICRAIQYGSKFISNGQPGTAQDVDRSTTLARKVFRLLKWVNDLHGLISPPAKGTPLTLVLLEKSKNALLSTFLFLDQFVWLGRTGIYKNKERTDRIVRISLYCWMASSVCAGLVELGELKRLSKSMRKLARELRDTDKYENDQYKSKMKQSDERLLALVKAAMDVVVAVGLLQLSPKKITPRVTGAFGFVTSLISCYQQLPSRAPAIKVKA

SEQ ID NO: 48264 - protein, 142 aa, Oryza sativa
MTTLGKRHRNNSSMRRTTSMSGFAVAEEEEQQGRQPPARAARGGGGGGSAAPSPGWGAMQRRHSGDFAVAETAAFLKACGICNRRLGPGRDTFIYMGEVAFCSHECRQQQMNLDELNEKKCFQREGGGGSDKSGNSGAVAAA

SEQ ID NO: 48265 - protein, 284 aa, Oryza sativa; identical to SEQ ID NO: 30613

SEQ ID NO: 48266 - protein, 570 aa, Oryza sativa
MFSPNFELDLQSWNPKLQDDVSLTVPLIQDKKSGSKAPAVVLGFECLECTAFNGIATNLVVYLETVLHGSSLASASNVTTWFGTSYLTPVFGAIIADTFFGNYNTILVSLVFYLLGMVLVTFSAFLPTTALCAVAGSTSCQQPVFGAQTIAFVGLYLVAFGSGGVRAALLPFGAEQFDDDNAVDRERKMSFFSWFYMCVDFGMIVSGLFIVWIQQNVSWGLGFGIATVCVAIAFGGFVLATPMYKRSMPTGTPLKSLAQVVVAACRKVSLRVPADAALLYEVHDKIDQPKITHTDEFSFLDKAAVIVQSDLEEDSNDASAAAAGSWRLCTVTQVEELKILMRLLPIWATSIVLSAAYAQLNTTFVQQGAAMNMRIMSFTIPAASMVSFEVFCVLAWVLVHGSVIVPLLRSFSPANGEPSQLRRMGAGRLLIAVAMAIAALVEMVRLDAAARGESLSIAWQMPQYFMLAGGEVFCYIAQLEFFYSEAPESMKSICTSLALLTVALGSYMSSFIYAVVNAFTAVDGRPGWISDNLNEGHLDYFFWVMSALCTLNFVVYSAFARNYKVKTVVS

SEQ ID NO: 48267 - protein, 303 aa, Oryza sativa
MGAEEEEEPASAVGREGGGGGGGARAAGAGAGGDTADDDDSGESAAAVVPCSICLDAVVAGGGDRSTARLQCGHEFHLDCIGSAFNAKGVMQCPNCRQIERGNWLYANGSRPSQDVSNDDWGHDEDFYDANQPETSRSVFLPFRFQWCPIGRLAQLPSVFDEGESAPPVTFHDFMGQNFTSEHLPVSAPGATPPGPYIAYFQPLQSSASSSSSHVTERTMDGTTYHDHWNPLPGPSDGRPLATVHPIDFHHNHWTHLPNSYSQPNSNNGVAEQMAIPVVPMRVGGLDSDSQQRGSLPSVYGNG

SEQ ID NO: 48268 - protein, 380 aa, Oryza sativa
MFAVGPYANEPQLVSPPVFSTYTTEPSTAPLTPPPELTHATTPSSPDVPYARFLFSAMDLKTAGKDHNMPYLSTAYSGGSGLQASYPLYPESPSSSLISPASATPRTGLSSPIPEQEVPTAHWKTSRSACDTPYSRASPIPEQEVPTAQWKTSRSACDTPYSRNSPSNIFGLDSAASRNYMLDNNFFRPAASAQFYLDQAQQSFPYNNGGRISVSRDKQDAEEVEAYRASFGFSADEIVTTQAYVEIPDALDEGFSISPFGNNAPATEVDKPLFNVKVTTSPKKSADQLSNDSPHNVVHLDIFKGTKGGDLSEDEGVVKDCHPFRKAMDEISLKPIEVRKKVQPGQSSSSDAEIEYRRARSLREANGVLSWRSTLARQLQ

SEQ ID NO: 48269 - protein, 579 aa, Oryza sativa
MKALRRSSTSSSPSSSSSSPTAASSPPSSSWIHLRSLLVAAASSSSSASSSAAAGSSVAMVSASAPAASSSPSPSPAPAPAPSSPHSDRGGIKSPWSRRKRKRVLSRQQWEGLFSANGKLRDRGKKFLKKVRSGGIEPGIRAEVWPFLLGVYDLNSTEDERNTIKIKKRKEYEKLRRQCQQILNCYKGNGLKVINENNEECSGIEFSAEGSESPCFEDVNIARASVSHEELKPESEPEQPDNSMCAVTECMEEDTGELICLDPCIAESESSDSESSDEDDPGRISMSGEENCDPDPKFTRTTSFKADFFKSSKTSEDFATWQRIIRLDAIRANTEWILFSRNQAEISRERALQCAESVGLRDYDHLDPSMIYHAARLVGLLEAYAVYDPEIGYCQGMSDLLSPIIAVMEEDDEAFWCFVGFMRKARHNFRLDEVGIRRQLKIVSQIIKRKDSHLYKHLQKLQAEDCFFVYRMVVVLFRRELTFEQTVCLWEVMWADQAAIRAGIGRSTWAKIRLRAPPTDDLLLYAIAACVLQRRKLIIEKYSSMDEILRECNSMAGQLDVWRLLDDAHDLVVNFHDKI

SEQ ID NO: 48270 - protein, 196 aa, Oryza sativa
MLRRRLSDTSAKIGVGPNRAAVATSMLRKYGAQIGVAILDDGMQHLSLLRDVDIVMINALNPWGNKHLIPRGPMREPLTALTRAHILLIHHANLVSQPQLKTILSTVHDNGATCPVFFSKLVPSHIFQVNQPMHRLPLHVLHGIIVLCVSAIGCPDAFIHSVQEVFPPFLFLSLCLQTFVLVLPIIKYGTMVVVRL

SEQ ID NO: 48271 - protein, 306 aa, Oryza sativa
MAIYTPTVCLQRCTYSLYSQSCQLQGGLTQGMALWKYSRSQAVGYHVKIRLVGLPPKMNIKSLRTCFASSGKQLCGRQPARDNILKLKLDEPSRQKLYSILWDSRSIGHKVGATGTGLFLSFAVPAKANAEGPVDNNTDSPQTTESSTSYAHGKKVCTDYSVTGIPGDGRCLFRSVAHGACIRSGKRPDDDLQRKMADDLRAMVADEFIKRRAETEWFVEGDFDAYVSRIRKPHVWGGEPELLMASHVLRMPITVYMHDKEAGGLIAIAEYGQEYGKEDPIQVLFHGFGHYDALQIPGKGGPRSRL

SEQ ID NO: 48272 - protein, 397 aa, Oryza sativa; identical to SEQ ID NO: 43864

SEQ ID NO: 48273 - protein, 788 aa, Oryza sativa
MVTASVLMFVLAGFFFILNLFGGLSNVGAILSPRVRLLFTSLLSLFLLVMSYLLSEAKNTAKELDQVTTVIGIGRASSTDLPFMAGVILTWMLLVELIRKKVDEIAMKGYSGTIHRAGRVVWLGSLVFVNIRSAGRKAVFGVLWVLCATKVVQRIAFTEVGKRSYACGKNPWIITSYMMSTSPSLPAQGDAMLKGCRYIVTGEEDARVEATADGYKLKEDSKSSLVTVGKIWVEQGLPGTGNNGGDEKAELKRLCLSFALSKLLRRRLEQLPVPEPEMSSAETSECRDVIFNGLYKSGDAVAVFEVMNSEINFLSEYYHSVVPVVLASPFFFVANYFLLPVVVLCVCVMTIILCGGGDVLYAFRSIKTDNFTISSGIFDTTMCLLLTAHHSAAAFFATINFAVTFLLYIIYIYEEVWELFVFLLSNWFAVSLLSAYVAKTRFCDNSAFRAFARCILSVRTWLGFHLHPQDMINQFSALDLRWPPLTLAMPIPLITLLVSTKPVPVPVPVKHSILLSSLASASASASTKSALASFDELKTACENGSIAEVILICHIATGLLERLNPPPDPEVMTTESDSKRMSCCGCPNKKKKNTSSDNFTVATTLSRYCAYLVAFQPELLPDYHEKAEDLFKAMKMELKDRLGCYNYYFSCGRERADAIINNINSKNNNKEGTVDKGAELANKLLEKYTNDHDSMWTLLAEVWTEIIVYVAPSNEERTIMAHKNVLWQGGEFITVLWALMTHTGITRHRRLREIALKISQDDASTSSSQQKSAPDRIDKQHEIDIHRH

SEQ ID NO: 48274 - protein, 338 aa, Oryza sativa
MAAPSKPQHGAIGPVPFKDVIGDAMAQRSSPEEEYAGVVSSLPSYPKLRLRHYQGMWLMEYTLPGIMAIQRSFVPRRHGDVVLASPGKCGTTWLKALAFAVLARGAYSPASDRHPLLRLNPHDCVPFMEGAISEGWGGKIDELPSPRLMSTHMQHAALPKSIADEPGCKVVYICREPKDILVSAWHFFRIIEPDLSFQEVFEAACDGKFLTGAIWDHIIGYWNACKANPEKVLFLVYEDLLRDPANIVRKLADFLGQPFSSTEEEAGLVTDIVRLCSFENLKSLEVNKMGEASFAFPNASYFRKGKAGDWKIHMTPEMVECFDTIVKEKMHGSGLVFA

SEQ ID NO: 48275 - protein, 97 aa, Oryza sativa
MECISRYRSHGYTSNLSYTNWCNFYRSEGSLDLCIKRSTFMTTIKVTWRLEMDLLCSYLAGQRNIIILGEDVLCEESSKLCVHPIGPIQTWRRISCK

SEQ ID NO: 48276 - protein, 419 aa, Oryza sativa
MGIFCCFQSEDRGGDGDGDGDGAPPSTSSSGCSNSSSSSKKKNLASERSLGGSSRDNNSNLVNLVNEIVAESVTYRHKRVADEILKIGKGKVTARAFTYGELSEATGGFRAESLLGEGGFGPVYRGRLSIKGTVTEAAVKQLDRNGMQGNREFLVEVLMLSLLAEHPNLVTLLGYCTDGDHRILVYEYMARGSLEDHLLDLPPGAAALDWTTRMRIAQGAARGLEHLHDAARPPVIYRDFKASNILLDSSFQARLSDFGLAKVGPVGDKTHVSTRVMGTYGYCAPEYALTGKLTTCSDVYSFGVVFLEIITGRRAIDMARPHDEQNLVQWAAPRFKDKKLFADMADPLLRGAYPTKGLYQALAIAAMCLQEDATMRPAISDVVTALEYLTVAGASSEPAPRPQKLQPPEDDDDDQRPAA

SEQ ID NO: 48277 - protein, 260 aa, Oryza sativa; identical to SEQ ID NO: 30722

SEQ ID NO: 48278 - protein, 244 aa, Oryza sativa
MVSLQSALLLPEASRRPPRPTCLPLVDSVASTATSKKRKRAGVDDVGEGESGEVGIELCFDAAPLPLEWQRCLDIKSGQIHYYNTRTHKRTSRDPRAEAPPAPAPESHHRRAAPAEEEEEEEAANYCAPPLGLDLELNLTFEPRRVPIQEAKKHRSSAVETTTKPAAAVAAEKLALELPAGGASREMVAAVCARCHMLVMMCREWPACPNCKFVHPTANQSSPPPPPPEPAPLKLGLQLLCCKD

SEQ ID NO: 48279 - protein, 322 aa, Oryza sativa; identical to SEQ ID NO: 31887

SEQ ID NO: 48280 - protein, 292 aa, Oryza sativa
MSREENVYMAKLAEQAERYEEMVEYMEKVAKTVDVEELTVEERNLLSVAYKNVIGARRASWRIVSSIEQKEEGRGNEEHVTLIKEYRGKIEAELSKICDGILKLLDSHLVPSSTAAESKVFYLKMKGDYHRYLAEFKTGAERKEAAESTMVAYKAAQDIALADLAPTHPIRLGLALNFSVFYYEILNSPDKACNLAKQAFDEAISELDTLGEESYKDSTLIMQLLRDNLTLWTSDLTEDGGDEVKEASKGDACEGSKMGRSIDRWLRMLLETIDLDASCCCHHDGWILLLFY

SEQ ID NO: 48281 - protein, 193 aa, Oryza sativa
MSLSTIARRLCCSRPTSGGRLSAVWAHLYSTEAAKDTGAKKYKYPEVYDPYGPMSPPSQKVVDLADRIAALPPEEIKQIAPALLLRLNQPPPQAISGQGFSFSPQGGGGAAGAAKAEEKKAEKTVFDVKLEKFDAAAKIKIIKEIRTFTDLGLKEAKELVEKAPVILKQSLTKEEAEAIIEKIKVAGGVAVME

SEQ ID NO: 48282 - protein, 189 aa, Oryza sativa
MSTSSGPKEAPANNPGLQAPSEKDPATKGYFMQQTMFRVKDPKVSLDFYSRVMGMSLLKRLDFPEMKFSLYFLGYEDVESAPTDPVKRTVWTFGQRATLELTHNWGTENDPEFKGYHNGNSDPRGFGHIGVTVHDVYKACERFERLGVEFVKKPDDGKMKGIAFIKDPDGYWIEIFDLNRIGAVTAEAS

SEQ ID NO: 48283 - protein, 239 aa, Oryza sativa
MKNSIDAVSDRDFVLEFLAANSIAAVHLSRIGEEWVLWASEEFGFLTPSDSVSTGSSIMPQKKNPDPMELVRGKSARVFGDLMTVLTLCKGLPQAYNRDLQEDKEPLFDSVKAVLGMLEVCTEFAQNISFNSKRIQSSLPAGYLDATTLADYLVKKGVPFRTSHEIVGRSVALCVSKNCQLAELGLDDLKSVHPVFEGDVYEYLGVENAVNKFISYGSTGSEQVKKQLEDWRTQLGISS

SEQ ID NO: 48284 - protein, 489 aa, Oryza sativa
MPDQRPKRPSDSVAAASPAAKRARDPSAPAFPTYRDAPDLPPKIRLLCEILASSAPDVDAALDDADVRVTSSDVEQVLRFSYAHPRAAVAFFRWAGHRHLRHQHSPYSWNLVVDLLGKNRLFEPMWDTVSSMRTQGLLSLATFASVFSSLAANPASSPLRAFVELPMYGMDRDTPALNSLLSALCRASRLDDARAAIPVARAEAGTRPDADSYAILLEGCEAAGDPHVAREVFDEMRHVIGFDPANVPAYDSFLTTLISSGSSTALMDAMDYLAILHRQRCSPGEKFFRAALAAHLKARELRGAVVLWNDFVVRRGLIPDKEMYSTMIMLQGTLGHPEVIVEYLDEMTFDGVFPDADTYNMVFQFLLKGRKLREASAIFSEMVKNEFWPNEANCSLALRMFLDTRDWDSGIKLWKCMVENGLPPLEESGNMLVSKLKDERLPEACKYAEDMIDRCIKLSSSTMSKLKQCLMKVYKGHIHDHLLRKWKAH

SEQ ID NO: 48285 - protein, 604 aa, Oryza sativa
MSVIHAEDIEISLCDGNSEDERRRRRIGSNLRRKAIHAIKKRGRRRVDCRFPPAISIEDVRDAEEERAVAAFHDRLAAHGLLPDKHDDYHMMLRFLKARKFDIDRAMQMWADMLKWREEFGADTILQDFDFHELDEVLRYYPQGYHGVDREGRPVYIERLGKVDPNKLMQITSVDRYIKYHVQEFERAFRERFPACTLAAKRHIDSTTTILDVQGVGFKNFSKTARELINRMQKIDSDYYPETLHQMFVVNAGSGFKLIWNSVKGFLDPKTSSKIHVLGSNYQSRLLEVIDSSELPDFLGGSCSCSDKGGCLGSNKGPWNDPFILKLIHNLEAGCVREIKPVSDGEERSSSSLRLEQPKWQGMISDISNAESGSDVDDFGSFFQKGVDYGYLTPVHEEVRGTDSLTYYSCDDQTRRDIAPESCKGVQATGMVQNQLPDNRQPSTNRNPHDSGNNGHLDGAFARRSLQNYIQVVVTTFIKLLSFLRLFISRPVRRLENVHSCTVPVPSEEKPEPRSIRDDDMTMCLQRLDSLESLCNHLASRPPEIPREKEHMLLNSFERIKCIEADLERTKRVLHATVVKQKALVETLEAVQESSRARKRLFCS

SEQ ID NO: 48286 - protein, 192 aa, Oryza sativa
MEATTSSLLVRPVDTRLSAASLPIVVRARRRVAVVTAAAPERKPAAAASSSNYVVVPLDAAPSGITRPLVEILRDLNKRVPDTVVRSSRRRASPSDPVIPWYHANRMLSFYAPGWCGEVRDVIYTDNGKVTVVYRVTVRGTDGEVHREAAGTTSLNDARFDDPVAAAEEAAFCKACARFGFGLYLYHEDETP

SEQ ID NO: 48287 - protein, 472 aa, Oryza sativa
MHAKLHKKKNFFLKTHDFLPQVEKRADQTPPPPPPPPPHAAVTAEKQLLHQHALAAAGAFTINHAVAAAATAVKQEPPFAPWCQPVAAVDPRGHQWSLPFAARAVAVASSRPQQQQQQPPPPERKGGGGFMDAGSRSSGGAGFDDDDGHAARREVSSSLKELTVRVEGKGGSCSGSAGTDQMPNTPRSKHSATEQRRRSKINDRFQLLRDLLPHNDQKRDKASFLLEVIEYIRFLQEKVQKYEVSYPEWNQENAKVVPWTNIYFRSSWKNAQNKGQVPADHSPDPPELLKNGSPYMFPFTGNSDNNNAVETAAASGAQDQAETDPMSRVSYRSVDTPSHNNVADKVTSQPHAQLVRPSPAENHTVNCDKLNNSDLAIDEGTISLSSQYSQELLNKLNHALENSGIDLSQASISVQINLGKRAMKRSTPAATSTSKELTDPASNSQAMGRQLRLGDGAEEHRQASKRHKSDNS

SEQ ID NO: 48288 - protein, 522 aa, Oryza sativa
MSSTSGSAWDHSNNGGGGSPELREALLLGDGGSSPESREIKGIAVKKQDDLEEIRSVGELMRLAAEENRRLWYLAGPAIFTSLAQYSLGAVTQVFAGHLTTLELDAVSTENMVIAGLAFGIMYGMGSALETLCGQAFGAKQHHMLGIYLQRSWVILTAMSVILLPIYLFATPILRFFHQDDEIAVLASRFSLYMIPQLFAYALNFPIQKFLQAQSKVMAMAAVSAAVLLFHVALTWLLLVPLRMGLVGLAVALNVSWWLVVLGQLAYIVMGYCPGAWNGFDWLAFTDLLSFARLSLGSAIMICLEFWFYMFLIVIVGNLPNAQVAVAAVSICTNLFGWQIMVFFGFNAAISVRVSNELGAGRPRAARLAIAVVLVSSVAIGVAFFAAVLLLRDVYGAPFTGSPEVVRAVASLGVVFAFSLLLNSVQPVLSGVAVGAGWQWLVAYINLGCYYCVGIPVGYAIAFPLRRGVQGMWGGMLTGVGLQTAILVAITARTNWNKEASEAHARIQHWGGTAKLAVDDPI

SEQ ID NO: 48289 - protein, 81 aa, Oryza sativa
MDLNHDKDEMHGDKTICTTSYLLLFDRFIYMISMLLIYKCETNVYSNVILFSLIYIENMEIMKVYVLCWSTSLLHMPSLYV

SEQ ID NO: 48290 - protein, 224 aa, Oryza sativa
MGVRRRMDNLVGWVYGIIDVQIDRRRRRRIVCEPRKNDLLDVAFDMEGEVESEGWVMNQDTMRGMFMDLLVAGSGSTSSTIEWAMAELLQNPKSMIQLPEELKGLMGTKTHVAESDISQLPYLQAVIKETLRLHPTVPIAFNKAEATVEIQGYKIPQGTTVYVNIWAICRRAKIWDDLDKFMPYRFLGRDINFLGTNFEFIPFGAGRRICLGMPLAEGMLHACI

SEQ ID NO: 48291 - protein, 178 aa, Oryza sativa
MAVAARAAAVACLLVVGLAAVAGVDGATASSPAPAPAVDCTAEALKLADCLDYVTPGKTAPSRPSKLCCGEVKGALKDSAAVGCLCAAFTSKTLPLPINITRALHLPAACGADASAFSKCLAPAPSPSVAPGTSSGSGGAAAAPAKGAAAARSPMASTTAVLVVAAAVAAPLLAFFHF

SEQ ID NO: 48292 - protein, 194 aa, Oryza sativa
MMAKMGYREGMGLGVSGQGMLDPIPVKVLPPKQSLDHAVAASEVNDSVGPGKKRSRGGKRKREKKFAEQARAAKAEEEERSVFSFINSQLVGQDVAEGSAVKSKKDSSGEANGHAKKEDRRSLLAYDDEVKELRSRVEKLEEMMKRNRKDNAFYEAASKKLKQTRKALADAEATHASATNAVARKEKEKKWLKF

SEQ ID NO: 48293 - protein, 245 aa, Oryza sativa; identical to SEQ ID NO: 32037

SEQ ID NO: 48294 - protein, 210 aa, Oryza sativa
MASSPASSYDCSFKILLIGDSAVGKSSLLVSFVSASHIDDEIAPTIGVDFKIKFLTVNGKKLKLTIWDTAGQEKFRGITSSYYRGAHGIILVYDVTKRESFTNLADVWAKEIELHSTNKECIKMLVGNKVDKNEERMVTREEGLAFAQGSGCLFLESSAKTRENVEKCFEELALKILEVPSLLEEGSSVVKRNSLKQKHENKAKNGGCCQ

SEQ ID NO: 48295 - protein, 70 aa, Oryza sativa
MVSFLCLKTLWHAKHLKPETVLLRQANSHSSWGFLPKFLFRISGLHINSVKNAECIIRETHASSIENGVL

SEQ ID NO: 48296 - protein, 487 aa, Oryza sativa
MPGSPIQTPPPEPKPHRRRRLLSVPALLAVAVAVLLATSPNPLPRLLRSLLGPNPSLLRSKERGPPSGTSPDARRPPCVLWMAPFASGGGYCSEAWSYVASLEEHAADAAAANFTLAIAHHGDLESPEFWLGLPEESKNMAYRLATARCELSRAVVVCHSEPGAWYPPMYESLPCPPTGYDEPAFVIGRTMFETDRVSPEHVRRCNQMDAVWVPTEFHVSTFVKSGVDPSKVVKVVQAVDVGFFDPAKHAAIPLPIGVPVMVPDDSRLDPVNSKGKGFVFLSVFKWEQRKGWDVLLRAFLQEFSGADDVVLYLLINAYHSDTDFDRKIRSFVKDSSIEKPMDGWAEVRLIDEHIPQSALPRLYKAADAFVLPSRGEGWGRPVVEAMSMELPVIVTNWSGPTEYLNEENGYPLDIDRLTEVTEGPFKGHLCAEPSVDRLRTLMRHVFSDREEARRKGKKAREDMVERFSPAIVATIVADKIQQALAST

SEQ ID NO: 48297 - protein, 251 aa, Oryza sativa
MIFGAYSEFTQVPAKHLLPVPRPDPEVVAMLTSGLTASIALEKAGQMASGQVVLVTAAAGGTGQFAVQLAKLAGNKVVATCGGKCKAALLSSLGVDRVINYQNEKIKDVLKKEFPRGADIIYESVGGEMFDLCLNALAVHGRLIVIGMISQYQGEHGWKPRNYTGLCDKILAKSQTVAGFFLIQYAHLWQDHLDKLFDLYASGKLKVSLDPKKFVGVASAPDAVEYLHSGKSVGKVVVCIDPSYSQTLAKL

SEQ ID NO: 48298 - protein, 180 aa, Oryza sativa
MEGTDKLVDAIRGADAVVCATGFRRSFDPFAPWKVDNFGTVNLVEACRKAGVTRFILVSSILVNGAAMGQLLNPAYTVLNLFGLVLVAKLQAEKHIRSSGINYTIIRPGGLTEQPPTGNIVMEPEDTLYEGSISRQQVAEVAVEALLCREESSYKVVEIVTRAGAHNRPLKDLFASIKQS

SEQ ID NO: 48299 - protein, 296 aa, Oryza sativa
MYDLMRLRLQKESTSDNDLLLEVQKRSNEICLQLYEKELLTDTSYLHIYGLQEHDLDAKQLAVVYALHQWRDYIAREVDESTGYVLPNKALIEIAKKMPTDTAELKRMVKSKYPFVDENLDQVVGIIWNATESSYAFESRAEQLKKERLEQLTDRVQTISSPEMKTSMNLSGQIRSMDKEILSDNIHQQVAQATFQELKRPMALGAVGNSTSGGQRDFFGGFSNKSEKMEKAKSYPAFYYPQLPQYSPEVGYGFQSINRTMAGTAQSPTGNKERDLQNPRRRQSFPPSGNISDTHQ

SEQ ID NO: 48300 - protein, 189 aa, Oryza sativa
MALAPTSLRCFLTGRPLCSAGSTAAVLPAPKPTRRRPSARLSCRAANEAPSTRGDLPVKLGKLAMVALAAGVLALSPVDDAMAAKSGGRVGGQAFRSAPRSAPRPSGPRINNSRTNIYINPPVAPPLVGGYGYGYGYGWSPFSFFAPGPSVAVGVGGGFDTLVLFIVLGTIVGAVRRFLNRNDDDYDDY

SEQ ID NO: 48301 - protein, 411 aa, Oryza sativa
MKKLAARDGRAASNGRLLRLVARAALLAVVVLSLVSLRLVLSPATAVGDDGELYLPVLLAEVSDRGYLRHGSRSVFVGDAGSWAPFLERHHVAVFRAGKLRELADESVDAVLFDGDAVQLGAVNRVLKLGGVAAGFATSGSSTLQLPDNYKAVFAHRSEAAIAFAVEKTTPPTTSAAVTASPVGPHRKLLALPGSKKDDALAGLEAVLLEPPQRQHRRIIRRLRPRYLPELTGDSLEGYRRRTFIDVAPSRGGGAASWFKKHYPRGERVFDMVRLDAADATEPAASSSAAGIAEWLEGNVREEDYVVVKAGVEAVEEILRRRAAVRRVDELFLDCDAGAGADAARRPYWECLALYGRLRDHGVAVHQWWELMNARPRRERKKRERERERERESEMMELMRGKRSLWVQNKL

SEQ ID NO: 48302 - protein, 322 aa, Oryza sativa
MGQRQSKQPSPAAAVHARATTTPTPTPGEDEQQGSALEAERRGRRRTTTRRAAEGAMDTFFLSHGAPTLSIDDTIAAQGFFKSWLPAAVAGAELPRAILVVSGHWEAAAPTVNVIRGNNDTIHDFYGFPKAMYKLKYPAPGAPDLAMKTKELLEQAGFGPVKENHSRGLDHGAWVPLMLMYPEANVPVCQLSLQSGRDGAYHYELGRALAPLRDDGVLVLGSGSATHNLRRMGPEGTPVPQWAAEFDGWLQEALLGGRHDDVKRYEEKAPHGRVAHPSPDHFLPLHVALGAAGEGAKAELIHRSWSNASLSYASYRFTTAKN

SEQ ID NO: 48303 - protein, 115 aa, Oryza sativa
MTLYTARRARGAPPRATPVARPWTLTPSTTAPAAMDAVCVPCPIMSRADIWLAPRPVLVDTRPSIVMVLKFIGWLVVQSEEIPTSCGQQFMLLIWGNTDHFSVGVRPTVAIMGFG

SEQ ID NO: 48304 - protein, 153 aa, Oryza sativa
MTPSYSSGGNSKGTRRDSTGDAFNRLADLRVQSNESKARREEQKQAKSARACMEMLKADGISMQDPVYHTILRMFRDGYLCEFFIEDCTTPEGRMYFIQLHGAPDLTPDPLLFAPPPPPTCSGHVEGWYKRFSPHDDDGSDGANGGADGAAMF

SEQ ID NO: 48305 - protein, 478 aa, Oryza sativa
MERYIWEVGPRLNMHLKLFPNNTNLFNTSEVVRLRHLLAGWEITLSNVFGPYELLNFTLGSYEDEFPTVASSGLKRGALAGILAGTITASIAASVFTTIFIMRRRSKRRTTSRRSLLSRYSVKVDGVRCFTFDEMAAATNDFTDSAQVGQGGYGKVYKGNLTDGTAVAIKRAHEGSLQGSKEFCTEIELLSRLHHRNLVSLVGYCDEEDEQMLVYEFMPNGTLRDHLSAKSRRPLNFSQRIHIALGAAKGILYLHTEADPPIFHRDVKASNILLDSKFVAKVADFGLSRLAPVPDVDGTMPAHISTVVKGTPGYLDPEYFLTHKLTDKSDVYSLGVVLLELLTGMKPIQHGKNIVREVNTAYQSGEIAGVIDERISSSSSPECVARLASLAVKCCKDETDARPSMADVVRELDAIRSALPEGEELLPEYGDQSATSTSLTATGPLSSSSTTGALFISSGSGGHANSKSGIPSGTVAPR

SEQ ID NO: 48306 - protein, 293 aa, Oryza sativa
MAAVQRLLRASASGGAAAAAAAARRRMSTAVAPEQTPAAAAFPFAAAAGRARQRVAEERNVQWVFLGCPGVGKGTYASRLSRLLGVPHIATGDLVRDELASSGPLSVQLAEIVNQGKLVSDEIIINLLSKRLKKGEEQGESGFILDGFPRTVKQAEILDGVTDIDMVVNLKSREDVLVEKCLGRRICGQCGKNFNLACIDVKGENGLPPIYMAPLLPPNNCMSKLITRADDTEEVVRNRLQIYNDMSQPVEGFYRQQGKLLEFDLPGGIPESWPKLLHVLNLEDQEEMKLATA

SEQ ID NO: 48307 - protein, 343 aa, Oryza sativa; identical to SEQ ID NO: 31985

SEQ ID NO: 48308 - protein, 175 aa, Oryza sativa; identical to SEQ ID NO: 46251

SEQ ID NO: 48309 - protein, 186 aa, Oryza sativa
MSAQIVPAPEHVCYVHCNFCNTIFAVSVPSNSMLNIVTVRCGHCTSLLSVNLRGLVQALPAEDHLQDNLKMHNMSFRENYSEYGSSSRYGRVPMMFSKNDTEHMLHVRPPEKRQRVPSAYNRFIKEEIRGIKANNPDISHREAFSTAAKNWAHFPNIHFGLGSHESSKKLDEAIGAPSPQKVQRLY

SEQ ID NO: 48310 - protein, 395 aa, Oryza sativa
MAVLSVADSPPVSAIGFEGYEKRLEITFSEAPVFADPNGRGLRALSRAQIDSVLDLARCTIVSELSNEVFDSYVLSESSLFVYPYKIVIKTCGTTKLLLAIPRILELAEELSLPLEAVKYSRGTFIFPEAQPSPHKNFSEEVAVLNRYFGGLKSGGNAYVIGDPAKPGQKWHVYYATQHPEQPVVTLEMCMTGLDKKKASAFFKTSADGHTTYAKEMTKLSGISDIIPEMEVCDFDFEPCGYSMNAIHGPAFSTIHVTPEDGFSYASYEVMGFNPASLAYGDLVKRVLRCFGPLEFSVAVTIFGGRNHAGTWAKGLDVGAYSCSNMVEQELPSGGLLIYQSFTATAEIATGSPRSVLHCFADENTEKAGKMEALYWEDDAVEEIDGTEGKKMRSC

SEQ ID NO: 48311 - protein, 85 aa, Oryza sativa
MGFRRATSSPETSWSSVLATRSRQTCVCSSLSAPPSVSSRVPSLVRLLRLTRPAIKSSWRTQTSRERSVWFLLALQLSTAALSVL

SEQ ID NO: 48312 - protein, 383 aa, Oryza sativa
MMRLKVTILVVAFVLSAGVHISAAAAAAGQREEVHLVPAVHVFGDSTVDVGNNQYLPGNSPLQLPYGIDFPHSRPTGRFSNGYNVADFIAKLVGFKRSPPAYLSLTPQTSRQLMRGYRGANYASGGSGILDTTGTTVVTLTKQIVYFAATKSKMMSNGGGDGNSSSASASAIDDLLSKSLFLISDGGNDLFAFLRQSNRTASQVPSFYADLLSNYTRHVQALYSLGARRFGIIDVPPIGCVPSVRVTSQAGATRCVDAANDLARGFNSGLRSAMARLAVSGALPGMRYSVGSSYNVVSYLTANPAAAGFKVVNSACCGGGRLNAQVGCGAPNSTYCGNRNGYLFWDGVHGTQATSRKGAAAIYSAPPQMGFASPINFKQLVSS

SEQ ID NO: 48313 - protein, 190 aa, Oryza sativa
MVGRWDSSRPARRRHRWGHRRCREQVVRTSSSSMGSSSARQRRRSSALPTPPHHAASDSAPPPVASAPLHHARSGGPRRQLCPMAPPTTLVGCAIDSAPGASRLLTACTCSRAASASMDVEPCLDDALGHSFCYAAAATANAHSLSFRHASPVPRSPPTASPPSAVAPERTRREEKRKRKETFMWAHVLF

SEQ ID NO: 48314 - protein, 203 aa, Oryza sativa
MAPLLFKDMKSLSCSSPASTAICPSLERQPMVRPHKGGAIAASPLCQVPGEPRTVHRQDCRRGQQHQHKAAAANGGELVSPAGSSRYLLSSRAAAAEEIQEVEASAAPAVDAKVVREEQAGSDVKNTLTQEQVVVLKVSLHCKACAGKVKKHLAKMEGVTSFNIDFAAKKVTVVGDVTPLGVLNSVSKVKNAQFWAAPPAIAA

SEQ ID NO: 48315 - protein, 674 aa, Oryza sativa
MAKVAVGQWVPHVEAFVDVSRPPAQHSASVDALSALVNKDKLTLFVLVSKMEMYLTTTDHIVRSRGILLLGEILCRISFKQLDVNAISTLSDFFISRLSDWQALRGALVGCLALLHRKRTVGSIIIADVKRLLETFLQNVQVQSLAAADRKLCFQILNYILDHYPEAVKTMGDELLYGMCEAIDEEKDPECLKLSFNLVEAVMKLFPDPSGLAAQYASEVFEILSKYYPIYFTHGVGDDLDATRDDLSKALMHAFCSTPYFEPFAIPLLLDKLSSSLPLAKLDSLKYLDNCIRCYGADRMGRHVITIWFKLKEVIFSLSIDQILSTSGAKDMEKNKNEIVSEALTCLKTAIIQMGPSDEDRLINLILLDEDIVSSIHSVASEEASGLTSLQNPIQLHALGSVISILAESSAYFCTRVLQAHFARLVDSLEISAGRESQHLNNCSGPSSGAINYGALYLSVQMLSSCREVALTYKEEFSPIKSAKESWWLILEKKLDSLIHILQSLLTIDSQFVQSADRQEYVLCAVKGLIILATFPEPRLPLSASAYEDVLLTLTSVIMSKYENMHLWRLSLKALTTIGSSIVEFHASQKENIYNKVVDKISSLDEPCRTSIPLNLRLEACFEVGTSGSNCMLRIAKSLEEAVVGNISEATEHSSCFHSSCMSHFYKQLNKIFC

SEQ ID NO: 48316 - protein, 105 aa, Oryza sativa
MVLGGTVTDDASDEWLVLDQKVNSYPTNRGFTAIGTGGDDFVQSMVVAVESVLQEPIPKGQVSHKLSSRGKYVSVKIGPIRVVSSEQVQAVYRAMRSDNRMKYFL

SEQ ID NO: 48317 - protein, 171 aa, Oryza sativa
MGDDGGGDGGASSAGFSYFAVFHNYPLVAALLGFAVAQSIKFFVTRYKENRWDPKQLIGSGGMPSSHSATVTALAVAIGFQDGFGCALFATAAIFASVVMYDASGIRLHAGKQAEVLNQIVCELPSEHPLSETRPLRELLGHTPTQVVAGALLGSMLATAGQMFLVVSGSV

SEQ ID NO: 48318 - protein, 267 aa, Oryza sativa
MPLRTWVAGYALQCVVHMVCVAIEYRMRRGQRDRAPASADEERGSDGSSSSSDDDVTEDDRRGSCTDCVSIAKHLESANTMFSFIWWIIGFYWISAGGEDVIRDAPQLYWLCIVFLAFDVFFVVFCVALACIIGIAVCCCLPCIIAILYAVSDQEGASEDDIRQIPRYKFRRTDEPEKQTADETGPFGGIMTECGTNQPIEKVLAPEDAECCICLSAYDDGAELRELPCGHHFHCACIDKWLHINATCPLCKFNIRKSGSSSGSEEV

SEQ ID NO: 48319 - protein, 94 aa, Oryza sativa
MKTRRAALLMLLLLVVVAAASWPQPCDAASGFCGSKCAVRCGRGRGRGSGCLRSCGLCCEECNCVPTGSGSTRDECPCYRDMLTAGPRKRPKCP

SEQ ID NO: 48320 - protein, 68 aa, Oryza sativa
MRNASRSLSPRRLSLLTPMAGGCVHCHVLRLTLFLIWRGAPLCLSSPMRSSTRMSFLNRASLCTHTRL

SEQ ID NO: 48321 - protein, 266 aa, Oryza sativa
MQRTAKELLEQYLKFRQEADDDGDGGDNKKASKKGKKKKKEKDPSKPKQPMSAYFVYTQQRRAALVAEKKNVPEIGRITGEEWKAMSEAEKAPFEAAARKQREEYQVEMAAYRQRKQEEAACQEKEEEEQKKIMKQEALQLLKKKEKTDNIIKKTKEEQRKKKVGGAAAAADPNRPKKPASSFLLFSKEARRQLAEERPGVASSTLTALVSVKWKELGEAEKQAWNGKAAEAMAAYKRDMEEYTKAAASGGGGGDASPCTSSSASS

SEQ ID NO: 48322 - protein, 333 aa, Oryza sativa
MSKARVYTDVNVLRPKEYWDYEALTVQWGEQDDYEVVRKVGRGKYSEVFEGINVNNNEKCIIKILKPVKKKKIKREIKILQNLCGGPNIVKLLDIVRDQHSKTPSLIFEYVNNTDFKVLYPTLTDYDIRYYIYELLKALDYCHSQGIMHRDVKPHNVMIDHELRKLRLIDWGLAEFYHPGKEYNVRVASRYFKGPELLVDLQDYDYSLDMWSLGCMFAGMIFRKEPIFYGHDNHDQLVKIAKVLGTDSLNSYLNKYRIELDPQLEALVGRHSRKPWSKFINADNQHLVSPEAIDFLDKLLRYDHQDRLTAREAMAHPYFLQVRAAENSRPRAQ

SEQ ID NO: 48323 - protein, 262 aa, Oryza sativa
MEVATATEASAPAASRRSHPFPWLDLAISEPYYFLHLVAFFSYFAARSTVPSADDGLLLRREIQAVLTFLVLFVVKIVKEENWETCIADSLLYAKGLLLAVTLVIDYWLTVSYLLGFVVIYAVAQQPPYDGLGHSNHLTPLQLEGLLTEEPTTRFWLVEFRTSFSGTCIEASSVLPELSNIYSNKNISFGIIDLGHFPNAAAKFGISMWDHLPTYVLFDKATEVARFPEIMNESKVFVPKITKKLLCQHFDLDRRLIEYLSR

SEQ ID NO: 48324 - protein, 272 aa, Oryza sativa
MAVSNNITACVNFLALVCAVPVVATGVWFASKQGDDCARVARWPLAILGAALLLVALAGFAGAYWNRRGLLAAYLFAMAALITLLLALLVFAFAVTRPSGAYPAFARAYDDYRLDGYSTWLRDRVAGDPRRWEGIRACLAASDTCRKLAQESVFFITPEQFYQSHLTPLQSGCCKPPTVCGYAYVSPTVWVNPANPAADADCAAWGNDPSQLCYECSSCKAGMLGTLREQWRRANVALVIATVALIFFYVIGCSAFKNAQTEDLFRRYKWRN

SEQ ID NO: 48325 - protein, 384 aa, Oryza sativa
MKFPHKLFGKPIEHCQVDSHNQKLLEQHLACAAYEHPLCVQYDADYFCSSLNSVMMALKDKGCLINNPSGPFSSSMWSYVGPEKRPSQAVSIRAIEHDKYRVIDKLNNRLLEEIEESKAFFQVYDGAVYMHQGVNYLVEELDLSSRTAFCRKADLKYYTKTRDYTDINVLGGEFAHLPPSMCKTNGVKTTAQANDCKVTTRWFGFYRIWKSNNKISDSIELNLPPYSFNSQAVWVRIPHSVKTNVEERKLQFRGGSHAASHALLNIVPLHMTCNASDLGTECANPHETRGIPDRILLYDKHPGGIGIALQIKSLFGELLLAALELVSECNCTSSAGCPNCIQTLTCGEYNEVLDKEAAILILKGVIEYERSYFEKEDGSDQGVR

SEQ ID NO: 48326 - protein, 504 aa, Oryza sativa
MIEARKKKKKKLQLQQQQQQLVTNKVMTMDRPNVAVAAVGLLVAAVAATLPAPSWGQQQPANKLITSTSGSGKGLSKWLAMNQEEYVEKKALHTMATAEELGGKKLDANLTAAEEAKVTWVIDPKGTPGDTTFTTITAALEKVPEGDKKRVILDLKPGAEFREKIFLNLSKPFITFKSDPKNPAVIAWSDTAATRGKDGKPVGTVGSTTVAIESDYFVAHGVVFKNDAPMAKPGAEGGQAVALRLFGTKAAIYNCTIDGGQDTLYDHKGLHYIKDCLIMGSVDFIFGFGRSYYEGCTIVSVTKEVSVLTAQQRSKTIEGALESGFSFKNCSIKGEGQIYLGRAWGESSRVVYAYTDMSKEVVPVGWDGWNIAKPESSGIYYGEFKCTGPGSDAKKRVGWALDLTEERPSPSSARTTSTATPGSSHQTGHQRHLAQLQRRATQPRKHRRRVVTQLHRLIKRKAIQLQKRRRRLATQLRQRRRVIPLRQRRRLITRVQVHRQKASS

SEQ ID NO: 48327 - protein, 281 aa, Oryza sativa
MVSLRAAIVLVVAASSVAVAFSHAEGNEGPDFTYIEGAMDGPSNWGKLSPEYRMCGEGRSQSPIDINTKTVVPRSDLDTLDRNYNAVNATIVNNGKDITMKFHGEVGQVIIAGKPYRFQAIHWHAPSEHTINGRRFPLELHLVHKSDADGGLAVISVLYKLGAPDSFYLQFKDHLAELGADECDFSKEEAHVAAGLVQMRSLQKRTGSYFRYGGSLTTPPCGENVVWSVLGKVREISQEQLHLLMSPLPTKDARPAQPLNGRAVFYYNPPGSAVSFQEFAK

SEQ ID NO: 48328 - protein, 402 aa, Oryza sativa
MAGERRWSTAAAAAGWLRVAAVVVAAASAASSAAGEGVGRQTVPAMYVFGDSLVDVGNNDFLPPPAPRPPEPPCGIDLPPEAAAADGGGGGRFTNGFNLADVIAQHVGFKKSPPAYLSLTTPGRDGELRRGLVGANYASSGSGILDFIGNGTISLGEQVKLFTKTKEAMITAGEVDGENIDNLLSQSLFITCTGGNDYNAFTDGIVPVSDAPAFIAHMVATYIKHIKTLYNLGARRLGILDVLPLGCLPISRVPIENGSCSGTDNWQARLFNRLLRREMTAAATASMPDLVYSIGSIYYTFYDMIKNPSSAGVREVARACCGDGKLNAEADCSATTHLCPDRDNYIFWDKVHGTQAAYHNCVHAFFHGSPRYAEPISFTQLVASPAVDLGRPSPGTNRTARI

SEQ ID NO: 48329 - protein, 224 aa, Oryza sativa; identical to SEQ ID NO: 47493

SEQ ID NO: 48330 - protein, 617 aa, Oryza sativa
MDSDYGVPRELSEVQKKRALYQPELPPCLQGTTVRVEYGDAAIAADPAGAHVISHAFPHTYGQPLAHFLRKTANVPDATVISEHPVVRVGVVFCGRQSPGGHNVIWGLHEAIKAHNPNSKLIGFLGGSDGLLAQKTLEITDEVLSSYKNQGGYDMLGRTKDQIRTTEQVNGAMASCQALKLDALVIIGGVTSNTDAAQLAETFAEAKCATKVVGVPVTLNGDLKNQFVETTVGFDTICKVNSQLISNVCTDALSAEKYYYFIRMMGRKASHVALECALQSHPNMVILGEEVAASKLTIFDITKQICDAVQARAEKDKYHGVVLIPEGLVESIPELYALLQEIHGLHGKGVSMENISSQLSPWASALFEFLPPFIRKQLLLHPESDDSAQLSQIETEKLLAQLVEDEMNRRMKEGTYKGKKFNAICHFFGYQARGSLPSKFDCDYAYVLGHVCYHILAAGLNGYMATVTNLKSPANKWRCGAAPISSMMTVKRWSRGPAATQIGKPAVHMATVDLKGKAFELLRNNSTSFLIDDIYRNPGPLQFEGAGADSKPISLCVEDQDYMGRIKKLQEYLEKVKSIVKPGCSQDVLKAALSAMSSVTETLAIMTSSSTGQGTPL

SEQ ID NO: 48331 - protein, 901 aa, Oryza sativa
MTPSHGAAAAAASSSAGAGRRAATFAGASVFLSRSLVAPEVYDAVHDALRLNGAEVFLCADPARTGPLDFHVISSSSHERFADLRAKGCNLLGPQCILSCAKEHRFLPKQGYTCCLAMDGVKILCSGFEKDEKAKIEQLVTAMGGTLQNKAYTDANFVIAKDVLAAKYKWAVNTLKKPIVSRNWLEQCWIEHRVVPHEPYRIPPFSGLNICITKLNVDERRELAKIIVQNGGQYSANLTRRCTHLVSNEPGGDKYVVAQKWGNIHIVVPKWIDQSVARKVCLDESAYLVCQNSTNINGVKHSLKEQHNPEISSASFQPVPTTSVDDSVSTSQYVPASFDDASKICSTDIGAPSFQETKELQVDSHVAEDSEAEDDDLYLSNCRISLVGFEEKESSRLVMMIRNGGGSRHVMLSERLTHIILGAPSEEEKKEVRRLAAWGVINVVKATWLEDCNKAKKEVKVSPSYVANELLAKEFSCAVMEKTVMRETKAAKNSGGIFHIPTVNDLHDKQLGNDLSSERKSARGKHETMNSNRTATKSAISSQQNGVASTSEYHPKFQVNSSAINRQSSRSSNTFKGRIFCFSNSFSHDRRAQVVDWVREGGGIMVDDAQSTVVDFIIESHGQNSMLRDSSHSTAVSTHWIRSCLEEGCFQDVGSHPIFSPLCCRIPFPGFEDFRFCVSQYEEKDRLLLKNLCFILGSKFTEKATKKVTHLICKFASGPKYEAYYSRGIPTITAEWLFECVRQDRIVPFDQFQPKPPTSQDRDAGLCTVSQYPTQAAKTISRFDCSESHTESQLPRSSSKYNSGNASVNEEPNDPGVSKRRRLSEFGKANDTSGNIGRTEELQDSTPVPDVADAIEDLLVQSSKIQDVQPPRSIFAPDDSVLNQDQENTHSFGISRHWLNM

SEQ ID NO: 48332 - protein, 423 aa, Oryza sativa
MRPYRNHLAFYHTNGSLDWGSLLCATDMASSLVSRTHLTPRPAAAASTASPCSARFAVRRRRGLVGGVRCQAQASDMDGHYMRRCVELARKAAGHTSPNPMVGCVVVRDGRVVGEGFHPKAGQPHAEVFALRDAGDLAENATAYVSLEPCNHYGRTPPCTEALINAKVKDVVVGMTDPNPIVASKGIERLRSAGIDVRLCVDEEASCRKLNEAYIHRMLTGKAFATLRTTLSMNGVVINQIGSGADQPEGYYSQLLKEYDGVIISSNFAKTNTLPVSREAGAKQPLYIIIAQCENSQLNIPFLKEERAAEAVVLSDSPITVEPAGVDVLVLDQMNLDAILQLLAQRGLCSVLVDFREAGGGIASLLNNFQDDKLVQKVVVELLPVWAVSKGPSDLAFGGSQSFPLKDVEHSEVNGSVLLQGYV

SEQ ID NO: 48333 - protein, 418 aa, Oryza sativa
MASSGLAVAATASSAWLCCPNHHIHTSSSRSRKHLLLHGLYGSAPARTRGRRPPVWTAAAATAAAPADTAASARREQVEIARSLNAWVEENMLPLLTPVDSAWQPHDFLPCSAAGGGEALAAFTEGVAELRAGAAGVPDEVLVCLVGNMVTEEALPTYQSMGNRAEGLADGTGVSPLPWARWLRGWTAEENSHGDLLNRYLYLSGRVDMRQVEATVHRLLRNGMEMLAPASPYHGLIYGAFQERATFISHGHTARLAGQHGDRALAKICGVIAADERRHEAGYTMASGRLFELDPDGMARALADVMRGKVTMPGQLMSDGRDGDGEHSLFARFSAVAERAGVYTARDYGDLVEHFVRRWRVAELAAGLSGEGRRAQEYLCGLAPKIRRMEELAHRRAARIEPAMARFSWIFDRPVMLG

SEQ ID NO: 48334 - protein, 695 aa, Oryza sativa
MCDPADLASLLAFSDGLDRMGAGLVGWGPNDTSCCSWTGISCDLGRVVELDLSNRSLSRNSFRGVAVAQLGRLPCLRRLDLSTNGLVGAFPASGFPAIEVVNVSSNGFTGPHPAFPGAPNLTVLDITGNAFSGGINVTALCASPVKVLRFSANAFSGDVPAGFGQCKLLNDLFLDGNGLTGSLPKDLYTIPELRWLSLQENQLSGSLDKALGNLSKLTLIDLSYNMFNGNIPDVFGKLRSLESLNLASNQLNGTLPLSLSSCPMLRVVSLRNNSLSGEITIDCRLLTRLNNFDAGTNTLRGAIPPRLASCTELRTLNLARNKLQGELPESFKNLTSLSYLSLTGNGFTNLSSALQVLQHLPNLTSLVLTNNFRGGETMPMDGIEGFKRMQVLVLANCALLGTVPPWLQSLKSLSVLDISWNNLHGEIPPWLGNLDSLFYIDLSNNSFSGELPATFTQMKSLISSNGSSGQASTGDLPLSFVKKNSTSTGKGLQYNQLSSFPSSLILSNNKLVGSILPSFGRLVKLHVLDLGFNNFSGPIPDELSNMSSLEVLDLAHNDLSGSIPSSLTKLNFLSKFDVSYNNLSGDVPAGGQFSTFTEEEFAGNPALCRSQSQSCYKRAVTTEMSSETRFTFGLFLTVEAGFAFGLLTVWNVLFFASSWRAAYFQMVDNFFDRFYVITMVNLNRLRRKWEHKDHP

SEQ ID NO: 48335 - protein, 458 aa, Oryza sativa
MAKKTILQVVCAVALVALCACGVAASPSSPAGAGCRKHIARITEYGGVGDGRRSNTAAFAKAVADLSLRAGDGGAALVVPKGKWLTGPFNLTSHFTLFLDHGAEILASQNLEDWPLIAPLPSYGRGRDEPGPRYSNFIAGSNLTDVIITGRNGTINGQGQVWWDKFHAKELTYTRGYLLELLYSNNIIISNVTFVDSPSWNLHPTYCTNVTISGITILAPLNSPNTDGIDPDSSSHVKIEDSYIVSGDDCIAVKSGWDQYGIKFNMPSQHILIRRLTCISPTSAMIALGSEMSGGIRDVRAVDNVAIDTESAVRIKSGVGRGGYVKDVFVRGLSLHTMKWVFWMTGNYGQHPDNSSDPNALPEVTGINYSDVFAENVTMAGRMEGIPNDPYTGICMSNVTAQLAPDAKKLQWNCTDVKGVASDVSPVPCPELGAAGKPCAFPEEELVIGPPELPTCSY

SEQ ID NO: 48336 - protein, 261 aa, Oryza sativa
MAVGKNERISKGRKGSKKKTVDPFSKKDWYDIKAPTVFSVRNIGKTLVSRTQGTKIASEGLKHRVFEVSLADLQNDEDQAYRKVRLRAEDVQGRNVLTNFWGMSFTTDKLRSLVKKWQTLIEAHVDVKTTDNYMLRLFCIGFTKRRPNQVKRTCYAQASQIRQIRRKMVEIMANQASTCDLKELVSKFIPEVIGKEIEKSTSSIFPLQNVFIRKVKILKAPKFDLGKLMEVHGDYKEDVGMKLDRPAETDEAVAGEVAAAE

SEQ ID NO: 48337 - protein, 89 aa, Oryza sativa
MSYYGQQPPVGVPPQQGYPGKDGYPPPGYPPAGYPPAQGYPPAGYPPQQGYPPPYAQPPPQQQQHSSGPSFMEGCLAALCCCCLLDACF

SEQ ID NO: 48338 - protein, 706 aa, Oryza sativa
MEAQADAGGDDLAAMREQCRSLEEAIGFRRETQMGLVASLQRLVPDLVPSLDRSLRIIAAFNDRPFVPTPNPDGGHGKSPAALKPHHRRALPDPARSTRRKTSPGSSPASVAAAPGGLDAVRTMVAVCLLELVPFAEIDAAALARRLQAESSSASEAERTALADLAAELGGSAASAVVLALRRIAEDTGGVQIEEAMIGGKSMTMVWAIDRNKLLKELPESATLPLLQPPPAPQMPPSETDAGSAMIPRTPQQQQPQPDMWPHSMPPIFPRPRGMTMQGMQRVPGVPPGLMPLQRPFMGPAGVITMGGGVGPSPNQQKQKSEEDELKDLELLLNKKTYREKQNTKTGEELLDLIHRPTAKETAVAAKFKTKGGSQLKEYCTNLTKEDCRRQSGSFVACDKVHFRRIIAPHTDTNLGDCSFLDTCRHTKTCKYVHYELDQTPDIPPMMAGALAPPRQIRLQRAEYCSEVELGEAQWINCDIRNFRMDILGQFGVIMADPPWDIHMELPYGTMADDEMRTLNVPALQTDGLIFLWVTGLAMELGRECLELWGYKRVEEIIWVKTNQLQRIIRTGRTGHWLNHSKEHCLVGIKGNPLVNRNIDTDVIVAEVRETSRKPDEMYPMLERISPRTRKLELFARMHNAHAGWLSLGNQLNGVRLVDEGLRARYKAAYPDSEVQPPSPPRASAPIDGDQGTSQKPTVSDGERPA

SEQ ID NO: 48339 - protein, 195 aa, Oryza sativa; identical to SEQ ID NO: 31706

SEQ ID NO: 48340 - protein, 348 aa, Oryza sativa
MLEEHVAEGMLTAKTRWRDYCAQVKDSSVYLAVASNISGSMPKDLFEDVMEELEKQYQDDKARIKEAVKSGKIPMTTSWTLEDFETAVTEDDTLKGITNINMKLIFDDQVERLREKEVKEAKKRQRLGENFSDLLYSIKEISASSTWDDSKALFEDSQEYKALDSETYSRELFEECVVHLKERLKEKERLREEEKARKEKEREEKGRRKEKEKKEKERKEKERDKEKEREKDKGKDRSRKDEMDIDAVDADSHGSKDKKREKDKEKKHKRHHHDTADDVSSERDEKDDSKKSRRHSSDRKKSRKHTHASDSDSENRHKRHKKDRDSSRRNGTRDDLEDGELGEDGEIH

SEQ ID NO: 48341 - protein, 598 aa, Oryza sativa
MGRLQNLMLLSAGFFSTLLLAQVTSAAAGMTVKVSTTPIFSKIPRAQTNKDFQVLLRIEAPPPVDLKGRVPIDLVAVLDVGGGGMSLEPVKKAMKFAIRQLSDEDSIAIFGPPMSREVIPKFMNIHGSRRIAEKKVDELEGRRFAHPARSSLDEALKMLEEQPASSSVGRAKFIVLVTDITRFSSDMPELSKYPVHAFGLGASHDAAALRLVAQRSQGTYSFLDDANADKVAAALALCLGGLKSVAAVGARVVLKAASGSGVRIDRISSGGYASSVSQVDGASGEIAIGALYAGEVKTFVVHLDVPAAPEISPGEGVCCDQQQLLVASLDGQLYTSGGGVDVIDDDAAAGGGGPIQDVLVVERPPAAVLPKVPSAIVVNHIFQFRVLEMVDAFINDEILLRRTPATTGRTKDVDVDDDRGMKLLARWERFVLEHQFWVGLDLGSLDGEITAVANSLRKQQHVVGGVLPSSSMAAYIFSWMSSYKMQRPTAMGSPAKVVGLFVTLEVHLTLQVAITAENGGGGGDGECEYSCVEQLPPAPPLLVASGRDDDSYRFNAAYEGVISLDDINQFMIKIYQGMVKANNLKQCHLMNQQPRAVA

SEQ ID NO: 48342 - protein, 674 aa, Oryza sativa
MARLLVLRSAPYHRSHLSATATFLLSPSNSKHPHSASASASFPSTARRILLPSPLRVPARAIESSPGTTKQEPTPAAGEGEAQEPPPPAASAFEVEELGWGTQLAVKLRMLVAPPWKRVRKGSVLNMKLRGEISDQLKTRFSSGLSLPQICENFVKAAYDQRISGIYLHIEPLRCGWGKVDEIRRHIVDFKKSGKFVVGYMPVCGEKEYYLACACGELYAPPSAYVALFGLTVQQTFLRGVLEKVGIEPEIQRIGRYKSAGGQLARESMSNEVREMLATLLDNIYGNWLDTISSKHGKKKEEIEEFINSGVYQVARLKEEGWITDLLYDDEVMAMLKERVAQKDKKSLRMVDYSKYSRVSKWTLGLQGGGEQIAVIRASGSITRTRSPLSVPSSGIIAEQLIEKIRTVRESEKYKAVILRIDSPGGDALASDLMWREIRLLADTKPVVASMSDVAASGGYYMAMAAPVIVAEKLTLTGSIGVVTGKFILQKLYERIDFNKEIISKGRYAELNAADQRPLRPDEAELFEKSAQNAYALFRDKAAMSRSMNVDQMETVAQGRVWSGQDAASRGLVDSLGGFSQALAIAKQKANIPHDRKVQLVEISKPSPTLPEILSGIGSSLLGVDRAVKGVLQDVTSLNGVQARMDGILFERLEDLSGENQLLLLVKDIVNYFD

SEQ ID NO: 48343 - protein, 541 aa, Oryza sativa
MAAAVAASPAQSRKTETYTDTKRRDDVRGLNIAAGRAVAAAARTSLGPRGMDKMISSSSSGGDQAVIITNDGATILSRMPLLQPAARMLADLSRSQDAAAGDGTTTVVVLAGSLLRRAQSLLSAGAHPTAAADALHLLAARAVEVLHGMAIPVELSDRDALVKSASTALNSKVVSQYSTLLSPLAVDAALAVVDPAHPYLLDLRDIRVVKKLGCTVDDTELIRGLVLNKKASHVAGGPTRIGDAKIAVIQFQVSPPKTDIEHSVVVSDYAQMDRILREERNYILGMVKKIKASGCNVLLIQKSILRDSVTDLSLHYLAKAKIMVVKDVERDEIEFITKTLNCMPIASIEHLREDKLGHAHLVEEISVGDGNNNKIVKITGIKNMGRTATVLVRGSNQMVIDEAQRSLHDAFCVIRCLVNKRFLIAGGGAPEIEMSMQLAAWAKELRGMESYCVREFAEALEVIPYTLAENAGLDPISTVTELRNRHAKGEKNAGINVRKGRITNILEENVVQPLLVSTSAVTLACECVRMILKIDDIVTVR

SEQ ID NO: 48344 - protein, 275 aa, Oryza sativa
MSRFGRSGPPPIRDTYSLLVLNITFRTTADDLSPLFEKYGEVVDIYIPRDRRTGDSRGFAFVRYKYEDEAQKAVDRLDGRVVDGREIMVQFAKYGPNAERIHKGKIMETVPRSRGRSRSRSPRRGYRDDYRERDYRKRSRSRDRYGRDRYRERDYRRRSRSRSYTPDDYRRRGRDSVSPARRSLSRSRSRSYSPDDYRKRGKHSQSPVCKSPSAKRSPSMSPARRSPSASPARRSPSASPVRRSPSRSPRRTPSSQEGSPVKRYDEPRRSRSPST

SEQ ID NO: 48345 - protein, 929 aa, Oryza sativa
MLVRLGVVVVASVAALTLKRANSGNRDGQAREGKDKTRYSEHGEKEEEKEEVKTISGIINSALSDDDDMLSEIESLLSGEIDIPLPSDRFDVKERSRYNSVNSELERLRGLVRELEEREVKLEGELLEYYGLKEQETDVVELHRQLKIKMVEIDMLKMTINSLQEERKKLQDDVARGTGAKRELEAARNKIKELQRQIQMEANQTKGQLLLLKNQVIALKSKEEEAAIKDAEVQRKLKKLKELEVEVVELRRKNKELLYEKRDLIVKLDAAQGKITESDVVSHAREEINKLRHANEDLTKQVEGLQMNRFSEVEELVYLRWVNACLRYELRNYQAPSEKISARDLNKTLSPKSRERAKLLMLEYAGSERGQGDTDLETASSAPSSPRSEDFDNVSVDSSSSRYSFFGKRPNLMQKLKKWGRGKDDGSSLASPTQSFTSDSPKSASQKPKGPLEALMLRNAGDGMGITTFGKREQDPSDIMDEANVASSFHLMSKTVQGFADDKYPAYKDRHKLATEREKAIKEKAEKARVQRYGGVNSSGIVPSPRSALPPKLAQIKEKAPTANAESSDQPSDNQNNPLVVTQLKLANIEKRAPRVPRPPPAPSATANTASALPPPPPRPPGAPPPPPPPGKPGGPPPPPPRPGSLPRNLAGGDKVHRAPEVVEFYQSLMKREAKKDTTSLGSTTSSVSDVRSNMIGEIENRSTFLLAVKVDVETQGDFVESLANEVRAASFVNIDDVVAFVNWLDEELSFLVDERAVLKHFDWPESKTDALREAAFEYQDLLKLEHKVSSFTDDPKLACEEALKKMYSLLETVEQSVYALLRTRDMAISRYREYGIPVDWLSDSGVVGKIKLASVQLAKKYMNRVATELDALQGTEKEPNREFLLLQGVRFAFRVHQFAGGFDEESMKAFEELRSKMCTTQTSAPQIS

SEQ ID NO: 48346 - protein, 380 aa, Oryza sativa
MRIVINSWSRFMPHYIPDDVMFNILSWLPSKSLIRFKSVCKAWHAMISSPCFTDAHLECSKRNPSILMVPGAYEKQEDGENIAFMMVLYKYHGGKTMELVHMQNFPLGIGVWTRPVHCNGLLLIPTMNLEMMICNPSTRQIVFLPKVSGNICTGTRAGFGFDPHSNKYKVARSFYQRDSETQELVCKFEVLTLGTNAWRQTEDPPYPIDALTPVHVKGAIYWIVCSSLCPDPPNAFLRFCLTDEKFSLFPCPPSNVKSVRFTEVEGELCCACFFSETLALEIWNCSGGQNLEWTRRYVIQIPPDVVMKYPVERPPLIVFREKMLLLAFKKVYRYDIETCRIVELASKVSDFTCYEPYLEKEARDLHLFNYAESLVPIREF

SEQ ID NO: 48347 - protein, 387 aa, Oryza sativa
MATPSPNPHLSMSINGGATVSAGWAATQPRRRRTVDHSSRSCLLRPSYGSTRGFGTRRIAVRSASQKNSSPPLMTTEQEAEDEVVLESPAHFRIYKSGKIDRLNRPPVLPAGLDEATGVTSKDVVLDADTGVSVRLFLPKLQEPSKKLPVVVFFHGGAFFIESAGSETYHNYVNSLAAAAGVLVVSVDYRLAPEHPLPAGYDDSWAALQWAASAQDGWIAEHGDTARLFVTGDSAGANIAHEMLVRAAASGGRPRMEGAILLHPWFGGSKEIEGEPEGGAAITAAMWNYACPGAAAGADDPRLNPLAAGGPVLEELACERMLVCAGGKDVLAARNRAYYDAVAASAWRGSAAWLESEGEGHVFFLGNSECENAKQLMDRIVAFIAGG

SEQ ID NO: 48348 - protein, 184 aa, Oryza sativa; identical to SEQ ID NO: 30128

SEQ ID NO: 48349 - protein, 379 aa, Oryza sativa
MKRFFQPVPKDGSPAKKRPAAAAAASASDSDSLGGDAPAAAACAVGEGDSPPAPREEEPRRFVTWNANSLLLRMKSDWPAFCQFVSRVDPDVICVQEVRMPAAGSKGAPKNPGQLKDDTSSSRDEKQVVLRALSSPPFKDYRVWWSLSDSKYAGTAMIIKKKFEPKKVSFNLDRTSSKHEPDGRVIIAEFESFLLLNTYAPNNGWKEEENSFQRRRKWDKRMLEFVQQVDKPLIWCGDLNVSHEEIDVSHPDFFSSAKLNGYIPPNKEDCGQPGFTLSERRRFGNILSQGKLVDAYRYLHKEKDMDCGFSWSGHPIGKYRGKRMRIDYFLVSEKLKDQIVSCDIHGRGIELEGFYGSDHCPVSLELSEEVEAPKPKSSN

SEQ ID NO: 48350 - protein, 73 aa, Oryza sativa
MVSMRPTRGSHCAPHPESLRRRHSWRLQRWTHEKPDVYGVLRRRLVRPNAGEVRRHWSLPWKKRETEKKMTVR

SEQ ID NO: 48351 - protein, 446 aa, Oryza sativa
MAPPSAMNTSRAEEKAIDDWLPITSSRNAKWWYSAFHNVTAMVGAGVLSLPFAMSELGWGPGVAAMIMSWVITLYTLWQMVEMHECVPGRRFDRYHELGQHAFGDKLGLWIVVPQQLVVEVGVCIVYMVTGGKSLKKFHDLVAPPSAPPIRTSYFIVIFGCLHLVLSQLPNFNSISGVSLAAAVMSLSYSTIAWAASLHHHNHNNGAAAGGVDYSLTEATPAGRTFNFLSALGDVAFAYAGHNVVLEIQATIPSTAERPSKGPMWRGVVLAYGVVAVCYLPVAFAGYYVFGNAVDDNVLITLERPAWLIAAANMFVVVHVVGSYQIYAMPVFDMLETFLVKKLRFKPGMPLRLIARSLYVLFTMFVAIAVPFFGGLLGFFGGFAFAPTTYFLPCIMWLSIMKPKRFGLSWCINWFCIIIGVLLSVFAPIGGLRSIIVNAQSYKFFS

SEQ ID NO: 48352 - protein, 702 aa, Oryza sativa
MRLSSSLQDLPTFSRIDALERGSSTGSDLVSGRAKPIRTLQRDGAVASFSKEKTPPSSPTNRKKCMRAAGCAIALFLLVFFIYASLRYFHVFLSEGSPEYYVILDCGSTGTRVYVYEWSVNHDDGNTFPIALKPLGNAPKKKSGKLTGRAYQRMETEPGLNKLVHNETGLKMTIEPLLRMAEKLIPRRAHKHTPAFLYATAGVRKLPSADSEWLLDKAWDILKNSSFLCSRDRVKIISGMDEAYYGWIALNHHLNMLGTSSSKMTYGSLDLGGSSLQVTFETDNSIQDETSMSLRIGSISHQLSAYSLSGYGLNDAFDKSVAHLVKKLGGAAGNGKVQVKHPCLQTGYKEDYICSYCHPLKLDGSPSVGGKTTGKEKQGMAVELIGMPQWNECSALAKLTVNLSEWSNASSVDCNTKPCALPSTFPQPHGQFYAMSGFYVVFKFFNLTADATLIDVLNRGQEFCEKTWKVAKSSVPPQPFIEQYCFRAPYITSLLREGLQIKDNQVIIDSGSITWTLGVALLEAGQVLSTRIDIQGYRILHREINPNILIVLFLISIVLVICAILCVSNSIPRSFRKSYLPLFRQNSAGSPVLSMGSPFRFHLWSHITSGDARTKTPLSPTVAGSEPHPFSMSHGLGGSSVQLMESSRQSLGVYHSYSVGSLGQMQFSSGMWKPGQTTLQSRRSQSREDLTSSLADLHLPKV

SEQ ID NO: 48353 - protein, 329 aa, Oryza sativa; identical to SEQ ID NO: 40454

SEQ ID NO: 48354 - protein, 292 aa, Oryza sativa
MRSFRVEFDEYFEDGIISEIEIGLGACGELRYPSYPAKHGWKYPGIGEFQCYDRYLQKSLRRAAEARGHTIWARAPDSAGHYNSEPNLTGFFSDGGDYDSYYGRFFLNWYSQVLVDHADRVLMLARLAFEGSDIAVKVSGVHWWYKTASHAAELTAGFYNPCNRDGYASIAAVLKKHGAALNFTCVELRTMDQHEVFPEAFADPEGLVWQVLNAAWDAGIPVASENALPCYDRDGFNKILENAKPLNDPDGRHLLGFTYLRLTKVLFERANFLEFERFVKRMHGEAVLDLQV

SEQ ID NO: 48355 - protein, 115 aa, Oryza sativa
MSDLDVQLPSAFDPFAEANAEDSGAGPGAKDYVHVRIQQRNGRKSLTTVQGLKKEYSYNKILKDLKKEFCCNGTVVQDPELGQVIQLQGDQRKNVATFLVQAGIAKKDNIKIHGF

SEQ ID NO: 48356 - protein, 220 aa, Oryza sativa; identical to SEQ ID NO: 30675

SEQ ID NO: 48357 - protein, 71 aa, Oryza sativa
MEINRAAGDGERQRGDRSAGLSLDPVGTCTQVRHEADAILLHLHSGLAPFCSSLKLRCRAAPTLFRNCRSG

SEQ ID NO: 48358 - protein, 675 aa, Oryza sativa
MDRHALGGGGALEIEKTPEAAEDMESEPALAAAREAERVPPWREQVTARGMVAALLIGVVYTVIVMKLSLTTGLIPTLNVSAALLAFLALRGWTHALDRLGIASRPFTRQENTVIQTCAVACYTIGYGGGFGSFLLGLNKKTYELSGASTPGNVPGSYKEPGIGWMAGFLLSTSFVGLLTLLPLRKVLVIDYKLTYPSGTATAVLINGFHTPQGDKNAKKQVRGFLRYFGISFLWSFFQWFYTGGDVCGFLQFPTFGLKAWKHTFFFDFSLTYVGAGMICSHLVNLSLLFGAILSWGIMWPLIGKQKGNWYSAKASESSMSGLFGYKSFICIALLVGDGFYNFVKVIVVTLKSVRERSRRRGLNNRVADADTMAIDDMQRNEVFNRDNIPTWMAYTGYTLLSVIAVVLIPVMFRQVKWYYVIIAYLLAPALGFCNAYGTGLTDMNMGYNYGKIALFIFAAWAGKDDGVVAGLVGCGLVKQLVLISADLMHDFKTGHLTLTSPRSMLVGQVVGTLMGCVVAPLTFFLFYKAFDVGDPNGYWKAPYALIYRNMAIIGVEGFSALPRHCLQLCAGFFAFAVLANLARDFLPRRYGRYMPLPMAMAVPFLVGASFAIDMCAGSLVVFLWHRFDGKRAALLVPAVASGLICGDGIWTFPSSLLALAKVKPPICMKFIPGN

SEQ ID NO: 48359 - protein, 213 aa, Oryza sativa
MAMLGHYIRHEPQWRRCRRAHAALDAVLRFSPARRWRNKIGQNSVLEPRRFCRRSGLLSEKLYGRAGLMRSVEVSPAVKDAVLRSLMSSYGRSSRGRAAERRVGSKVDWLWYGSRKSWASDDGDGCVSTTDIILAWHVATRLYEMRCSLHASSPTPSASSSDMAAACHLSNYCAYLASAAPELLPDIATWTEKRYREVTADVTAGAGQGQRRR

SEQ ID NO: 48360 - protein, 182 aa, Oryza sativa
MIQAQLGGQGVEQLAGDARHVVAVLRHQRPDPHPAIIIIIIAIADLRRRRRRAGDEIDMESLQPVDLLDAERLQRSRAPEVARPRLLQLEGVATQQLLPQLQQPPPELAGDAVVHHAERAQIPAGRHQRRPVLAADALQVQRRQLQPGQTRLQLQLQRQRWRLRLRERRARRVHLRGPRRRR

SEQ ID NO: 48361 - protein, 349 aa, Oryza sativa
MAVASWSIPAIPRAGPTARGVLLGGAFVTAARPPVAWRCRATLPRRVRLGGVVARAGAAETPVAGSGEAGLLFSEKFPLRRSRTVEGKAWVRVDAEPDGEGKCKVVIGCDVEGKWVLHWGVSYDGEQGREWDQPPSDMRPPGSVPIKDYAIETSLDTPHNSEGKTIHEVQIKIDKGTSIAAINFVLKEEETGAWFQHKGQDFRIPLSGSFGGDLLGTEQDIDVRPGALGHLSNVLQKPEGPIAEPHKTVPDDKGSRTKHISGFYEEYPILKTVYVQNFITVNVRENNGTTKHAVEFDTDIPGEVIIHWGVCKDNTMTWEIPPEPHPPATKIFRQKALQTMLQVRTLIPW

SEQ ID NO: 48362 - protein, 296 aa, Oryza sativa
MLQSNKAVAEISKIASSLLPFGQGDADEGEPVAGVTEEVVVFVRHISTRPETWLDFPLFISERYADDFELSDAQYVHALSMEHLVPSLSDIKAAICSTDMSEACFWKIYFVLLHSKLNKQDAELLSTPQILQAREELLQSLQTKNKRGSEVPEEEESSKTVIMSSAPAEEKVIQPSSIENKAGKPEVSSFEEPSSDISPDVEAEKFPIAITEMEIVDKSVIEEELSVKNETKSLAIEPKIHSETDEDEVDEWPDDDDDAEEVVGTEGNRTSLGQEEDVSFSDLEDDDDDGNKGIAK

SEQ ID NO: 48363 - protein, 61 aa, Oryza sativa
MVSLNPLVWVLHSIKFSCVVELDKRCYCNLKVVNNSEHHAAFKVHGLPFHDQYFLKLGEKA

SEQ ID NO: 48364 - protein, 675 aa, Oryza sativa
MMEADMENGRLYPERPRTFSTVRTKSSLPPIFRVLMRINPRAFIVLLLLVFSGVLYVGASTSPIVLFVFCICTLSLFFSLYLTKWVLAKDEGPPEMSEISDAIRDGAEGFFRTQYGTISKMACILALVILGIYLFRSTTPQQETSGVGRTTSAYITVASFLLGALCSGIAGFVGMWVSVRANVRVSSAARRSAREALQIAVRAGGFSAIVVVGMAVFGVAILYATFYVWLEVDSPGSMKVTNLPLLLVGYGFGASFVALFAQLGGGIYTKAADVGADLVGKVEQGIPEDDPRNPAVIADLVGDNVGDCAARGADLFESIAAEIISAMILGGTMAQRCKIEDPSGFILFPLVVHSFDLVISSVGILSIRGTRDSGLISPIEDPMAIMQKGYSITILLAVVTFGVSTRWLLYTEQAPSAWLNFALCGLVGIITAYAFVWISKYYTDYKHEPVRLLALSSSTGHGTNIIAGVSLGLESTALPVLVISVAIISAFWLGHTSGLVDESGNPTGGLFGTAVATMGMLSTAAYVLTMDMFGPIADNAGGIVEMSQQPESVREITDILDAVGNTTKATTKGFAIGSAALASFLLFSAYMDEVAAFAQLPFKEVDIAIPEVFVGGLLGSMLIFLFSAWACSAVGRTAQEVVNEVRRQFIERPGLWTTTRSLITVVVLQLWHLLP

SEQ ID NO: 48365 - protein, 899 aa, Oryza sativa
MAGAFVSASVGVLNPLLTKLSALVEGEYKLLKSVKKDIIFLRNELSSISVLLEHLSTKEDKLDGPTKEWRNNMLELAYDIEDCIDLFIHKLSCGDANANFVQKIGSKIKKLWGKHQITECIQELKNRVMEEDQRRKRNQIDDFISEPSVVEIDPRLPALYEEVERLVGIDGPREKIIKWIMTKGKPLEQRKVVSIVGLGGLGKTTLANEVYKTIQGDFKCITFVSISRTPNIRKILVDMLKGLGSNGDVSEDEQNLISHLRGFLKDKRYLIVFDDIWDIGAWKVVNCAFPENNLGSIIITTTRNTAVAEACSRTTSEGYLHSMQPLEEQDSQRLFYRRAFNSESCCPPHLEDISHAIISKCRSLPLAIISIASLLSIKPDTEDQWMQVHNSIGVTLNSDVEVRKILMLSYYDLPYPLKNCLLYLSMYPEDYVIDRQELIWRWIAEGFIIEAKGKTREQVGENYFNELINRSLIQPVYIQYDGRASCCRVHDIVLDLIISLSTGQNFVTIVHEQQHWSSFKKIRRTWFPSNGTDNRIVKEITNNCSHVRSLFFDSPKPEQIPQFKKCHALRVLVLDGCMSLESQHINSLTYLFQLKYLKLNVANVTEMPKDIGRLQQLETLIIRGGGHVNEINIPSSVCRLQKLERLIVDYPMRLPDEIGFLQALEMLSLFYNIEYSIKCLQELRRLTRLRYLRIRTPFGGDVARFERYKDAFYMTLDELGKNSLQSLHVHVTTKFSDTLMDSCCSSAPGLRELSTSGVGISKLSEQMISLSNLAYLVIFYNTRSNDQKDINLLGCIPKLLYLKVIFAQGWEDGLTVGCGGFPCLKELMFRHSRLHWLLFEPGAMPKLQRLSIELFAQKAASKLGFEQSFVHLSSLQHLIVVLDCSDAHYKGRESFGRCH

SEQ ID NO: 48366 - protein, 758 aa, Oryza sativa
MTPSMMAQERGEPLLQSGNGAAGGGAKGWPPPALARTVLKVLMWAVFLTWAAAIFFYPTKPAQAAFEGWMAATKQSLFGITGSIFLAFSAPILIVAALAYVYISAFPSDHIHVEKNKLKTLCFRLWTFPVLVDGPFGVVSAVEFIGIVLFIVYVVYSMTYYAVESVSLISKFGQISLTYSELLLYIIGLRFGSIGLFCMAFLFLPVSRGSVLLRLIDIPFEHATRYHVWLGHLTMALFTLHGLCYVIAWSLEGNLLGELAAWKEIGVANLPGVISLAAGLLMWVTSLHPVRKTYFELFFYTHQLYIIFVVFLAFHVGDFIFSFSAGPIFLFMLDRFLRFWQCRAKVDIISASCRPCGTVELVFSKPASLRYNALSFIFVQVRELSFLEWHPFSVSSSPMDGRYHMSILIKVLGSWTEKLRGIITDAQEQGRNGSESETGRITACVEGPYGHESPYHLMYENLILVAGGIGISPFLAILSDIIHRIEEGKPCMPKNVLVLWSVKKSNELSLLSAVDAQFISSSVSDKLHLDIQAFVTQESQPPLEEGIVGDDQKATGMFVKNGTTMSGLVGTGNNFWAGMYFAASTLGFVLAYALAQAYYVRRLNVFAWWHLGLVFVLCMAAGVALPGGLVVLLWHLSEKRKAEDDRWDAAATAVPRAQDGEEEAEQTTNGADAADGGVSLAAVKTTRYGCRPQFEAEFAAFAEKAGGGAADVGVLVCGPPGLQASVARECRSHNLGRRGGRRRRAGAVFHFNSHSFDL

SEQ ID NO: 48367 - protein, 605 aa, Oryza sativa
MLEIYMGNIRDLLAPRSKTNGIKNVPSLSIKSDPDGGIEIEDLVAVTVNSFQEVKRLYEMGTRLRSTASTMANSTSSRSHCLIRISLTSLNATERRKATSKLWMIDLGGSERLVKTKATGKRLKEGKAINLSLSALGDVIDALQTKKPHVPYRNSKLTQVLRDSLGCESKTLMLVHISPDEGDLCETICTLGFATRVRGIRLESEEPPEMKARKETLLIDLGQRVNDLEHECEDIRRKIKNLEESMEHLTGPQPTIYSNFDMSHLSSEELKTDVSSNVRNSKNRREASSRLPRFMKPTASSQHRIGLNNRTPIINRLKPPVPPRRRPSSVYAESVMVPVNAAPWQSECSSECSMSLTSDMNWTPSIRDGTECSQDASEYEIKQVIFSEHEKSSHDQVTCYTDYPLAESRDIQIKIEEKGIVDIDNWLHQQIVEKTSTFRSKMVLDIPGVTEAEIHVSSIPSPTTMACTKEDSQVKDEVMGLTLQSSTDYVEDIKQSKTDNQFTAKELCTPPFKEFSSNNEVKGHKNEHPVYHGRPRRSLQEELENCTLEKPNMDSKSHRSHDDKHKTGKFTKFFQALQTAWIGALLALGTVSIGLEHGFFQSLTL

SEQ ID NO: 48368 - protein, 63 aa, Oryza sativa
MPPFPSLPPWNHQRMRTPPRARAPPSPPFLLAAPSATHPPFLLPSPVAGAASMRSCRGIASAA

SEQ ID NO: 48369 - protein, 80 aa, Oryza sativa
MGKYVELLDMGVRIAARFHSHCPQTARMYYHPPPSSSSSPSSSAAAGSADGGGGGCAGFAAKRMPRAAADTAEIILYAVV

SEQ ID NO: 48370 - protein, 746 aa, Oryza sativa
MHLGRIAIQLHASAPLLFSRRATATALVLPHSRRAAFAMAATPPVARKVPRELAQHGDVRVDNYYWLRDDSRSHPDVLAHLRAENLYTATIMSDVKNLEDEIYAEIRARIKEDDIGAPLRKGQYYYYNRTLTGKEYVQHCRRLVPTDAPVTVYDVMPTGPNAPHEHIILDENVKAEGHDYYSIGAFKVSPNGKLVAYAQDTKGDEIYTVYVIDAESGKFVGQPLEGITSDIEWAGDDHLVYITMDTILRPDKVWLHMLESNQSDDICLYHEKDDMFSLGLQTSESKQYLFVESGSKNTSFIFYLDISKQSKELVVLTPCVYGIDTTASHRGNHFYIKRRSEEFYNSELIACPLDNVAETTVLLPHRESVKIQSFQLFENHIAVYERQNGLPKVTAYRLPATGEPIGQLQGGREIDFVDPAYDVEPEQSQFGSSVVRFHYSSMRTPPSVFDYDMDSGVSVLKKIDTVLGGFDASNYVTERKWAAASDGTQIPMTILYRKDRVNLDGSDPMLLYGYGSYEICIDPSFGRSRFSLVDRGFIYVIAHIRGGGEMGRKWYVDGKLLNKRNTFTDFIACAEHLIENKYCSKEKLCINGRSAGGLLMGAVLNMRPDLFKAAVAGVPFVDVLTTMLDPTIPLTTSEWEEWGDPRKEEYYYYMKSYSPVDNLKAQGYPNILVTAGLNDPRVMYSEPAKYVAKLRELKTDDNLLLFKCELGAGHFSKSGRFEKLREDAFTYAFILKALGMAPKAAL

SEQ ID NO: 48371 - protein, 332 aa, Oryza sativa
MMAASAGPGVVVVALVVVVYLILLIRPAASFRVNVGVGIGGGIGIGNQNQNQDQNQNQNQKPYYDDSNNNNNYDEGEGEGGDDQEEGPEAAAPVGPGQSFTGGRGTYKYMAHEFLDAHNKVRAQYGLQPLKWSNKLARYARRWSAARRFDCVMMHSPESPYGENVFWGTGWGWRATDAVKSWAGESSVYDWRGQSCNPGQMCGHFTQIVWNDTKLVGCGRSECVAGGVFITCSYDPPGNWKGEKSCCCCCYWRIGRLYSAGSVATVRRSIPVGVLARPIPQFLLSFGSLSVNDLGISRPSSSKYKRDFLFKLALLLLGRHHMINKSKGQVGN

SEQ ID NO: 48372 - protein, 189 aa, Oryza sativa
MDAGVGLRAKPGAWAGLGNPRRSSTARVPVRFAVEKFAQPLVLGSDRRSCGAKLKVSCSRKPAGIDKTYYSADEALVLKQKAEDVVPYLNDRCIYLVGMMGSGKTTVGKILAEVLGYSFFDSDKLVEKAVGISSVAEIFQLHSEAFFRDNEELHEERVNNLVRCSIGCTCKTNCCSRNCFSAPLASRIW

SEQ ID NO: 48373 - protein, 301 aa, Oryza sativa
MADHAVVVDDGGSRRMRPASLSSSSDAEDDDAGSKKQFLRAAGRALEAAPPVRRRPGRPSRPVRMFHTMCRSLPVLTPGCGRLQPAGAACRIAAPSRLSPSASLMSKLVASASTGAAGASRRRMTGTLFGYRDARIALSLQDNPRCQPTLVVELALPTHALLRDLGTTAGARIVLESEKRAADGGDGAGAGASSRREREQQDGWVLEESMWTMSCNGKKVGYAVRRDPTDDDIAVLETLWAVSMGGGVLPGISDMDGKDGEMAYMRGSFEHIIGSRNSESLYMISPHGGDCPELAVFFVRL

SEQ ID NO: 48374 - protein, 207 aa, Oryza sativa; identical to SEQ ID NO: 30471

SEQ ID NO: 48375 - protein, 589 aa, Oryza sativa
MAVVDPVMFDNDDEEGPISFKRSSTSVKNRPTPTKQEGSSGNAGPIRSPKAVASNQQKNGLTGVSRPLQQRPQSSSPNPRPLGSGQPNSSKEHSSHNSNSVDKSKLKRPFVEDKSDDSEDDHKPIGLRRKVEDRNLKKPAVGSGTANDSDDDKPLSLKINSTKTPSSSANKAIVLKTTPKIEQPGDDSEDDKPLASRLPTNAALKRGGNVSDDSEDEKPLAARFSKVTGNASASISSSKDKVLSASIKASSSSKMSNNDASTSRNSIKRPIDNNNQTSSALKKARPSDVSASASVKREPKADDNDNVPLSQRLKMGESSKSKPPAKNIVKKSPSSLKKDNKKMKMKMKTKKTMKNSQFSKTMKVPPGSGGGQKWTTLVHSGVIFPPPYKPHGVKMLYNGQPVDLTPEQEEVATMFAVMKDTDYASKQTFIDNFFTDWRKILGKNHVIKKFELCDFTPIYEWHLREKEKKKQMTSEEKKALKEEKLKQEEKYMWAIVDGVKEKVGNFRVEPPGLFRGRGEHPKMGKLKRRIKPSDITINIGKGAPIPECPIPGESWKEVKHDNTVTWLAFWNDPISQKDFKYVFLAAAVH

SEQ ID NO: 48376 - protein, 67 aa, Oryza sativa
MQQLARPCGPVAAARGARAASGDHPIRSFTAQNRCSARLHVRHSTGKSRSRGWGKVATSRYRFCSSN

SEQ ID NO: 48377 - protein, 325 aa, Oryza sativa
MAMEGPILCRAVMQAKLPVTMISNSLTKSGQLGTAFLGCVCKYRNITRLISPIYQPAQKNFATVCGSFSSSSDGNGYMAGNFSESDEDYVNSTVLEAVEVRSGAEGYVIKMRDGKNLRCVHNNSQGRNIPESAPQPAIVLRIEDGSETLLPIIVLEMPSVLLMAAIRNVHIARPTIYQVVKEMIDKMGYEVKLVRINKRIQEAYCAELFLTKVGDHTESITFDLRPSDAINIAVRCKVPIQVHRSLAYSDGIRSVEPARMAIAAGMSDGLLFTKLDRPDGQPCVEAQEFGLIRNMLIAAVEERYKDAATWRDKLMLLRSKRKNWA

SEQ ID NO: 48378 - protein, 452 aa, Oryza sativa
MGRISRLLLLLAAAVVLVIATGVAAQEEAAEAVVEVEEGIVERAKEEAEAVALRAELQQLRDKISGLESGISERSKELKAKDDSIAKLEKLIEEKSQKIASLQSEITSLQAKGSVAAEEQAGKANARAVELEKQIDELKKDVEAQSVKKATLENRANDAEKRVQELNAKIDALQKTNDEQKRKLQSTERALKVAEEELMRLHLEATTKSKQLTEVHGAWLPPWLAAHSAHYMEVISGHWNEHGKPAINSFLQKASEKSAQAKKWAEPHVETAKMKWVPVKEKLVVLKKNTEPYVQKVSSKSVEVYEASRDAVKPHVAKVKEFADPYFQEAKKFSKPYIDQVAEVTKPHVEKVRTTLKPYTKRAVRVYGSFLESATTYHRQAQSTILDYLHQHEVSKSLATKELVWFLASALLAIPVYIIYRLLMEAFCKKPKRPPHGGNHGHRRHKRRHADK

SEQ ID NO: 48379 - protein, 215 aa, Oryza sativa; identical to SEQ ID NO: 31927

SEQ ID NO: 48380 - protein, 916 aa, Oryza sativa
MAVVDPVMFDNDDEEGPISFKRSSTSVKNRPTPTKQEGSSGNAGPIRSPKAVASNQQKNGLTGVSRPLQQRPQSSSPNPRPLGSGQPNSSKEHSSHNSNSVDKSKLKRPFVEDKSDDSEDDHKPIGLRRKVEDRNLKKPAVGSGTANDSDDDKPLSLKINSTKTPSSSANKAIVLKTTPKIEQPGDDSEDDKPLASRLPTNAALKRGGNVSDDSEDEKPLAARFSKVTGNASASISSSKDKVLSASIKASSSSKMSNNDASTSRNSIKRPIDNNNQTSSALKKARPSDVSASASVKREPKADDNDNVPLSQRLKMGESSKSKPPAKNIVKKSPSSLKKDNKKMKMKMKTKKTMKNSQFSKTMKVPPGSGGGQKWTTLVHSGVIFPPPYKPHGVKMLYNGQPVDLTPEQEEVATMFAVMKDTDYASKQTFIDNFFTDWRKILGKNHVIKKFELCDFTPIYEWHLREKEKKKQMTSEEKKALKEEKLKQEEKYMWAIVDGVKEKVGNFRVEPPGLFRGRGEHPKMGKLKRRIKPSDITINIGKGAPIPECPIPGESWKEVKHDNTVTWLAFWNDPISQKDFKYVFLAASSALKGQSDKEKYEKSRKLKHHVHKIRDTYTKDFRSKDKTKKQIAVATYLIDKLALRAGNEKDEDEAETVGCCTLKVDNVTCVPPNKLQFDFLGKDSIRYFNTVEVELLVYKAIEEFRAGKKPGQDLFDKLDTTRLNAHLKDLMPGLTAKVFRTYNASITLDDILHKETEDGTLLEKIAVYQRANKEVAIICNHQRSVSKSHDSQMTRLNEKIDELKAQRDELKADLSKVRKGKNLGNDKDGKPKRNLAPEAFEKKISQIETKIEKMEMDKKIKEDLKTVALGTSKINYLDPRITVAWCKRHEVPIEKIFNKSLIAKFSWAMDVDPDFRF

SEQ ID NO: 48381 - protein, 210 aa, Oryza sativa; identical to SEQ ID NO: 30650

SEQ ID NO: 48382 - protein, 127 aa, Oryza sativa
MRGVILLRYEEDAMAGHRSTAAATGGRLYGQVGVKRRVVEETAAAVEVGGGGGGYLGVEAAVLLGVVTATLLVLPLLLPPLPPPPPMLLLVPVAIFAVLLLLVLLPSDAKSIAAAGRPSSSSSSSYL

SEQ ID NO: 48383 - protein, 123 aa, Oryza sativa
MFSGPLCLMVKLGVVNAGVMMKENQIQPLGGIAGGRQTRNMVIHANWKGGQMTPPSTLWMVVVLHRNVGVTPVTRRETMINAVITNGVLVGALMIRSLRIGVTDGVIQAKMVMLPVKKVSLTT

SEQ ID NO: 48384 - protein, 615 aa, Oryza sativa
MATPPPLRRVAALLLLLVAAASTPTARADLVVTRADRKVDLTSHIVRVLTSLKVENSGPEAVSQFLLAFPNVQAKNLAAIRAFGTEEKVKGPSMVLPIEVVQPSGVPPELTFFSASLSKPLEKGKTLHLDVLTVFTHSVQPFPEEITQAESQLVVYQDSAQYLSPYPVKVQTLSIRLPGGRVESYTKYPNTKLAESELKYGPYEDLPPFSYSPMVVHYENNNPFAVAKEVIREIEISHWGNVQITEHYNIAHGGAKLKGEFSRIDYQSRPYIRGVSSFRHLIARLPPRAHSIYYRDEIGNISTSHLWSDSKKTQLEVEPRFPLFGGWQTTFTIGYGLPLQDFVFNSDGKRFLNITFGSPVEEILIEKLIVKVVLPEGSKDIDISVPFPTKQEQEVKYSHLDISGRPVVVLEKLDVIPEHNLYFQVYYRFNNISLLREPMMLITGFFLLFMACIVYMRTDMSISKNSPSYLAKVQWDEVQSIIQQIQAIFNQCLAAHDKLETSLHELSRSGDVKSCKVARKTADAQFKELAKELKPLLTSLQSSSQSYQIWPKVEELVAKERELQDKLMTRHSTVVDSFEKKLRGQDVENRIAAQQQKVAALRQEVESLLEYISEI

SEQ ID NO: 48385 - protein, 181 aa, Oryza sativa
MPPPSPHPPHRNGNHVPAPSGESFAKFFECWISEQSRDLAALRSAASAATNPAAPPDDAELHRLVNRVLGHYEHYYRTKSAAASTDVLRMFSPSWTSTTENLYLWCGGWRPTAALHLLYSKSGAQLETQLPVFLAGGGLGAGDLGDLSAEQLQAADQLQRITVSKEREIENAAASAQVSDG

SEQ ID NO: 48386 - protein, 398 aa, Oryza sativa
MELCVRASSLLLGLLLQLLSSVDVVSAAQKFGINYGQIANNLPDPTQVAGLLQSLNVNKVKLYDADPKVLMAFANTGVEFIIAIGNENLQSMAGNPGAARQWVTQHVQPFLPATRITCITVGNEVFSGNDTGMMASLLPAMKAIYAAVGELGLGGQVTVSSAHSVNVLATSFPPSSGAFREDLAQYIQPLLDFHGQTNSPFLINAYPFFAYKASPGSVSLPYVLFEPNPGVRDPNTNLSYDNMLYAQIDAVYAAMKAMGHTDIGVRISETGWPSKGDEDEAGATVENAAAYNGNLMQRIAMNQGTPLKPNVPIDVFVFALFNEDMKPGPTSERNYGLFYPNGSPVYAINTGAGGVSGRTGPFDPYSAQMFSSASRLAVRTASLTLLLLVLPLLSSFSC

SEQ ID NO: 48387 - protein, 216 aa, Oryza sativa
MKSRKNSTTSTKAAGSCHTSSSGGGGGGGNCYSSSSSKMERKDVEKNRRLHMKGLCLKLSSLIPAAAPRRHHHHYSTSSSSSPPSSTKEAVTQLDHLEQAAAYIKQLKGRIDELKKRKQQAAAVPGWDAGRGGGERGDQGGEGEGGAAARGDRRAGGRRRGGGERQLLRRRRQDLLHSPLPGALLQNRPRRLQGLPQAAQPPPPILIHTTLSLCSE

SEQ ID NO: 48388 - protein, 402 aa, Oryza sativa
MISATATAAFLAAAPASSSSCTTHRRRSGLPAISASLATASSTEEPLLVRAARGEDGLPRPPAWMMRQVGRYMAEYQALAMRHPSFRERSETTELIVEITLQPWRAFAPDGVILFSDILTPLPAIGVPFDISDSKGPVIQSPVRSEEQVRELTPIDFEKLRFVGESLKILRTEIDGQAALLGFVGAPWTIATYVVEGGMTNTYTNIKSMCHTAPNVLRGLLSHLADAISEYIIYQVNSGAQCIQIFDSWGGQLPPHVWEQWSKPYIKQIVNKIKIECPNVPLVLYINGNGGLLERMTDTGVDVIGLDWTVDMADGRRRLGNKISVQGNVDPAFLFSPLPVLTDEIHRVVKSAGPKGHILNLGHGVLVKTPEEAVAHFFDVTRSLRYDTLFQGCVTEVLEPVA

SEQ ID NO: 48389 - protein, 380 aa, Oryza sativa
MVAGAEVMHQVVPLLEASFHRRCSVKGVDEVSPPVEEMSPEAASEAAIEVPELMVKAPVESLQFSPNIRSGSFADIGPRRYMEDEHIRIDDLSGHLGSLLMCPAPNAFYGVFDGHGGPDAAAYMKRHAIRLFFEDSEFPQALEEDESFYESVEKSIHNAFLSADLALADDLAISRSSGTTALAALIFGRQLLVANAGDCRAVLCRKGVAVEMSRDHRPTYDAEHERITECGGYIEDGYLNGVLSVTRALGDWDMKMPQGSRSPLIAEPEFQQTTLTEDDEFLIIGCDGIWDVMSSQHAVTIVRKGLRRHDDPERCARELAMEAKRLQTFDNLTVIVICFGSELGGGSPSSEQAPIRRVRCCKSLSSEALCNLKKWLEPNE

SEQ ID NO: 48390 - protein, 701 aa, Oryza sativa
MAVQTTLDQLPSPHSSSDFRTLSPLSPHHTDQSHTPRSSVSSSRPVGDYNLPSPRLQSSSTTLPRHHPSALSGSTHKPQRSSSALFNFAAAALDKTQSALANTLEPVVRPRQSNSALARLSLGTGSLSSSESFSSPKVSSIPNGSAAYKNKAHTTPSGSTLAVADPYPLDPPSQRYSETDPNTLPPLRLPASDSKMHQTSSRLLRMTDDDRPFTKDFKDLFATLIVSLLPLGSHRVRLTKVDYTFLSEDAINNLGSLKFSQSNRMPDPKDPTRIVTTTTTTTFSMAKDMARSICQRFVEARFIESADGKLQQVYNMKGSVWQLTPKGVSVLDRFCSRNGIQQRQVSDLANMHSTQLVIMERDSQSDKLLHDRGTVEVIFRRFVGADGRNVKQSVSAADSESLHDYKDGLTGVKMAAERKINGKTYYNTFTGRATTDWLMDCSTIVDRRETNEVASLFVEYDLMEPVSADRTYVSQNPGASLFQPTKHAIYQISQRGKDVINGNSSRGRASESEGGQSQRNGITRDSNTQRLDKILNDPALRLLFRENLRDTHCEENLSFYQDVDEFVRSCKAAIRIAQKNPSATSMDGIKEIMAQAYSIYNAFLAPGSPCELNIDHQLRNNLATRMTKAVGQDVAMIDTLQEVTALFEDAQNAVFKLMASDSVPKFLRSPKYEHALRNYEFEMSSGSQRMLERSQSRSNRK

SEQ ID NO: 48391 - protein, 467 aa, Oryza sativa
MKPLQQRCKPTDTGTAAKLGGSTMQSLKPGKYINKSSGNASTKYRRAGASSPQLYTEKQSAPKDGSFMEALFHDSKNVSARPPCHSGKIALQLFPIDEEFQKSLQQKNHNPYLELTVAPRKKISSVLQHLNTKWGNSQCARGELMLFPDGTRLDNINGSERWTRSDSCTAADVHVAVGSPSTFRLRYGWFPPNFGEQNSGVSLGLVHSAGNIIDNEPLDPVVREQKQMTALSEFPSNFAAPSTEANTVKTMKQDNQSKETPLSWIDCISNISFGALLAEAAPSQDSKQLLPQNNSSLQQIPLTADSFDAAIASLIARQQASSQPKVSTPSLWDAEETCHAFPSQNRISRRTPGTTPSSCGASTLSVLGTILESGTDGEKQCSTEDRREEPNPQASLLANDDNNVKPDIPVSESTGEPRLGASCFQSESTGEPEVGASCSRLLSGTDSLSVSDLLANSLDAFQKFSVF

SEQ ID NO: 48392 - protein, 343 aa, Oryza sativa
MSSINLMDDTTVAKSQFASQTAVIKDIESVLGVFTFNLTWDDIVKNLRPKISTPFSSFKLDRNPRYRNAGNFMRLSDFLDFTKDKDLSGIMISVEHAAFVAEELGFDMVDSVIKTLDAAGYSNQTAQKVMIQSSNSSVLVKFKQQTKYDLVYMINEEVKDAAPSSLAAIKKFADAVSVEGNSIFPENRHFTTYRTNLVESLQNAGLPVYVYTLMNEFASQPYDFFSDATAQINAYVQGAGVNGVITDFPATARRYKLNTCMHMGNNTPSFMAPARPGDLLQIISKPAQPPAMSPMPLLTGSDVAEPPLPPARTAQAPSLASRMQAHAAIVVTLAMLLACHPLV

SEQ ID NO: 48393 - protein, 517 aa, Oryza sativa
MIKQILGRFPKKPSKSGDKDPIGRSSPSVPNPPLGPRGAERSSNLSSQTPVISSSGLSYGSGMHVGNANSRVNGNSVQPTVELLPSFKDVPNTEKNNLFVKKLNLCCATFDFTDPTKSVKEKEVKRQTLLELVDYIASANGKFPEIIMQEITRMVSVNLFRTLTTPPRENKIEAFDVDDEEPVMDPAWSHLQIVYELFLKFIQSPETDAKLAKRYIDHSFVLRLLDLFDSEDPREREYLKTILHRVYGKFMVHRPFIRKAINNIFYQFIYETEKHNGIAELLEILGSIINGFALPLKEEHKLFLVRALIPLHKPKCIGMYHQQLSYCITQFVEKDCKLADTVIRGLLKYWPITNSSKEVLFLGELEEILEATQPAEFQKCMVPLFRQIAHCLNSSHFQVAERALFLWNNDHIENLIKQNSRVILPIIFPALERNANGHWNQAVQSLTLNVRKLFSDHDVGVYDECQRKYEDEKAKEKETKLKQEVAWKRLEEMASAKATSGAAVLVSRTLPRQSSAV

SEQ ID NO: 48394 - protein, 296 aa, Oryza sativa
MSSQQQHAGEAPASAAAAARARLRWTGQLHERFVLAVAELGGADRATPKSVLRAMAVPGLTLYHLKSHLQKYRQAVSRGGNGGGGGSGSLNDRSSSSERQPADHDGDSAADEPRTIAYDGDSDGDAKEGLRDSSRSMVQMQREVQRKLQEQIEVKRHLQLRMEAQGRYLQSVLRRAQQVLADHSLASSPEAATAELSELASAVDIECMSSSSPPRHHRQSAATDSCVTTTSSSEAESKAAGSKRLHTSDCTVEQPVQGKRAFNFLQRHNQADQEEEQEEEYAGAEDGSSSEIDLNR

SEQ ID NO: 48395 - protein, 740 aa, Oryza sativa
MRGSHVCSLVSSLVFLWLGVAAAQKASSWKTLSGNAPAIIAKGGFSGIFPDSSEFAYQFALIASSPDTILYCDVRLTKDGLGICLPDIKMDNCTNIPDFYQQGRKSYLVNGVSTAGWFSVDYNGTELGQVSLKQSIFSRSPRFDPSFFPILAVEDIASKFKPPGMWLNVQHDSFYSQFNLSMSNYIFSVSKRVIVDYISSPEVSFLTKVSGKLSNNTRLVFRFLDESTIEPSTKQTYGSMLKNLTFVKTFASGIIVPKKYIWPVSPDNYLEPHTSVVDDAHKAGLEIYAADFANDFMFSYNHSYDPLAEYLSFIDNGAFSVDGVLTDFPVTPSEAIGCFTNLKKSKTDHGKPLIISHNGASGDYPACTDLAYQKAVDDGADVIDCPVQLTKDGIPICMSSINLMDDTTVAKSQFASQTAVIKDIESVLGVFTFNLTWDDIVKNLRPKISTPFSSFKLDRNPRYRNAGNFMRLSDFLDFTKDKDLSGIMISVEHAAFVAEELGFDMVDSVIKTLDAAGYSNQTAQKVMIQSSNSSVLVKFKQQTKYDLVYMINEEVKDAAPSSLAAIKKFADAVSVEGNSIFPENRHFTTYQTNLVESLQNAGLPVYVYTLMNEFASQPYDFFSDATAQINAYVQGAGVNGVITDFPATARRYKLNTCMHMGNNTPSFMAPARPGDLLQIISKPAQPPAMSPMPLLTGSDVAEPPLPPARTAQAPSLASRMQAHAAIVVTLAMLLACHPLV

SEQ ID NO: 48396 - protein, 487 aa, Oryza sativa; identical to SEQ ID NO: 44831

SEQ ID NO: 48397 - protein, 414 aa, Oryza sativa
MQVKYADGELERLAAEQKLFIGMLPRDVKENEVSALFSQYGNIRQLKVLRSPQKTRKAAACAILEFGSKEHARAAIEALNGTRVVFNGSSATLVVKLADTEREKQARKAQKAQAQPSKPLRFYLFPQLLSISGAPQMSFLPPYNVLDYKTEGTTDPELKDLMKMTNDKLEMLVTELKSVVNLLENRVTYNDPIQPIQHSLLPVEHDEKQYKPNECDSKTLEVPGHYGHTKNPLALYSTMYPHVNQGNLLQGLNTNIFPGTDPKISNLIQSAGYIQPPYPDLSGLHYPVSYAGALVGDTPQYFSDGKVNIPNSHSNHASSAANTKIGSKIEGPPRANLFVYDIPQEYGDEDLANLFQEFGRILSTKVFIDRATGVSKCFGFVSYDTPASAQAAIRRMNGSQIGGKMLKVQLKRET

SEQ ID NO: 48398 - protein, 560 aa, Oryza sativa
MAGGQLNVLSTLDQAKTQWYHFMAIVIAGMGFFTDAYDLFCISLVTKLLGRIYYTDDSKDTPGALPPNVSAAVTGVALCGTLAGQLFFGWLGDKLGRKSVYGFTLILMVVCSVASGLSFGSSAKGVVSTLCFFRFWLGFGIGGDYPLSATIMSEYANKRTRGAFIAAVFAMQGFGILFGAIVALAVSAGFRHAYPAPSYSDNHAASLVPQADYVWRIILMFGTVPAALTYYWRMKMPETARYTALIARNAKQAAADMSKVLHTQIEESADRAETVAVGGESWGLFSRQFLRRHGLQLLATTSTWFLLDIAFYSQNLFQKDIFSKVGWIPPAKTMNALEELYRIARAQALIALCGTIPGYWFTVAFIEIMGRFWIQIMGFAMMTAFMLGLAIPYHHWTTPGHHTGFIVMYGFTFFFANFGPNSTTFIVPAEIYPARLRSTCHGISAAAGKAGAIIGAFGFLYAAQDQHKPEPGYPRGIGIKNALFVLAGTNFLGTIMTLLVPESKGMSLELYLGYSIEPKKEREVRRMEEEGEKVVAWACDAEGAGDGERRERTAAAAAGG

SEQ ID NO: 48399 - protein, 819 aa, Oryza sativa
MNIATGAMNTLLPKLGELLVGEYKLQKGVKGEIEELEKELKGMTAALHKVAETPVDQLDQQVKIWASEVRELSYDIEDAIDTFMLKCKGHEPATSFKKVTNLFNKFKTNHQIHGVIKDIMDQVKKVSERRDRCRVDDIAARPTVVDVDSRLEAMYRKATKLIGISKPKNELTKQLLEYDGSSSQQSNIISIVGFGGLGKTTLANSLFQELKAKFDSYCFVSVSLNPDINKILKNILLQLDEKMYSHIDETWETKQLIDKIRDFLNNRRFLCVIDDVWKKSAWDTIKLAVQDAKLGSKIIVTTRNKVIAEHAGGGVYEMKPLSDDDSRQLFCKRIFDSNDDCPADLCGVTEKILKKCGGVPLAIITTACLLASKPRNSEEWDKVNKSISLGLENNLDVDNMRKILSLSYSDLPFHLKTCLLSLSKYTEDELIRKYVLIWSWLAEGFITDETRPAGTSLQEIGESYFNELINRSLIQLMSENTLWDEDGKVHACKVHDMVLELINQLSVEEDFVTTYLSDGQQTGKHTCTAQKKKIRRLSLHNSNKSYASPEAREQLSKVRSITIFGKVDSIPPLSSFHVLRVLQLEDCSGMDKNHLNHLDKLLLLRFLRLGHYGATELPESIGKLESLETLDIRGARKPSSFKSHKVLFPMSFAKLRKLLRLYAGRVKLAQGLMLGDMKSLQELVIEATRKVIKEIGNLTELRTLRIVFSSEKTFELKESIQTSIQRFTNLQDLDLRNNNSFEEIIDMQQVPSGLQRLFMHHSYMKAFPCWINSSMLSRLTTLSIWLCFEYLQSDHLDRLAELPSLRFLRLQLAFVSEQL

SEQ ID NO: 48400 - protein, 193 aa, Oryza sativa
MAVSQSAQLGMATAFFGALSFLLAILGELNKPPHGTPIRGRGVVVCKFPADPTVALGALSAVAAACGAGVGALAVFFPYNGKPVPRKALFDYTLLYVFFHLAIGITVAGIATTAWVTASEAMHRVRNVHGVDPEYACPTAKTGVLGGVAFLNLDASLFWLLCLMLAGNVKEEYFDDGGGGGEVGDGVAGLEEK

SEQ ID NO: 48401 - protein, 250 aa, Oryza sativa
MVLGQLALWSKIANEASCGSPRWIGKSLSCVCIKRKGAYERICMNLTPVQEERLQRLRHRMKVYFDPSRRDHQEALKALWHATYPDQELQGLISEQWKDMGWQGRDPSTDFRGAGFISLENLLFFAKTFSASFQRLLKKQCGNRATWEYPFAVAGVNITFMIMQMLDLQSTKPRTFVRAVFIQMLSEDEWAFDLLYCVAFVVMDKQWLDKNASYMDFNEILKSTRTQLERELLLDDVMRIEDMPSYSLLC

SEQ ID NO: 48402 - protein, 47 aa, Oryza sativa
MYMRRLQGATVGGAAVPAGGTSFGSAPRGETKVMQLQADRSPPPILA

SEQ ID NO: 48403 - protein, 542 aa, Oryza sativa
MGARASRHRQSPDQSQSQSPSPHHKHHHHHQTTRAPKPKPKPQPPPPQQPRSQPPPPPRHQPQQAPQQAAAEDGVGRVLGRPMEDVRATYTFGRELGRGQFGVTYLATHKPTGRRYACKSIAARKLARPDDLDDVRREVHIMHHLTGHRNIVELRGAYEDRHSVNLVMELCEGGELFDRIIARGHYSERAAAALCREIVSVVHSCHSMGVMHRDLKPENFLFLNKREDSPLKATDFGLSVFFKPGEQFRDLVGSAYYVAPEVLKRLYGAEADIWSAGVILYILLSGVPPFWAENEDGIFDAVLQGHIDFSSEPWPSISSGAKDLVKRMLRQDPKERLTAAEILNHPWIREDGEAPDKPLDITVISRMKQFRAMNKLKKVALKVVAENLSEEEIVGLKEMFKSLDTDNSGTITLEELRAGLPKLGTKISESELRQLMEAADVDGNGSIDYVEFISATMHMNRLEKEDHIYKAFEYFDKDHSGFITVDELEEALTKYDMGDEATIKEIIAEVDTDHDGRINYQEFVAMMKNNSPEIVPNRRRMF

SEQ ID NO: 48404 - protein, 373 aa, Oryza sativa
MFESRNSRRSVTMDARRRRLSPVVVVAAFLFFPLFFGSQPAAAYGEASGAGGMTALQKHAAFFDKDNDGFVSPTETYDGLRALGLGAGFSILSAALINGVLSLKTRPRGYLDTEATRRRDSRDSGTETAERVRSSQRARQSREETAGDARAMDARRRRLSPAVAVAAALLFFPMFFGSHTPAAAAAYGEASGDAGVTALQKHAAFFDKDGDGIVSLSETYDGLRALGLGSGLSSLSAAFINGVLSPKTRPDNGTAPRLSIYIENIYKGIHGSDSSAYDSEGRFVAEKFEEIFAKHAKTVPDALTSDEIDELLQANRKPGDYTGWVAASSEWKILYKIGKDKDGLLRKEAVREVYDGSLFTKLAAARINDENQA

SEQ ID NO: 48405 - protein, 28 aa, Oryza sativa
MLFKGAYYAMNIVDLLAKSMSYFMDSRE

SEQ ID NO: 48406 - protein, 201 aa, Oryza sativa
MSFRAREMYKKVVRRVGGEGKLPAELMASVKNLLPDSKVVMGRAKRGIYAGRHIQFGNKVSEDGGNKSRRTWKPNVQEKRLFSYIHDRHIRVKVTTHALRCIDKAGGIDEYLLKTPYNKMDTEMGVAWKAKIEKMYSQLAQMEVGFFSPEEETKIEQGFEEARAAKREHRREARRALAKQTQLEAGNAGGDKQLKLLLMLQ

SEQ ID NO: 48407 - protein, 220 aa, Oryza sativa
MNYGQLAVQDSHAESLKDSLSAVRKSAQAAARIFQAFRVESFHRKKVVEYGDDDCGLSDEHTFSLISLQKVKQGQHDTRLHSAAVRIQNKFRGWKGRKEFMIIRQRIVKLQAHVRGHQVRKNYKKVVWSVGIVEKVILRWRRKGRGLRGFRPEKQLEGQTQIQPAKTEDEYDYLQDGRRQAEGRLQRALDRVRSMTQYPEAREQYRRLTTCVAEMQQSRV

SEQ ID NO: 48408 - protein, 203 aa, Oryza sativa
MAAKIYIVYYSMYGHVAKLAEEIEKGASSVEGVEVKLWQVPETLSDDVLTKMGAPSKKDVPIITPAELAEADGVIFGFPTRFGMMAAQFKAFMDATGGLWRTQQLAGKPAGIFYSTGSQGGGQETTPLTAITQLVHHGMIFVPVGYTFGAGMFEMEQVKGGSPYGSGTFAGDGSRVATELELQQAFHQGKYFAGIAKKLKGSA

SEQ ID NO: 48409 - protein, 123 aa, Oryza sativa
MPALRTLILRTRQRISWTVGGTGLFPNLRFCEMNIALTFLQGAMPMLTELQFELWAAEDGAAAGDVGLGQLPLLNYIGLLLMCTGATGRQVEEAEVAWRRMVNAHPNRPATVVHRIGRYFWFG

SEQ ID NO: 48410 - protein, 162 aa, Oryza sativa
MSEAQRSALNALLFRTGDQSRDIVLVLATNRPSDLGAAITDRIDEVIEFPLPGEEERFQLLRLYLNHYMLKEDGKNSFWDSLLKKQRQKIQVKDISDDLLREAARKINGFSGREIAKLMASVQAAVYGRPDCVLDPQLLMEVVEYKVAEHHQRIKLASETST

SEQ ID NO: 48411 - protein, 59 aa, Oryza sativa
MATTSSSPYHGVSGTAVAAYSSPRHHAVAVPLPLPGATVVTSSFPLCGGHRIRLPRARG

SEQ ID NO: 48412 - protein, 201 aa, Oryza sativa
MGCAASATDSAERRRPGRSPGHDGEQQQQQDGRRRGCKVAPEPKEEDGAAAAAFLASMPGSPSFRYYCQKSATVDAIVADADGDGDSDGDECVRITETPQPIKNNGHGSSEVEINPWLRSSSRIPNRIHPEFNMQLSKSAPEASRWVRFRGLALAAWCSLFSRHSRRSAASAPSHPPPPPPPAKSHQRFDAAAPAERSVLL

SEQ ID NO: 48413 - protein, 119 aa, Oryza sativa
MPMRAATSSPRCASFSCNRGGAHAHLGQSCGRPLGRAAGCLAAAFFASLERCSCVEFPTDDDDDHPPRSRDVVVVSEAAPLLPRATTAAPKKSTSTTTAGKGKISRGGFRCCDNTTTAN

SEQ ID NO: 48414 - protein, 235 aa, Oryza sativa; identical to SEQ ID NO: 32366

SEQ ID NO: 48415 - protein, 721 aa, Oryza sativa
MAAATALDSLPAPLRSLRLKTKQQELLLRVSALALIYVLAFVVRLFSVLRYESMIHEFDPYFNYRTTLFLSDHGFSEFWNWFDFESWYPLGRVVGGTLFPGLMVTAALLHRLLRALSLAVHIREVCVLTAPFFAANTTLVAYAFGREIWDSGAGLVAAALIAVCPGYISRSVAGSYDNEGVAIFALLLTFYLFVRAVNTGSLAWSLASAFGYFYMVSAWGGYVFIINLLPLYVLVLLVTGRYSQRLYVAYNSTYVLGMLLAMQIRFVGFQHVQSGEHMAAMGVFFLLQVFFFLDWVKYLLNDAKLFKSFLRITLTCVITVGTLALGIGTASGYISPWTGRFYSLLDPTYAKDHIPIIASVSEHQPTAWSSFMFDFHILLFLFPAGLYFCFKRLSDATIFIVMYGLTSMYFAGVMVRLILVAAPAVCLISAIAASATIKNLTTLIRTKSKSPQTVSGKSSGSKAAAKGAVDQSLPFQQNVAIALLLGAFYLLSRYAVHCTWVTSEAYSSPSIVLAARGHNGGRVIFDDYREAYYWLRQNTPSDAKIMSWWDYGYQITAMGNRTVIVDNNTWNNTHIATVGRAMSSYEDEAYEIMQSLDVNYVLVVFGGVTGYSSDDINKFLWMVRIGGGVFPVIKEPDYLVNGEYRVDKGAAPKMLNCLMYKLCYYRFGELTTEYGKPPGYDRVRGVEIGNKDIKLEYLEEAFTTSNWIVRIYKVKPPKNRS

SEQ ID NO: 48416 - protein, 109 aa, Oryza sativa
MATPFCAAACRLSISPPNAAPSAPGRARALARRGLVVAVHAEAGVGGINPSIRKEEEKVVDTVLAGELSKPLTPYCRCWRSGTFPLCDGSHVKHNKATGDNVGPLLVKK

SEQ ID NO: 48417 - protein, 505 aa, Oryza sativa
MPLAPCPSPPLPSSPWPARAPRRGGLLRARAVRAAPRPPSKWSLGSWRSLTALQQPEYPDKAELDEVLRTVEAFPPIVFAGEARKLEERLAEAAVGRAFLLQGGDCAESFKEFNANNIRDTFRVLLQMSVVLMFGGQMPIIKVGRMAGQFAKPRSDGFEERDGVKLPSYRGDNINGDSFDEKSRLPDPHRMIRAYSQSAATLNLLRAFATGGYAAMQRVTQWNLDFTEHSEQGDRYMELAHRVDEALGFMAAAGLTMDHPIMTTTEFWTSHECLLLPYEQALTREDSTSGLYYDCSAHFLWVGERTRQLDCAHVEFLRGIANPLGIKVSDKMDPKELVKLIDILNPQNKPGRITIITRMGPENMRVKLPHLIRAVRGAGQIVTWVTDPMHGNTMKAPCGLKTRSFDRILAEVRAFFDVHEQEGSHPGGVHLEMTGQNVTECIGGSRTVTFDDLGSRYHTHCDPRLNASQSLELAFIIAERLRKRRIASWQLNKNSHLGNIPSLGL

SEQ ID NO: 48418 - protein, 570 aa, Oryza sativa
MAGGGVEDTYGEDRATEDQLITPWSFSVASGYTLLRDPRHNKGLAFSEAERDAHYLRGLLPPSIVSQELQEKKLMHNLRNYTVPLQRYIAMMDLQERNERLFYKLLIDNVEELLPVVYTPTVGEACQKYGSIYRRPQGLYISLKDKGKILEVLKNWPERSIQVIVVTDGERILGLGDLGCQGMGIPVGKLSLYTALGGVRPSACLPITIDVGTNNESLLNDEFYIGLKQRRATGEEYHELLEEFMTAVKQNYGEKVLVQFEDFANHNAFDLLAKYSKSHLVFNDDIQGTASVVLAGLIAALKVVGGTLADHTYLFLGAGEAGTGIAELIALEMSKQTEIPINDCRKKVWLVDSRGLIVESRKESLQHFKQPFAHEHEPVKTLLEAVQSIKPTVLIGTSGVGKTFTQEVVEAMAAFNEKPVIFALSNPTSHSECTAEEAYTWTKGSAVFASGSPFDAVEYEGKTYVPGQSNNAYIFPGFGLGVVISGAIRVHDDMLLAASEALAEQVSEDNFARGLIFPPFTNIRKISAHIAAKVAAKAYELGLASRLPRPDDLVKYAESCMYTPAYRCYR

SEQ ID NO: 48419 - protein, 445 aa, Oryza sativa
MLEHLTTPAARLGDGYSIYRVPANVDRKHYEPRLVSVGPYHRSKHHLSAMEDRKRLYLLRFLDDGGESGHRRGLLLQDCIDRVRELEPRARACYFESPATGDDGEDDDGDMFVEMLLLDGCFVVQFFIQWFSGVADPIFNVGWNLPLLHTDLLMLENQIPYFILLALYDAYTHDGDGDLDRPARRPKPSLTSIITAYFSQKEGRQPAATETAQLQEEDDIDHLLHLYHSTFVKPPDHLPARRHRHGGGGSRPPRTIRCAKELAMHGVRFVPKVGTSNILDVAFHDGVFEIPRVAVDDSTCTRFMNLAAFEQCRGGDAETPAAGKHLTSYVVLMDYLINTAEDVVILERADVMENNLANEEAAAAFFNQLRVCSYIDYDDHYLAPVYRDVDAFCRRKWPKYKAKFRRDYLNSPWAIVGFCFATTFAVVTFFNTIVNILKTFFHVLH

SEQ ID NO: 48420 - protein, 135 aa, Oryza sativa; identical to SEQ ID NO: 48225

SEQ ID NO: 48421 - protein, 627 aa, Oryza sativa
MSAATACASPAAARPPLHIPLRSPPSAAHLPSAAASRRASSAACRCTASASASASPSTWDWTRWTRHFADVDQAESYASLLKFQLEEAVDNEDFAEASKLKKAILEATGNDAVAQVMSELKTAIEEQRYQDASRLTKLARTNLVGWWVGYAKDTDDSIGRIVRISPGVGRYVAKSFSPRQLVTASSGTPLFEIFLVRDDDETYTMKVVHMRPTKGTSSASSVSSATAESPAKEENESSLESSAISEGITDEANTDTTLKGDEDVEDKEQDVGNAKDSSVEGLKSVLNFFKSRIPEFKVQVINVDVSEEAELASDSSEELVQDDVKSTSENSLEDSTTEELQQDDVPDGDSDSAEDSKSPEMKLFISGVVHNKEDAGAKSYVRVPAEINNLEKDSFELYIPGKGSDRDLADTKAAKQKVADMAAKLASELMPSDVAKALWGTTKSSSKINKEVQELLKLTLSKARVKLTENTIFNRIITDSNGSDPFSGLYVGAFSPYGPEVVQLRRKFGHWNSTDEVEFFEYVEAVKLTGDLSVPAGQITFRAKIGKGKRLENRGAYPEEFGVIASYKGQGRIAQPGFKNPRWVDGELLVLNGKSTIPHLGGAELGFLYSVPEQSFLVLFDRLKLPE

SEQ ID NO: 48422 - protein, 786 aa, Oryza sativa
MVDAAAAAAECGELDGTDAMAYGDDRTPRDGMVFKSYEEVLNFYKRYALRTGFGVCVKKSSFTKAGLCRRLVLVCNKWGDGKEDACYQARPTAKTNCQATVVARLWSDGLLHLMDVNLEHNHALNPSAARFLRCYKTLPSGMSKDLVVRAARGECSTSGDIEVPIFDDWGRLKIGEDDVAAINGFFADMQAKQANFFYLMDFYGEGHLRSVFWADSRSRAAYQYFNDAVWIDTTCLRNRFDTPLVLFLGVNHHGELVLLGCGLFSDESTESFLWLLKSWLTCMKGWPPNAIVTDDCAAIKAAVREVFPNARHRISDWHVLRSISEKLGESAQFEGMKTELGTVIYDSLKDDEFEARWNNLISRFGLQDNEWITFLYENRHFWVPAFLKDTFWAGLSTVNHHESPNAFFEDSINPETKLVTFLSSYVNLLQNKYKMEEDDDLESLSRSRVLVSKFPMEEQLSRLYTFKMFTKLQNELNATMNCEVQLDDSTSSIVVIDLAESSGEMVNKKYEVVHCMETDRMECNCGLFQFSGIVCRHTLSVLKCQHVFDIPPCYVLNRWRNDFKQLHALDNPWKDLVTSNHIERYDYVSLQCLRLVEIGASSDEKHQHALKLIRDIRRTLLDDNLCRELEQKLTPSERAINGDSHMQAGSSEGGPAKKRRGRPPKKSKDTNVESVSNQYAHKDSLLVSSDVSQKDAFHSSSTASNLGTHVRTNGVVDLMEEVNPNELSFDSRYGVQSSHPHHYGNQLHPSNTMQFGQTTSTAEHSRVQWMYQNIFQDDQVPYGRRT

SEQ ID NO: 48423 - protein, 558 aa, Oryza sativa
MQQRRKSVFASAPFAMKQAALGAGVAARRNGAPLSLAAVVFALFVFATFLYNEDIKSIADFPFGAGALRAKSPDLHVLQEAVGAAHLAAGSIAKRGEEVIVRVLDAPASTAMAAAAGSSSNNSTIEVAKANANANANAADAGVKVDEGQERERDVTLPSVKEGGADEARRREDEEAAEKESSAKAAAATAALRTVVSVPDTCDLYRGNWVYDEVNAPVYKESQCEFLTEQVTCMRNGRRDDSYQKWRWQPTDCDLPRFDARLLLERLRNKRLMFVGDSLNRNQWESMVCLVQSVIPKGKKTLTKFVNGGNSNIFYAHEYNATVEFYWAPFLVESNSDNPQVHSVPDRVIQWHSIAKHAHNWLGVDYLIFNTYIWWLNTLDMKVLKGSFDQGATEYVEVDRPVAYKEVLKTWAKWVDRNIDPNRTTVFFMSMSPNHITPEAWGNYGGIKCAMETLPITNRTTSLDVGTDWRLYAGAQEVLQTFRRVPVHLVDITALSELRKDAHTSVHTLRQGKLLTPEQQSDPKTYADCIHWCLPGLPDTWNQFLYARIASAPWSSDQ

SEQ ID NO: 48424 - protein, 351 aa, Oryza sativa
MENGHAKNLVAVIGSGNWGSVASRLIASNTAKLPSFHDEVRMWVFEEILPTGKKLSESINQANENCKYLPGIKLGANVIADPDLENAVKDANMLVFVTPHQFVEGICKKLVGKLRPGTEGISLIKGMEVKMEGPCMISKLITNILGINCCVLMGANIANEIAVEKFSEATIGYKKDKEVATRWAKLFTTPYFLVSVVEDIEGVELCGTLKNVVAIAAGLVDGLDMGNNTKAAIMRIGLREMRAFSKLLSPTVRDNTFFESCGVADLITTCLGGRNRRVAEAFARNGGKRSFDELEAEMLHGQKLQGVSTAKEVYEVLTYRGWQELFPLLSTVHEICIGQLPPTSIVEYRIH

SEQ ID NO: 48425 - protein, 63 aa, Oryza sativa
MCRWNDSCLVLIRITYICVSLIILILWHTNNLTMKSCINATKLCTVLLNFSACAFLFVALGYH

SEQ ID NO: 48426 - protein, 521 aa, Oryza sativa
MESRGRRPRSPERQRPAARKVPVVYYLTRSRHLEHPHFVEVPVSSPEGLYLRDVISHLNMVRGKGMAAMYSWSCKRSYKNGFVWHDLGEDDLVHPATDGEYVLKGSELLDQSSSGQFYQGTNGNQKQQSRLKEGARLPLPREASYSSSPPSVIVREAKPRRSPSVPSLEEDDSPVQCRVTSLENMSPESEPQRTLLSRAGSASPAEFRVYKPTGCVDAATQTDDLGRRSVRKVPEMHKKSLSTDHDSVVREITEYRQSQPRRSAELQGIAREAMSQCHTPLSIPSSRGKSESLESLIRADNNALNSFRILEEDDIIMPTCPRLRPANVLMQLITCGSLSVKDHENIRLVEGYKPRFPNMKFPSPLISRTMMMGELDYLSENPRLMGMRLEDKEYFSGSLIETKMQRDVPADRYSALKRSSSYNAERSNETLDCARPDEDTVNTSRARCLPRTPILSSFLHPKSEAMKSPISDCRRSSSAGPDCSLASSGDGSKRFIDATGAPGSRIDSFRKEEKLVKIEES

SEQ ID NO: 48427 - protein, 250 aa, Oryza sativa
MEVAAAEDALEESGVAVYLPRLLAGVISGALTGLFALAGALTGAVTGALAGRASDSGVLRGAGLGAFAGAVLSIEVLEASRAYWCSDRLGSHGTSSMADFIEQLLQARFVQEQIVPSGYATHRWQVSISDFGHDDLYDIFGDCSSKGLSRESLNKLPHYVVTDQTRNSFGEDLSCTICLQVHLSKLALCCRQTCLAALHNFAHGLGSTTIIKAKQHPFHDCRQYSECLVSIFELSPFWQSLLRKSRSPVI

SEQ ID NO: 48428 - protein, 345 aa, Oryza sativa
MGDASASTSAPATPTSTLICREDGNDLFSADPADDDGGGGSGGDWELSIADDDHVLLMDRDDEYLALMLSKERCAGGGGGGERGDEEEEEMVEEWMKNARAWCVGWIVKTNAGFRFSLKTAYVAVTYLDRFLARRCVDRDKEWALQLLSVACLSLAAKVEERRPPRLPEFKLDMYDCASLMRMELLVLTTLKWQMITETPFSYLNCFTAKFRHDERKAIVLRAIECIFASIKVISSVGYQPSTIALAAILIARNKETAPNLDELKSVVGSLWQQLDTGHVYSCYNKMMIQEDRSMQSTTEVASSGVSVAHIGGSEDSAMGGANNATTLEATPDKKRKRLHSPQRQ

SEQ ID NO: 48429 - protein, 432 aa, Oryza sativa
MADAMVTAGYVTECTQMFLVARRNASDASLRALGYEKASIDDVVKMTWEALEAEIATWTKAFRHTINVGLSTEHDLCARVFAGRHAAVGRGMFADLARCVMLHMLNFTEAVTMTKRAAEKLFKVLDMYEATRDASPVIDAFLTADDGNNSTALTDLKHELNSVRSRLGEFAAAIFRELESSIRADAGKQPVPGGAVHPLTRYVMNYLKYACEYNSTLEQVFREHGAHGGGGGGDGENPFAAQLMEVMELLHGNLEGKSRLYKDPSLSNIFLMNNGRYMLQKIRGSPETNAMLGEAWARKQSTNLRQYHKNYQRETWSRVLGLLRDDGVLTVKGSVQKPVLKERFKQFNAAMDEIQRTQGAWVVSDEQLQSELRVSIAAVVVPAYRSFLGRFAQTFSAGRQSEKYVKLSADDVEAIIDELFDGNATSMTRRRT

SEQ ID NO: 48430 - protein, 467 aa, Oryza sativa
MDNGMLVPDQVVTDMVVSRLSQPDVRERGWLLDGYPRSYAQAQSLESMKIRPDIFIVLEVPDDILIDRCVGRRLDPETGKIYHIKNFPPENDEVSARLVTRSDDTFEKVKSRLDTYKQNSEAVIPTYSDLLNQIDGNRQVEVVFNEIDSLLQKICENASFNMLAKTNGKPQDSKDTTASKNEFRGIPTRLNNIPHSREIRKYFYNDVLVATRHAVEDKKTRLQIDINIPELNPEMDVYRIGTLMELVRELSLSFADDGKRVKVCVQGSMGQGAFAGIPLQLAGTRKILEIMDWGEYGAKGTFINFGAVGASEVDKEDDMFILIAPQNAVGNCIIDDMKAMTDAAGDRPVILVNPRLKDMPGSSGVMQTMGRDMRLKYAASFETCYSFRLLFYAGSFYPIMGALRMAYPNKYEIYRRVDEPNGQERYVLLEEFVEKPTPDEITNAFRPRKNENEKSASGFWGFLSGIL

SEQ ID NO: 48431 - protein, 466 aa, Oryza sativa
MGLRSKQPKALAFRCYAASHRSLTLAVWSLAALVVVVNFHLLIIHKEDESTSIHEINRSIVSELEEVEEEKFRVSPPRSRRNPRAVRRKGEQKPPSVVDEFLDESSAVHDMFFPERNMAIDPINGGNDSMYFYYPGRVWLDTDGNPIQAHGGGVLYDEKTETYFWYGENKDGKTYKAHSKGADRVDIVGVSCYSSKDLWTWRNEGVVLRGEKKNVTHDLHKSNVLERPKVIYNDRTGKYVMWMHIDDTNYTKASVGVAISDSPTGPFSYLYSKQPHDCESRDMTIFKDDNGKAYLIYSSEDNSELHIGQLTDDYLDVTDNMRRLLIAQHREAPALFKYEGTYYMITSGCTGWAPNTALAHAATAIMGPWETLGNPCVGGNDIFRSTTFFSQSTFVLPIPGLSGSFIFMADRWSPSELRDSRYVWLPLTVGGLPDEAADYSFMFPLWSRVSIYWHRRWRLPEGWRDS

SEQ ID NO: 48432 - protein, 700 aa, Oryza sativa
MEYGGGREGGGGMNGNGTAYAGALSPAARYAESGGASLTWENLTAVLPGGGGRATKKLVQGLYGYAVPGRVVAIMGPSGSGKSTLLDALSGRLARNVLLTGKVLLNGKKRRLDYGVLAYVTQENVLLGTLTVRETVTYSALLRLPSTMSKAEVRRVVDDTLDEMGLRECADRNIGNWHLRGISGGEKKRLSIALEILTRPRLLFLDEPTSGLDSASAFSVIETLRQLAVDGGRTIVSSVHQPSSEVFALFDDLCLLSSGECVYFGDAKLAPQFFAETGFPCPSRRNPSDHFLRCVNADFDDVAAAMKGSMKLRAEADFDPLLKYSTSEIRERLVDKYRISEYAMMVRNTIHEISKIEGVIEEVVMGSQASWCKQLTTLTRRSFTNMSRDFGYYWLRIVIYVLMAACLGTIYYDVGTSYAAIQARASCGGFVSGFMTFMSIGGFPSFIEEMKMFTLERQNGHYGVAAYIISNFLSSMPFLLAVSWASASITYWMVKFRPGFSYFAFFALNLYGGVSVIESLMMIISALVPNFLMGLILGAGVIGIMMLTSGFFRLLPELPKIFWRYPVSYIVYGSWGLKGAYKNDLIGLEFEPMMPGQPKLTGEYIITKMMGLSLNHSKWLDLSMIFVLLFAYRLIFFLVLKAKEAAAPYIRVAYTRFTIKRLERRASFRKTLAMSSMSKRHNQPPHPMAVQEGLNSPMPY

SEQ ID NO: 48433 - protein, 208 aa, Oryza sativa; identical to SEQ ID NO: 30754

SEQ ID NO: 48434 - protein, 508 aa, Oryza sativa
MGWAWRREQWAVAWLSVAVLGAALVGAAGAFEEGTAVYIVTMKQAPVFHKRLDLERFGSSRVAGGGGGGGGDTPSTSILMKPRHGPAQPMNYGSYLVRLQNSLLKRTLRGERYIKLYSYRYLINGFAVVITPQQAERLSMTKEVANVMLDFSVRTATTHTPEFLGLPQGAWVQEGGPQCAGQGVVVGLIDTGIDPTHPSFADDLITDSYPVPAHYSGICEVTNDFPSGSCNRKLVGARHFAASAITRGVFNASQDHASPSDSDGHGTHTASIAAGNHGIPVVVAGHHFGNASGMAPRAHIAVYKALYKSFGGFAADVVAAIDQAAEDNVDIISLSITPNRRPPGLATFFNPIDMALLSAVKAGIFVVQAAGNTGPSPKSMSSYSPWIFTVGASAHDREYNNYVVLGNNLTITGVGLAPGTDGDSMFTLVAAPHALKNNVASPTEMSLGECQDSSHLDEDLIRGKILVCSYSIRFVLGLSSVKQALDTAKNVSAAGVIFYLDPFVIGSS

SEQ ID NO: 48435 - protein, 247 aa, Oryza sativa
MSELANKFLVLHLDGEGGGADDTEEALIQTSSSIKEADAGENALSDTLVLNYDEGSLVSSSGDYQMPLVWIDLEMTGLDVAKDRILEIACIITDGKLTKQIEGPDLVINQKKDLLDNMDEWCKTHHAASGLTQRVLQSTISEHDAETQVLDFVKKHVGSSPPLIAGNSVYVDLLFLKNYMPQLAAIFSHVIVDVSSIMALCIRWYPKERKRTPQKGKKHRAMNDIKESIAELKYYEDNIFKPQKSKQ

SEQ ID NO: 48436 - protein, 745 aa, Oryza sativa
MLVCLRRRGLSLLRQRPPRPFPPLPRPRSSPPRVASLRPLSAAAMGENSAAAAGKGKEAKGKATTSASASAPNVEPDVAYLEAVTQKRIRQFEEIQAKQALERLNIGGEPIRITLPDGAVKDGKKWISTPMDIAKEISSGLANSCLIAQVNGTLWDMTRPLEGDCELKLFKFDSNEGRDTFWHSSAHILGESLERAYGCKLCIGPCTTRGEGFYYDAYYNDLTLNETHFGIIDAQAQKAVAEKQPFERIEVSRAEALEMFAENKFKVEIINELPEDKTITVYRCGPLVDLCRGPHIPNTSFVKAFACLKASSSYWRGKADRESLQRVYGISFPDSKRLKEYKHLLEEAKKRDHRLLGQTQDLFFFHQLSPGSCFFLPHGAIIYNKLMDFLRQQYRDRGYQEVLSPNIYNMQLWETSGHAANYKENMFVFEIEKQEFGLKPMNCPGHCLMFEHRVRSYRELPLRMADFGVLHRNELSGALTGLTRVRRFQQDDAHIFCRESQIKDEVKAVLDFINYVYEIFGFKYELELSTRPEKYLGDIETWNKAEQQLTEALNEFGKPWQINEGDGAFYGPKIDIGVFDALKRKFQCATLQLDFQLPLRFKLTYSAEDEAKLERPVMIHRAILGSVERMFAILLEHYNGKWPLWLSPRQAIVCSISSNSVEYAKQVRARIHEAGFHVAIDETDRTIQKKVREAQLAQFNYILVVGAQEAETGQVSVRVRDKAELATVSIDDIITRFKEEVAAYK

SEQ ID NO: 48437 - protein, 119 aa, Oryza sativa
MEIIVILSLVVLLVLGALFVLPKSRNKGKAKEASSNAKSVTFRSYTKEEISAHNTRTDCWVIIKDKVYDVTSYVEEHPGGDAILNNAGGDSTEGFFGPQHGFRVFEIIEDFCIGELKHS

SEQ ID NO: 48438 - protein, 146 aa, Oryza sativa; identical to SEQ ID NO: 44232

SEQ ID NO: 48439 - protein, 468 aa, Oryza sativa
MEANTGGGGGVLVVSRRMIRPEFKELPPEHDTTVHLTPWDLRLLTVENIQKGILLPKPPTGGETLVEHLASSFARALGRFYPFAGRLVVEEVDGGASPASSVSVSLRCNDEGAEFVHAAAPDVAVADIAASLHIPRVVWSFFPLNGVVAAHAATESLPVLSTQVTELSDGVFIAMSVNHVVGDGTNFWEFMNTWSEISRSSGGELGISPSASTSTSPPLVVKRWFLDNCTVPIPLPFAKLEQIIPRSEHQAPVQECFFAFSAASIRKLKAKANDEIAGAAVAISSLQVLLALVWRAVSRARGLAPRQETAYVVVVGCRGRVGGISSGYMGNAVVPGAVRLTAGEIMERGLGWTAWQLNKYVASFDEAAMRGALASWPRRPDFFSVLSLLGGAAIITGSSPRFDVFGNDFGWGRPATVRSGGANKFDGKVTVYEGPDGAGSMSLEVCLTPAALAKLVADEEFMGAVTTP

SEQ ID NO: 48440 - protein, 329 aa, Oryza sativa; identical to SEQ ID NO: 32405

SEQ ID NO: 48441 - protein, 124 aa, Oryza sativa
MEEEREVQEQVPQVAGVESQSKRASASLTPASSKATAGAAAVGRAARIPASRSRGSATTNKAMATPTVAPSSRAKASNPSMSVEMVIMSDGEEDEENSFDLNDEMSVSLPSSGSASEGDDGDDK

SEQ ID NO: 48442 - protein, 224 aa, Oryza sativa
MAAAAVRAAEELAEREMAGRDASHDAAHALRVRDLALSLAAELGLSSSPDRLLIVEIAALLHDIGDYKYTKDNAEDMSIVERFLEEVELEQGQREEIVAIIKGMGFKNEVSKKSVVEPTLEFAIVQDADRLDAIGAIGIARCFTYGGSKKNTLHDPKILPRDNLSKEKYMSKDEKQTSINHFHEKLFKLKDMMKTEAGKKRAEKRHKFMEDFVAEFYEEWSGRA

SEQ ID NO: 48443 - protein, 518 aa, Oryza sativa
MGGDHGKLMKSLKGAAQKYLGVGFLLGFFLVLLTYFTVSEQFAIAAPNAIRKTSPGHASPTIPPPVEEKRPQLPPIIEQRQAPKAEHEHAAVVQEKTPSAEEIEIQKETEEDHTKEKPTDDVTTTVEESAPAKKPACDIQGPWASDVCSIDGDVRIHGAAHDVVIPPPIEGGGSNPNPREWRVVPYSRKHMGGLKEVAVREVASAAEAPACDVRSPVPALVFAMGGLTGNYWHDFSDVLIPLYLQARRFDGEVQLVVENIQMWYVGKYKRVLDRLSRHDIVDMDRDDKVRCFPGAVVGIRMHKEFSIDPARDPTGHSMPEFTKFLRDTFSLPRDAPVSLVDNAAAVRPRLMIISRRHPRKLMNVEEVVRAAERIGFEVVIGDPPFNVDVGEFAKEVNRADVLMGVHGAGLTNSVFLPTGAVLIQVVPYGKMEHIGKVDFGDPAEDMRLKYMAYSAGVEESTLVETLGRDHPAVRDPESVHRSGWGKVAEYYLGKQDIRLDLARFEPLLRDAMDYLKHQ

SEQ ID NO: 48444 - protein, 439 aa, Oryza sativa
MDCFAETEGKRAHDPLYQRRAAAAATPATGVPVDDVDKVVDVPGAVIVGAGPAGVAVGALLGLRGVAYVVLERCGCIASLWRHRTYDRLCLHLPKRFCELPLRPFPASFPEYPTRDQFLGYLDAYAREFGVEPVFRRAVISAEYDGESWWVYTREVVAAAAGGEQAVLGCTMTVYRSRWLVVATGENAEPVVPEMDGAGRFKGQMMHSSEYRNGDGYAGKKVLVVGCGNSGMEVSLDLCNHNARASMVVRDTVHVLPREILGFSTFGLSMWLLRWLSVQTVDWLVLLLSFLVFGDTARLGIPRPSLGPFELKSVSGKTPVLDVGTLAKIKSGDIKVTPAIQCFQEHGVEFVDGSTEEFDVVILATGYKSNVPYWLKEKEFFSEKDGFPRKGNAWKGQNGLYAVGFSRRGLSGVSMDANNIVQDIVQRLHDMGYERSENN

SEQ ID NO: 48445 - protein, 171 aa, Oryza sativa
MASSSSWWVVMLLMVVAAAGWGGVAAATAAEAAHEVLRAHGLPRGLLPAGIADFRHDEGSGRFEAALGESCTAQFEVGLRYNATVAGVISYGRIASLSGVSAQDLFLWFPVRGIRVDVPSSGVIYFDVGVVFKHFPLAVFEAPPPCTPDPLLLLTQVCEDGSVAGGGAASQ

SEQ ID NO: 48446 - protein, 301 aa, Oryza sativa
MPWSRDFSTFLCGWLPATRQSTASTGPPSAFQPISSPSTMATVANYCRKRIHAVLTEELRRAEDDACGSDLSGLESKKLWEKAFVDCFSRVDAEVGGNAASGAPPVAPDTVGSTAVVAVVCSSHVIVANCGDSRAVLCRGKQPLPLSLDHKPNREDEYARIEALGGKVIQWNGYRVLGVLAMSRSIGDKYLKPYIIPVPEVTVVARAKDDDCLILASDGLWDVMSNEEVCDAARKRILLWHKKNAATASTSSAQISGDSSDPAAQAAADYLSKLALQKGSKDNITVVVIDLKAHRKFKSKA

SEQ ID NO: 48447 - protein, 675 aa, Oryza sativa
MMPRVLMASTEDTATAPAGGPPEPPPQSSSASPSPSPPPPPPTPSSPQRPPPPPPPATPPPPPPASPGKNQSPASPSQDSPPPVASPSVSSPPPAPTTPPSPPPPSKSPPPPSPPPTTSSTPPSHQSPPEEGTSPPPSPSSGATTPSPPPNAQSSSSSSTPPAGAGTSPPAPREMPSPGTPPSPPTTLITTQAPPIQPPPPPGGNSMIMPSSLTTAGTSQSPPDATTAGAPPPPAPSVGAWGGNVPSGLLIGVAFAGFLLALASMFLFLCIKNRWKRRRRPAQVMNLARRRTLVVPERVASPEVYQPSNGPTASPSGTSSYEFSGTTSWFTYDELAAVTGGFAEEKVIGEGGFGKVYMGALGDGRCVAVKQLKVGSGQGEKEFRAEVDTISRVHHRHLVTLVGYSVTEHHHLLVYEFVSNKTLDHHLHGGGLPVMDWPKRMKIAIGSARGLTYLHEDCHPRIIHRDIKSANILLDDAFEAKVADFGLAKFTNDSVTHVSTRVMGTFGYLAPEYASSGKLTDRSDVFSFGVVLLELITGRKPVDSSQPLGEESLVEWARPLLVDALETDDFRELADPALERRYSKSEMRRMVEAAAACIRYSVTKRPRMVQVWRSLDVEGSSPDLTNGVKLGQSMAYDSNQYSADIELFRRMAFANDLSTAELGYSGKDDVRRPPR

SEQ ID NO: 48448 - protein, 476 aa, Oryza sativa
MEEFELQQQPYYSKLLLGSPLEIANVDDSDLQLVAGVPSDPPPAPPTAVKKKKKRSLPGTPDPSAEVVALSPRTLLATNRFVCEICGKGFQRDQNLQLHRRGHNLPWKLRQRGGAGGGGGGEPPRKRVYVCPEASCVHHSPSRALGDLTGIKKHFCRKHGEKKWKCDRCGKRYAVHSDWKAHSKVCGTREYKCDCGTVFSRRDSFVTHRAFCDALAQENNKLAQPMNMAAVTSALQGQQQAHHPVADDDDAAGVKSPHLKMFPDVDNIVAAATAGNPLLPPPLSMAGCMLSSLAAPLSSPFLPGCKLGVDAARDAAMVFPPPPPPAGSAAAIMSATALLQKAAELGATTSTGCYGGVAFPAMGIAGGLDRLPAIGHHLAPYDDVVVPAALQGQTATQLVGFDLGGLLPGQLYGGGGGAMTRAIGSLMHGGDQHAGVVDRRRGEGVRVVDYMGVDDDDDHGCFDGVGPFGPHIGPWA

SEQ ID NO: 48449 - protein, 310 aa, Oryza sativa
MIRRVQGEVCAALEEADGSGARFVEDVWSRPGGGGGISRVLQDGRVFEKAGVNVSVVYGVMPPDAYRAAKGEAGKNGAAADGPKAGPVPFFAAGISSVLHPKNPFAPTLHFNYRYFETDAPKDAPGAPRQWWFGGGTDLTPSYIIEEDVKHFHSVQKQACDKFDPSFYPRFKKWCDDYFYIKHRNERRGLGGIFFDDLNDYDQEMLLNFATECADSVVPAYIPIIERRKDTPFTEEHKAWQQLRRGRYVEFNLVYDRGTTFGLKTGGRIESILVSLPLTARWQYDHTPEEGTEERKLLDACINPKEWLDL

SEQ ID NO: 48450 - protein, 470 aa, Oryza sativa
MRAKKMFFGFSVSLILINLASIMERADENLLPAVYKEVSAAFNAGPTDLGYLTFLMNFLKSIASPLAGVLALQYDRPAVLAIGTVFWAVSTGAVGVSQYFQQVAFWRAVNGLGLAIVIPALQSFIADSYKDGTRGAGFGLLSLIGSIGGIGGSILATIMAGRDYWGLPGWRFAFLMVAFLSLLIGLLVYFYTVDPRKVSPSHFGDDEDHHERSHLIGNGIFPPQSIWKDSWIAARSVMKVRTFQIIVLQGIVGSLPWTAVVFFTMWFELIGFDNSSSAALNSMFAIGCASGSFLGGVIADRLSKYYPDSARIMCAQFSAFMGIPFSWILLTVIPQSVDYWSAFAVTLFLMGITISWCATCANNPMFAEVVPPKHRTMIYAFDRAFEGSFASLAAPAVGMVTEKIYGYNAKTVNLENGSVAGAYALSRGLLTMMIVPFGLCFLFYSPLYFVFKRDRENVRRLPSVKEQELI

SEQ ID NO: 48451 - protein, 558 aa, Oryza sativa; identical to SEQ ID NO: 48423

SEQ ID NO: 48452 - protein, 346 aa, Oryza sativa
MAAATVSNKRVILKRYVTRLLSEDDMEVVTVEAPPLDVPTGSKGVVVKNLYVSCDPYMRNRMTHHELPSYIPDFVPGEVLENFGVMKVISSGHLDFKAGDLVWGMTGWEEYTVINNPESLFKINHPELPLSYYTGILGMPGLTAYAGFFDVPKPKKGEYVFISGASGAVGQVVGQLAKITGCYVIGSAGYDEKVNLLKSKFGFDDAFNYKKEQDLEAALRRYFPEGIDIYYENVGGKMLDAVLPNMSLGGRIVACGMISQYNLEQPEGVRNLYYIVTKRLRMEGFHVFDYYDRYYRFEEEMAGYLKEEKVSYVEDVVEGLDTAPAALIRLFTGRSVGKQLVAVARE

SEQ ID NO: 48453 - protein, 621 aa, Oryza sativa
MEVGGPQDALDNRSDDNDFDKNDNSDPVVYQLVRVEGDGTLIPATEDEVLQFETFLHDEKVDDDLPSIDDVTHVEEYFTNDCIVKKPEFEEGPSKLDTADVQTQKLDAGLEEDRLCTLNDSIVLPSNCSAVHDQQLDKLNTEQGANIIAQQDNASTETTKSTVLNDLSSDKEKADACSKPVNEASAGQSVSGVTSSVPDFSILKGEVCLDDLTMRELQEAFRATFGRQTTVKDKLWLKRRIAMGLINSCDVPSSGCVVRDYKVIAMGAKQEIPVVEAIPKMELEANLVRDQVMNPGHERDLPSSLSYHSEEQQRSSKRLKRVPTDNDEPQVTIFAEQGTTKRIRKPTKRYIEELSDIDTHESTGRLSSPGKRHVYDEVLLRPRIAPLHEVDSLSTAYPTREDTLGGCSVHVPYVSRMRRGRPRSNFIPFLDPEPSVECTEAPAADVVNLEKEGERKNHKNTGKKGVHVETSCEKDVQGLQDKDFCDSDDNPKTKRGGKRKHHRAWTLCEVVKLVDGVARYGAGKWSEIRRLAFSSYSYRTSVDLKDKWRNLIRASQTQLSTENDGVCPRKSNPSAIPIPVSILLRVKKLAEMQSQAGDVRVPIKFSGQSTTVVQGKVSGFL

SEQ ID NO: 48454 - protein, 647 aa, Oryza sativa
MATKLRQPSTDAEKTEVGEIDTRAPFESVKAAVSLFGEVRFSSDKSAARKPKPPQAERVLAKETELHLAQKELNKYKDQLNNAETTRVQALSELEKAKKTVEDLTNKLDAINKSKELAIQATEDAKTRTKQLEGGDSLEAVGKDGPLKQELDVAREQYVVALADLDAAKQELRKLKKDFEASLDMRLAAAQQEEESLHLAETNKQKADQLRKEIATIQESLTHVKAATEQAHEEEAQILAEKDVTRKTYKQALEEAEKKLSSLKKDFDPAVYKSLKEKLDETNLEISSMQKKIEDARAQDLESIATVSTELDDAKEMLQKVAEEESSLRSLVESLKQELEAVKEEHDQLKQKDTETESIVGDLHVKLQKCKSELEAAVAAESKATSASDDLMLALQQLSSESKNALQEAEVMQKSAADLRDEAEAARVALAEAEQKLQSALKEAEEAKSAEAKALDQIKQLSERASAARASTSESGAKITISKEEFESLSRKVEESEKLSEMKVAAAMAQVEAVRASENEAIKKLEAARKEMEDMELATEEALKRAEMAEAAKRAVEGELRRWREKEQKKAAEAQPAPEAQAHGTASSPVQKASAGKANEKNDGPHKNSRTLLKKSFMLPNITSMFHKKKNHADGSSPSHLPGDKSV

SEQ ID NO: 48455 - protein, 58 aa, Oryza sativa
MNRRKEYSHIPAGCEEVGLKHQRLRRYPGFDTSVRLPSSLEWLEDRGISCLLQRPSNT

SEQ ID NO: 48456 - protein, 146 aa, Oryza sativa
MAPPLLRGVPVLIALVVMAAVALLPAAAADDMGGVVASASGRRKMAAAAATCDGAVGECDVDDEEEVEEMALMGAAGAASGETLMRRSLAARRPTNRYVSYAALDANKVPCNKRGQSYYQNCASQKAANPYRRGCSAITRCARNTN

SEQ ID NO: 48457 - protein, 989 aa, Oryza sativa
MAPPRHLLLLLLLGFLAAASLAFTLTAAVYEDQVGLADWHQKYIGKVKQAVYHSQKSGRRRVVVLTEENVIASLDLRSGDIFWRHVIEKNDPVDELSLSLGKYVVTLSSGGSILRAWNLPDGQMIWETNLQVSKSSKPLLHVLSNNKVAKDNLVFVLAGRWIYAVSSIDGVISWGKEFSLDGLDLKQIIQSPENDIVYAVGLAGSSKLNLYQLNAKTGETVKHIQESFPIALCGETILGSHNVLVALDETRSDLFLIELKGESISYNKVHISDLVQDLSGTVKLLPLMSNGVIALQASSTVSLLKLKGIDGLEVIQSFEQPAAVSDALTITEKDEAFAVVQHTGSEIEFVVKFTSDVTGEVIREKINIDQHRGNIQKVFLNNYIRTDKSHGFRALVVMEDHSLLLVQQGEVVWSREDGLASIVDVTTSELPIEKDGVSVANVEHNLFEWLKGHMLKLKGTLMLANADELAAIQAMRLKSSEKNKMTRDHNGFRKLLIVLTKAGKVIALHTGDGRIIWSNLLQSLRSSKSGEMPSALRICQWQVPHHRVMHENPSILIIGRSGADSAAPGVLSVLDSYSGEELNSLKLDHSVVQIIPLTVKDSSEHRLQLIVDSHSRAHLYPRSPDAMNVFLHEMPNTYLYTVDIETNVIRGHSLQKSCDNSADEYCFSTKELWSIVFPSDTERIAISETRKMNEVVHAQAKIIADQDVMYKYLSKNLVFVATVSPKASGEIGSAAPEEAWLVAYLIDAVTGRILHRVTHHGAQGPVHAVVSENWVVYHYFNLRAHRFEMAVIEIYDQSRADNKDVMKLILGKHNLSAPTTSYTRPEVMVKSQSYFFTFSVKAIAATQTAKGITSKQLLIGTIGDQVLALDKRFVDPRRSVNPTQQEKEEGIIPLTDALPIIPTSYLTHSLQVEALRGIVSIPSKLESTTLVFTYGVDLFYTQLAPSRTYDSLTDEFSYALLLITIAALVAAIVVTWIWSEKKELRDKWR

SEQ ID NO: 48458 - protein, 573 aa, Oryza sativa
MASLTPGVLLKVLKNINSDVKVCGEYRSILLQVISIVPAITGSELWPDHGFFIKVSDSSHSTYVSLSKEDNELILSNKLQLGQFIYVEKVQSSIPVPVLVGVRPVPGRNPCIGNPKDLMQMSTPTGISEALAHQRKATKSAELSESEKENSQRKVVIKEQKAVVASRYMLGISSNNSKITNLNSSIDSDKSNGGSSICSANQKSAPTKFKQESKPQERPNTPSRSPAKIVSAKQEINKDTRKTSASSPSQNGSAVVKKQMSKDSKKESASEKNSPPKLYKTSPPTPTPTPPPPAMTSPPKLNLAAKPNGTSGTVTSTPTVKRRVTETVSWDSLPTSLIKSVKVVARRKTIALVVAAEAQREATAAASLLKGLGIFAEIRKSAEEDPHAAITKFFQLNRLIIQQSVFWKDYSSEPVKESRPEKEKPSRKASASQNKAVAGSTAKNSDDAYTSEKIDWAREDGFKEISRSWIILKKESQSWFLSFLEDALEAGFKFEGQNKNTRERVRGHSKGGDGQIAVRLSQLKETSNWLDQLHSEVDKSQDALVETIEQLKQKVYTCLLGTVETAASALEAR

SEQ ID NO: 48459 - protein, 599 aa, Oryza sativa
MAYSGDGIGCCSLLHYAESPMTMARRWLHCWIGDSLLAFSLGGGSCLPRLLLAKMDYSLLKDVTQESHRWRVRVRATRFSEFTTANEPDKILRLDLVLLDEQGDMMDAQIPGRRVVQFKPLLKEGAVYYIKYFEVAEARPQYRPVDRLLMAKFTAHTTVTEDTGPPSTFPSYACKILSFDELRARAYKKDIISDAIGIMTAIGPVQTVSYAGVMKAVLNDHITNGRETVVVALWGPHATQFHAENLQQQADNGHVVMLFVGLTVKFRDRQLALQGSTVCRWYPNAPIQETISLISSLHGNPQVVRMIEANFGQKEAINVKVSDICDLNPHEALGNSYVVNIIIRDLVPAEPWWYIACSTYKRGTAREGNAYKCPRCSTDAIETRYRVVIMGIDPSDLANDQAKAAEFTFFGEIGEQLIGRPVLNLVASVHGARDIVPPEIKAIFGRQYVIRTSVSRGSLQRNRVSYQVDSLMLPHPDPSHAICLPSHDTCMGSSGHGSTSANAVEPHAIVLSSTQSMPPSTPFVLPDTKDTRDSHGDQHEATPPTPQVIAIAHLDKKRKSSMADENLGHGGSSPDEHDRRKPSVVHTLFVDKLPPELPK

SEQ ID NO: 48460 - protein, 356 aa, Oryza sativa
MPRETPPPPPPEGGEVHEVVEGEDGQAEDQEERWARLLPELMSEVVRRVEASGGERWPARKDVVSCACVCRRWRDAAVAVVRPPAESGKITFPSSLKQPGPREFPMQCFIKRNKKNSTFYLYLGLTNATVDKGKFLMAARRFRRGPHTEYIVSLDADDLSQGSNAYMGKLRSDFWGTNFKIYDSKPPYDGAKASSSRSSRRFGSRRISPQVSAGNYEVGQVSYKYNLLKSRGPRRMYCALECPSTQETWENCLKTKFRKPTGNTVLRNKAPRWHEHLQCWCLNFHGRVTVASVKNFQLVAAADPNDPASSKDEETVLLQFGKVDDNIFTMDYRQPLSAFQAFAISLSSFGTKLACE

SEQ ID NO: 48461 - protein, 83 aa, Oryza sativa
MARRRAEAEAVRPVRVAAVGPPAGEGAVRGGGGGAEEEPQLAAELLPVGEVRRREERRRRPAPGGWHRQQREIRRHHLMLSCR

SEQ ID NO: 48462 - protein, 289 aa, Oryza sativa
MLMPASAQIPHHTIRPVASYLVLHRRRRHKSGRRFRLQGPTRRVVFCTRSVLGSSNGAPSGGLVKKRKIVEHIILLRAKPNISDAEEKDMLDYLYTSQYQMRGILAVSLGRIEDPNTENFTHAVLMRFQQKDDIAKFHSSPYYYKILDEHVKPVSYGSVSVDFESEVEDDIIPLFRRGEDFNYGVEFMLLISFLESASGDSVEDALASLQRFISQCSSFIVQATLGCCLNHMDSGYSHAAVIRFPSFDDFKIFREGMEYKDMWASTFQPIVEKSLELHFTVDPVGNQLM

SEQ ID NO: 48463 - protein, 403 aa, Oryza sativa
MEGGGEGTTTAAAAAAVAAGKEEEAEVVVVRNPRCYLDVSIGGDMEGRIVVELYASVAPRTAENFRALCTGEKGVSAATGVPLHYKGSCIHRIVKGFMVQGGDITAGDGTGGESIYGLNFEDENFVLKHERKGMLSMANAGPDTNGSQFFITTTRTPHLDGKHVVFGRVIKGMGVVRSMEHVSVGESDRPITDIVIVDCGELPEGASDGVVNFFSDGDMYPDWPNDLEEKPAEISWWMTAVDSAKSFGNEYFKKKDYKTALKKYRKAMRYLDLCWEKEEIDEEKSSALRKTKSIILTNSSACKLKLGDLKGALLDADFALREGEGNPKAFFRQGQARIALNDIDAAVESFKHALQLEPNDGGIKRELAAAKKKIADRRDQERKAFSRMFQPSGGSEKIDEENN

SEQ ID NO: 48464 - protein, 280 aa, Oryza sativa
MEREISALYEPKRNNEIRIFESSDEMSTDLAEYISQVSEISVKERGYFAIALSGGPLVSFLGKLCEAPYNKTLDWSKWYIFWSDERAVAKNHAESNYRITKEGFLSKVPILNGHVYSINDNATVEDAATDYEFVIRQLVKVRTIGVSESNDCPKFDLILLSMGSDGHVASLFPNHPSLELKDDWITYITDSPQPPPERITFTLPVINSASNIAIVTTGDDKSEAVHLAISDNADGPEAPSSLPARMVQPTDGKLVWFLDKSAASSLDAENDDAFEQHREY

SEQ ID NO: 48465 - protein, 851 aa, Oryza sativa
MARLNPSKPSSRGGKPRSSSADAMAEHKPLPGRPKREGEGASKRKAKSGGFESMGLCEEVYRGVRHKGYRVPTPIQRKAMPLILAGHDIAAMARTGSGKTAAFLVPMIQRLRRHDAGAGIRALILSPTRDLATQTLKFAQQLGKFTDLKISLIVGGDSMESQFEELAENPDIIIATPGRLVHHLAEVEDLNLRTVEYVVFDEADSLFSLGLIQQLHDILHKLSDTRQTLLFSATLPQALADFAKAGLRDPQIVRLDLDKKISPDLKLAFFTLRQEEKLAALLYLVRERISSEEQSIIFVSTKHHVEFLNILFREEGLEPSLSYGAMDQEARNIHISKFRARKTMILIVTDVAARGLDIPLLDNVVNWDFPAKPKLFVHRVGRVARQGRSGTAYTFVTSEDMAYLLDLHLFLSKPLRPAPTEEELLKDMEGMNLKIDRALANGETVYGRFPQTIIDLVSDGIKEVINGCTDLIALEKPCTNAFHLYLKTRPMPSTESIRRVKDLPREGLHPIFRDVLGSDELSALAFSERLKSFRPKQTILEAEGEAARGSNQWLDVMKKKREVHEGIINLVHQKNNVDHEPKEELVENISNWERKDVCGNKRKLQSFRDEEYYISSVPQNQHLEAGLSVRANEGFVENRLDAAVLDLVDDETSGMQAQKTRYHWKKNKFVKLNSGDRVTATGKIKTESGAKLKPTKTGIYKKWQQKTHRSIDTGRKFGGFAEEGASTTGSHQRGNRKHTAVGRGRRYIPNADVPSEIRNPEQIQKSRQQKAMDIARMKNRSTKESKFQKFQKNNRRHDGPLKDGKFQKNRRPDGNGKNRRPDGNGKGRGKGKGNANGFGKGKGKMKGKGTR

SEQ ID NO: 48466 - protein, 168 aa, Oryza sativa
MLVGAYPFEDQDDPKNIRKTIQRIMSVQYKIPDYVHISAECKQLIARIFVNNPLRRITMKEIKSHPWFLKNLPRELTETAQAMYYRRDNSVPSFSDQTSEEIMKIVQEARTMPKSSRTGYWSDAGSDEEEKEEEERPEENEEEEEDEYDKRVKEVHASGELRMSSLRI

SEQ ID NO: 48467 - protein, 620 aa, Oryza sativa
MFGRDPWGGPLEISNADSATDDDRSRDLDRGALMRQLDETQQSWLLAGPGDQAGKKKKKYVDLGCMVLDRKIFMWTVGTILGVGLFIGFVMMIVKLVPHKRPPPPPPDQYTQALHKALMFFNAQRSGPLPKHNGVSWRGNSCMKDGLSDSTVRKSLVGGFYDAGDAIKFNYPMAWSMTMLSWSVIEYKAKYEAIGELDHVKELIKWGTDYLLKTFNSSADTIDRIVAQVGVGDTSKGGAQPNDHYCWMRPEDIDYPRPVTECHSCSDLASEMAAALAAASIVFKDSKTYSDKLVRGAKALYKFGRLQRGRYSPNGSDQAIFYNSTSYWDEFVWGGAWMYFATGNNTYLSVATAPGMAKHAGAYWLDSPNYGVFTWDDKLPGAQVLLSRLRLFLSPGYPYEEILRTFHNQTDNVMCSYLPMYNSFNFTKGGMIQLNHGRPQPLQYVVNAAFLASLYSDYLDAADTPGWYCGPTFYTTEVLRKFARSQLDYVLGKNPLKMSYVVGFGNKYPKRAHHRGASIPHNGVKYGCKGGFKWRETKKPNPNILIGALVAGPDRHDGFKDVRTNYNYTEPTLAANAGLVAALISLTNIHVKSGIDKNTIFSAVPPMFPTPPPPPSAWKP

SEQ ID NO: 48468 - protein, 92 aa, Oryza sativa
MDDAGEICSFSRSSSSAREDDEEDQRWAALEKLPTYDRARTALLAMPPDGELREVNVQRLAAVERRALLQRVAGVADDHARFLAKFKERVDR

SEQ ID NO: 48469 - protein, 92 aa, Oryza sativa
MDANMDATWMLGEGLLQYDKHCFQRQAFNCSPNFCGNRVWKWRSLVPTGGLLKHFTRVSLSLQSPITYYYYQHCTKNVIITYERVTSTTIVW

SEQ ID NO: 48470 - protein, 608 aa, Oryza sativa
MKYVLVTGGVVSGLGKGVTASSIGVVLKDCGLRVTSIKIDPYLNTDAGTMSPFEHGEVFVLDDGGEVDLDLGNYERFLDIKLTRDNNITTGKIYQAVIDKERRGDYLGKTVQVVPHITDEIQEWIERVAMNPVDGTDEPADVCVIELGGTIGDIESMPFIEALGQFSYRVGAGNFCLVHVSLVPVLNVVGEQKTKPTQHSVRGLRGLGLIPDILACRSTQPLEENVKVKLAQFCHVPISNIVNLHDVTNIWHIPLLLRDQKAHESILKVLDLQCVGKVPRAPKLTEWTERASKFDKLKTPVRIAMVGKYTGLSDSYLSVLKALLHASVALDRKLVVDWVPSCDLEDSAATETPDAYEKAWDLLKGAHGVLVPGGFGDRGVQGKILAAKYARENNVPYLGICLGMQIAVIEFARSVMKLRGANSTEFDPATTTPCVIFMPEGSKTHMGATMRLGSRRTFFQANTCKSAKLYGNASYVDERHRHRYEVNPEMVPEFEKAGLSFVGRDESGTRMEIIELPTHRFFVGAQFHPEFKSRPGKPSPLFMGLIAASSGQLDHLLQQSCGVVSSPVRRGNYCNGATKQQKLYQNGHVKNGLVNGCYYANGNSILHT

SEQ ID NO: 48471 - protein, 175 aa, Oryza sativa
MFRRPVAVTLPTSTNCVKPRFVGTLTRSGSPLGDTVQPLGVSRGSPGQRICLSVLALPAFRSCVIPNSGVQNPTVLAPLPMMFTTSYAGGWSCPSTSLNLPASPSNVVLRTALRSAVPVADTPSRSRSVSGALVCGVWNAGPATPADSAAAAIAHAVSYAQNLRTVGSRTSSTVG

SEQ ID NO: 48472 - protein, 169 aa, Oryza sativa
MCVPTTDPGIGTDKHRRFPIYKIGGRHARSGGGEGPAMLPPPFPLDLAERRVPPLPGRFLPSRRLWHRGARRRAAAGPPPPLPSDLAEGRAPPWWMEEEERSAATVVDGRGGERRRKKWRERRKKKRGGSGLRVREIEFEREGGEEEIRMGVDRVAQLGSVSSADRCRF

SEQ ID NO: 48473 - protein, 380 aa, Oryza sativa
MKVEQDLHMSRGDGETSYAANSRLQEKAILKTRPLLHKAIEEAHASLSGLSRAPAGGKMVVADLGCSSGPNTLLVVSEVLSAVANRSSCDHKSSLVADVQFFLNDLPGNDFNLVFQSLELFKKLAEMEFGKALPPYYIAGLPGSFYTRLFPDRSVHLFHSSYCLMWRSKVPDKLASGEVLNAGNMYIWETTPPSVVKLYQRQFQEDFSQFLALRHDELVSGGQMVLTFLGRKNRDVLRGEVSYMYGLLAQALQSLVQEGRVEEEKLDSFNLPFYSPSVDEVKAVIRQSGLFDISHIQLFESNWDPQDDSDDDDVATLDSVRSGVNVARCIRAVLEPLIARHFGRCIVDDLFDMYARNVAQHLEQVKTKYPVIVLSLKARR

SEQ ID NO: 48474 - protein, 297 aa, Oryza sativa
MDGLISDDSMMMGGEVRAIESRLPPGFRFHPSDEELVGYYLRNKQQQQQQQTAATSMLVEVDLHACEPWDLPEVAKVGSDEWYFFSWRERKYATGWRRNRASKQGYWKATGKDKPILHPTVAGARKTLVFYSGRAPNGRKTAWVMHEFRLLHHHHHPNPNIQNMQQQEGDDWVLCRVFRKGNNSNGQPLATSSPPAHHLVESLISSPAPTIMSDHDRLFTIQLPHHQHCDEQYFFLDDDEQHQQQLLDLSVLQAPTSFESEQAPGHGGMEINIAEMESFDTTCAALQDASDYCMQLY

SEQ ID NO: 48475 - protein, 517 aa, Oryza sativa
MTKDDAVPVAVAPAKRPPINKYAFGCALLASMNSVLLGYDISVMSGAQIFMKEDLKITDTQIEILAGVINIYSLFGSLAAGMTSDWLGRRYTMVLAAAIFFTGALLMGLAPNYAFLMAGRFVAGIGVGYALMIAPVYTAEVAPTSARGFLTSFPEVFNNSGILLGYVSNFAFARLPVHLSWRAMFLVGAVPPIFLGIAVLAMPESPRWLVMRGRIEDARRVLLKTSDSPDEAEDRLLDIKKAVGIPEDASDGEDVVAIVRANKASQGEGVWKELLLNPTRPVRRMLVAGLGLMFIQQATGVDCVVMYSPRVFERAGIKSKTNSLGASMAVGVCKTFFIPIATLLLDRVGRRPLLLASGGGMAIFLFTLATSLLMMDRRPEGEAKALGAISIAAMLSFVASFASGLGPVAWVYTSEIYPVRLRAQAAAIGTGLNRLMSGATTMSFLSLSNAITIAGSFYLYASIAAAGWVFMYFFLPETKGKSLEDTVKLFGKDTDDDDDVDTSRHERKRSTELSAQH

SEQ ID NO: 48476 - protein, 248 aa, Oryza sativa
MVERDRIRIEYLETKIWRNDTTCIDMLRLRRGSFFRFCKLFRDCGLLEDTIHMCIEEQVAMFLHTVGHNLRNRLVRTNYDRSGETVSRYFNKVLHAIGELRDELIRPPSLDTPTKIAGNPRWDPYFKDCIGAIDGTHIRASIRKNVESSFRGRKSHATQNVMAAVDFDLRFTYVLAGWEGTTHDAVVLRDALERENGLHVPQGKFYLVDAGYGAKQGFLPPFRAVRYHLKEWGNNPVQNEKELFNLRH

SEQ ID NO: 48477 - protein, 349 aa, Oryza sativa
MAASSAAFAACLLACALLFQMCVASRKLTALVQDLPITMTYHKGALLSGRIAVNLIWYGNFSAPQRCGDHRLRLVAVHPAVAAAAAGAVRRQLVQDGAEVLRQLEGALPGAVPRPARARPVVLPRQAARGEGPRQARRPRLAEPRHQRGAHGRRRRCRRLLHEPVRHPRRVAAVPRRAVRLRVGGQPGDPVPRPVRVAVPPAGVRPAGGAPHAAQRRRRRRRHGDIPRLDDRRHRHQPVRQRLLPGRRRRAAGGRHRVRRSVRQGGVPGLRWVAAGGPGQRGQLQREWGAREEIPGPGARRPRHVGLLHRRVDLLEWSRGLLFCYHGGECSTRLKFVPGGSGEILSFVQ

SEQ ID NO: 48478 - protein, 432 aa, Oryza sativa
MAKPRRGRSASRSSSGSSSRSPSRSASSGSGSSRSRSRSRSFSSSSSPSRSRSPPAAKASSPGARRGRSPSSPAKRGSPSKKGRSPSPPPPKKASPPRKASPAPESVVLHIDHLSRNVNEAHLKEIFGNFGEVVNVELSMDRMVNLPRGYGYIEFKKRTDAEKALLYMDGGQIDGNVVKLRFTLAPRQRASSPMKAPPPPPKRDVPHNEKGAPSAEKDVQQRREPSPRRKPASPPRKRTPPNRRIESPRRQPDPSPRRRPDSPPIRRRADASPVRRGDTPPRRRPGSPVRRRSPSPPPRRRRSPMRPSPRRLRGSPSPRRRSPGPIRRRSPPPPPRRPRSPPGRRLPPPRRHSRSPPPRRPPHSRSRSISPRTRRGPPLRRGRSDSSYSRSPSPPRKGPRRVSRSRTPPRHRRGRSISSDSRSSSSPSPRRR

SEQ ID NO: 48479 - protein, 355 aa, Oryza sativa
MGLDVGEIGVGAADLSLDLKMFAAKSFGRVRGKDTTTTAMGDCIRRLEEEMGKIEVFRRELPLCVRLLADVIDVMKEEVEKKGGDRKEDEEDAAGDKSNWMSTAQLWTGNSGGPDAAAADPEKQDKVRISSEAKSNGGAFVGSGAPAFARPKQSLMRKEDMAYDVRMPDLSLLSPPASAAAADESRRQVVGFSQAAARAAAMAASGPALSLQPQPQPAAAQQQQQARKTRRCWSPDLHRKFVAALQQLGGPQVATPKQIRELMKVDGLTNDEVKSHLQKYRLHNRPRVPSSTIVNQPIVLMQGLCYIPQEQSSSQSGSPEGPLHFSGSGMAGGGSSAATVSCEEEDGRSESYGWK

SEQ ID NO: 48480 - protein, 420 aa, Oryza sativa; identical to SEQ ID NO: 47050

SEQ ID NO: 48481 - protein, 264 aa, Oryza sativa
MHVMQLQGMASTMKKKVESKHNNKDMKMALKHDIPLEVLQEGIPTVLRGAPDNEVQAGRVIRVSSATGLKEALQQAGPGALLKVYVVSYIPPSAAAQIREMTTTTRGGKEAQEKKPSASATIAKAQPQPHDQETATAPPQPTKSLSAPFKFKVKLRSHSKAPPQPIKRRNLPLSSSRLIVRIRMPPSARRRRRATSPVSSLPIFTFLKLKRWLWWPWKATCPSLKSSRRESHPLQISARMMCKCNYQQPLTILEPIKGKTFCSL

SEQ ID NO: 48482 - protein, 109 aa, Oryza sativa
MRSFAPQVWRVPMLEELSRIIEGVKASIRWTCVMDKLCYFVWFHLSNYYSKFSIINYVVLVLCYVFIFHFMFKFTTLFMFHSSGGSFCLHYSSTMRSHGNAIWIFIHDP

SEQ ID NO: 48483 - protein, 270 aa, Oryza sativa
MGRGRIEIKRIENTTSRQVTFCKRRNGLLKKAYELSVLCDAEVALIVFSSRGRLYEYSNNNNVKATIDRYKKAHACGSTSGAPLIEVNAQQYYQQESAKLRHQIQMLQNTNKHLVGDNVSNLSLKELKQLESRLEKGISKIRARKNELLASEINYMAKREIELQNDNMDLRTKIAEEEQQLQQVTVARSAAMELQAAAAAQQQQQNPFAVAAAQLDMKCFFPLNLFEAAAQVQAVAAQRQQIIPTELNLGYHHHLAIPGAAAADAPPPHF

SEQ ID NO: 48484 - protein, 95 aa, Oryza sativa
MRVVMEGRMGRGGGGGGRRRGKISSGWCPAGSSPTTAAAGRRRCTRSKGARGSTRTPCSSGMGSAARTTACCAGCSTGTGRTGTWWRGGSATRCR

SEQ ID NO: 48485 - protein, 254 aa, Oryza sativa
MAPPPHALAAAATSALGVAVGVRLLLVLSRSRALKPLAAATSAAAAALKTPRVLAAASSPLAAVLAASKAASKSYKAARTLGPAARLPSLPSDKRLKAAFAAASLLRLAAAAPPPVASPTGVAALAILKSGYKLSKNSAKVIEGFLGLQVHKGIRNGVDALGVVVKVAVIASEVAVWVGGRCWGGRRGRSVRFLCSTRPSGLLLVRYSKSEAQVVLFDHGLGIAAMDGDEKQMEEQEGSDLLCLAVPVPEATNY

SEQ ID NO: 48486 - protein, 222 aa, Oryza sativa
MEGGSNDFPGDLLRAVLQRLPPPDLARAACVCRLWRGVASDRAVLEAAFASPWGVRRVVGEPETRAFWRAASLARFALSHTVRRGDTVPGIALKYSIQVTDIKRFNNMMSDHGIYLRERLLIPISNPEILQGSTCYIEMDYNARREVAVFYPQGRPSGKAESSTNTAAAERRSRRILESVKRSLHTDDRTAAYYLSVTDGDPRAAMMEYSEDLRWERQQTGH

SEQ ID NO: 48487 - protein, 207 aa, Oryza sativa
MAGAGTDGCTNLQLGHAGEDLQSMTRRWQLTHGTATIGPNEPTPPPPPAILASSSAMAAAPPELALPAPTWKVDGIVEMLSSRSRVLLPPCSSMGLTQLFLMVFLFRSRHCSQSMGRGSLRWRSRLAWDTASSQAKCFLLFLLPSSLLPSDSDDDELLPAPAPTPKPSNVGPRESSGCTSIDRPILSLISEPWDLAAPLKMLGYVVR

SEQ ID NO: 48488 - protein, 170 aa, Oryza sativa
MATPAGGRPSQPQPQAQQLSVDFEALSYISSLVEAFQAFDSDNDGLVTAPELRGLLASLGLDKPEHEVRDMLARADADRDGKLSVEELLDVMNAGQLGLGALGALLQSAVPALESAAGPDGVLGADELARLLSVMGTASVEDCMEIIACMDGDGDGAISVEEFRLMAQLL

SEQ ID NO: 48489 - protein, 609 aa, Oryza sativa
MSALTTSQLATSATGFGIADRSAPSSLLRHGFQGLKPRSPAGGDATSLSVTTSARATPKQQRSVQRGSRRFPSVVVYATGAGMNVVFVGAEMAPWSKTGGLGDVLGGLPPAMAANGHRVMVISPRYDQYKDAWDTSVVAEIKVADRYERVRFFHCYKRGVDRVFIDHPSFLEKVWGKTGEKIYGPDTGVDYKDNQMRFSLLCQAALEAPRILNLNNNPYFKGTYGEDVVFVCNDWHTGPLASYLKNNYQPNGIYRNAKVAFCIHNISYQGRFAFEDYPELNLSERFRSSFDFIDGYDTPVEGRKINWMKAGILEADRVLTVSPYYAEELISGIARGCELDNIMRLTGITGIVNGMDVSEWDPSKDKYITAKYDATTAIEAKALNKEALQAEAGLPVDRKIPLIAFIGRLEEQKGPDVMAAAIPELMQEDVQIVLLGTGKKKFEKLLKSMEEKYPGKVRAVVKFNAPLAHLIMAGADVLAVPSRFEPCGLIQLQGMRYGTPCACASTGGLVDTVIEGKTGFHMGRLSVDCKVVEPSDVKKVAATLKRAIKVVGTPAYEEMVRNCMNQDLSWKGPAKNWENVLLGLGVAGSAPGIEGDEIAPLAKENVAAP

SEQ ID NO: 48490 - protein, 190 aa, Oryza sativa; identical to SEQ ID NO: 30565

SEQ ID NO: 48491 - protein, 409 aa, Oryza sativa
MAEARATRRRAEEAEMEAEAGTEGDDGDGGGSSDYTSEDEGTEDYRRGGYHAVRVGDSFKQGAYVVQSKLGWGHFSTVWLAWDTGHSRYVALKVQKSAQHYTEAAMDEIKILKQIADGDPDDSRCVVKLLDHFKHSGPNGNHVCMVFEFLGDNLLTLIKYTDYHGIPLPMVKEICRHVLIGLDYLHRTLSIIHTDLKPENILLESTIDPSKDPRKSGVPLVAPSARTDDPPPKAHAPSVNGGLTRNQKKKIRRKAKRAAAATSEGSGTVASGETDGSDDRGNLSTANEGSPNQDGDKKEEGEGSRRGSKGTRKKMALEADLKCKLVDFGNACWTYKQFTSDIQTRQYRCPEVILGSKYSTSADLWSFACICFELATGDVLFDPHSGDSYDRDEVCLFISFQDISYLYKT

SEQ ID NO: 48492 - protein, 129 aa, Oryza sativa
MAGRPGYVTVPILSVLAAIGYVYYTAVFLAIPAWLGLATAAGVANAVAFTALAAACVATYAVAVSRDPGRVPPAFLPDVEDAESPIHEIKRKGGDLRCCQKCSHYKPPRAHHCRLQEMCSKNGPSLYMD

SEQ ID NO: 48493 - protein, 169 aa, Oryza sativa
MASKQMEEIQRKLAVLAYPRANAPAQSLLFAGVERYRLLEWLFFRLLGDRSPFTQQNWQGDSLDRDEENSRIQHLAEIANFLGITPSVDTEAIQGRGSYDERVELLCLIVDLVEASCYADNPEWSVDEQLAKDVLLVDSIAEKQAQIFSEECNYFLQMFRYNQFTPCLI

SEQ ID NO: 48494 - protein, 241 aa, Oryza sativa; identical to SEQ ID NO: 30599

SEQ ID NO: 48495 - protein, 365 aa, Oryza sativa
MVAEQLTLQKFLLTIDGIRSQVLRLQDRLSKVRSKQENMVSLVDHAHIKVSEKRLRTQKRSFSYKKDRYSKSKKKKNLNILSKEEDKPAHAVISTLSKRAPDCQTEVTMYSSEEKSGERCQSHKKAITVDLLLPNGHMGDLCKDNDDVLIDNQAANEGYQPFENAKQPMDKSLELTEKVCETANLRVGSNSSPVEVTSTSAPFRVENASVSLEARSTPGQVVKQEPVFEKPPALKHVYSGKRRRKLKMKEGSGPVSGLTQSKEASKTPATKKKTESTSPAAKKLKIEETTAPDEGKKAVKTHSTGKKRKAGKSCSSTKNQEAENSSCAARKDISESTPSKPRIEKAVLVAVNSRRSQRVRKPKIY

SEQ ID NO: 48496 - protein, 266 aa, Oryza sativa; identical to SEQ ID NO: 31013

SEQ ID NO: 48497 - protein, 72 aa, Oryza sativa
MAPYGSKELVLTPLFSKTRNSAFKMKTSRLYLDTKATLQIMLWSCITRNNFMIMYLLCKRNNIRCQDQLALT

SEQ ID NO: 48498 - protein, 483 aa, Oryza sativa
MAQMLSAVAMVGAASAASPIVTKSLVGVDAPASGITVVSRQDVRPDGASAVGDLTLSVSDLPMLSCHYIQKGLFFPAPDVPMASLVSLLMSSLSRALAIFPTLAGRLVTLPDDRVVIRCNDAGVEFRHAVAPNLSLDDFIVPDADVPTKLTKDLFPMDRTVSYDGHRRPLTSFQVTVLGDGAVFIGIVANHAVVDGTSFWHFFNTWAALCRGASPKLPDFRRSFFGESTAVLRFPGGVGPAVTFDADAPLRERVFHFSADAIRELKAITNRRPSGGQDAEVYGKMAHDRKNPEGLSAISSFQSLCAQIWLSVTRARQRLAPDATSTFRMAVNCRHRLRPAISPVYFGNAIQSAATTATVAELASNDLRWAAAKLNASLAAYDDGAIRRAAAAWQGAPRCFPLGNPDGAVITMGSSNRFPMYEGNDFGWGRPLAVRSGRANKFDGKMSAFPARAGDGSVDIEVCLAPDTMAALLRDSEFMQFVS

SEQ ID NO: 48499 - protein, 349 aa, Oryza sativa
MGVDYYKLLQVERGATEEELKKAYRKLAMKWHPDKNPNSKKEAEAKFKQISEAYEVLSDSQKRAVYDQYGEEGLKGQVPPPGAGGPGGSSYYGGDGSTFRFNPRSADDIFAEFFGFSSPFSSMGGMGGMGGGVDRGMRGSKFGMYDNDIFGSFSQFPGEASMHAPQRPQKAAPIENRLPCNLADLYKGTTKKMKISREILDSSGRTMVVEEILTIDIKPGWKKGTKITFPEKGNESPHVIPADIVFVIDEKPHDLFTREGNDLVMTQKISLAEALTGCTVQVTALDGRNLTVPINNVVYPGYEEVVLREGMPIPKDPSKKGNLRIKFNIKFPSRLTSEQKSEIKRLLAS

SEQ ID NO: 48500 - protein, 535 aa, Oryza sativa
MEVAAMEISTSLLLTTVALSVIVCYALVFSRAGKARAPLPLPPGPRGWPVLGNLPQLGGKTHQTLHEMTKVYGPLIRLRFGSSDVVVAGSAPVAAQFLRTHDANFSSRPRNSGGEHMAYNGRDVVFGPYGPRWRAMRKICAVNLFSARALDDLRAFREREAVLMVRSLAEASAAPGSSSPAAVVLGKEVNVCTTNALSRAAVGRRVFAAGAGEGAREFKEIVLEVMEVGGVLNVGDFVPALRWLDPQGVVARMKKLHRRFDDMMNAIIAERRAGSLLKPTDSREEGKDLLGLLLAMVQEQEWLAAGEDDRITDTEIKALILNLFVAGTDTTSTIVEWTMAELIRHPDILKHAQEELDVVVGRDRLLSESDLSHLTFFHAIIKETFRLHPSTPLSLPRMASEECEIAGYRIPKGAELLVNVWGIARDPAIWPDPLEYKPSRFLPGGTHTDVDVKGNDFGLIPFGAGRRICAGLSWGLRMVTMTAATLVHAFDWQLPADQTPDKLNMDEAFTLLLQRAEPLVVHPVPRLLPSAYNIA

SEQ ID NO: 48501 - protein, 439 aa, Oryza sativa; identical to SEQ ID NO: 31369

SEQ ID NO: 48502 - protein, 81 aa, Oryza sativa
MSRGGFLGVFGRHGEERPVVWILSPSVALSIASSVFSDSNLVGDGDDEMDPHPLCCCCARAGFASSVAIEISVVAENLRLS

SEQ ID NO: 48503 - protein, 270 aa, Oryza sativa; identical to SEQ ID NO: 30786

SEQ ID NO: 48504 - protein, 205 aa, Oryza sativa; identical to SEQ ID NO: 31610

SEQ ID NO: 48505 - protein, 154 aa, Oryza sativa
MAALSSAAVTIPSMAPSAPGRRRMRSSLVVRASLGKAAGAAAVAVAASAMLAGGAMAQEVLLGANGGVLVFEPNDFTVKSGETITFKNNAGFPHNVVFDEDAVPSGVDVSKISQEEYLNAPGETFSVTLTVPGTYGFYCEPHAGAGMVGKVTVN

SEQ ID NO: 48506 - protein, 360 aa, Oryza sativa
MARVPVSRHLRVALLALLVVAVAAAAAARGDQPRRGHSMAARHERWMARFGRAYADAAEKARRMEVFAANAERVDAANRAGGDRTYTLGLNQFSDLTDDEFAQTHLGYSWAPPPPSHRHGHRAENGTAAAAADDTDVPDSVDWRARGAVTEVKNQRSCGSCWAFAAVAATEGLVQLATGNLVSLSEQQVLDCTGGANTCSGGDVSAALRYIAASGGLQTEAAYAYGGQQGACRAGGFAAPNSAAAVGGARWARLYGDEGALQALAAGQPVVVVVEASEPDFRHYRSGVYAGSAACGRRLNHAVTVVGYGAAADGGGEYWLVKNQWGTWWGEGGYMRVARGGAAGGNCGIATYAFYPTMDS

SEQ ID NO: 48507 - protein, 379 aa, Oryza sativa
MDGREQQQQPRVSSPPPAGGGVMMPQHPYGAAPAMPPGSANVMHGVPLSFNPMASPTASSPMKPADMSGTMYRTDPVVQGMQQQPGSGGGGTAVGGGELVKKKRGRPRKYGPDGNIGLGLKPAAAAGTEAGGPSGGAGSNSNPDGKRRGRPPGSGKKKQLDALGSSGTSFTPHIITVKPNEDVASKIMAFSQQGPRTTCIISANGALCTATLRQPATSGGIVTYEGHFDILSLSGSFLLAEDGDTRSRTGGLSVALAGSDGRIVGGCVAGMLMAATPVQVVVGSFIAEGKKGKEEHLKREPTSAPTPNHAAGFGAATAASPPSDGSSSDHSDDPGSPMGPNGSTFNNSGHPMHSSYAPVSWSLSGNQGRYDPDLKMMTD

SEQ ID NO: 48508 - protein, 329 aa, Oryza sativa
MQRHRLLQPEQPARGRRLWEGVQSHLEEINEIVAVKQLDKDGFQGNREFLVEVLMLSLLHHPNLVKLLGYCTDMDQRILVYECMRNGSLEDHLLDLPPKAKPLPWQTRMKIAVGAAKGIEYLHEVANPPVIYRDLKTSNILLDEDFNSKLSDFGLAKLGPVGDKSHVSTRVMGTYGYCAPEYAMTGKLTKTSDIYSFGVVLLEIITGRRAIDTSRPTHEQVLVQWAAPLVKDKKRFVRLADPLLEEKFPLKGLYQALAIASMCLQEDASNRPMISDVVAALSFLAEQKYHPQDGPDQAARKSRDRDCSNPPRKTDMVSEIKADDEIEHR

SEQ ID NO: 48509 - protein, 237 aa, Oryza sativa
MEQARFAHLCTVMSRMHHRRAGYPFGSLVDFAPDPMGHPIFSLSPLAIHTRNLLEDPRCTVVVQVPGWSGLSNARVTIFGDVVPLPADLQEWAHQQYVLKHQQWASHQWGNFYYYKMQTISDIYFIGGFGTVAWLDVKEYEALKPDKIATDGGEQSLKELNAMYSKPLKELLSTEIEVDDAALISIDSKGIDIRVRQGAQFNIQRMAFELHYSVETLEEAKEAIRRILGKSRWHAKF

SEQ ID NO: 48510 - protein, 598 aa, Oryza sativa
MGTYKCCLIFKRRFRWNDAPPPDDVRALFANHSAGGGPHMAADGLRAYLQATGQDGDVDMERLVEQIRQLQGRGGRIPRVGRALPLLTVDDFHRFLFSHELNPPIRHGQGQVHHDMAAPLSHYFIYTGHNSYLTGNQLSSDCSDLPIIRALQRGVRVIELDMWPNSSKDDISILHGRTLTTPVSLLKCLLSIKQHAFEASPYPVIITLEDHLTPDLQDKAAKMVLEVFGDILYYPDKDHLKEFPSPQDLKGRVLLSTKPPREYLQAKDGNAATIKEDAKAAATDDAAWGKEVPDIHSQIHSATKHDQREDDDDTDEDEDDEEEEQKMQQHLAPQYKHLITIKAGKPKGTLLDALQSDPEKVRRLSLSEQQLAKLADHHGTEIVRFTQRNLLRIYPKGTRVTSSNYNPFLGWVHGAQMVAFNMQGYGRALWLMHGFYKANGGCGYVKKPDFLMQTDPEVFDPKKSLSPKKTLKVKVYMGDGWRMDFTQTHFDQYSPPDFYARVGIAGVPADSVMKRTRAIEDNWVPVWEEDFTFKLTVPEIALLRVEVHEYDMSEKDDFGGQTVLPVSDLIPGIRAVALHDRKGIKLNNVKLLMRFEFE

SEQ ID NO: 48511 - protein, 308 aa, Oryza sativa
MAIASSSSSLLLLMFLAFLDHGAAVANLSSIEAAVRDRAFQLFRRTSEIVAVDVPAVLAGAGVEASATRVRSSALWADGVNATVPGLAVAVPPRVVPAPFARRVAIVFVRFLGDASSWLFDAPPGYALAAPVVALLAFDASGPNGGVALRALGAPVRVEFRDISPASGFNATAARCLTFSSGGGKAVAAHAVAMEPGPSCVVSGTATGHYGVAVRVETPPPPPPPRPPPVRERWWVWKVGATAGGVAAASFLAVTVVGAVRWRRRRRREEMERRAMCGEELGRMAVRGSRMPSAKMVRTRPELVEELS

SEQ ID NO: 48512 - protein, 265 aa, Oryza sativa
MDHSGSVSAGGKMMVKAAAAAESASTNERTQSFSGCNSEKFYHIESPHKKRKSQYELSDTRVSSLKYKFRNRLAWQEDESSRTESLGCNSIFVNRNYDMDMVNRVEELESCDNTQSLIGGCIEVDSINGIESHKMLKVQAFSSSSSSNNISSDAFTSSRSNGTKDTDSWDMQHLEYDHPGLMLLPYDDDIEEAYDVLGQYDVVMKNDLASGDVDGSAAGVIDEKLYSNGIEDLLILPRGQNSIHDEKNKLTIDQEFEQYFTRLML

SEQ ID NO: 48513 - protein, 700 aa, Oryza sativa
MEFGGVLQLWNEWGVQMLVLASFALQVFLLIFGGIRRHSSSSVLMFFLWSAYLLADSTAIYTLGHLSVDGRSDEHELVAFWAPFLLLHLGGPDNITAYALEDNTLWLRHLQTLAVQVLGAVYVIYTYIVGSGTDLLMASVSMFIAGLLKYGERIWALKCGNISSIRSSISTRKFKTDPYELLALGTSEEELLLGAHSQFDICKGVFADIIMLPNPSLLSRSKRRSVISYLGMDLYKLVEMELSLMYDFLYTKAAVIHTWYGFCIHFVSLFGTATTFLLFQLIISSSRGDGYSREDVVISYVLLVGALVLEIISVCRAVLSTWTCSLMHRRGRAWEWPLHIITSFSRRVHPASRRLWSGSIGQYNLFHLCARNTNEIGSRLATRLGLQDWWNMMHFSGTFSNTGSFSIQDLKKLVLQALEEKERALQYKDTDLNSRGSFILKSMKAYDDFARWSVNIDFDESILVWHIATELYIRRSKARHAKELVEATEVLSNYMMFLLVVKPNMLPGAARHNIHLPSCEQIEGHCRMGFGGEKDNPVAASPISWNPYCMLKELLHHDGPSCSSIPRREKLAEIVWSFCQFALGSVKAPNPHGESIRDSANMYSVLLANELLGIESRWCEQRDTLELILGVWVEMLLYAANHCSQESHARQLSNGCEFITIVSLLAHHFKYYSGASRGADELYESNPSMRTVRSWSRSLS

SEQ ID NO: 48514 - protein, 451 aa, Oryza sativa
MLIAAAIQHKCKVVDLGIAKDTEESLKEHMDAALSSDADIILTSGGVSMGDRDLVKPCLASMGKIHFEKIRMKPGKPLTFAEIVTEDSSKPSKKVLAFGLPGNPVSCVVCFNLFVVPAIRSLSGWSNPHLPRVHARLLHPLRGDPHRQEFHRAVIRWVPDDGSGRPGYVAESTGQQASSRLLSMKSANALLEVPLVGQMLEAGTSMQAILISDMTSSPFDKLPTASNPLPSHLFPSAKSVSTDLSQVPASQNTEVKVAILTVSDTVSLGAGPDRSGPRAISVVNSSSEKLGGATVVATAVVPDDVEKIKNILVKWSDIDRVSLILTLGGTGFTPRDVTPEATKSVIEKEAPGLTYVMLQESLKVTPFAMLSRATAGIRGSTLIINMPGNPNAVAECMEALLPALKHALKQIKGDKREKHPRHVPHAEAAPVDQWDRSFRAASSGRGCSCEP

SEQ ID NO: 48515 - protein, 192 aa, Oryza sativa
MLLQNVVQMISVMFVGHLGELALSSASMATSFAGVTGFSLLAGMASSLDTLCGQAFSAKQHHMLGVYKQRAMLVLALVSVPIAAVWAFTGEILLVVGQDPEIAAGAGSYIRWMIPTLFVYGPLQCHVRFLQTQSAVVPVMLSAGATAANHVLVCWLLVHRLGLGAKGAALANAVSFLTNLSVLAIYAWRPVL

SEQ ID NO: 48516 - protein, 236 aa, Oryza sativa; identical to SEQ ID NO: 31137

SEQ ID NO: 48517 - protein, 430 aa, Oryza sativa
MIASWPSPAPRATAPPTSRATARRAAPSPATSRAPTSPCSARGARLRHHQHRRQLWNGVRRQRLLDERHRRPAILHPQGLPAGRPRVVRRSLLAGHLARPRRARPGPPAHRRRGSQGPGAPGHRNSAHGQVRLRPATHHALHGRHIRRLRRAGGRLLPLHLRHLPDVPQPGRLRQADTPRVEGRRARLRLLHGGPRRGAQRGGGVPGVDVPGHGSHCGIRSHPHRPAAAVEQGQRGGRHGRRGVRLRAGRGRVAHGGQGAVRAREPGHHRSERADAGGQPGVHPGGRGGARGVQPAAPAALRLGDQPGDDHHGGERACRAGRRAQGGAPGARQALDRQVGPRLHRRHRRGVACAVSAGEEVQPWLLHAVGRGGDRVGDCGLGRHHPSAGGRELDHHHQGLRRHVHQRRCVRPPRRRQPPPPRHHGRHARG

SEQ ID NO: 48518 - protein, 780 aa, Oryza sativa
MGTVENMEGREERSTDVERDGKQGKEVESDYEPARDSVSSQGEANSNEDTRAKRVSRVPKKLVKKDSKENSPRSGRINSNRQVQTKLQYISSNNLQSKSPKPNKTSDGAKTIEITKPDTVTVPSCPSSEVSEEMDDKPIENIGTDDKSIEDVADDKATEGTASYDKATEGKAADDTTVEDNTTDERSIESGTDDRTIAGIAADVKSSEEAKEIDILDEAPNCDQSTATDEEIADTEESIAYDGKSAAYEKSEELESKCERLEQELREVAALEISLYSVVPEHGCSSHKLHTPARRLSRLYVHASKFWSSDKKASVTKNFVSGLVLVAKSCGNDVSRLTFWLSNTVVLREIIAQTFGITRQPSLAMKAFSTNVNAKMLGKNSSPTRRKNNYSGKHARPAIWPLPDDWRETGTLVAALEKIESWIFSRIVESVWWQALTPHMQTLVKDISSPKAGSLLGPALGDQQQGNFSIHLWKTAFQDAFSRICPLRAGGHECGCLPVLAKLVMEHCVARLDVAMFNAVLRESANEVPSDPISDPIVDSRVLPIPAGDFSFGSGAQLKNSIGNWSRWLQDKFGMVAAAPEKHGQAGDESDDRSGAADFYSFKLLNELSDLLMLPKDMLLEKSIRKEVCPSIGIPLVTRILCNFTPDEFCPEPVPGMVLEELNAESLLERFTEKDVITTFPCVAAPVVYCPPSPEDVAEKVADAGGNAEPDLRASMVQRRGYTSDDDLDDLGNPLASLYDRSSPPSPCNGASRSTTRQGGSMSNARYELLREVYGRRGLV

SEQ ID NO: 48519 - protein, 666 aa, Oryza sativa
MHQLPSPAPSSASSSPSTTTATTTSLVSRARTAIHSAAARVLTDIKADLRDADGSGALRAPSPRPSADRHPDSIAAVVGSPRDEAPDIISSPDGDTSNIEPDSTSSTKMAFPSVSVVKQLVAAIDNGKNFKSMNDMRSNGDQLLKEKGGLSLSVVKSLVRREKDERSSSEFVGDDETQSLMYTLFKLEEHFPHDKSQCNSELHHSISLPKDLHGAPPGSFTHQIAETIGKISSVYKMAFFWQSLVLELKKLWSDGQPVPRMPLDAAPDLNCCLLHQEIQVINCCIARKKRRKAAKESLDSLLKRASIDNSNHLYSNGDSPDSEMYIKGSAGDNVLRLGADHPSENLTLLETGELVYSPTLQEGPIMTAELIKETEELVLRTGSVGAGCSQLLSDMQAFKAANPGCVLEDFIRWHSPPDWSEDCAASSAEVGEGSSRRGRLSERMQTKEGNLWKELWGAAKPIPAVEQAPIYDEDLAVESIFDALEVIEPSKLFEQLLAVILSVCFVAAELVLPAGSNLSKLFYDCKDYILSIYQDDISKEKLDEICKVYETMEAIVTHPEETLQIMEAPDEKSPLESKNRFKIKLNFIGKDRHPLWKRAPKEEKKSSPKDEKRSSEERSTKIFSNLLDKKVSIFSKKNAKPTTEVPPPPPPSSAPGPFDDSEWTIL

SEQ ID NO: 48520 - protein, 581 aa, Oryza sativa
MCLSSRILNGKTRYFSTLRSSHTENKCILSVPVSSLSHHHLPILLSRATVSGLLLKLPLVHSVLRSLYLGPIPSLSFSFLSLLRRFANMTLDNYSLNIAISAAARVPSLDVGSQFHALSLKLSLASDSFVLNALINMYSSCNYPASARLVLDSAPRWASDVVSWNTIIAGYIRGGMPNKALQSFHQMAKEQVRLDEVTLLNVLVACARTGAMKVGSLCHALVVLNGFEINCYIGSSLVSMYAKCGMVEEARRVFNRMPERNVVCWTSMIAGCTQSGRFKEAVDLFRDMQIAGVKADDATIATVVSSCGQMGALDLGRYLHAYCDGHGLGKELSVKNSLIDMYSKCGDVNKAYQIFHGLTKRDVFTWTVMIMGFAMNGLCVEALDLFAQMEGEDKVMPNEVIFLGVLTACSHGGLVEQGYHHFHRMSKVYNLVPRIEHYGCMVDLLGRAKLLAEAEQFIKDMPVAPDVVVWRSLLFACRASGQVGLAEYAAERIEQLEPKRCGGHVLLSNVYATTLRWVDVNNVRTGMGNSRTSKKPGCSFIEVDGCIHEFFAGDESHFETEAICNTLFGINELLVAESFLM

SEQ ID NO: 48521 - protein, 251 aa, Oryza sativa
MASRSSALLLLFSAFCFLARRAAADYGSWQSAHATFYGGGDASGTMGGACGYGNLYSTGYGTNTAALSTVLFNDGAACGSCYELRCDNDGQWCLPGSVTVTATNLCPPNYALPNDDGGWCNPPRPHFDMAEPAFLQIGVYRAGIVPVSYRRVPCVKKGGIRFTINGHSYFNLILVTNVAGPGDVQSVSIKGSSTGWQPMSRNWGQNWQSNSYLDGQSLSFQVAVSDGRTVTSNNVVPAGWQFGQTFEGGQF

SEQ ID NO: 48522 - protein, 283 aa, Oryza sativa; identical to SEQ ID NO: 31698

SEQ ID NO: 48523 - protein, 647 aa, Oryza sativa
MATYYSSPGSERDSQTMYSRDPGSASYPMSSALGNLLYLNNPSSGPYTEFSGILQPQQNCMEMPGPGHASAMSQDPSSRESDMLSSHQGQRSFSHVKDMKNEMLMHMMDGAQGSGSELIHDDAHTGSQLEFGVLNNHNSSSVPSMQSQGLSLSLNTQIMAPSLPYWSIKPDMLTPQSYHDNLRGEDMRMKNLQSEASRAIRNSRYLKAAQELLDEVVSVWKSIKQKAQKEKVESGKADGKETDGGPKSEGVSSNPQESGANAAPELSTAEKQELQNKMAKLMAMLDEVDRKYKHYYHQMQTVVSSFDVVAGPGSAKPYTAVALQTISRHFRCLKDAINDQINVIRKKLGEEENSSGKEGKLTRLRYIDQQLRQQRAFQQYGMIPQNAWRPQRGLPENSVTILRAWLFEHFLHPYPKDSEKLMLARQTGLTRSQISNWFINARVRLWKPMIEDMYKEEIGDLEQDSNSSSDNAPRSKDKMASSEDKEDLKNSRARICETSQLSESRTSIGAMNVGGAPVGFQNEPNPDDSFMNLMLKDQRSNEVDGGLLLHNTVAQHSDENARFMAYHLAELGRYGNGNVSLTLGLQHSSSNLVPNAQPGFPGVNEDDIYNATAPLGVTVASSDYDSMNQMDQRQRFEHSPLLHDFVA

SEQ ID NO: 48524 - protein, 329 aa, Oryza sativa; identical to SEQ ID NO: 29905

SEQ ID NO: 48525 - protein, 193 aa, Oryza sativa; identical to SEQ ID NO: 31763

SEQ ID NO: 48526 - protein, 421 aa, Oryza sativa
MLPTNRNRPQQRPARSWYFISDMDFSDPKRKPRYLSKILMVALLTAMCVVMLTQPPCHRRTPSVFSIHEPGVTHVLVTGGAGYIGSHAALRLLKDSFRVTIVDNLSRGNMGAIKVLQNLFSEPGRLQFIYADLGDPKAVNRIFAENAFDAVMHFAAVAYVGESTLEPLGYYHNITSNTLVVLEAMAAHNVRTLIYSSTCATYGEPEKMPITEGTPQFPINPYGKAKKMAEDIILDFSKSKKADMAVMILRYFNVIGSDPEGRLGEAPKPELREHGRISGACFDAALGIIPGLKVKGTDYETPDGTCVRDYIDVTDLVDAHVKALNKAERGKVGIYNVGTGKGRSVKEFVEACKKATGVDIKVDYFPRRPGDYAEVYSDPAKINSELNWTAQHTDLLESLRVAWTWQKKHRSGYGPPQAMVL

SEQ ID NO: 48527 - protein, 501 aa, Oryza sativa
MNRRRTMLLLICLCATFCLMTQLGAANVVLMGTNLTLSFDDVEASFAPGVKGSGFEGVVYTAEPLDACSPLTSKAEKGPPSPFALIIRGGCTFDEKVKNAQDAGFKAAIVYDNENSGVLISMAGSSGGIHIYAVFISKASGEVLKKFSGHTDVEVWILPAFENSAWSIMAISFISLLAMSAVLATCFFVRRHHIRRDRPRIPEAREFHGMSSQLVKAMPSLIFTKVQEDNCTSSMCAICLEDYNVGEKLRVLPCRHKFHAACVDLWLTTWRTFCPVCKRDASTGIPDPPASETTPLLSSAVRLPSQSSSFRSSVAASPPRPISRRPSSQSISRIYAASGTPNSPNPIRSFTNSTAMSISRSNVDLSNMSSRPRASHLASAHSLVGSHLSPPINISYYLGSSSQHRSYLRRCGESGPSLSTMAPQSPQQSQLRHGGESDLNLAGASSGQSFRQSYLRHCADSEVNLAGASSGQSFRQSYLRHCADSDASLSAMASAQSLPGC

SEQ ID NO: 48528 - protein, 627 aa, Oryza sativa
MAISMASPLSSWPWAFLGSYKYLLYGPVVGKVVQEWREQGRLPLGTSWCLHLILLLALRSLTYQLWFSYGNMLFFTRRRRVVDDGVDFRQIDTEWDWDNMVIMQTLIAAVLVTSRVFPATSDLSAWDLRGWAIAVVLHVAVSEPAFYWAHRALHLGPLFSRYHSLHHSFQATQALTAGFVTPLESLILTLVAWAPLAGAFMAGHGAVSLVYGHILLFDYLRSMGYSNVEVISHKTFQDFPFLRYLIYTPSYLSLHHREKDSNFCLFMPLFDALGGTLNPKSWQLQKEVDLGKNHRVPDFVFLVHVVDVVSSMHVPFAFRACSSLPFATHLVLLPLWPIAFGFMLLQWFCSKTFTVSFYKLRGFLHQTWSVPRYGFQYFIPSAKKGINEMIELAILRADKMGVKVLSLAALNKNEALNGGGTLFVRKHPDLRVRVVHGNTLTAAVILNEIPGDVAEVFLTGATSKLGRAIALYLCRKKIRVLMLTLSTERFMNIQREAPAEFQQYLVQVTKYQAAQNCKTWIVGKWLSPREQRWAPAGTHFHQFVVPPIIGFRRDCTYGKLAAMRLPEDVEGLGTCEYTMGRGVVHACHAGGVVHFLEGWDHHEVGAIDVDRIDAVWNAALRHGLTPA

SEQ ID NO: 48529 - protein, 1030 aa, Oryza sativa
MLAGNMNNDNYIDLSSDSDIDFDFDSDDSVGGLDQELASSSSRPTENINGQYRTLPPSFTNGRHVDNARHALGSGDRAYPHSSSYRGSPNDSARATPASNRTDIVVKKHNGFASEENDNGKRILPSSFSNGRTTNAMHPVVASETRKFPPSFTNGNSQRLAENRMGKNVANGIGEPSSSRFPSRSSFGTDNKRVITDSDNEDVYVYGSSSSHRVLPPSFGRNSSANHSEFANGIDMQGRLNLENRIIDSDERAVYQEALQNIIQDKREDDLPEGVLSVPLLRHQKMALAWMVSKENSSHCAGGILADDQGLGKTVSTIALIQKQRIQQSKFMSVDSDRLKAEALNLDDDDEAAPVADNKGEQTKNDEPRKDLGAGSSSTAAGTGDVETCASLMNTAPDKTVERNVERKKKSKASTSSTMQSMTRPAAGTLVVCPASVLKQWANELTDKVGESAKLSVLVYHGGSRTKDPNELAKYDVVITTYTIVANEVPKQNADDDTDQKNGEESSAGNKRKQPPKAQSKSKKKKKKLKDSDIYLASGPVARVRWFRVVLDEAQTIKNFRTQVAKACCGLRAKRRWCLSGTPIQNAIDELYSYFHFLKYDPYSTYNSFCTMIKHPIARNAVHGYKKLQTVLRIVLLRRTKETLIDGEPIIKLPPKTINLDKVDFTKEERAFYLTLEERSRQQFKAYAAAGTLKQNYANILLMLLRLRQACDHPLLVKGHQSEYKGDGSIEMAKQLPKEMIINLLAKLEVGEFCSVCSDVPEDAVVTMCGHVFCYQCIYERITTDENMCPFPNCGNTLSTDSVFSSGALRICMSGVSSSHASGSSSLDDESSSISQTSYISSKIQAAIDILNSIINTYALTDSDTVESNPSRVAPVKAIVFSQWTGMLDLLELSLNSNLIQYRRLDGTMSLNSRDKAVKDFNTDPEVRVMIMSLKAGNLGLNMVAACHVILLDLWWNPYAEDQAIDRAHRIGQTRPVTVSRLTIKDTVEDRILALQEEKRAMVSSAFGEDKSGGHATRLTVDDLKYLFRF

SEQ ID NO: 48530 - protein, 272 aa, Oryza sativa; identical to SEQ ID NO: 37122

SEQ ID NO: 48531 - protein, 457 aa, Oryza sativa
MAVGGAGSSRSVAPCCCCAVLLAAALLFSAPATTEAYDALDPNGNITIKWDVMSWTPDGYVAVVTMFNYQQFRHIQAPGWQLGWTWAKKEVIWSMVGAQTTEQGDCSKFKGGTPHCCKKDPTVVDLLPGTPYNMQIANCCKAGVINTFNQDPSNAASSFQISVGLAGTTNKTVKLPKNFTLKAPGPGYTCGRAMIVRPTKFFTGDGRRATQALMTWNVTCTYSQFLAQKTPSCCVSLSSFYNDTIVNCPTCSCGCQNNGTSPGSCVNENSPYLQSAIDGPGKWTGQPLVQCTSHMCPIRIHWHVKLNYKEYWRVKITITNFNYRMNYTQWNLVAQHPNFNNITQLFSFNYKPLTPYGSKINDTAMFWGVKFYNDLLMQAGPLGDAQSELLLRKDSKDFTFDKGWAFPHRVYFNGDNCVMPPPDAYPWLPNASPLTKQPLTLSVLVFSIVLATLLAYA

SEQ ID NO: 48532 - protein, 356 aa, Oryza sativa
MEYRRVKDQESYDVVSQKDIESPGERSLSSTSATSSLSTAGASKGKNSWKLKSIVTLALTLLTSSQAILIVWSKRAGKYEYSVTTANFSVEALKCLLSLIALYRTWNSQGVTEDNRLSTSFDEVSVYPIPAILYMVKNLLQYYIFAYVDAPAYQILKNLNIISTGVLYRIILKKKLSEIQWAAFILLCAGCTTAQLNPSSDHVLQTPIQGWVMAIVMALLSGFAGVYTEAIIKKRPSRNINVQNFWLYIFGMLFNLVAICVQDFDAVMNKGFFHGYSFITVLMILNHALSGIAVSMVMKYADNIVKVYSTSVAMLLTAVVSVFLFGFHLSLAFFLGSTVVSVSVYLHSVGKPQPQK

SEQ ID NO: 48533 - protein, 262 aa, Oryza sativa
MAPLVSLSLPLPCAVPASSLPPRAEPDASSSFHPPASSSSSPRGGRLALAAAQPGSGRRWVGRWRAGVSSFSFLAPFFAGNKEKENREKAERLKEELLATIRPLDRGVDATAEDKERVEKIVQQLEEVNQVKEPLKSDLLNGKWELLYTTSESILQPQRPKFLRPFGTIYQAINTDTLRAQNMETWPYFNQVTANLVPLNSRRVAVRFDYFKIFNLISIKAPGSGKGELEITYLDEELRASRGDKGNLFILKMVDPTYRVPL

SEQ ID NO: 48534 - protein, 195 aa, Oryza sativa
MRRHYAVLLRRAASLPSLPLVASLHAAALRRGAVLAPSLIHAYSACGDLASARNLFDELPPRDRTLSARTALASAMSAHGRCREVLDLFAGLAEEEMDDKAVTAVLAACARAGMVDEGRRVFATVRRRPALQHYTCMVEMLGRAGEVEEAERLVARMGARPDRVICAVLLAACRVHGRVDVAGRVHGLMRRYGIA

SEQ ID NO: 48535 - protein, 581 aa, Oryza sativa
MEGGATLADKAEFKECLRLTWSQPYILQLVFSAGIGGLLFGYDTGVISGALLYIRDDFTAVEKSTVLRETIVSMAVAGAIVGAGFGGWMNDKFGRKPSILIADSLFLAGALIMALAPTPFVIIIGRIFVGLGVGMASMTAPLYISEASPARIRGALVSTNGLLITGGQFMAYLINLAFTKVKGTWRWMLGIAGLPAFIQFILMCMLPESPRWLYRQDRKEEAEAILRKIYPAAEVEEEIDSMRRSIEHEKQLEGSIGEQSLVGKLTKALSSKVVRRGLMAGVIAQVAQQFVGINTVMYYSPTIVQLAGFASNNTAMALSLITSGLNAIGSIVSMFFVDRAGRRRLMIISLVGIVLWLAVLGGTFLGAAHHAPPVSDLETRVFANQTCPEYSPSARWNCMNCLKAQSTCGFCAHGGNKLLPGACLAAGEASRRTCHAGNREFYTEGCPNNFGWLALVALGAYIVSYSPGMGTVPWIVNSEIYPLRFRGVCGGIAAVANWVSNLIVTQTFLSLTKALGTSATFFLFCAVSFFALVVVFFTVPETKGLQFEEVEKMLGEKDYKPWKRYRPDVSSKGRDIGLSVP

SEQ ID NO: 48536 - protein, 148 aa, Oryza sativa
MSRPTQHHPTAAATAVILLLLAVSPARIRTTSGACRASSNLCPASATGARPPSPPPARASSPTSRASPATTAVSTSSPSRASPSPAPSRRTSPTAPTSSRSTSPPTRSPAPSPRSSPACSTSPCSTSPPTASPAPSQGTSPAAHTSTS

SEQ ID NO: 48537 - protein, 85 aa, Oryza sativa
MKQLRAVAFFVLLGHIFQSLSTWKLHYEYIACYRKLIAYFMEALGDLENLLLSLHPTYSFFAIPWPMQLNWVIEISHPSFFYVNL

SEQ ID NO: 48538 - protein, 186 aa, Oryza sativa
MSAQIVPAPEHVCYVHCNFCNTIFAVSVPSNSMLNIVTVRCGHCTSLLSVNLRGLVQALPAEDHLQDNLKMHNMSFRENYSEYGSSSRYGRVPMMFSKNDTEHMLHVRPPEKRQRVPSAYNRFIKEEIRRIKANNPDISHREAFSTAAKNWAHFPNIHFGLGSHESSKKLDEAIGAPSPQKVQRLY

SEQ ID NO: 48539 - protein, 731 aa, Oryza sativa
MRAGMSYFHETIWKGVPKFLRRVDTALKNIGINERVPYNAPLIQFSSWMGGDRDGNPRVTPEVTRDVCLLARMMAANLYYAQIEDLMFELSMWRCSDELRVKADQLHRCAKKNTTKHYIEFWKQVPPSEPYRVILSNVRDKLYNTRERARHLLASGFSEIPDEATFTDVEQFLEPLELCYRSLCACGDNSIADGSLLDFLRQVSTFGLSLVRLDIRQESDRHTDVMDAITQYLGIGSYREWSEEKRQEWLLSELNGKRPLFGPDLPQTDEIADALDTFHVIAELPYDSFGAYVISMATAPSDVLAVELLQRECHVKKPLRVVPLFEKLADLEAAPAALARLFSVDWYRNRIDGKQEVMIGYSDSGKDAGRFSAAWELYKAQEELIKVAKQFGVKLTMFHGRGGTVGRGGGPTHLAILSQPPDTIHGSLRVTVQGEVIEQSFGEEHLCFRTLQRFTSATLEHGMHPPISPKPEWRALMDEMAAVATKEYRSIVFQEARFVEYFRLATPELEYGRMNIGSRPSKRKPSGGIESLRAIPWIFAWTQTRFHLPVWLGFGAAFKHVLQKDIRNLQILQEMYNEWPFFRVTIDLVEMVFAKGDPGIAALYDKLLVSEDLWPFGARLRANYEETKQLLLQVAGHKDLLEGDPYLRQRLRIRDSYITALNVCQACTLKRIRDPGFHVSPRAHLSKDIMDSGKPAAELVKLNTTSEYGPGLEDTLILTMKGIAAGMQNTG

SEQ ID NO: 48540 - protein, 212 aa, Oryza sativa; identical to SEQ ID NO: 30548

SEQ ID NO: 48541 - protein, 330 aa, Oryza sativa
MPIASKLVYFQRRRPSPAPPEPEPEPPDPRRRPCRAGAGASAARRRKPVHLYGGQVTSWKNDRGDELLFVSSKATFKPPKAIRGGIPICFPQFGTHGILEKHGFARNRFWAIDDNPPPFPTSTAAKAFVDLILKTSEEDLKIWPHSFEFRLRVALGPGGDLALTSRIRNTNTDGRPFSFTFAYHTYFSVSDISEVRIEGLETLDYIDCLRGKERSTEQGDAIVFESEVDKIYLDAPAKIAIIDHEKKRTFVLRKDGLPDAVLWNPWDKRTKNMQDFGDEEYKHMLCVEPAAVEKPITLKPGEEWKGKMDLSAVPSSYCSGQLDPNKVLQG

SEQ ID NO: 48542 - protein, 223 aa, Oryza sativa; identical to SEQ ID NO: 30204

SEQ ID NO: 48543 - protein, 303 aa, Oryza sativa
MGSGIGAVLVLVAAWLTFAPPGALASSRRFDLSIAQEKLVNSTGGSTASSSHLVFDPSKSKRLSWHPRIFLYEGFLSDMECDHLVSMGRGNMESSLAFTDGDRNSSYNNIEDIVVSKIEDRISLWSFLPKENGESIQVLKYGVNRSGSIKEEPKSSSGAHRLATILMYLSDVKQGGETVFPRSEMKDAQAKEGAPSQCSGYAVRPAKGNAILLFNLRPDGETDKDSQYEECPVLEGEKWLAIKHINLRKFDYPKSSLASEDECTDEDDRCVSWAASGECDRNPVFMIGSSDYYGSCRKSCRVC

SEQ ID NO: 48544 - protein, 609 aa, Oryza sativa
MMIQQHRLHTQSDLARDILLNFDTLLPKFIKVYPRDYKRVLDKLKEEKAAKEAEQKAREVVDKKPVEVIQAPNGISVKTEKVMNEEPSSRPSRVSNAVKYRGFIKYEREGTSYRDPNERVKDWNEVAIELVPGPLLKTQSARCMDCGTPFCHQEGSGAGCPLGNKIPEFNELVHQNRWHEALDRLLETNNFPEFTGRVCPAPCEGSCVLGIIDNPVSIKSIECAIIDKGFEEGWMVPRPPLRRTGKRVAIVGSGPAGLAAADQLNKMGHFVTVFERADRIGGLMMYGVPNMKADKEGIVQRRVELMAKEGVQFIVNAHVGSDPLYSVEKLRSENDAIILACGATKPKDLPIPGRELAGIHFAMEFLHANTKSLLDSNLEDGNYISAQGRKVVVIGGGDTGTDCIGTSIRHGCTNLVNLELLPEPPRKRAPDNPWPQWPRIFRVDYGHQEATSKFGKDPRSYKVLTKRFIGDENGNVKALEVIRVEWGKVNGRFQFKEVEGSEEIIEADLVLLAMGFLGPEATVANKLGLEQDMRSNFKAQFGNFATNVEGVFAAGDCRRGQSLVVWAITEGRQAAAAVDNYLSKDDEGETNGTEDIAVSSEGLVQPVVA

SEQ ID NO: 48545 - protein, 543 aa, Oryza sativa
MLRLPDKMPREDKRALVEGTIVEMGLQDCADTVIGNWHLRGVSGGEKRRVSIALELLMRPRLLFLDEPTSGLDSSSAFFVTQTLRGLARDGRTVIASIHQPSSEVFELFDMLFLLSSGKTVYFGQASQACEFFAQTGFPCPPLRNPSDHFLRCVNSDFDKVKATLKGSMKARIERSDDPLDRMTTSEAIRKLVASYSRSQYYYAARERVNDISRLKGTVLDSGGSQASFLMQAGTLTKRSFINMSRDFGYYWLRLLIYLLVTVCIGTIYYDVGTKYTSILARAACTAFVFGFVTFMSIGGFPSSVEEMKVFQRERLNGHYGVAAFVISNTISALPFLVLICFLSGTICYFMVRLHPGFSHYIFFVLNPYASVTVVESLMMAIASVIPNFLMGIIIGAGIQGIFMLVSGYFRLPYDIPKPVWRYPMQYISFHYWALQGQCQNDMDGLVFDNQYPDQPKIPGDFILKYIFQINVHRSKWIDLSVIFSMIFIYRILFFLMIKVNEDALPWIRGYIARKRLQKKEPLGKTPSLRGYVVDPELGPNES

SEQ ID NO: 48546 - protein, 279 aa, Oryza sativa
MAMNHPLFSQEQPQSWPWGVAMYANFHYHHHYEKEHMFEKPLTPSDVGKLNRLVIPKQHAERYFPLGAGDAADKGLILSFEDEAGAPWRFRYSYWTSSQSYVLTKGWSRYVKEKRLDAGDVVHFERVRGSFGVGDRLFIGCRRRGDAAAAQTPAPPPAVRVAPAAQNAGEQQPWSPMCYSTSGGGSYPTSPANSYAYRRAADHDHGDMHHADESPRDTDSPSFSAGSAPSRRLRLFGVNLDCGPEPEADTTAAATMYGYMHQQSSYAAMSAVPSYWGNS

SEQ ID NO: 48547 - protein, 809 aa, Oryza sativa
MEETSTPPQPQPQPAHPSPQFPAVFTPPPPPTSGFSSRGSPSPGTGSAAAQAQFSTPPGPPVFSSPLRPAAVPFRATPASPQPVPFASRGGGYSSSSSSAAVSLPTSSGPHFLNGVATPTSHLPSSAAAPPPPPPPPPEESPYVLFSAHKVLKQKKLLNAPSLGFGALVSPGREVAPGPETVERDPRRCLNCGAYVNLYCDVLIGSGQWQCVICKKMNGSEGEFVVSSKHDLLQWPELASSAIDYVQSGNRRPSFVPVPDTRVSGPIFILIDECLDEAHLQHLQGSLHAFVDTLPPTARIGIISYGRTVSVYDFSEGAAVSADVLPGNKSPTHESLKAIIYGTGIYLSPVHASLPVAHTIFSSLRPYQLSLPEVSRDRCIGAAVEVALGIIQGPAAEVSRGIIKRSGGNYRILVCAGGPSTFGPGSVPHSVQHPNYAYLEKTAMKWMERLGHEAQRHSTVVDILCAGTCPVRVPVLQPLAKCSGGVLLLHDDFGEAFGVNLQRASTRAAGSHGLFEIRCSDDMLVTQVIGPGEEASPDSHETFKHDTSFCIQMHSVEETQSFSVSMESKGDIKNDFVYFQFAVHYSNMYQTEITRVITMRLQTVDGLSAYLASVQDDVASVIIGKRTVLRARTASDAIDMRLTIDERVKDLALKFGTQVPKSKLYRFPKELASLPGCLFHLRRGPLLGSIVGHEDERSVLRNLFLNASFDLSFRMLAPRCIMHREGGTFEELPAYDLAMQSNAVVVLDHGTDIFIWLGAELAAQEGQSAAALAACRTLAEELSELRFPAPRILSFKVSFLFSLNYCSGF

SEQ ID NO: 48548 - protein, 425 aa, Oryza sativa
MDMEHELRGGGVGAAAHGHGSICFSGGPVLVDGRRIQQLLLHCAAALESNDVTLAQQAMWVLNNIASSQGDPSQRLTSWLLRALVARACRLCAAAPAGAAVEFLERGRAPPWGRAMSVTELADYVDLTPWHRFGFTASNAAILRAVAGASAVHVVDLSVTHCMQWPTLIDVLSKRPGGAPAIRITVPSVRPAVPPLLAVSSSELGARLAIFAKSKGVQLEFNVVESATTTSPKKTSTTLCQELASVLSDPPSLGLRDGEAVVVNCQSWLRHVAPDTRDLFLDTVRALNPCLLTVTDEDADLGSPSLASRMAGCFDFHWILLDALDMSAPKDSPRRLEQEAAVGRKIESVIGEEDGAERSEPGARLAERMSRKGFAGVVFDEEAAAEVRRLLSEHATGWGVKREDDMLVLTWKGHAAVFTGAWTPN

SEQ ID NO: 48549 - protein, 439 aa, Oryza sativa
MMPPKPAAKDVADEQPEPPDEDPDVAEADPTGRYLRYREIIGSGSSKTVYKAFDAVDGIEVAWGKVEINERIMGSSKELQRLRTEIQLLKSLQHKHILKLYASWVDTNRRTVNIVTELFTSGNLREYRTKHKKVDMKAMRRWAKQILTGLEYLHSQKPPIIHRDLKCDNIFINGNHGKVKIGDFGLAMVMQQRKTRSIQGTIEFMAPELFGENYNELVDIYSFGMCMLEMVTCECPYSECKGFIQIYKKITEGVKPAALSKVKDAEVRGFIESCLASVSDRLPASELLKSPFLQSDDANHRSSNSVQEPVKFPENNFTKDEPIFVSLAPNNGTVNGKEQSFILVLQKSDFLLEGNMSTTNPVMLFLRFPGPDGKFKNVQFPFDMEKDTSLSVSTEMVEQLELPEWNNPVLAELIDAFLLHILPSWKPCVKVGKMLPSSS

SEQ ID NO: 48550 - protein, 283 aa, Oryza sativa
MSGGRQSYWCYQCRQRVRPRGQDMECPYCDSGFVSEMDDVDALMRHFVGMDPDFHRDPRFGIMEAISAVMRHGMAGTNREVDVRGRPNIFSDLEMEFGSGPWLLFRGQLPGHLSEDNGFDVFINGRRGVGMRRANIADYFVGPGLDDLIEQLTQNDRRGPPPATQSSIDAMPTVKITQRHLSGDSHCPVCKDKFELGSEAREMPCKHLYHSDCIVPWLEQHNSCPVCRYELPPQSSTGASCSRTRSTNQSQSSSSNGRTNGRQRRRNPFSFLWPFRSSSSSSR

SEQ ID NO: 48551 - protein, 597 aa, Oryza sativa
MHPAGAVVAPAAGAPARAAPRVEKATSHLLMGPDWAVNLEICDIINADVWQTKDVVKAVKKRLQNKDPKVQFYALTLLETMMKNCGEYVQLEVAEQHVLQEMVKIIQKKNDMLVRDKILLLLDSWQEAFGGPGSRYPQYHFAYLEVKRIGAVFPRRPIDAPPIFTPPATHTSQSYGSPRYEAGSLNEIMSSDVETLSLGDLNNIRNVTELLCDMVHALNPSDHMAVKDEIITDLVSQCRSNQQKLMQFVSSTGNEQLLKQGLEINDRLQNIISKYDIMASSTHLAVEAPPADNVEAPKEDPAEKPSAPPISTLEEEEEEEDEFTRLAQRKNKSVMTSDDSLSSTGDLALVPIDMESSESSSSVASNALVPVDPALVSSSPQTKEQDMIDLLSLTLCSPTHEASTDSSTQGPNGPQQPAVTDGQHNPSGVPQYPSNHQSHPINQEYIRQNRNYVAPWAQSGQYYPAPPWAAPPSVNSNPFQSATYQEQPPPVGSVSSTYSAPSASYTSPSMAYVPPSASLPIWNGSTTSNGLSATQAQMNGNQQPPGSSAAASKPYYIPDNLFSDLIDLKGLSGGNKMGVPTSMGSANGGQPTIGGKK

SEQ ID NO: 48552 - protein, 74 aa, Oryza sativa
MMSEASMLSSPAATYSGLWLSSPSSVAEKARKERNSFGKEDVADVAVAPNTDADLREPDVVKLRGSTLPKVRGS

SEQ ID NO: 48553 - protein, 105 aa, Oryza sativa
MGASAAAVMEDGGNWIEWAEEDKEKVWARESAPVTEMRPTGDERSRQARGEGGGTVTVARSTVWSPLTKTTGSMALGRGGSGGEARGRARANLRLRGRKDASGRD

SEQ ID NO: 48554 - protein, 199 aa, Oryza sativa
MPKLPMDQRPRLTLEDYILFFTTRSGHGLTMDHLNQIVFMHGFIKFHRQNKPVIVDALNKFDLMRPRRSTVGINAAAPPRGAAKPSDALLTMDEARDDIEDLGWRECPVGSLLSIRAGGGDAAPSAAHMPVAAIRPGSTAVERVSPPSILSACSPAPPGAVVIRKRCKKGQGKAAMRGRKRRVVQLLTLPSVENLAATA

SEQ ID NO: 48555 - protein, 507 aa, Oryza sativa
MASSAVGAAVAAVAVLLLLAPGAEPIGLWLPPPTGGGGRLGGAAAPGRYLTQEERWMDQTLDHFNPTDHRQFKQRYYEFLDYYRAPKGPIFLYICGESSCNGIPNSYLAVMAKKFGAAVVSPEHRYYGKSSPFESLTTENLRFLSSKQALFDLAVFRQYYQETLNAKYNRSGADSSWFVFGGSYAGALSAWFRLKFPHLTCGSLASSGVVLSVYNYTDFDKQIGESAGPECKAALQETTKLVDGQLQSGRNAVKQLFGASTLANDGDFLFLLADAAAIAFQYGNPDALCSPIVEAKKNGTDLVETFARYVKDYYIGTFGASVASYDQEYLKNTTPPPAESAYRLWWYQVCSEVAYFQVAPKNDSVRSAKIDTRYHLDLCRNVFGEGVYPDVFMTNLYYGGTRIAGSKIVFANGSQDPWRHASKQKSSKELPSYLIECSNCGHCSDLSGCPQAPSHIEGDSSNCSSPEAVNKVRKQIVDHIDLWLSECQEQGHDNEPLLGSRWSIATY

SEQ ID NO: 48556 - protein, 830 aa, Oryza sativa
MAAQPSSSASTGATKFDASQYAFFGNNAVEEVELGGLEDDDGVDAGFVGPGDEEYPSAYGRDMFEDEGGGSFTGVDDLAGAFSKLTRSINEPTQSGIISHGGSISRQSSTPDWAQDSYWPTQPIFGAEQGLDNESRWSQPPHLARFADSRLHRTSSSPQQDAQYNPNEHILGAMPYLLHRTSSYPQQEPQYNHTEPIPVPKSSFISYPPSGAVSHSSPGQPHHMNMPSPPTSFQMPVSAQNELHHPQFPRGGMPPGPLGRNMAHLDSAGLSTNNLQQNALNSGPIRPNGAMLTPGLVQHNLQRPNGLVPPQMLSRRPQHGMAPIQHSPPQFSQFHAQMLGPRHPPPQGRQMYNPQHSSQMMSGFDANLAMPDLSDPRARAMLHHGVHGQHYLPQGFELASMRMDNGWPRFRSKYMSTAEIENIARMQQAATQINDPYIDDYYHQACLAKKSAGGQLKHHFCPTLIRDPSSCARSKDEPHAYLQVDALGRLPFSSIRRPRPLLDVEQTSESSDDVTEKSASKTLDQEPMLAARITIEDGLCLLLDVDDIDRLLQFSQQQDGGLQLRNRRQALLEQLAESLQLVDPLTPSNNGPLSPNDDLVFLRIVSLPKGRKLLSRYLELVSSGSELARIACMAVFRHLRFIFGNLPSDSSAVETTTKLATAVSTCVVRLELSGLSACLAAIVCSSLQPPLRPLGHAAGDGASFIIKSVLDRATELLTDQHVASTYSMQNRALWQASFDAFFGLLTEYCMSKFDSVIHALQTQPAVAAVISREMPVELLRASLPHTNEYQRKQLLSFSQRTVPVNNHSSHGSNNGPMTSESIPSSESRKI

SEQ ID NO: 48557 - protein, 85 aa, Oryza sativa
MVCLACLLPLFLIPVVNALPLLFHLILSKIYRLFGWEYRRPERAPPACPFKPAAKNNEGASESKPLVEPQSASTTTTTAEDKKED

SEQ ID NO: 48558 - protein, 444 aa, Oryza sativa
MPGRSTADVAADGYHKYKDDLKLMVDTNLEAYRLSISWSRIIPNGRGDVNPKGLQYYNDIIDGLVKNGIQVHIMLYQLDLPQVLEDEYDGWLSPRILEDFKAYADVCFKEFGDRVAHWITIDEPNVASIGSYDSGQLAPGRCSDPFGIRKCTVGNSSVEPYIAVHNMLLAHASVTKLYREKYQVAGKGIIGISVYTFWAYPLTNSTVDLEATKRCQDFIVHWVLRPLVFGDYPQVMKNIVGSRLPSFTKAQSEDVKGSLDFIGMNHYYSLYVNDRPLGKGTRDFVADISIYYRGSKTDPPPGKAAPTSIGPDPQGLRLMVQYLQETYGNLPIYILENGYGSSNDTVHDNDRVGYLKSYIGSILTALRNGANVKGYFVWSFVDVFEYLTGYGQSYGLYRVDFADESRPRQARLSARWYSGFLKNREMDVDQSELAMAAAESRAQQ

SEQ ID NO: 48559 - protein, 580 aa, Oryza sativa
MAPPPAGVEAVCAAVIKSTLTQPHNHHHLLAASPSLLAAVLHRLSPLPSTALAFFRSLPLPHPLDASLALLRLLAPHPRHHPTARSLLRDLSLRHPLSSPLLLPSLLADPHLPSWLLLLLSQSARPHDALRVFDHMRAREVVPDAHASSALLTALAKSRMTATARKVFDQMTRAGVAMNTHVYNAMLHVCLKAGDAALAESLMTRMDAAGVPLDRFSFNTVIALYCRKGMQYEAMCVRERMENQGVKADVVTWNSLIHGLCKERRVKEASQLLREMAMAGVAPDHVTYTTLVDGYCRAGDLEEAVKLRGEMEAMGMLPGVATYNAILRKLCEDGKMKEVNVLLNEMDERKVQADHVTCNTLINAYCKRGDMTSALKVKRRMMESGLQLDQFTYKALVHGFCKAKELDEAKEALFEMMGAGFSPNYSVLSWIVDGLCNKNNAVAVLAIPDELMKRGFPPDKAVYRSLIRRLCKKGFIDLAGNVFNEMQGKGLEADCLVYATLACAYLTAGKPVAALDILNEMAKKQLYITPQIYNCMCTSYADEKGSLNMLWVHAIERGLITKSVYKVMHQARMKSSNPAV

SEQ ID NO: 48560 - protein, 498 aa, Oryza sativa
MRGGLLVLLLLTAAVAGGGGHEGSSSCPFHAHDKPHDDHHHGHGHGHGHSCGGGGDDSHHVHHHHHGHGHGHDGGIQRRLLPEELAEEADLELDSFGDHHHHHHHHHEHHHHDHHHGHGDFQAELSPLGMWLSAMGCSLLVSMASLVCLVLLPVIFFQGKPSKTMVDCLAIFGAGAMLGDSFLHQLPHAFGGGHSHTHDHQNHNHSHEHSHAHSLEDLSIGLSVLFGIVFFFIVEKIVRYVEDNSQKGAHGMGHHHHHHKRHDRSDKAKLNHAEKDHEDKGVNQAEKEPSHDGAIEKTDGVTRADSKSAIRKRGLSSGSNSADREPVNSESDPAPNKALSSEDSSVSNSNMVFGYLNLFSDGVHNFTDGMALGSAFLLHGSVGGWSRTLFLLAHELPQEVGDFGILVRSGFTVTKALFFNFLSALVALAGTALALSLGKDPGHSSLIEGFTAGGFIYIAVAGVLPEMNDQKTTVKSSMIQLVSLTMGMLVALGISLVE

SEQ ID NO: 48561 - protein, 681 aa, Oryza sativa; identical to SEQ ID NO: 42692

SEQ ID NO: 48562 - protein, 420 aa, Oryza sativa
MSAAAEAEAAAVESLPDDVVAEILLCLPPHPSFVSGASLVCKRWLHLIRSPSFLRRVCAFHRTPPVLGFFHNYRDLPSFVPAEGVPGRNRMDGVDDGGDARMFIDCRHGRALLRRYDWADLVVWDPMTGERRRIAGPNQKMQGGGAGTSRRSAALFCSCDVSGGGGDQDCHSSPFHVVVVFTGGCRAFACVYSSLTDAWGDLISTPAPLPCELCDTPPALVGEASYWLSYGGLILEFQFGSQSLTLMKRPLEMLADVRLVRLEEDGLGLAFIKDSTLHLWAREVADDGAPKWKWIPRRAIELDKFLPMPRVLTGKWCGEMFVSISGFSEDGNVVFIRTLAGVFLVWLEALKFKKMSDPLYMMTVHPYSSFYVPNGMGSSLSFFILCCLVLFLANEKISSVFLLVLNPVLCVSLWFRSESK

SEQ ID NO: 48563 - protein, 669 aa, Oryza sativa
MAKKLGKKARKFARKHLQSAAKRNRKQRSQFARRPRRGGSGRGNERDGDGDDEMPQRAIDNVMNNGDAAALVNGLEFPEDECELNSDLSDSDGYLSEDSECLYYSDSEDGNAVNDCFVQDGLDGENDKMNTEIKKQKKKLNKLMDKDPEFVNYLEKWQSELKSDGSKEDSDEDEMDSVDNDADSSDENLSNDKILTRKTISEWCQLVAKEPKAPSLRSLLNAYRDACRFGVSKSPSVQRIQSTEVFHQIITFVLSEADNIFHALLEISDDVNKGKIMNLRSAKKWKTIEPLVKSYLQNSLDLLSQLTDNQILAFVLTRLRASAVLFSAYPSTSRRLLKILIRLWASGDHNLSLSSFLMIREVASLLPECLDLCLNKSYNTYLASSKLVNEGNIKHIDFLMDCLVELYSLDVQKSCERATTSIGQLNSILRQACKTKEKEDLRKVDNWQYINCVNLWVRFLCCNYKDYNMHPLLSSVVQIIRGVAHLFPGTRYLPLRLRLVQMLNELSSCSQMFFPIPSLLFDCLEFRDTSQKEQGKKAKVNFSSLLKVPKNMLKSRDFHEECILSAIDVLSAHFAQWCYHVSFPEVATIPLILLKRLHEQTTIESLRRPIKRLIDQVDENKNIVERKRDGVSFSPNDTTSVESFVQDLQAEKSGAKISQFYKIVPKKLR

SEQ ID NO: 48564 - protein, 269 aa, Oryza sativa
MWCTWALGRVVLAVVFLVALAAGDAAPPKVHRNHGKFTAGPWKQAHATFYGGRDGSGTLDGACGYKDTSKEGYGVQTVAVSTPLFGAGAGCGACYEVKCVDSPDGCKVGAAPLVVTATNLCPPNPGQSNDNGGWCNPPREHFDLSMPAFLQIAQEKAGIVPISYRRVPCVKVGGIRYTITGNPYFNLVMVSNVGGAGDVAGLSVKGNKRVKWTPLKRNWGQEWQTSEVLTGESLTFRVMTGDHRKATSWHVLPPDWQFGVTYQATKNFN

SEQ ID NO: 48565 - protein, 421 aa, Oryza sativa
MAMEPPPLFLCPISMELMEDPVTVATGVTYDRRSIERWFFKYGKTTCPATMQRLASFDFTPNHTLKRVISSWLDRASSSSSPSTAGSPATTSSSSSSNAMERERLPSVLAGIEETPFKATALKNLKSCMAGDEAAREDFVACGGIQVLGRVMTQALEESSAGGDFSAFRTCEEAAAVLATLPLSDDASVELLLKPECIRPVSVLVQRGSAEARLHAMSMISKISRASVRDWTAEVDVDDMVKALLELLSDGASAKLSSRALDVLLDVTARYSRGARRAKAVELGAVRVLAELLLDADRHVAERSLLLLKRMCKCPEGRLAFAEHGLAVAAVARAVLRVSGLATRLAVNVLWLVACAPAPAERVLEDMVVGGAVAKLLALMQVESSPSTKDKAVKMLRAHGAFWRQYPCFPTDLKDYLKSLN

SEQ ID NO: 48566 - protein, 204 aa, Oryza sativa
MATAGISFSPVGPVPFEDVDGELPASERPAPEGIDDGDDHLADMVSSLPSKMEVNLPLKLRLYRGFWLAEIHVPAAVALRRRFVPRPDDVIVASLPKCGTTWLIALTFATMARHVHHPPTSAPASASSHPLHRLNPHQCLPFLEGLFAPVVKRPNSTHSPLRASSTRICHSLYYRAPRQPLPQLTPLATEEATKLSTSVGNPRT

SEQ ID NO: 48567 - protein, 342 aa, Oryza sativa
MAAEVEEGRTGIPSLLSSAVGEETIASNIAQLIGWTPLIEMKNIPKKEGIQTRLIGKMETYQPLFSVKDRTALSMIEDAEEKGLITPGVTTLIEPTSGNLGIGLVLVAIQKGYRFIAVMPARYSPDKQMLLRFLGAELILTDPAGGYKGAMDKVEDLMKIMPNYHCFNQATNPANPEAHFKWTGPEIWKDTAGKVDFFVTAAGTGGTLSGVGRYLKIKNPSINIVCVEPSESAVISGGSPGSHKIQGTGPGFIPKTLDRSIIDEVVTVSSEESMAMARRLAKEEGLLVGISSGANVAACIKIAAREENKGKMIVTMFPSGGERYMSSDLFADVREECANMTF

SEQ ID NO: 48568 - protein, 448 aa, Oryza sativa
MAGSVVTRSPLCSILFYVLATAAAATATATLVGNITADEEYWAKRSEVARSFNRAAYVSDPVAVLNRFNEDVLNTTTATAAAARRSLMRRYRRRGPCTVTNPIDLCWRCRKNWASRRKRLAKCAMGFGHKATGGLAGKIYIVTDAGDEHLVIPRRGTLRHAVIQERPLWIVFARSMVIRLAKELIVTSDKTIDGRGAQVHVTGAQITVQAVSNVIIHNLHIHNSVPRSGGLIRDSMHHFGIRGESDGDGISVMGSSNIWIDHVSMSNCSDGLIDITDGSTAITISNSHFTKHDHVMLFGARDDSPKDKIMQVTLAFNHFGKGLVQRMPRCRFGFFHMVNNDYTHWLMYAIGGNMNPTIISQGNRFRASDDMKLKEVTKREYTSYDEYKEWVWKSQDDLFLNGAFFNESGGRNERRYNRLDLIQARNGRYVGRMTRFAGTLPCRVGKKC

SEQ ID NO: 48569 - protein, 248 aa, Oryza sativa; identical to SEQ ID NO: 30794

SEQ ID NO: 48570 - protein, 307 aa, Oryza sativa
MAGGFLSMANPAVTLSGVAGNIISFLVFLAPVATFLQVYKKKSTGGYSSVPYVVALFSSVLWIFYALVKTNSRPLLTINAFGCGVEAAYIVLYLVYAPRRARLRTLAFFLLLDVAAFALIVVTTLYLVPKPHQVKFLGSVCLAFSMAVFVVPLSIIFKVIKTKSVEFMPIGLSVCLTLSAVAWFCYGLFTKDPYVMYPNVGGFFFSCVQMGLYFWYRKPRNTAVLPTTSDSMSPISAAAAATQRVIELPAGTHAFTILSVSPIPILGVHKVEVVAAEQAADGVAAAAAADKELLQNKPEVIEITAAV

SEQ ID NO: 48571 - protein, 80 aa, Oryza sativa
MGSVLGLEQFGMGDRPGNSSRVHTSEHKVCRKDMCYNMAWMKKRNERNGDVKNLLLVETTSEDKVYRKDMCWSTRAVYDL

SEQ ID NO: 48572 - protein, 454 aa, Oryza sativa
MNVARVNMCHGDREWHRGVIRAVRRLNEEKGFAVAVMMDTEGSEIHMGDLGGAAAAKAEDGEIWTFSVRSFEAPPPERTIHVNYEGFAEDVRVGDELLVDGGMARFEVVEKLGPDVKCRCTDPGLLLPRANLTFWRDGSIVRERNAMLPTISSKDWLDIDFGISEGVDFIAVSFVKSAEVINHLKSYIAARSRGSDIAVIAKIESIDSLKNLEEIIRASDGAMVARGDMGAQIPLEQVPSVQQKIVKLCRQLNKPVIVASQLLESMIEYPTPTRAEVADVSEAVRQRADALMLSGESAMGRYPEKALSVLRSVSLRIEKWWREEKRHEELELKDVSSSFSDKISEEICISAAKMANKLEVDAVFVYTNTGHMASLLSRCRPDCPIFAFTTSTSVRRRLNLQWGLIPFRLSFSDDMESNLNRTFSLLKARGMIQSGDLVIALSDMLQSIQVMNVP

SEQ ID NO: 48573 - protein, 565 aa, Oryza sativa
MSKGAIIGASTVLVVAVVAAVCVVSFKNGSSNAKEDGELSTSVKSIKSFCQPVDYRETCETTLEQTAGNATNPTDLAKAIFKATSERIEKAVRESAVLNDLKNDPRTSDALKDCEELLDYAIDDLKTTFDKLGGFQTSNFKRAVDDVKTWLSSALTYQETCLDGFENSTSTEASEKMRKALKSSQELTENFLAIVDQFADTLANLDITGFSRRLLGDDGVPVWMSNAKRRLLEATPGSKEFKPDVTVAADGSGDFKTINEALAKVPVKSTGTYVMYVKAGTYKEYVSVARNVTNLVMIGDGATKTIITGNKSFMLNITTKDTATMEAIGNGFFMRGIGVENTAGSKNHQAVALRVQSDQSAFYECQFDGHQDTLYTHTSRQYYRDCTITGTIDFIFGNAQVVLQNCRIQVRRCMDNQQNIVTAQGRKEKHSAGGTVIHNCTIEPHEDFKADAAKFKTFLGRPWKEYSRTLYIQSDIGGFIDPQGWLPWLGDFGLNTCYYAEVENRGDGADMSKRAKWRGVKTVTYQQAQQKYTVERFIQGQTWLPKFGVPFIPGLLPQEQSGRIH

SEQ ID NO: 48574 - protein, 215 aa, Oryza sativa; identical to SEQ ID NO: 29262

SEQ ID NO: 48575 - protein, 470 aa, Oryza sativa
MTLRTGEATPPPQAHAEEEPGRGKRRRVVARETRLQQEEEEEEGASSEPETRPRPPPATPATAEEPAATAAGAEARAQLAINIRRMLAVEAERRGRIAERIGVQAEGPILTLEDTFCDIDDGSAKSQVARKVALGVSQSIVSLSSFAGRKRIRVCSGFVIRWNDSTSIGTILTSAALVRPPCGDDVRVEVFLPSGDISICQISMVDFHHNIALVEVTSNFKLQEAVILKYIIDKGDVLALGRSYEGGLLMCSRGEISNRASIFECSELLVSSCEITMAGTGGPLVNYNGHVVGINFFEENQTPFLSMAIVFKCLEHHQIFGRIIRPWIGFWFTSIQMVPLSHLEHIYRKFSDVDNGLYISNVAEGSPADIAGICQGDILMKCGGKFLSTAPEFGAMLMDKCKETMEEYDQETNGDFSAKRITVEIVIKRENDGSTIEKTISAGLIEEFNYNRWPTPIPSYKVRRDTIGRC

SEQ ID NO: 48576 - protein, 268 aa, Oryza sativa
MITMILGEVANFAAYAFAPAVLVTPLGALSIIFSAVLAHFVLKEKLHMFGVVGCILCVVGSVGIVLHAPKEREIDSIDEIWHLATEPGFIVYSCVAVVSVLFLIFWVAERSGHRKMLVYIAICSTMGSLTVISVKAVAIALKLSFGGSNQFIYIQTWFFIVVVIVCCLVQLNYLNKALDSFNTAVVSPVYYVMFTILTIFANMIMYKDSFSRNATQIATQLCGFVTIVAGTFLLHKTRDMGNEPPLPDDEICLDGGSVRPDRLSQSSS

SEQ ID NO: 48577 - protein, 339 aa, Oryza sativa
MDHEADAYRTDLMTITRYVLNEQSRNPEARGDLTILLSHIVLGCKFVASAVNKAGLAKLIGLAGETNVQGEEQKKLDVLSNEVFVKALVSSGRTCVLVSEEDEEATFVDPALRGKYCVCFDPLDGSSNIDCGVSIGTIFGIYMIKDKENVTLEDVLQPGKNMVAAGYCMYGSSCTLVLSTGNGVNGFTLDPSLGEFILTHPDIKIPKKGKIYSVNEGNAKNWDEPTAKFVEKCKFPKDGSSPKSLRYIGSMVADVHRTLLYGGVFLYPADKKSPNGKLRVLYEVFPMSFLMEQAGGQSFTGKERALDLVPTKIHERSPIFLGSFEDVEEIKGLYAAQAK

SEQ ID NO: 48578 - protein, 193 aa, Oryza sativa
MSTVSSALSSFLYCCFSPTGGHRHGHRAGAYYYSSHPTSTNTYYYEGGLAGRRMGRSRPLSLQTVELKVRMCCSGCERVVKHALMKLRGVDSVEVELEMEKVTVTGYVERQRVLKEVRRAGKKAEFWPNPDLPLYFTSAKDYFHDEESFRPSYNYYRHGYNGDKHGHLPEPHRGADPVSNLFNDDDVNACSIM

SEQ ID NO: 48579 - protein, 419 aa, Oryza sativa
MENMRSENFNQGVSMEGVKHAPEMANTNRRALRDIKNIIGAPHQHMAVSKRGLLDKPAAKNQAGHRPMTRKFAATLANQPSSAPLAPIGSERQKRTADSAFHGPADMECTKITSDDLPLPMMSEMDEVMGSELKEIEMEDIEEAAPDIDSCDANNSLAVVEYVDEIYSFYRRSEGLSCVSPNYMLSQNDINEKMRGILIDWLIEVHYKLELLDETLFLTVNIIDRFLARENVVRKKLQLVGVTAMLLACKYEEVSVPVVEDLILICDRAYTRTDILEMERMIVNTLQFDMSVPTPYCFMRRFLKAAQSDKKLELMSFFIIELSLVEYEMLKFQPSMLAAAAIYTAQCTINGFKSWNKCCELHTKYSEEQLMECSKMMVELHQKAGHGKLTGVHRKYSTFRYGCAAKSEPAVFLLKSVAL

SEQ ID NO: 48580 - protein, 720 aa, Oryza sativa
MLLLHPRPLPAPAPARRFEPAVRVPPPRRRRRRRRPPLPPLASASASAAIYSVGSSDEDAFTRCSGYLFEEGAATEGELPTAYDLAGIGAVYRRRPLLVVRRALQIGTSFGRWFTLRYLDRVNERSDDMFEIRAAQLRRILLELGPTFVKIAQAVSSRPDVIPPAYLDELSLLQDRIAPFSTEVAFNIIETELGLPLDMIFSEISPEPVAAASLGQVYQARLRSNRKVVAVKVQRPGVQAAISLDIYILRFLAGVARKAGKLNTDLQAVLDEWASSLFREMDYRAEARSGLKFRELYGKFRDVLVPEMYLEQTRRRVLIMEWVEGEKLSEVRDQYLVEVGVYCSLSQLLEYGFYHADPHPGNLLRTVDGKLAYLDFGMMGEFRQELRDGFIEACLHLVNRDFDGLAKDFVTLGLLPPTAQKDEVTKALTGVFQNAVDRGVQNISFGDLSGNLGRTMYKFKFQIPSYFSLVIRSLAVLEGIAISFNPNYKVLGSSYPWIARKVLTDSSPKLRSTLQTLLYKDGTFQIDRLESLLTESLRARTEQSLTRDQQEETDSSKFAIKQVLSFTLTEQGAFVKDLLLQEIAKGLDALGAATLSSATSAAASRLPFAVPSPSPSLDNEDATNLRNLHRLLLLLSKVPQKEDSSPIPGYNSTEENEGDSTDEISLVLYEMRSLPELLPVLSVIPELPPESQQQFLLLPADLTNRLLSRAVARTIRRIFI

SEQ ID NO: 48581 - protein, 478 aa, Oryza sativa
MVLGKLWKVYRPGIENWIVGLLQPVIDNLHKPDYVNRVEIRQFYLGEEPLSVRNVERRTSRRANDLQYQIGLRYTGGARMALALSLKFSAVPVVVPVWVRDFDIDGELWVKLRLIPTEPWVGAVSWAFVSLPKIKFELSLFRLFNLMAIPVLSMFLTKLLTEDLPRLFVRPKKIVLDFQQGRSMGPVAGDVASDVIQNVASGILQDVASDVIQDGNKDFVGELSVTLVDARKLSFVLFGKTDPYVVMILGDQEIKSKKNSQTTVIGQPGEPIWNQDFHMLVANPRKQKLCIQVKDSVGLTDVTIGTGEVELGSLKDTVPTDKIVTLYGGWGLLGKRSKGEVLLRLTYKAYVEDEEDEGVKNEFAAGYVSDEDVLDYVQDSTSKQSDMDGKERETFMDLLAALLVSEEFQGIVSSSEPGSLRDSEQAAKSRDGENAAAAADTGTVSNSSTDTALVWLAAITSVMVLVSSNLGGSGYFNP

SEQ ID NO: 48582 - protein, 429 aa, Oryza sativa
MAEGSRSPLRSFVEVAPGSHFPIQNLPFGVFRRRGSPEPEPPRPAVAIGDFALDLAAVSDAGLFHGPLLSASPCFRQETLNMFLGMGRPAWKEARATLQKILSADEPVLRDNEALKKKCLVPMSDTEMLLPITVGDYTDFFCSVHHARNCGFIFRGPQTPVNPNWFQLPVGYHGRASSVIVSGTDIIRPKGQGHPTGDSRPYFGPSKKLDFELEMAAIVGPGNELGKPIDINDAEEHIFGLMIMNDWSARDIQAWETIPLGPFLGKSFSTTVSPWIVTMDALKPFTCEAPKQEPEPLPYLAEKNHVNYDIPLEVWIKPKEQSEPSMVAKSNFKHLYWTLTQQLAHHTVNGCNLRPGDMFATGTLSGPETESLGCLLELTWNGQKEISVGNSTRKFLEDGDEVILTACCKGEGYNVGFGTCTGKVLPALP

SEQ ID NO: 48583 - protein, 376 aa, Oryza sativa
MVSTIKVHNVSLEASEQDIREFFSFSGVIVHVEMQSGDERSQFAYITFEDDEGAERAMLLTGATIVDMSVIITPATNYQLPAAVLADIESKNAGGMESALRKAEDAVVSMLAKGFVLGKDALERAKSFDEKHQLTSTATAKVTSLDRKMGLSQKFSTGTLVVNEKMKEMDQKYQVAEKTKSALAAAEQTVSTAGSAIMSNRYILTGAAWVTDAYSKVATTATDAGAKSKEMVVAEQDDKHQDDKPAKDYSPISSKEFVQEGKHQEGERPKKNMPEKPEMGKRELENQEAAIPTAHAQENAQITGKEHKHQEADLPKADIPGSFTMAAKSEKHRNPYSELSKTHIPGSPATIPVCTATTDVNSTKTPKKPENAEGFI

SEQ ID NO: 48584 - protein, 197 aa, Oryza sativa
MQELLASALMILEHFGHFLFGGSFSCLVQIMTIQVIAEREQKIRSEVKEIQKVFFCSLCNKQYKLAHEFESHLSSYDHNHRKRFKEMKEMQSSSSSSRDDRQKREQQREEKELAKFAQLADAHRKQQQQKQEPSESSSERITMKNLPNPSNQDQRKTLKFGFSKMAPSKAPVGNVSKKPKVATKMSSVFGNESDEES

SEQ ID NO: 48585 - protein, 152 aa, Oryza sativa
MSTPARKRLMRDFKRLQQDPPAGISGAPHDNNIMLWNAVIFGPDDTPWDGGTFKLTLQFTEDYPNKPPTVRFVSRMFHPNIYADGSICLDILQNQWSPIYDVAAILTSIQSLLCDPNPNSPANSEAARLFSENKREYNRKVREIVEQSWTAD

SEQ ID NO: 48586 - protein, 521 aa, Oryza sativa
MASHMGADFDKLKFDPTEFSSKKEVFIVRNIILSTLKFANTCHNMLSKTPGASCNLYDRIKELIECVQQNASQYCSTYEFFHLIMCACISWYACKTRDGNQESGDPTEQPDIFSSPSIWLTQELCAIRITKMLFRKQRYWDAYMSAMYCCREGLWFVVSFVFRKLADDFGSGSFSFWFKSLLLISAGEIEMKLLLFPSAIIKLVSELKTDCDLHESFYCVETNVDSSLAGSSELHGSQAKITDICSKTFLATDHLLSNTSSSHELFFQRWFISLRASFLEILADFLGILTAHLTDQRDESHHDAIGDHSSVPREHNNSQLLALVNCSLRLSELAHSYDLLAVSHGDMDRQSFSSIARLAFMCSLLAFCIAFSVDFSKVHSSVESCRLPERFSHASVVQDLHERVDRTDSQIVSQLQQLMPICCDKVHSIQIVTRMNCELFRYSGKGFLSSLQICCGIFPPLTWGHQRNSDWRGQCISFAWRDAISVQHFTEGYGIAICSTQILLQSKVTYACCSLKISCCG

SEQ ID NO: 48587 - protein, 297 aa, Oryza sativa
MSPTAPSRTGRALALLPVLVLLLLVCSPAASAGEQKGVCVSPGGRFPAFSSEGKRPGRAAKGRRDLALCRVFRQNTCCDVSQTFSALLSVRKLASTGEGSQECLHLWELLECSICDPRVGVRPGPPVICASFCDMVFKACSEAYFAIDVKTQALSPCGLGDILCGKAHKWVSNGTELCRSAGFSVQALETTSGGVDDTFCYGGKASFDAISSSWTSSKERPVLSDVASWNLEDFRRWAREMPASERVSWAIGGMVLTAGLIFISKRKSYIPGQKQAAIARNVRKLESRVNPQQLRRN

SEQ ID NO: 48588 - protein, 569 aa, Oryza sativa
MGMESGDAQLPLLHHQASASNQHYTKPPFNWKAPALILAFEFLESIAYAGISLNLVVYLGTVLHGTTASNAANVDTWNGTTFLTPVLGAFLADTYWGKYKTIAISTVFYLIGLLVITASAVIPSLQPAPCNGSSCPPATGFQYFVFFTALYLISVGTGGVKSALLPFGADQYNDSNLEESKKKQSFFSLFFIAINLGVFISGTVVVWIQQNVAWSLGFGISSICLVVATVAFLAGTPVYKVQLPSGSPLKSVVMVFVASFKKRKLEVPADNALLYEGDDADLSNGQSVKLAHTDGFRWLDKAAVVFEEVEEINKDEGGGGGWLQCSVTQVEEVKILLRMLPIWVTSVLYAASLGQTATTFVQQGNAMNTKIGSFSVPAASLNSAEVIFMMIWVVFQDTVVVPIARRYTGNPAGLTQLQRMGVGRLLAVPALAVAAVLETWRLRSVRDGGNLSIAWQLPQFVILACSDVFCGIAQLEFFYSEAPVSMRSLCSAFSFLALSLGYYVNSLVVSIVAVVTTTSNKGWLPADLNDGHLDYYFWLWTGISAINFVVYAAFAKNYTVKRLAVPHSH

SEQ ID NO: 48589 - protein, 231 aa, Oryza sativa
MALRTLASRKTLAAAALPLAAAAAARGVTTVALPDLPYDYGALEPAISGEIMRLHHQKHHATYVANYNKALEQLDAAVAKGDAPAIVHLQSAIKFNGGGHVNHSIFWNNLKPISEGGGDPPHAKLGWAIDEDFGSFEALVKKMSAEGAALQGSGWVWLALDKEAKKLSVETTANQDPLVTKGANLVPLLGIDVWEHAYYLQYKNVRPDYLSNIWKVMNWKYAGEVYEDATA

SEQ ID NO: 48590 - protein, 936 aa, Oryza sativa
MASRFWGQGDSDSEEEEQEIESEAGSESEDEGGDAGGRSNQNRYLRTTNASDSDESDSGQRVVRSLKDKRNEELKITVDQMRNAMKINDWVNLQESFEKLNKQLEKVVRVNESTTVPNMYVKALVLLEDFLAEALANKEAKKKMSSSNAKALNAMKQKLKKNNKQYENLIQECREHPERFEDDDVEDKDDDDETDDDASDADIEDPEKMVMSESEEEGDDDEEGDQDGGAWEKKISKKDKLMDKQFLKDPSEITWDIVDKKLKEIVASRGKKGTGRVERVEQLTFLTRVAKTPAQKLEILFHVISAQFDVNPSLLGHMPVNMWKKCVNNMLLVLDILQQYPNIVVDTSVEPDEKETQKGADYDGQIHVTGDLVAFLERLDSEFFKGLQCTDPYTKDYVQRLRDEPLFLVVAQNVQDYLERVGNFKAEAKVALRRVELVYYKPQEVYDAMRKLAEQDEDSREDDDADADEERQVVDDNRGPPPFVVIPEVVPRKPTFPESGRALMDALMSVIYKYGDERTKARAMLCDIYHHAISDKFSVARDLLLMSHLQDGVQLMDISSQILFNRVMAQLGLCAFRAGLIIEAHGCLSELYSTGRVKELLAQGVQQSRYHEKTPEQERLERRRQMPYHIHINLELLEATHLICAMLIEVPNMAASTYDRRKSMNRTFRRLLEISERQTFVGPPENVRDHVMAATRALRKGDYQKAFDVINSLEIWKLLRNKEHVLEMLKLKIKEEALRTYLLSYSSCYESLSLDQLTTMFDLSEQQAHSIVSKMMMHEELHASWDQPTKCIIFHNVDQTRLQGLLFQMSDKLSVLVESNERAYEAKTGGTLEGAPPRRRGGDGQDSSNLGKWQENFVSSQGRQGGGRSGYSGRVGGPGRGGGGYQRDRGSQGSRGGYGGGSRFQDGGRSRNQSGSMARGGDGGARMVSLNRSGRG

SEQ ID NO: 48591 - protein, 221 aa, Oryza sativa
MAAAAPATTSSAAARPSSSSSSSRQSDAPLRAATVSFPYSPRPAALAAGARASRVSPVVVAAGGGHQRLMGSLTNTQGLRFGVVVARFNEIVTNLLLQGALETFERYSVKKENITVVSVPGSFEIPVAAQKLGKSGKFDAILCIGAVIRGDTTHYDAVANSAASGVLSAGLSAEIPCIFGVLTCDDMDQALNRAGGKAGNKGAEAALTAIEMASLFQHHLA

SEQ ID NO: 48592 - protein, 377 aa, Oryza sativa
MADAEDIQPLVCDNGTGMVKAGFAGDDAPRAVFPSIVGRPRHTGVMVGMGQKDAYVGDEAQSKRGILTLKYPIEHGIVSNWDDMEKIWHHTFYNELRVAPEEHPILLTEAPLNPKANREKMTQIMFETFSVPAMYVAIQAVLSLYASGRTTGIVLDSGDGVSHTVPIYEGYALPHAILRLDLAGRGLTDSLMKILTERGYSFTTSAEREIVRDIKEKLAYVALDYEQELETAKSSSSVEKSYELPDGQVITIGAERFRCPEVMFQPSLIGMEAPGIHETTYNSIMKCDVDIRKDLYGNIVLSGGSTMFPGIADRMSKEITALAPSSMKIKVVAPPERKYSVWIGGSILASLSTFQQMWISRAEYEESGPAIVHRKCF

SEQ ID NO: 48593 - protein, 70 aa, Oryza sativa
MVGLDFIPRCGLFCPGEYFCIYLAPPEQINTLFLHFHYSLFQIQLIRVLFIQQGHAWWMYVWFQFMILDE

SEQ ID NO: 48594 - protein, 516 aa, Oryza sativa
MSKTESRKLSDDYEVVDVLGRGGFSIVRRGVSKSEEKTQVAIKTLRRLGPAMAGMKQGTKPVPGSGLPMWKQVSISDALLTNEILVMRRIVESVAPHPNVINLHDVYEDVHGVHLVLELCSGGELFDRIVGRDRYSEFDAACVIRQIASGLEALHKASIVHRDLKPENCLFSDKDEKSTLKIMDFGLSSVEDFSDPIVALFGSIDYVSPEALSRQEVSAASDMWSVGVILYILLSGCPPFHAATNREKQQRILQGEFSFQDHTWKTISSSAKDLISRLLSVQPYKRPTASDLLRRPWVIGDCAKQDLMDAEVVSKLQKFNARRKLRAAAIASVLSCKVALRTKRLRNLLGTHDLTSEELDNLRLHFGRICADGENATLSEFEQVLRAMKMDSLIPLAPRVFDLFDNNRDGTVDMREILCGFSSLRNSRGDDALRLCFQMYDADRSGCISKEELASMLRALPEECLPGDITEPGKLDEVFDQMDADSDGKVTFDEFKAAMNKDSALQDVLLSSLRPQ

SEQ ID NO: 48595 - protein, 760 aa, Oryza sativa
MWRLKIAAESGGGSGSSPLLHTGNGFLGRAVWEFDPDAGTPEERAEVARLRRDFTRHRFQRKESQDLLMRMQYAKLGHLQPDLSAVIVEDNQNVTEETILSSLRRALNQYSTLQAHDGHWPGDYSGILFIMPLLIFSMHVTGTLDVVLSLEHKREICRYIYNHQNEDGGWGTQVLGQSTMFGSCLNYATLKLLGEALHNNDALAQGRMWILSHGSATAAPQWAKIWLSVIGVYDWSGNKAIIPELWMVPHFLPIHPARFWCFVRMIYMSMAYLYGKKFVGPITPTILEIREELYNIPYSEIDWKKARDCCAKEDLRYPCSWIQDIVWTYLNKYVDPMFNVWPFNKLREISLRNLMKHIYYEDENTKYIGLCPINKALNMICCWIEDPNSDAFKRHLPRIYDFLWLAEDGMKAQVYDGCQTWETAFIVQAICSTGLVDEFSTTLEKAYGFLKNSQVLHDLPNGKSFYRHRSKGSWTLSTADNGWSVPDCTGETLQALLGLSKISPKLVGDPIKEKSLYDAVDCLLSFSNKDGTFSSYECTRTASWTEILNPSESFRNIVVDYPHVECTSSAIQGLISFTELYPGYRGVEIESCIKNAVMFIENKQQNDGSWYGTWGICFTYGAFFAIRGLIAAGRNYENSQAIRNGCKFLLSKQLSAGGWGEHYSSSEIEVYVDSGSPHAVNTSLAMLALLYSGQIERDPTPLYRAAKQLISMQLETGEFPQQEHVGCFNSSLYFNYPNYRNLYPIWALGEFWHRLVASKD

SEQ ID NO: 48596 - protein, 137 aa, Oryza sativa
MHYLVTSLDGALLMVRREMADAGSTDGFEVFEADLAASRWVEVGGLGAGGEALFVGRLCSRAVRAPDDGDQIFFLDDTDGLSFRWELQPRPPYQVAAYDMVRRTFSMLMWKKPLEDGNTPVTWLFPDDDDDDDRVTK

SEQ ID NO: 48597 - protein, 432 aa, Oryza sativa
MGTCLTTAEQRAMEVPAASVKGGGGRRSDEEAPGRIAGNGAGNVACLFTRQGKKGTNQDAMVAWENYNGRSDTVFCGVFDGHGPHGHLIARKVRDILPSRLCDLIYEDCGDSPTSNSDVSTLEENLSPYADAECRSPTLAGQKEHQEFFNAMKESFRKAFKNVDKELKLQRNIDSICSGTTAVTLIKQGHDLIVGNLGDSRAVLGTRDQNDKLVAHQLTVDLKPDHPREARRIRRCNGRVFAHQDEPDVARLWLPNCNSPGLAMARAFGDFCLKDFGLISVPDVTYRQITEKDEFIVLATDGVWDVLSNQEVVDVVASCSGRFAAARSVVDLANETWRFKYPTSKTDDCAVVCLFLNKYEVTGGLSGQPGYSPRMPALSGITRPNSKRVTPDDVDDGSDSNVSGDERSLDGFTRLNTLLALPKFGDTSPTKK

SEQ ID NO: 48598 - protein, 618 aa, Oryza sativa
MADSPNPSSGDHPAGVGGSPEKQPPVDRRVAALAAGAAGAGARYKAMSPARLPISREPCLTIPAGFSPSALLESPVLLTNFKVEPSPTTGTLSMAAIMNKSANPDILPSPRDKTSGSTHEDGGSRDFEFKPHLNSSSQSTASAINDPKKHETSMKNESLNTALSSDDMMIDNIPLCSRESTLAVNISSAPSQLVGMVGLTDSSPAEVGTSELHQMNSSGNAMQESQPESVAEKSAEDGYNWRKYGQKHVKGSENPRSYYKCTHPNCDVKKLLERSLDGQITEVVYKGRHNHPKPQPNRRLSAGAVPPIQGEERYDGVATTDDKSSNVLSILGNAVHTAGMIEPVPGSASDDDNDAGGGRPYPGDDAVEDDDLESKRRKMESAAIDAALMGKPNREPRVVVQTVSEVDILDDGYRWRKYGQKVVKGNPNPRSYYKCTNTGCPVRKHVERASHDPKSVITTYEGKHNHEVPASRNASHEMSTPPMKPVVHPINSNMQGLGGMMRACEPRTFPNQYSQAAESDTISLDLGVGISPNHSDATNQLQSSVSDQMQYQMQPMGSVYSNMGLPAMAMPTMAGNAASNIYGSREEKPSEGFTFKATPMDHSANLCYSTAGNLVMGP

SEQ ID NO: 48599 - protein, 343 aa, Oryza sativa; identical to SEQ ID NO: 31985

SEQ ID NO: 48600 - protein, 426 aa, Oryza sativa; identical to SEQ ID NO: 33048

SEQ ID NO: 48601 - protein, 145 aa, Oryza sativa
MVHGKLEVLLVCAKGLEDTDFLNDMDPYVILTCRTQEQKSSVAKGAGSEPEWNETFVFTVSDDVPQLNVKIMDSDAFSADDFVGEANIPLEPVFLEGSLPPAVHRVVKEEKYCGEIKVALTFTPAAETRHHHNHENEGEGYSSWN

SEQ ID NO: 48602 - protein, 254 aa, Oryza sativa
MDRSEMGRGRVELKRIENKINRQVTFSKRRNGLLKKAYELSVLCDAEVALIIFSSRGKLYEFGSAGINKTLEKYNSCCYNAQGSNSALAGGEHQSWYQEMSRLKTKLECLQRSQRHMLGEDLGPLSIKELQQLEKQLEYSLSQARQRKTQIMMEQVDDLRRKERQLGELNKQLKNKLEAEADSSNCRSAIQDSWVHGTVVSGGRVLNAQPPPDIDCEPTLQIGYYQFVRPEAANPRSNGGGGDQNNNFVMGWPL

SEQ ID NO: 48603 - protein, 183 aa, Oryza sativa
MLNLIKIKGQKKEDAANANGKPPAKKQSPGELRLHKDIAELKLPKSTRISFPNGKDDLMNFEVTIRPDEGYYVGGKFIFTFQVPPAYPHEPPKVKCKTKVYHPNIDLEGNVCLNILREDWKPVLNVNTIVYGLNLLFSQPNDEDPLNHEAAAVLRDNPEKFERNVQRAMAGGYVGETHFPRCM

SEQ ID NO: 48604 - protein, 390 aa, Oryza sativa; identical to SEQ ID NO: 31241

SEQ ID NO: 48605 - protein, 307 aa, Oryza sativa
MASRGSGSGSGKGKGKKASGGTRGKGRMPLDGEITERISTLRMANTPRTERLRRNLASLVLRQALQGVYSEILGGYIQSYELDYQDQDGCSFVQGRIFMESPRSGEEGFIQHDATFVVMDEDYETGRIMAQKIYDTTIKFHGYNDVIADIYLVAYCETLGKWVIGYEPFCQYWLESTLAPFYESDTTISAYWRDKIREMTESISYLCTRKVSHGGLANRESYVLDLDSKLKLINVARYSTDGSTTRDDVVDFFDLLCTEDRINASGNGNVEWEGFDYLIKSNSMYNTRFGEWKQANIEPPNFERPFS

SEQ ID NO: 48606 - protein, 447 aa, Oryza sativa
MATYYSSPGNERDSQAMYPADSGNSSYPVPSAIGNMLYPGNGSSGPYTEFSGIIQHQQNFMELPGHPTAISQDSSSREPNMVASYMDQRSFGPAKDMRNEMLMHLMDGAHNAGADLIHNDTHSSAQIEFGLLNNHNSMSVAPAPGQGLSLSLNTHILAPSYPYWSAKTELLTPHSYHGDDNRMKNMQSEASQAIRNSKYLKAAQELLDEVVSVWKSIKQKAQKDQAEAGKSDNKEAEGGSKGEGVSSNPQESTANAAPEISAAEKQELQNKMAKLMAMLDEVDRKYKHYYHQMQIVVSSFDMVAGSGAAKPYTAVALQTISKHFRCLKDAINDQINVIRKKLGEEESSSGKEGKLTRLRYIDQQLRQQRAFQQYGLLQQNAWRPQRGLPENSVSILRAWLFEHFLHPYPRFRKADASETNWLNKKSDFKLVHKCPCPPVETDDRRHV

SEQ ID NO: 48607 - protein, 467 aa, Oryza sativa; identical to SEQ ID NO: 36860

SEQ ID NO: 48608 - protein, 184 aa, Oryza sativa; identical to SEQ ID NO: 30447

SEQ ID NO: 48609 - protein, 705 aa, Oryza sativa
MGDESNTLRVLVATDCHLGYMEKDEIRRFDSFEAFEEICSLAEQNKVDFVLLGGDLFHENKPSRSTLVKTIEILRRYCLNDQPVKFQVVSDQTINFPNRFGQVNYEDPNFNVGLPVFTIHGNHDDPAGVDNLSAIDILSACNLVNYFGKMDLGGSGVGEIAVYPVLVKKGTTFVALYGLGNIRDERLNRMFQTPHAVQWMRPETQDGMSVSDWFNILVLHQNRIKTNPKSAINEHFLPRFLDFIVWGHEHECLIDPQEVPGMGFHITQPGSSVATSLIDGEAKPKHVLLLEIKGNQYRPTKIPLRSVRPFHYAEVVLKDEVDVDPNDQASVLEHLDKIVRNLIKKSSQPTASRPETKLPLIRIKVDYSGFSTINPQRFGQKYVGKVANPQDILIFSKSAKKRQTTGVGNIDDSEKLRPEELNQQTIEALVAENNLKMEILPVDDLDIALHDFVSKDDKMAFYACLQRNLEETRTKLNSEADKFKIEEEDIIVKVGECMQERVKERSLRSKEDSRFTSSSQNLDTGGRSVTAQSNLNSFSDDEDTREMLLGARTTNAGRKASGFTRPSKDATDVAKTGTSRRGRGRGTASMKQTTLNFSQSRSSAAIRSEEVQSSSDEENETNEANEVVESSEPEESPQQTGRERAAPRGGRGRGRGATAKRGRKADISSIQSMLMSKDDDDDDEDDRPKKPPPRVTRNYGAVRRR

SEQ ID NO: 48610 - protein, 578 aa, Oryza sativa
MPLLKSIPPVTRMAMGRGTWVTVLCRKLRDWWHWVAEGDIPIVASHGTEIEAYKVLEPATRLIILKAICDIRVEQEDIRNFIDSSLKHGYDLSTFRKERIGGDAYGISYWYEDDPILGHRLYREIRRVEQLKKEPGKRSRGKGGSIILPVVSYQWETVASNFDEFDDVAEKLFSSRNRTEANLGKKLKIEYLPDIEKIHKKKERLLKKQQREALLIDSFLAPDGFTTGRSLRDRKPVTYTFDEYDRSISEAIKITKKGENSAEPAAPANRRILTPRPEASSNGKVNGLSPTTNEYDGNSSKSDDYRDSDGEEESETLDRSNRRRRRSQRYTRDFVEAVSDIDPNFDSDDEIMGEAVYDEEYLRTRKQQKTSSASEEDEEFRLEEDDDEEEEEYSLSTSEDLEEPQQRKKLQTRGRRGAKLRSVDEIQTGLRRSKRSSRQRINYQQYDYSDTDTEGGKEGKSDASDPDAGFDAENDTELSTSSQEQEEDEDDGPEEQKDNSDDNKMDEDHVMVENKEEQEEQPQPPPLPPQQPVEKMEAPSREIETVGRTFLDLNELAPGGGFDDGPSLTMKDEDMDNS

SEQ ID NO: 48611 - protein, 265 aa, Oryza sativa
MSPAEPTREESVYKAKLAEQAERYEEMVEYMERVARAAGGASGGEELTVEERNLLSVAYKNVIGARRASWRIISSIEQKEEGRGNDAHAATIRSYRGKIEAELARICDGILALLDSHLVPSAGAAESKVFYLKMKGDYHRYLAEFKSGDERKQAAESTMNAYKAAQDIALADLAPTHPIRLGLALNFSVFYYEILNSPDRACNLAKQAFDEAISELDSLGEESYKDSTLIMQLLRDNLTLWTSDANDDGGDEIKEAAAPKEPGDQ

SEQ ID NO: 48612 - protein, 610 aa, Oryza sativa
MLQLPFSPKESWSSPVNSAIGHVRKIRRRAGHFLSRSSKNKAAHSKGGQTTKSLISGDLHSGSIQDVWATLSAEVASKLSKSVVSLALSDGNIPIYACSGTAISCQEGSGTIFLTSASLVRAFYDTEEIYDNLKIEVRHEGNEVYKGYLAKYDLDKNFAVVYTMESLDVHVVLSEHLKDRYAKKKLVAVSRNKYGGLITKSVMVGSHHNSNRSEVCHDISVMAEDWEGGPLFDFDGKFVGMNKFLAMDTTFILSWMSILIIFKHYLPTLQNRILKRLQNLKRVRDGEGPGELSDCHPEVHRGGLDKEHVEYLNSLGYPKPPVNVLDDGLILAYSFEENFGFVYGEVIKKFPCDIHQSVVALASFKGERRFFACTGFFIEWKGCTIILTSASLVAESGDRNKIDENLRIEVLLPNEQRRQGTLQHYSLHYNVALVSVNDMDFHARPANMKLDNECPPQVAALGRCFESGKIMAVCGDLVDWTGTLDCNFLIRSSCKTTKAGIGGPLIGLDGKVIGMNFYDKKIGTPYMPWDVILKILACFENESSAAEVGNGSDPSDAPGWKIPGDGSVKLNRWPVPLPYWRPHDDVEEQEPPEGCEYQCTYRNGERWCYR

SEQ ID NO: 48613 - protein, 508 aa, Oryza sativa
MGWKAAMVGGKLAGVGGEKLRCAAAPAAAARSRMKLWMVRATTTVLLWTCVVQLTAVGDTWGPRVLKGWPSCITSPDDDAASATLAAARPEPVVDKAVLPPKRIYRNNGYLMVSCNGGLNQMRAAICDMVVIARYLNVTLVVPELDKTSFWNDPSEFQDIFDVEHFITSLRDEVRILRELPPRVKRRVEHGMYHSMPPISWSDISYYHNQILPLIRKYKVLHLNRTDARLANNGLPMEIQKLRCRVNYASLRFTSQIEELGKRVIRILRQNGPFLVLHLRYEMDMLAFSGCTQGCSNEEADDLTRMRYAYPWWKEKIINSELKRKDGLCPLTPEETALVLRALDIDRSMQIYIAAGEIYGGKRRMSALTSAYPNVVRKETLLEPSDLMFFQNHSSQMAALDYLVSLESDIFVPTYDGNMAKVVEGHRRYMGFKKTILLDRKLIVELVDQYNNSSLRWDEFSLMLKAAHANRMGSASKRTVILDRPKEEDYFYANPQECLQDSNLLHTS

SEQ ID NO: 48614 - protein, 276 aa, Oryza sativa
MQANPPQLHSNLLYIQRYRRQSRLVSEAQYFFTNILSAESFIWNIDGESLSMDERDFQKKMDLARERMLGLSASSENQDNQNNLDVREQKSQTLKASRDSDVNLSLKDNFQGPGLEMRRDSDASSNPVERVQSISDLEKKGAAELLKDDDLNKKIQEYPFLFARSGDLTVADVENLLNSYKQLVLKYVALSQGMGINLENPPVQSMQTVSDLVESEEPKNVKNAVNFSEGSSKTSDDIKNDTLYSEVDNTGTQQTAVDPSYQKAQQDEASDQPEHA

SEQ ID NO: 48615 - protein, 387 aa, Oryza sativa
MELHCRVLKLGCGKDRYVRNALVSMYGKFGRLGDARKAFDEMPDKNAVSWNALVGAHRAAADWMGADRVSQAMPVRNLSWWNAEIARNVRIGYMDEAARIFSEMPERDAVSWNSLISGYTKLGKYTQALGIFQEMQENGIQPTELTLVLVLGACAKIGKLDLGTNIHRNLQNKGIVADGLVGNALIDMYAKCGMLDLAKKVFDRMSMRDITCWNAMIVGFSVHGCSREALELFDSMKIEPNPVTFLGVLTACSHGGLVNEGRKYFNSMIEDYRIVPDVKHYGCMIDMLCRYGKIEEAYLMIKENPSTASSVLWKMLLAACRVHGHIDLAYMFFHELRELILTDNGGLVTISNVYAEAKRWDDVEHLRMKVRCNSALKHAAHSQMDVM

SEQ ID NO: 48616 - protein, 326 aa, Oryza sativa
MSSPPVLLLCRLFPGTFTDVAHRFRLLDFYASALPIHAFLAAVAAHADPPRVVLVFGGGPIPVGAELLDAVPSLRCIITVSAGTNHIDLRECARRGVQVANAGGIYSTDVADYAVGLLLDVLRHVSAGDRFVRRGLCPEQRGGDFLPLGSKIGGRRVGIIGLGSIGSAIARRLEAFGCVVSYHNRRRREDVAYAYFPTATDLAASSDVLVVACALTAETRRIVDRGVLDALGERGVVVNVARGANVDEAELVRALAEGRVAGAGLEVFDDEPNVPPELWAMDNVVLTPHQAIFTPESMADLSRVVLANLDAFFAGEPLLTRVEASE

SEQ ID NO: 48617 - protein, 255 aa, Oryza sativa
MVSLSRARFAFPTQLAATFRFSRKFALCLPPAAAAGVVIFGDAPYVFQPGVDLSKSLIYTPLLVNPVSTGGVSTKGDKSTEYFVGLTRIKVNGRAVPLNTTLLAINKKGVGGTKLSTVTPYTVLETSIHKAVTDAFAAETSMIPRVPAVAPFKLCYDGSKVAGTRVGPAVPTVELVFQSEATSWVVFGANSMVATKGGALCLGVVDGGVASETSVVIGGHMMEDNLLEFDLVGSRLGFSSSLLFRQTTCNNFRLG

SEQ ID NO: 48618 - protein, 591 aa, Oryza sativa
MAGAAAAAFAAQVLRGRWFMAYGSFLIMSAAGATYIFAIYSKDIKSTLGYTQEQLNTVGFFKDVGANIGIHAGLIAEVTPPWFVLAIGAAMNLGGYLMLYLSVTGRVGARTPLWLVCLYIAVGANSQAFANTGALVTCVKNFPESRGVMLGLLKGFVGLSGAIFTQLYLSFYGGGGSNTKPLILLVGWLPAAISVAFLGTIRIIRAPRSPTAARREYRAFCGFLYVSLALAAYLLVVIVLQKRFKFTRAEYAVSAAVVFAALLAPFAIVLREEAALFRKTPPKEEADDVPALSAATKPSPAAAETPPATAMERVVRALRPPPRGEDYTILQALVSVDMVLLFTATVFGVGGTLTAIDNMGQIGESLGYPQRSIATLVSLISIWNYLGRVSAGFASDALLSRYGISRPVVVTGVLLLTVAGHLLVAFGVPGSLYAASVLIGFCFGAAYPMILAIISEVFGLKYYSTLYNVGNVACPVGSYILNVRVAGRMYDREARRQGAVAVAAGKKELTCIGVKCYKDSFLIVAGVTVAAAVVMAALAWRTRKFYAGDIYARFREEAAAGGGGAGNGTGAGEDEKVESKEEKAVMTPTST

SEQ ID NO: 48619 - protein, 417 aa, Oryza sativa; identical to SEQ ID NO: 36137

SEQ ID NO: 48620 - protein, 606 aa, Oryza sativa
MDHHPIPADENEMTSTSPQMQMRRNKLSSHFQGDIDDDGGVGVVDIRGSPMGSAELARTGGWVAAVFIFGNEMAERMAYYGLSLNMVIFMFNVMHRPFAASANAVNNFLGISQASSLLGGFLADAYLGRYWTIAAFTTLYLLGLVALTLCATMPALQAPGQDECDGFAKLLGKCQQPHPWQMAYLYAALYTTALGAAGIRPCVSSFGADQFEERSPVLDRFFNLFYLAVTVGAIAAFTLLVYVQRNHGWAAAFGALALAMAASNALFFMGTPLYRHRVPGGSPLTRVAQVLVAAYRKRHIKHTTELLYEVGGAKSAVRGSGKIEHTEELRWLDKAAVRVEGQEEINNPWRLCTVTQVEEVKILVRLAPVSACTVMLSVVLTEFLTLSVQQAYTLNTRGLPVACMPVFPCLAILLLLALYYRAFAPLARRLTGHPHGASQLQRLGLGLLLSTLSVAWAGLFERYRRAYAIRHGFLPLFLTPMPGLSAYWLLIQYCLIGLAEVFCLVALLEFLYQEAPDAMRSLASAYAALAGGLGCFLATAINTAVDSITGDIDAGRPSWLAQNINVGKFDYFYWLLAVLSTINLIVFIYFAKAYKYRIKPPTTPHN

SEQ ID NO: 48621 - protein, 492 aa, Oryza sativa; identical to SEQ ID NO: 29422

SEQ ID NO: 48622 - protein, 598 aa, Oryza sativa
MAEDGRGEEKAVDVVAVKKPKQGGFRTMPFILANDFCDRLANVGFSSNLITYLTLQLHLPLVDASNTLTNFHGTANLTPLVGGLIADSFAGRFWTITFGSVIYQLGMVFLTLSAALPSLRPPPCAKHAADCQRASSSQIAVLYASLLFTSIGTGGTRPCIMAFGADQLELDAGARGRRGRKGPKWSFFNLYFFGIELAKLTAVTVIVYIQENVGWGWGLGVPTIAMFAAVVAFVSGYSMYVKMPPAGSPLVRLAQVAAAAFKKRKAVMPEPSRLYEDKVLDAGISTTGRLLHTDQLKFFDKAAIITDGDVLPSGEPKLWRLSTVHRVEELKSILRMLPIWAAGILLVTSASHNSSFAIQQARTMDRDITPHFKIPPASMLIFTNLAMLLTLAFYDRVLVRVLRRFTGHPNGITHLQRAGVGMTIAMLANAVAAVVESRRKSVAAASGMLDAPKGSSLPISVFWLVPQYAIHGVADAFMDVGRMEFLYDQAPESMRSTAAALYWLTMSIGSYLGTLLVTIIHAKTQRSGQWLQDNLNRAKLDSYYWLVFGLQGLNLIYYFVCVRYYTFKPLETVKPEEELELYRGNGNEGDGKKGGTLK

SEQ ID NO: 48623 - protein, 390 aa, Oryza sativa
MGTSSRPTTVKEGKKLEAPRRAGSHAAVKRSPVDKPPFTLGDIRKAIPPHCFHRSVIKSFSYLLHDLAIAAGLLYFALVVIPALPGVLRLVAWPFYWAAQGCFLFGVWIIAHECGHHAFSGHALLDDTLGLVLHSWLLAPYFSWKYTHQRHHSNTSSQERDEVFVPRFKSDLPWYSPYVYKYNNPVARLLLLVVQLTVGWPMYLVFNTWGRQYPRFASHFDPSGPIYKGRERVFIAISDIGMLAVSLALYRLAEGYGFWWVVRVYGVPLLVVNAWLVVVTYLHHTHRAIPHYDSSEWDWLRGALATVDRDYSFLNRVFHNITDTHVVHHLFPTIPHYHAVEATKAIRPILGEYYQFDPTPIVKAIWREAKECIYIQSEDHKGVFWYSNKF

SEQ ID NO: 48624 - protein, 432 aa, Oryza sativa
MAMSSSRSAAAIRGRRVGALARARRHATRAMASLFGHVEPASKDPILGVTEAFLADPSPDKVNVGVGAYRDDNGKPVVLECVREAERRIAGNLNMEYLPMGGSIKMIEESLKLAYGEDSDFIKDKRIAAVQALSGTGACRLFADFQRRFLPNSQIYIPTPTWSNHHNIWRDAQVPQRTFTYYHPESRGLDFAGLMDDIKNAPNGSFFLLHACAHNPTGVDPTEEQWREISYQFKIKNHFPFFDMAYQGFASGDPERDAKAIRIFLEDGHQIGCAQSYAKNMGLYGQRAGCLSILCEDEMQAVSVKSQLQQIARPMYSNPPVHGALVVSIILNDPELKSLWLKEVKGMADRIIGMRKALRENLEGLGSPLSWDHITNQIGMFCYSGMTPEQVDRLTNEYHIYMTRNGRISMAGVTTGNVAYLANAIHEVTKTK

SEQ ID NO: 48625 - protein, 228 aa, Oryza sativa; identical to SEQ ID NO: 31828

SEQ ID NO: 48626 - protein, 147 aa, Oryza sativa
MMNVEDFVMAPPPPLARARPISPRRLEEELSSRRAEMRRIHDDNQRLADEIVGLRQAMPRLKEDLHAASQAIPKLRAEKELESRELTQRNLKLEAELRSLEPLRQDALQLRSEAGKLQSIRQELTAKVQGLLKELEHQNSENQKYLS

SEQ ID NO: 48627 - protein, 214 aa, Oryza sativa; identical to SEQ ID NO: 28928

SEQ ID NO: 48628 - protein, 247 aa, Oryza sativa
MSSPFLGSSSSSASSPLSYLTPPRPPPPPPPLLMGQGYAAAANGGIGGGGVEAVNAAAAPRQGGRHAGHPPLPRPPPRQCPRCGSANTKFCYYNNYSRTQPRYLCKACRRHWTEGGTLRDVPVGGGRKNSKRAAGGGKAGATASTAASAHVVAPAAAPPTSSSFPDLLRQMLMAPATAGGGGGYSIDQTAWQQMAAFAAPPQAATGDVGGAVGAASTAAPDANCGGGGVQYWNGWLQDDMPGLDGSC

SEQ ID NO: 48629 - protein, 472 aa, Oryza sativa
MEGRERRRSMSSSSSGRRTPELERERWAPWSPAPTWSRPLSVGGGGSRAASLKSLFRTIGLWFSSLSTSSSSSSSAAATSASGSNAKRRSRREPNDLIKKPPLPGPGSDQGKASMRGLYNSSRGRGIATQFQSSVFSMEEILRATNNFSPALKVGQGGFGAVYRGVLPDGTLVAVKRAKLRDQNPHVDVEFRSEVKAMARIEHQSLVRFYGYLECGQERVIVVEFVPNGTLREHLDRCNGRFLDMGARLEIAIDVAHAVTYLHMYADHPIIHRDIKSSNVLLTPSLRAKVGDFGFARLGVGEAGAADGVTHVTTQVKGTAGYLDPEYLKTCQLTDRSDVYSFGVLLLEIASGRRPIEARREMRERLTARWAMRKLAEGAAADVLDPHLPRTPATARAAEMVMELAFRCLAPVRQERPSMGECCRALWAVRKTYRDMVVAAAGDETPLSSISDRASSSSAGTGGDRSGELWRN

SEQ ID NO: 48630 - protein, 1021 aa, Oryza sativa
MSSDIRKWFMKAQDKNGGAAKPAGTTALAKKPVLSIPEKPSAAPSMAACDQDCSARRKTSKYFASKTEKEEDTSAGKGTGRGLPKRKLQKVSDELEDDMKPLPAKEVHKEEEDDDDDDFVAPSKRKTPVKPPPSKKLKGASTAEAHGKTGLDDDNEDKMDEDAKTPSKASGSGRGRGRGRGRGGRGAGAAHGKTIGLDDDGEEDKMDEDAKTPSKAAGRGRGGASGGRGRGGGGRGFMNFGERKDPPHKGEKEVPEGAPDCLTGLTFVISGTLDSLEREEATDLIKRYGGRVTGSISKKTNYLLADEDVGGVKSNKAKELGVPFLTEDGLFDMIRKSKPAKATVAKHQSDKNSEKQQKSPMKSSPVKVERRDGNQITTGKNISPKSNKGSASIDNQKVNIVDRGSLQWTEKYRPKVPNDIVGNQSMVKQLHDWLRSWEDQFLHSGQKGKGKKQADSGAKKAVLLSGPPGIGKTTTAKVVSQMLGLQAIEVNASDSRGKADSKIEKGVGGSTSNSIKELISNATLNYSNNRLKRPKAVLVMDEVDGMSAGDRGGVADLIASIKMSKIPIICICNDRYSQKLKSLVNYCLLLNFRKPTKQQMGKRLMEIAKKEGLQAQENAMEELAERVHGDIRMALNHLQYMSLSQSVVKYDDIRQRLNSSTKDEDISPFTAVDKLFGFNGGRLRMDERIDLSMSDPDLVPLIIQENYINYRPITVGKDDSGVKRMNFLARAAESIADADIVNVQIRRYRQWQLSQAACLSSSIVPAALMHGNREILEAGERNFNRFGGWLGKYSTTNKNIRLLEDAHSHILASQQANLDRESLRLDYLTLLLRQLTDPLKTMPKDEAVQKVVEFMDTYSLSQEDFDTIVELSKFKGHPNPMDGIQPAVKSALTKAYKQGSSSRVVRAADLVNIPGMKKPLKKRVAAILEPVGESLPEENGVASSEGDEEDSSDAENNDELVPGDTKPKLDLQSDKKKGIQVQLDLKSNGNGLNSKKMPAGRSKASGSAGKAAGGSGGKRKR

SEQ ID NO: 48631 - protein, 315 aa, Oryza sativa
MADHAAAEAAPQSSQEEEEDWKEAEGGDGDVEVADRGGGGGAANGGIPEGRPIRVYADGIYDLFHFGHAKSLEQAKRLFPNTYLLVGCCNDELTHKYKGRTVMTEDERYESLRHCKWVDEVIPDAPWVVTEEFLNKHNIDFVAHDSLPYADASGAGNDVYEFVKKLGKFKETQRTDGISTSDIIMRIVKDYNEYVMRNLARGYTRKDLGVSYVKEKRLRVNMGLKNLRDKVKQHQEKVGEKWNTMAKLQEEWVENADRWVAGFLEKFEEGCHSMGTAIKERIQERLKAQSRDFSLLQYDGEDVDEDEDDDEYVRE

SEQ ID NO: 48632 - protein, 195 aa, Oryza sativa
MGGNCTLHCYMGNTFQLKQVEPPGFSFQIVNTNLDEDSPRARRRSALLTWQHIASLPPNLPVIYCGGFNTQKESMTGRFLLGRSREHGVVGDMRDAWPNARVRKNVSLIHTYHGFKGEKQGALEFLKLIFRALCLCWDRQTQDLHIDWILFRGRPLVPALCEVINDNIDGVYPSSHFPIFAEFLLPRSVRLVETP

SEQ ID NO: 48633 - protein, 1004 aa, Oryza sativa
MAARGGGGRPPASRRRRRKPRGGRMERVSTPARLRRPPRLDAAEWFDIPGEHMSAPDEKAPTEVAGMPFSWDMQSEAAKYFGNFDTEIQASCQTQEPSYRAIYGSCNSGQMIGLGDSQYKLAGSSSSQSLYSDNFSDATGFNQLKLQKQTSADGNTESWSELNRDAIGGLSGKGSPLAKSGKQLEQRMAKALSAQPYHPVFPVTQGVSSSNSSSQHVVSSSGEAKYIGNSGQEMQVACETAKEPSHRALYGSKNPYQLTGLSDLRDKIIASSSFEGVNTGSLTSTLSGMNLPTNSAKENTEYNQLKLQKQIDGYQRFESGSGLNRDDAGDITVTGVPQQVQVGQNMVNALSAKPYHPVFSVSHGTSASSSSQHPYMARQLLEHPEYNPRMHRTHPSLQPTIEAASTSMTSHVKEPCYQENVGDSNPGMSLLRSTAVSSRDVENKSPNLGDRVHADVSEIYSTLDHQTSANSMQIQYAPQVVRQPSQQSLHSDVTETYSAFGHQSAASNIQRQFAPRVTRQASHRSLYESSNSSLWTGPHDDSQMELFRPSSSRRISTNVISGELPRINLQSETMMGNADFNQQNLRRQISLRENTESHSFGTYNELPRTSSFLRRQSSESSQLNSASVKCSPGSGSSSTTMGPPRPFNTVSGGASSLLGSPLSSMSGGSSSGGNPDHQGTVLSSIYQPDGYNINSTLPLRMRTHAREAYATSVLPQATRRSHQVNFDSAERRPQYVQQRGLDDTINSNMLSARQQFQRQVERQLQRQLERQLQRQLERQLQRQVQRQLQRHHERAAASEAHPFYGNDETSVRMNPTEEFLDIVKDHEAFFLSFYHPSRIPARVMNTVDQCYGVDMEREMPHQESHPTPGCGTELSHKNDTSGFERSDVDVAHIHDSKRLNNEELNALLLHRKFSSLNKGNYRLFHIEGHVLQCSIDQCGSRFIQQKLPTATPDEKLMVFKEIMPHFLEMVTDVFGNYVLQKMIEHGAPFQRREITACLFGSVRA

SEQ ID NO: 48634 - protein, 608 aa, Oryza sativa
MATGQIFSKTTQALFYNYKQLPIQRMLDFDFLCGRETPSVAGIINPGSDGFQKLFFGQEEIAIPVHPTIEAACNAHPTADVFINFASFRSAAASSMSALKQPTIRVVAIIAEGVPESDTKQLISYARANNKVIIGPATVGGIQAGAFKIGDTAGTIDNIIQCKLYRPGSVGFVSKSGGMSNEMYNTIARVTDGIYEGIAIGGDVFPGSTLSDHILRFNNIPQVKMMVVLGELGGKDEYSLVEALKQGKVQKPVVAWVSGTCARLFKSEVQFGHAGAKSGGELESAQAKNQALKDAGAVVPTSYEALETAIKETFEKLVEDGKISPVTEITPPPIPEDLKTAIKSGKVRAPTHIISTISDDRGEEPCYAGVPMSTIIEQGYGVGDVISLLWFKRSLPRYCTQFIEMCIMLCADHGPCVSGAHNSIVTARAGKDLVSSLVSGLLTIGPRFGGAIDDAARYFKDAYDGNLTPYEFVEGMKKKGIRVPGIGHRIKSRDNRDKRVQLLQKYAHTHFPSVKYMEYAVQVETYTLSKANNLVLNVDGAIGSLFLDLLSGSGMFSKQEIDEIVEIGYLNGLFVLARSIGLIGHTFDQKRLKQPLYRHPWEDVLYTK

SEQ ID NO: 48635 - protein, 908 aa, Oryza sativa
MKLSPSAGGVSDQPPSPPEVAEEQKCLNSELWHACAGPLVSLPAVGSRVVYFPQGHSEQVAASTNKEMESQIPNYPNLPPQLICQLHNVTMHADAETDEVYAQMTLQPLSPQELKDPFLPAELGTASKQPTNYFCKTLTASDTSTHGGFSVPRRAAEKVFPPLDFTQQPPAQELMAKDLHGNEWKFRHIFRGQPKRHLLTTGWSVFVSAKRLVAGDSVLFIWNDSNQLLLGIRRANRPQTVMPSSVLSSDSMHIGLLAAAAHAASTNSRFTIFYNPRASPSEFVIPLAKYVKAVYHTRISVGMRFRMLFETEESSVRRYMGTITGISDLDPVRWMNSHWRSVKVGWDESTAGERQPRVSLWEIEPLTTFPMYPSPFPLRLKRPWPTGLPSLYGGKEDDLASSLMWLRDSQNTGFQSLNFGGLGMSPWMQPRLDSSLLGLQPDMYQTIAAAAALQNTTKQVSPAMLQFQQPQNIVGRSSLLSSQILQQAQPQFQQMYHQNINGNSIQGHSQPEYLQQPLQHCQSFNEQKPQLQPQQQQQESHQQQPQHQQMQQQKHLSNFQTVPNALSVFSQLSSTPQSTPSTLQTVSPFSQQHNFPDTNISCLSPSNVSSMHDTLRSFPSEAASDLPGVPRITPVPVSDPWSSKRVAVESTITSRPHDISSQIENFDLTPSSIPQNSTLAPLPGRECLVDQDGSSDPQNHFLFGVNIDSQSLLMQDGIPSLHNENSSSTIPYSTSNFLSPSQDDYPLSQTLTTPGCLDESGYVPCSDNADQVKRPHATFVKVYKSGTVGRLLDITRFSSYHELRSEVGRLFGLEGQLEDPLRSGWQLVFVDREDDVLLVGDDPWQEFVNSVSCIKILSPQEVQQMGKPGIELFSTSARRLGNSCDNYMSRQESRSLSTGIASVGSVEF

SEQ ID NO: 48636 - protein, 86 aa, Oryza sativa
MAAALGGGSGSPQRGGARQELGDAGGIADLVQGARTYQAAPNLLRLACKMKSYLRRCLKISAIPVLTIGLWGKAPYQQPWMHFVIT

SEQ ID NO: 48637 - protein, 425 aa, Oryza sativa
MAVDPRQVVAGFLTLSMFVMLGNMIKHDHFTPVGAGQEELGLEATGIESNEIKIADTTEMTKVNKAGVDLPKETAEEIRPCWSKPRSNVQESKGFVTFSLTMGPEYHISQITDAVVIARYLGATLVLPEIRGNELGKRRKFEDMYDVDKFMTSLDGVVKVVHSLPNAVSSKKPAVVRVPNRVTEEFITGTIEPIFQRNNYLRLATIFSSVSLKQKESGNKDLDSTACLAMFSGLQLKPEFSAVAKHMLDKLKEISEKSDGMVIAIDLQTELLEKKICKTNGGARRRGCYYPQEVVHFLKKVGFSADTTIYLTETWWHKSLDTLKEAFPNTYTKDDIMPAANKGEFLKSGDSYLARALDLKICSESDVFVPAIPGLFYGHVAGKRIAAGLTNIIVPAPVSSSSALASEFVSTYVSKKSHLAYSCYC

SEQ ID NO: 48638 - protein, 602 aa, Oryza sativa
MSAAELCDALAAAGFDGDGPLDLDSLEWPFLQGDDARRLLAWVSSRLRPANVLSATDLALYEQLELEGKLLEGEDLDFAFDSISAFSETGENQEDTFLTEESLEHIRDSKLTLRAEVSDLERQLASLEWQLDMLTAQATTITQGKKSRVSAKTNPNIQISRLDEKLAKRSLEMNSLLGKLAATTQELSYYHSEADIGIYLSYSDFQSYIIQNLACIKELNRWFSKKFEKGPLQFVAKEDMSRGDYEGSHHLSVELKRINSIFARSKRQYIEAQAEYAKEEAILSTLRTQLASQQSLVHQDVNSLRRRNSEFAEELRDLSLQVKRCLSEIITSLCADLAQLEGANILQGDHNLKVLRQECYISQQKRFINYLVNQLAAHQFLKIACQIEGRAKMSSAYSLLKAAAMELQGYFSVVDGRLDRYHLIGQAASVMLEEGSIDDRDTFLHAVRDILSTHSGAQAMTPSYVSAYGLVEQISDLQNELEYLHHELENVLPRERKRCIDELCRMIQTLEQILSVPFTYVQPTLTPWPVAQSLEELEIINQQVSACVNEVTMARDKKAKMLQQPSRNVQQERRVFVDFFCHPGRLENQVREMSSHVRALQE

SEQ ID NO: 48639 - protein, 142 aa, Oryza sativa
MTEAWVRHKPGMASVKDMPVLQDGPPPGGFAPVRYARRIPTKGPSAIAIFLTTFGAFAWGMYQVGQGNKVRRALKEEKIAARTALVPVLQAEEDERFVKEWTKSLMWEEIIMKDVPGWKVGQSVYNSGKWMPPATGELRRED

SEQ ID NO: 48640 - protein, 550 aa, Oryza sativa
MSGPMQRSSQPQFISSVERNNQSNGPGTPLIDSIDVDQIVIPEKNSWKNLFSYIGPGFLVSIAYIDPGNFETDLQAGAQYKYELLWIILIASCAALIIQSLAARLGVVTGKHLAEHCRAEYPKATNFILWILAELAVVACDIPEVIGTAFALNMLFKIPVWCGVLITGLSTLMLLLLQQYGVRKLEFLIAILVSLIATCFLVELGYSKPNSSEVVRGLFVPELKGNGATGLAISLLGAMVMPHNLFLHSALVLSRKVPRSVHGIKEACRFYMIESAFALTIAFLINISIISVSGAVCGSDNLSPEDQMNCSDLDLNKASFLLKNVLGNWSSKLFAVALLASGQSSTITGTYAGQYVMQGFLDLRMTPWIRNLLTRSLAILPSLIVSIIGGSSAAGQLIIIASMILSFELPFALVPLLKFTSSRTKMGQHTNSKAISVITWGIGSFIVVINTYFLITSFVKLLLHNGLSTVSQVFSGIFGFLGMLIYMAAILYLVFRKNRKATLPLLEGDSTVRIVGRDTATEGEGSLGHLPREDISSMQLPQQRTASDLD

SEQ ID NO: 48641 - protein, 783 aa, Oryza sativa
MDAEAGVGGADQLPWRQHYRNLLLLAYQSFGVVYGDLSTSPLYVYKSTFSGRLRRYQDEQTVFGVLSLIFWTFTLIPLLKYVTIVLSADDNGEGGPFALYSLLCRHAKLSFLPNQQSADEELSTYYRNGFTSRHGSLPWLRRFMEKHKNARTVLLLIVLCGASMMIGDGILTPAISVLSSMSGLKVRATGLHDRSVVLLSCIVLVGLFALQHRGTQKVAFMFAPIVVIWLFCIGGIGLYNIIHWNPRIYQALSPYYIVKFFRTTGKDGWIALGGILLSMTGCEAMFADLGHFTSASVRLAFITIIYPCLILQYMGQAAFLSKDILDMPTGFYDSIPGPIFWPVFVVATLAAVVGSQAVISATFSIVKQCHSLGCFPRVKVVHTSRWIYGQIYIPEINWILMVLCVAVTVAFRDITLIGNAYGVACMTVMFVTTFLMALIMIFVWQKNIIFALSFFLLFGSVEVVYLSSSLMKVTQGGWVPLVLALIFMSVMYIWHYGTRKKYQYDLQNKVSMRYILSLGPSLDVVRVPGIGLIYTELVTGVPNIFTHFTTNLPAFHEVLVFLCVKSVPVPYVSPDERYLVGRIGPRAYRMYRCIVRYGYKDVQRDDDNFENMLVMNIGKFIMMEAEDASSSASYDTANEGRMAVITTSDDYDSPLAVRDSNDLADSMTMRSTKSESLRSLQSSYEQESPNVSRRRRVRFELPEEDDMDQQVKDELLALVEAKHTGVTYVMGHVYIKARKNSSFFKRFAIDVGYSFLRKNCRGPSVTLHIPHISLIEVGMAYQV

SEQ ID NO: 48642 - protein, 429 aa, Oryza sativa
MPQESRGSSGKAPVTVTVTAAGASSSGECSTPPFRLNVHAPEFVPRSPAASPMAAAAAGYYSPFLQLPGSSIGLGADWSIFADPDPTFFLPDFGHAKIGGGNGQPKGASPADIAQKIIKQVEYQFSDTNLVANDFLMKIMNKDPECYVPMSVISSWKKIKAMGVTNQLLVNALRTSSKLVVSDDGKKVRRAQPFTERHKEELQSRMVIAENLPEDSTRNSLEKIFGIIGSVKNIRICHPQEPSSARSSKSDALISNKLHALIEYETSQQADRAVDKLNDERNWRKGLRVRPVLRRSPKSAMRLKRPDFDHLMISDDDHSPQSQASSDSPMADHLPDHHQEDQHGKKSWGRGRGSRPHAAAGGAPQAAAAAAGHLDSLMMMSPRHAPQGPRMPDGTRGFTMGRGRPSPAAVLRSSPARAVAAPAPAAVMI

SEQ ID NO: 48643 - protein, 49 aa, Oryza sativa
MAGTANCIDILIAIILPPLGVFLKFGCGVIMEYLIKLLSVTLVSSMPFA

SEQ ID NO: 48644 - protein, 304 aa, Oryza sativa
MAAGRGINQLLRRTLHNQSSGSSLLSSFRIKHEESSAGLRALALLGVGASGLLSFATIASADEAEHGLAAAEYPWPHAGILSSYDHASIRRGHQVYTQVCASCHSMSLISYRDLVGVAYTEEETKAMAAEIEVVDGPNDEGEMFTRPGKLSDRFPQPYPNEQAARFANGGAYPPDLSLITKARHNGQNYVFALLTGYRDPPAGVQIREGLHYNPYFPGGAIAMPKMLIDGAVEYEDGTPATEAQMGKDVVSFLSWAAEPEMEERKLMGVKWIFLLSLALLQAAYYRRMRWSVLKSRKLVLDVVN

SEQ ID NO: 48645 - protein, 265 aa, Oryza sativa
MVEELKESVKEEQAEKKEEAAKEKPDEPQEIVLKVDMHCEGCAKKVEKSLLRFEGVENVKADSRSKTVVVKSRAADPSKVCERVQRKTKKRVELIFPLPPPPEEEKKEEAPAPPPEEKKEEPPKTITVILKVQMHCDACAQILQKRISRTEGVESVETDLLNGLVVVKGVMDPAVLIESIQRKTRRPAVIVEEVKPREEEKKAEGEEKKPDEDKADGIEEIKKYDFWPPVQYYVEYVYPYPLPPPPTALVSEEFSDENPNACTVA

SEQ ID NO: 48646 - protein, 376 aa, Oryza sativa
MTLLAAITNPSAAAAAAAVAANPIVLTPGAAPPPPTSSALPTQIPPSDWSLSPADPALATAASFLSTSLSSTSVSLPRFRSLLASFLTTLSNSLSLPAPSPNLPQAIRSVSPYFPAALASPVASRAASLAEYDVLLALAECGLLRHPPPSLLSSLSEADRPELVCAVVRQAADLRSSELLATLRCFLSPASDAAYDAMMSVKNRWKEAAVLAVNRCKEKGAGKKVDAMARQAALLLMMGYDGFTSPEVCLHYLFASENVDSVVFGAAVSELDGGEVVRLMKYLTKWIGKYQRFPEAQACPEAVGMPGLELCDIVPSFRVVAGALGLVFDQHFSHLALNAELKEDLKAAEMMVKQLATEAESAGPILDLLRRMQQDV

SEQ ID NO: 48647 - protein, 266 aa, Oryza sativa
MGILVILVDLQCCRCDAKIRKVLGCLEEEYCIEKVEYDVKNNRVIVRGKFDPEKLCKKIWCKAGKIIKEILIVDVWPPPLPQPPPPCKPPPCEKPPEDCKPKPCHCCSCEKPKPKPKPCHCEKPKPCHCEKPKPCEKPPPCKPEEPPKPPPEKPPPKPECKLVPYPYPVPYPYAGQWCCPKPEPPKPPPEPPKEPEPPKPCGCSHAFVCVCKPAPPPPPPCGCSGGHGNCGCGIRPWPPQVWPPPPVCPPPPWCYTEDNANACSIM

SEQ ID NO: 48648 - protein, 170 aa, Oryza sativa
MVDLAEEPVTESHFQPCRESHPRMLWRYLVESGGRLLQVIRLFGYPFPLSHDDVLEDPRTLSFVVYEADLSNGSRMWRRVESLGGQALFVGTHGSKSVPAVECGAQEDCIYFISDYNRPYSANPLGDSGIYNMRNEMITPLVRLVSGNRHSGVYYQWRHPRWFFPADGAI

SEQ ID NO: 48649 - protein, 269 aa, Oryza sativa
MTWTVKPTYLNSPQMVPFSLGSHIRIYNAEKKWTIHKDITCKKLRWTVSDIALSPDQRYLAYSSLSPIVHMVDIQNGMRESHANITQVHEGLEFSNDDDGFSFAIFSVEFSKDGRELVVGNNNESICIYDIGSNKVTERIHAHSADVNAVTFADEGSDVLYSGSDDSLCKVWDRRCNKRGKQVGVLTGHLDGITFIDSRGDGHYFISNCKDQTIKLWDIRKMSSTVKDCTPKAYEWDYRWMTYPSEARYFKHPYDSPCQHLEGIQCYVH

SEQ ID NO: 48650 - protein, 1089 aa, Oryza sativa
MPAKYLQMLGEERRPELHRQQAGCVTGILQAFDRRYPLAAHHSHNRLLPPAHALSSSPSVGEERTRYSSQIVLDKNMSKSWIDNQRAPLTVELSQGSYSSSSCSSSSSLDGNRSGQQDLSSTDRMLFPEKPFKSSPKLKSSSDSDCGVDYYLDDALAKLSAQPSYPTLGIRNLVKDSIYRDTRDFSIRTFTKEAEKDHLFNCGDPPRILNEPPNSAIQEKNKGTMDIDESLRVLAKLRNPSESVQQPRLSYDAPRFSCEGRESASKLREVPRLSLDIKESPLRNREIDVRPKPSMTDEDRRSSISKDYSPPLETQQEHNACKRLPSVVAKLMGLEDLPEHKDNTAISSQVSKSVTERSEEPTMLRPLSLSSQNEATPRQQRNLDATIKNVPNSKFPVETAPWKQQEKIVLPRKLPKGSKGAHGKEQHAASVYSEIEKRLKDLDFQQSNKDLRALKQILDSMQAKGLLQNKKREDPSMPKIYDGDHDNGDVTDVNLRLNSTSNTKQAPEGTPSFTTEEDSTTERSFKSPIVIMKPAKSADLLSDVTEDSAVGPLGGLSELPQLRTANSADKRKSSKKVTREAVEQHTKSSSRAPTPQHLASFDKRANGRNEEISRKQKSTSQLMTENSARRQQMQRENNGSLLKHKNSTSPRVQQKKPDSERRARPPIPSPDSSKNQRQSVERSHLDSVSPRSKFRRKPAQAQGEDFHQNGVSRRTRSLNQEGNDMSARSDGSISVASELDVEVTSTDRSAEVNILRSQHGTQTPSGRNPQKVKTSYDANKDLPSMDPAATITERPSPVSVLDSSFDQEEFFHTSKTTNSSNVDDEHHPSPSEESCKPSEKKSTELPTQPKNSNLANIASLLKKLQQLSVNKDEAPPVDHIAFLCETPSPDHRYVSEILLASGLLMKDLGSGLSQMQLHTSGYPINPDLFFVLEQRKSGWTSKPEGIHQSRSTTKPDDPKRAHRKLMFEAVNELLLDKFEKETTLITGVAARDPVMSSGQQLVKMICSGIECLKTERSRMCQEDSSVIPDAEILNRLEGWSPSFIRRELPGMVLEIERSIFKELVDEVVRGESADGQPAKAGRRRRRLFA

SEQ ID NO: 48651 - protein, 300 aa, Oryza sativa; identical to SEQ ID NO: 32466

SEQ ID NO: 48652 - protein, 67 aa, Oryza sativa
MMFMNGEVGKVGSDRRQLNYGGLNALPVNHCLLLYYTAFRGVVRETEVAVQMTMTPFYLLSVLRKCT

SEQ ID NO: 48653 - protein, 145 aa, Oryza sativa
MAARGLAALSSPARVGASATPCSGRPVRVSATPAAGGWRRRRRSMVVRAGGPPSTNALILAFVLPLSLFVGTLITAARVADDLDERFLREMESNKAIMEENEDFEQDGGGEEEEEDAEQPAPVEKEGVLVAAAPRTRNRPKREVQ

SEQ ID NO: 48654 - protein, 292 aa, Oryza sativa; identical to SEQ ID NO: 30293

SEQ ID NO: 48655 - protein, 156 aa, Oryza sativa; identical to SEQ ID NO: 30629

SEQ ID NO: 48656 - protein, 137 aa, Oryza sativa
MQSEHLIAYLAKSLNSMHQKLSKREFLALIMVVYCWRPYLQKVEFVIRTCSHVIYKTISFCMTCPQNAMTKPNELQFMIQCKKVKRKECRSMPWLVLPHHLQSKLSQNANRVCLQEVISSEQLSFVFFRKMLKLVHK

SEQ ID NO: 48657 - protein, 228 aa, Oryza sativa
MNYNTSEPTIMGCQLNGLLATRGNRASGRTPLDWETRSAIALAAARGVAHIHSTGPTASHGNIKSSNVLLTKNYEARVSDHGLPTLVGPSFSPTRVSGYRAPEVTDIRRVSQKADVYSFGVLLLELLTGKAPTHAVVNEEGLDLPRWVQSVVREEWTAEVFDQELLRYQNVEEEMVQLLQLAIDCSAQHPDRRPSMSEVAARIDEIRRSSLGDRPATDSAGEGEEPSL

SEQ ID NO: 48658 - protein, 178 aa, Oryza sativa
MRDSTATAARAKFFSIRLRSRAPRSSSSRVLLLCWSRGLPHTTSSPVAVGAEVVPFRLRHYRTAPLPPPPPPWRRVLLQLPLEPCSTLLLACIAAAAGALVFPSPSPEPRPPPPSSPALEAEVFPSGDATAVHRCAQRSRGCSVVAQRRSDEQTRQPGDEERAAGGEGEELADQAIPP

SEQ ID NO: 48659 - protein, 96 aa, Oryza sativa
MTVVGPDLRHGQKPQYTVPPNVWFGAFLTCDIESFTEDGSVFVKTPGRDSELHYSFVGVTCAPAFQIEDDEMATRESMKALAPKAEAFINYLVPSD

SEQ ID NO: 48660 - protein, 64 aa, Oryza sativa
MGSVVARSGRPELGGSRIRPPQARVRRTCAGSSCDGGPPTASWWVFELARRGSHNCTCMMRRSN

SEQ ID NO: 48661 - protein, 131 aa, Oryza sativa
MSWQTYVDEHLMCEIEGHHLTSAAIVGHDGTVWAQSAAFPQFKPEEMTNIMKDFDEPGFLAPTGLFLGPTKYMVIRGEPGAVIRGKKGSGGITVKKTGQALVVGIYDEPMTPGQCNMVVERLGDYLVEQGL

SEQ ID NO: 48662 - protein, 227 aa, Oryza sativa
MTVFHFLNCAALTFGPHVVYYSATPLSEYDTIGTCVKAAVVYLGTALVKLVCLATLLKVPENDSFDPYQELMKIFIGFIDVAGLYFALTQLTHRNISQNHKFQAVGLGWAFADSVLHRLAPLWIGARGLEFTWEYIFQGLEANANLVMTLSLAALGSLMWLRKNKPRTLVPIIYACALLLATMPSITSYLRRSLEWQTPKVVGFELFSSLVMAFISWQLFSACRRPM

SEQ ID NO: 48663 - protein, 489 aa, Oryza sativa
MSTNEISGSNELCAQDPEVMTFYNLRGSDKTTILRKKELQRLRKERIENKCFRKKEKIRKAKEIVDNALKIREELHQKYLRAEPWLKEQERQRLERNKRFTTEIINQPPDYRGEWDPYVSDDEFGTSFELKRTGWEVEKFALDLARSTVGLESFTGENHLFSCSGTIIEFLNGICSVVTSASLIRCMDKDEQADELKINVWLPSGEKCEGFISNVDLYYNICLVTVHCTSNLPKKSFNDDTGFFDLYGNHSKDVVALGRSCEPWSLKVASGKLIPRRHRFDCEELLVSSCKITKIGVGGPLMDFNGNIVGMNFYDKKETPFLPSFIVLKCLQHFKEFGKVVRPLHGLRVGNLHKESLASLEKICHEFPKVCGVIVEKVEPSAEHSEIKVGDIITHLDGMAFSNAAEFGGILLDRCVTQMLEKQNLSEDCNQMISLKFSVKTRGGISEATTRTINTDKFTPSGLNRWPLPRPIIVRQYARGVLFSEDWYS

SEQ ID NO: 48664 - protein, 378 aa, Oryza sativa
MATAVASQVAVSAPAGSDRGLRSSGIQGSNNISFSNKSWVGTTLAWESKATRPRHANKVLCMSVQQASESKVAVKPLDLESANEPPLNTYKPKEPYTATIVSVERIVGPKAPGETCHIVIDHGGNVPYWEGQSYGIIPPGENPKKPGAPHNVRLYSIASTRYGDSFDGRTTSLCVRRAVYYDPETGKEDPSKNGVGSNFLCNSKPGDKVKVTGPSGKIMLLPEEDPNATHIMIATGTGVAPFRGYLRRMFMEDVPKYRFGGLAWLFLGVANTDSLLYDEEFTSYLKQYPDNFRYDKALSREQKNKNAGKMYVQDKIEEYSDEIFKLLDGGAHIYFCGLKGMMPGIQDTLKKVAEQRGESWEQKLSQLKKNKQWHVEVY

SEQ ID NO: 48665 - protein, 319 aa, Oryza sativa
MVLHSPIPTAVGFGELGVDRLSSSGAAAEAADCESARPPSLLARILHCEFQAICCSRCSLDARRLFDGMPPGEAPPPTGVDRIGGLPDGVLQHILGFLPPHEAVRTCVLARRWRHLWKSVAALRITNWDWRKVVPMEEFRYFVHHLLLRRGRAPIDEFELDLAELSDRDTLRVNRWFRHAVMCQARVLRLDIRVSRGSELELENLPVVSRHLQKLDLYGVKLMHNFLDFSSCPVLQHLEIAGCDLSDSNARKISSLSVKHLNISGCNFSDTFHTHIYAPNLLSLGLVNYMNQSPVFEGIPSGSFITGQEVGVVSSGTRF

SEQ ID NO: 48666 - protein, 851 aa, Oryza sativa
MGSVGLNDTVSGVVSRKVLPACGGLCYFCPGLRARSRQPVKRYKKIIADIFPATQDEEPNERRIGKLCEYVARNHHRVPKITAYLEQRCYKELRNEQYGFVKVVVLIYRKLLVSCKKQMPLLASSALSIICTLLDQTRRDDMRIIGCETLFDFTVSQVDGTYQFNLEELVPKLCELAQIVKAEEKDNMLRASTLQALSAMIWFMGEFSHISSAFDNVIQVVLESYNLQKMQNDNIDSEAPGNRWVEQVLKAEGNATISRIPSWKSIVDDKGELHLPAEDAKDPNFWSRVCVHNMAKLSREATTFRRVLESLFRHFDNNNSWSSQNTLAFCVLLDMQILMENQGQNIDLMISILVKHLEHKSVLKQPEMQLSVVEVIASLAEQSRAEASAATIGAISDLIRHMKKTLHVALGSRDLEVIKWNDKLRDAVDECILQLSKKVGDAGPVLDMMSVMLENISRTPLVAIATTSAVYRTAQIITSIPNLSYRNKVFPEALFHQLLLAMVHPDHETRVSAHRIFSVVLVPSSVSPFSKSTSPNQLVKHDIKRTLSRAVSVFSSSAALFDKLKRDKESFREKPQDGSMNRLSHAADNDTSTVKDMPSSRSRRHSFKVPNFSMKRVASLSLKSPMSPKECQNTSAESCSETESTLLRLSSRQATLLLSSIWAQAISPKNTPQNYEAIAHTYSLLLLFSGSKASIFEALAPSFQVAFSLMSYSLEGTDSLLPSRRRSLFTLATSMIMFFSRAFNVAPLIPICKSMLNERTMDPFLHLVQDTKLQAVKDCSEETYGSPEDDNNALKSLSAVELTQSQSRESMASTIMNNIRDLPDSELQTIRSQLLSDFSPDDMCPTSALFF

SEQ ID NO: 48667 - protein, 686 aa, Oryza sativa
MADAVQYRLERMSDELDDLERRGLFTRAELAEVVRRRRDFEFRLRRRSPLRSDFLDYIAYELRLDALRDLRKRAIIRATPDTTDHDADATDNDSSKKKKKKRNKGKAKKWKKSVSDIAGVLRVLDIYRMATVRYKGDLDLWFRYLEFCRDKRHGRMKQALAQAIRYHPKVPGLWIYAAAWEFDQNLNVAAARALMQTGLRSCPESEDMWIEYLRMELTYLNKLKARKVALGEDVKTLQKKNNDASTWKEENKELFMSLNEQDEGPKESGSQGVALEGKEDLFWQQGLLIIQTIYHGATKALPSSLTLRKKFLEILSSVDLAHSDELKVEVMDDLKKEFSDSEDYWDWLARLQLSDSTSSSNLNRMEALSNKLNKSIQVYDEAVRRLPTSRMYSLYAKFWMGVLFADTEDSISLFHGGEFDASGFTSCILKVYQNAESSGCLTEDLACQYVSLYLRLGGLEEAPGRLEEARNLAKKLCNGPLSHAADLWNLRASIEMKSLATSTGISSFSKENLSSLFDLFNVALPKLPIPEAEELWHTAMKLFSHEKVYFEKLVKCAMLSLSSAGGNDCGASVSSAIVGWILQRDGIKQARKMYKRFLALPRPSFKFFQYCIELETNLASIGNQDSLVNARKLYDAALDLYPQERELWRNYYNMELKLGTSETANAIYWRARKVLGDSSALDIPHS

SEQ ID NO: 48668 - protein, 269 aa, Oryza sativa
MANICANMKRCFSPPALRAYFAEFFSTFLFVFIAVGSTISARMLTPDETSDASSLMATAVAQAFGLFAAVFIAADVSGGHVNPAVTFAYAIGGHITVPSAIFYWASQMLGSTFACLVLHYISAGQAVPTTRIAVEMTGFGAGILEGVLTFMVVYTVHVAGDPRGGGFGGRKGPAATALGALVVGAVTGACVLAAGSLTGASMNPARSFGPAVVSGHYSNQAVYWAGPMVGAAVAALVHQALVFPTVPEPAPAPATNESARHGSVQTVVV

SEQ ID NO: 48669 - protein, 598 aa, Oryza sativa
MASAFGSTSACGIKITPTAFATKKHLCLVPPPVVSLPRKNRPQRKCNFRVNAAKELYFNKDGLAIKKLQNGVNKLADLVGVTLGPKGRNVVLESKYGSPKIVNDGVTVAKEVELEDPVENIGAKLVRQAAAKTNDLAGDGTTTSVVLAQGMITEGVKVVAAGANPVQITRGIEKTTKALVSELQKMSKEVEDSELADVAAVSAGNNYEIGNMIAEAMNKVGRQGVVTLEEGKSAENNLYVVEGMQFDRGYISPYFVTDSEKMSVEYENCKLLLVDKKINNARDLITILEDAIRGGYPILIVTEDIEQEALATLVVNRLRGALKIAAIKAPGFGERKSQYLDDIATLTGGTVIREEVGLSLDKADRDVLGTAAKVVVTKDSTTIVGDGTTQDEVNKRVTQIKNQIEVAEQEYEKEKLNERIAKLSGGVAVNQVGAQTETELKEKKLRVEDALNATKAAVEEGIVVGGGCTLLRLASKVDAIIETLENDEQKVGAEIVRKSLSYPLKLIAKNAGVNGSVVTEKVLANDNFRYGYNAATGKYEDLMAAGIIDPTKVVRCCLEHAASVAKTFITSDAVVVDIKEPEKAAAAGNPMGGSGFGF

SEQ ID NO: 48670 - protein, 347 aa, Oryza sativa
MDITGAGAMGGGSTAATAAAAAGAGWKTPVSMVLVQLFITGQILLSKVSIGGGMLIFVLLAYNSFFAVVFLLPFALIFERGKWRDMDWGAFGWIFLNAFIGYSVPMSLYYYGLKDTTSSYSVIFLNITPLFTFILSLMFRLEAFKLRSIPGVLKIASILLSIGGTMLISLYKGKSLHLWDSIIQHQNEHKSATNQLRGTILLVGSSFTFACWFLIQSKILKVYPYKYWSSMVTCLVGVFQTALVGIILRRDKSAWELGWNLNLVTIVYTGALATAGKYILNSWAITKRGPTYPTMFSPLSVVFTVVLDSVLLGNDITIGSLLGTALVIVGLYLFLWAKAREIPKKST

SEQ ID NO: 48671 - protein, 182 aa, Oryza sativa; identical to SEQ ID NO: 33396

SEQ ID NO: 48672 - protein, 514 aa, Oryza sativa
MKKWHGGFVIVSLFIILMLRYVILDSPLAEKSLQYVFQQNNTTPLHWLDVPNPPAVQNPQNISQVISTELLASNLSITRNFSDRELQSLHSWNHLKDLVSHAHILPDGVEAIKEAGVAWRELNAALEYDESAVSVNGSTHQKSKEKQCPYSIRRMNATRSGDRFVLKIPCGLIQGSSITIIGTPGGLLGSFKIELTGATVPGEPDPPIVLHYNVRLLGDKLTEDPVIVQNTWTIADDWGSEDRCPSPGSDAKDIAKVDELEKCGSMVGNDQKQAWATKLKSNVSSIQPAWKKNTEPKKYFPFRQGYLAIAILRVGAHGIHMTVDGKHVTSFAFREDLEPGFVGEVRIAGDIKLLSVIASGLPTTEDFEHVTDLEILKAPPVPMDKPLDLFIGIFSTANNFKRRMAVRRTWMQYDAVRSGKAAVRFFVGLHKNEVVNEELWNEARTYGDIQLMPFVDYYSLILWKTIAICIYGTNVLSAKYVMKTDDDAFVRVDEILLSLDREHQSWVTVRSCQF

SEQ ID NO: 48673 - protein, 825 aa, Oryza sativa
MMLSSSASRREVGGGGAASSTKSGELSLSKVASVAIRESSGSGSGGISKSSELLSRAGTMAAAREAAAAAVHHEGWMVRYGRRKIGRSFFHTRYFVLDSRLLAYYKKKPKDNMVPLKSLLIDGNCRVEDRGLKTHHGQMVYVLCVYNKKEKEHQITMGAYDIEDALAWKKNIELIIGQQENMTSKNRKAFASMDFDTELGGQFIFSDHDSAAKDEEERPMLIRRTTIGNGPPESIHDWTKEHDIGPPNQIDPIQVSSKKNWRLLRCQNGLRIFEELLEFDYLARSCSRAMRAVGVVEATCEAIFGLVMSMDVTRYEWDCSFRYGSLVEEVDGHTAILYHKLQLHWCPMLVWPRDLCYVRYWRRNDDGSYVVLFRSTEHPNCGRQKGYVRALFESGGFKISPLKCRNGRPRTQVQHLMQIDLRGWLLNYSPSFQYHSLLQIQNCVAGLREYFSQTDETHITPRIPVMENMVDTSAVQKDDKKSTEEVDSKTKTPDRGQADSKNMGIIDEETDEDEDYQVPEANIEEDPNKDAKRADEPPEKIDLSCFSGILRCDADEKSRNCWTVPDSKLFKVRSKNFPHDKSKIPAASYLMELAAIDWFKDSKRMDNVGRQKGCVAQVAAEKGMHTFVANIQIPGSTHYSLVMYFVTKSLKKGSLLQRFFDGDDEFRNSRLKLIPSVPKGSWIVRQSVGSTPCLLGKAVDCSYVRGAGYLEVDVDIGSSAVANGVLGLVFGVVTTLVVDMAFLIQANTYEELPSRSSAPPVSLTSNPPPLSSPRTLLPLLLPLPTTTTPLLLPPRMIIFPRKPTKLAPLSTHALQLINHLSSCNF

SEQ ID NO: 48674 - protein, 738 aa, Oryza sativa
MGTSVQVTPLSGAYGEGPLCYLLAVDGFRFLLDCGWTDLCDPSHLQPLAKVAPTIDAVLLSHADTMHLGALPYAMKHLGLSAPVYATEPVFRLGILTLYDYFISRRQVSDFDLFTLDDIDAAFQNVVRLKYSQNHLLNDKGEGIVIAPHVAGHDLGGTVWKITKDGEDVVYAVDFNHRKERHLNGTALGSFVRPAVLITDAYNALNNHVYKRQQDQDFIDALVKVLTGGGSVLLPIDTAGRVLGILLILEQYWAQRHLIYPIYFLTNVSTSTVDYVKSFLEWMNDSISKSFEHTRDNAFLLKCVTQIINKDELEKLGDAPKVVLASMASLEVGFSHDIFVDMANEAKNLVLFTEKGQFGTLARMLQVDPPPKAVKVTMSKRIPLVGDELKAYEEEQERIKKEEALKASLNKEEEKKASLGSNAKASDPMVIDASTSRKPSNAGSKFGGNVDILIDGYVPPSSSVAPMFPFFENTSEWDDFGEVINPEDYLMKQEEMDNTLMPGAGDGMDSMLDEGSARLLLDSTPSKVISNEMTVQVKCSLAYMDFEGRSDGRSVKSVIAHVAPLKLVLVHGSAEATEHLKMHCSKNSDLHVYAPQIEETIDVTSDLCAYKVQLSEKLMSNVISKKLGEHEIAWVDAEVGKTDDKLTLLPPSSTPAAHKSVLVGDLKLADFKQFLANKGLQVEFAGGALRCGEYITLRKIGDAGQKGSTGSQQIVIEGPLCEDYYKIRELLYSQFYLL

SEQ ID NO: 48675 - protein, 381 aa, Oryza sativa
MECAFETDHVSFEDAEWWTAEDMIKRWILATKLVAKALAVMQRQLQAQSCGAFDRFKNDYFMAIAKNSIFVLLRFANGFTTTEAPDKLVYVLEMYEALSSATPGLLLLFTEQRVELVSRQVEVVLAKLARALRAMIGGLIARIRKADCPQTTGSAARGVGVHPLTRYAMTCVELLSPHRAALDLILANGAGESVTSLGSLVAVLVTSLERHLEEINPKLSNDDDDAAAAAAASRHLFLATNASYVARRAVDAGVEPLLGDGWAARRGSLIARYVASYVEACWAPVAACLETAGRKPVKVAAKFSSAFDEAYESQVHREIPDPALRDALRKAASEMVVPAYSAYLQNHPKLQKNVRHTAGELDRLLWELFEGEAAERNKLLL

SEQ ID NO: 48676 - protein, 108 aa, Oryza sativa
MARGPRPGAKHACLARPKHGPAQLESCSCRPGPTAGPCLGRAIGTLGQHGTARNRPARWAGTARHAITAGTARPRHAHRSPASRPITSLAYISRPRRSAPSPPPLLKP

SEQ ID NO: 48677 - protein, 80 aa, Oryza sativa
MLKFYKSKFILTVFILYLCAAIIGLAPLPFDINYISIACSPLCEQEKYRPYYPQAAVMCQLAASTLCKHTKNTALQRVQS

SEQ ID NO: 48678 - protein, 36 aa, Oryza sativa
MVKASRTNQLLTWIFSLKGFMNISVQKGYDALLPNG

SEQ ID NO: 48679 - protein, 76 aa, Oryza sativa
MVVNNFTGPGIGLGFGIGCGFGVGWGFGGMPLNMFGLGIGTNSCTLLYYCTSPTVSQVSIKVLPSFKVGDVELVLG

SEQ ID NO: 48680 - protein, 284 aa, Oryza sativa
MAAAAPMPVAGAGWWDLVNGSTAWQDGIFLSLAALYGLVAASSFIQVVRIQYRVPEYGWTTQKVFQLLNFIVNGARRSIFAVRRQVQQVNPEIFQHVILDLPGLAFFTTYAMLALFWAEISYQARGLETEGLRSGFYTINGVIYVIQVLLWALLWHNPNPSMIVLSKLFIAGLSFSAALGFLLYGGRLFFMLKRFPIESKGRQKKLREVGRVATICFLCFLARCIMMCFDAFDKKADLDVLDHPILNFIYYLIVEILPSSLVLFILRRIPSKLRLAQYHPLNSG

SEQ ID NO: 48681 - protein, 520 aa, Oryza sativa
MPGAVIVHHHTRYKTYPGEVTGFVFFCCLIASVGGCIFGYDIGLTAGLTSTESFLAMFFPVIFEQQQERVITNQYCKFDSQVLTLFGSSLFLSAMVAGIFASPMSRAFGRKWTLFVAAVAYLIGAILGAISFNFIVLLTGRLLLGVGVGVCIHASPLYISEMAPAQQRGMLNILFQLMITVGILSASLTTYWTSKIAGGWGWRVGLAFGTVPAAVIALGSLAIPDTPVSLIARGEGEAARATLAKIRGVDDVRAEFEDLTTASEESKAVAHPWRELFFGGRYKPQLAFAVLIPFFQQLTGINVIMFYAPVLFKTVGFRQDASLVSSVITGLVNVFSTFVAVMTADKVGRRALFLQGGTQMIISQILVGTFIGLQFGVSGTGAMSEQYAMCIVLFVCVYVAGFAWSWGPMGWLIPSEVYPLAVRSAAQSVTVAVNMFFTAFISQIFLTLLCHLRFGLFYFFGAWVLLMTVFIATLLPETKCVPLEEVAHVWRKHWFWRKFIVDSPDRGGAEMRKRIALEMS

SEQ ID NO: 48682 - protein, 331 aa, Oryza sativa
MDNLGHRENGRQRPDQYKGLHTQWMMPQTQRHLKDHQSMNLLALMNDRDNAIRERDHALAEKKAAIAERDMAFTQRDAAMAERNAAVVERDNALAALELARTNGLNMNNGNGFPQGSLSGSKNIHHHDQLSHAQSSPLQLADSPYDHAREMHISEAYPISTAPGSAGKAKRPKKNSSQASPLKRPSGVLRKTKKPSGDWKNVGMSGCGDDSAHASVMKNEWKDQNLGLNQVAFDDSTMPAPACSCTGKLRQCYKWGNGGWQSSCCTMNISMYPLPVMPNKRHARMGGRKMSGGAFTKLLSRLAAEGHDLSTPVDLKDHWAKHGTNRYITIR

SEQ ID NO: 48683 - protein, 711 aa, Oryza sativa
MEESFVPLRGIKNDLHGRLQCYKQDWTGGFRAGIRILAPTTYIFFASAIPVISFGEQLERNTDGVLTAVQTLASTALCGIIHSFLGGQPLLILGVAEPTVLMYTFMFNFAKDRPDLGRRLFLAWTGWVCVWTAILLFLLAILGACSIINRFTRIAGELFGLLIAMLFMQQAIKGLVDEFRIPERENRKALEFVSSWRFANGMFAIVLSFGLLLTALRSRKARSWRYGTGWLRGFIADYGVPLMVLVWTGVSYIPYGSVPKGIPRRLFSPNPWSPGAYDNWTVIRDMPNVPLLYIIGAFIPATMIAVLYYFDHSVASQLAQQKEFNLRKPPSFHYDLLLLGFLTLLCGLIGIPPANGVIPQSPMHTKSLATLKHQLLRNRLVATARQSMSQNASLSQLYGSMQEAYQQMQTPLIYQQPSVKGLNELKDSTVQMASSMGNIDAPVDETVFDIEKEIDDLLPIEVKEQRLSNLLQATMVGGCVAAMPLLKKIPTSVLWGYFAFMAIESLPGNQFWERILLLFTAPSRRYKVLEEYHTTFVETVPFKTIAMFTLFQTMYLLVCFGITWIPIAGVLFPLMIMLLVPVRQYILPKLFKGAHLTDLDAAEYEESPAIPFIAAQDIDVALARTQSAEILDDIVTRSRGEIKRLNSPKITSSGGTPVAELKGIRSPCISERAYSPCITELRHDRSPLGGRGSPRTGETRSSKLGEGSTPK

SEQ ID NO: 48684 - protein, 679 aa, Oryza sativa
MESVGDPRDGPSTERAFEGQPVPPWTEQVTLRAVVASVALGVALSSVMMNLVFTSGIIPSLNISAGLLGFFLLKAWTRLLDQLGSPGRPFTRQENAVVQTCVVACASMTYSGGFGSYLLAMDRKTAEKTSTGDDSSASVSEPEFGRMMAFFFLVSFVGLLAIVPMRKTMIIRHRLTFPSGSATAHLINSFHTPHGARQAKRQVSLVLRSSLASLFWSIFQWFYTGGPNCGFTSFPTFGLSAFNRGFYISLNGTYVGIGMISPHLINVSMLFGSIISWGIMRPYIRSKRGIWYDADLQETNLKSFSGYKVFCAIAMILGDGIFQLVAISLRTIHTVRHHQVAAETLRSFSDVDAMPRPVMSFDDRRRTQVFLREHIPSTFAISGYVVLATVSTVVIPLMYGQVRYYHVAAAYAFAPVLAFCNAYGTGVAETNFSAQYNKLVILMFASWIGIKNGGIVGSLVICGIVSSIVSTASDFMSDFKTSYLTLTSPRATLVSQVIGTAMGCVVNPAVFTVFHHFYEMNPNKTYQAPLAKIYRGIAVLGAGGLELPKYCLAISATFFVLALAVCAMREVAAHGKWRAEPYIPSVTGMAVSFLLVPAVSIDMCIGSLIVFLWNRNDKLGSQVFGPVLASGLICGDGLFSIPYALLARYDVTPPICIRFLGRVQNDKLDAFLASKAKAG

SEQ ID NO: 48685 - protein, 199 aa, Oryza sativa
MAAEKPAPVRVLYCGVCGLPAEYCEFGPDFERCKPWLRANAPGVYPDELLASSSSAAADVDKVGERLQGVGISAADGSTSAGDASASKQEEVKRLPGGKVKKKDKQEVVIEKIVRNKRKCVTVVKGLELFGVKLSDASKKLGKKFATGASVVKGPTEKEQIDVQGDISYDIVEFITDTWPDVPESAIFFIEDGRKVPAA

SEQ ID NO: 48686 - protein, 985 aa, Oryza sativa
MSRLFRESRRDSSSSNGSSAAAAATASTGGLPSPFPDLGVPLSAADLREAAYEVLVASSRTTGGKPLTYIPQAAASAGGGGGPASPASASSLSSANASSSPSLQRSLTSAAASKMKKALGLRSSASSKGGSPGSGGGGKSVPPRRPATVGELMRVQMRVSEPADARIRRGLLRIAASQLGRRAESMVLPLEFLQQFKASDIPDPQEYEAWQSRNLKLLEAGLLVHPLVPLNKSDVSAQRLRQIIRGAYDRPLETGKNSESMQVLRSAVMSLAGRSDDGTSDGCHWADGFPLNLHLYQMLVEACFDNDDGTVVDEIDEVMELLKKTWGILGINQMLHNLCFAWALFNHFVMSGQVDIELLSAAENQLAEVAKDAKTTKDPNYSKVLSSTLSSIMGWTEKRLLAYHETFNTSNIESMQGIVSIGVSAARVLVEDISHEYRRRRKEETDVARSRIETYIRSSLRTAFAQRMEEADSKRSSRNPTPVLSILAKDIGDLAIKEKNLYSPILKTWHPLASGVAVATLHSCFGNELKQFIAGLTELTPDTVQVLKAADKLEKDLVNIAVEDSVDSDDGGKSLIREMPPYEAENAIANLVKVWIKERIDRLKGWVDRTLKQETWNPAANRENIAPSCVEMLRMVGETLDAFFQLPIPMHPVLLPDLMFGLDRSLQLFVSKAKSGCGTRNSFMPQLPPLTRCEVGSNILFKKKEKPQNPQYRGSQNGTTNGADPLALPQLCVRLNTLQFVRGELENLEKKIKTGLRNVESAQADVTDGLDIKFELCQTACQEGIQQLCETTAYKVTFYDLGHVLWDILYIGDIASSRIEILLRELDPILETISGMVHNKVRNRAITALMKATFDGFLLVLLAGGPLRAFTRQDSQIIEDDFKALKDLFLADGDGLPEELVDKASSQVKNVLPLLRTDSESLIDRFKRMMAESNRSGAKNRLPLPPTTGHWSPNEPNTVLRVLCYRYDETATKFLKKTYNLPKKI

SEQ ID NO: 48687 - protein, 439 aa, Oryza sativa
MLIVTVSSSPLFLNSSYYNWNICRATVYTGLYLTAVGSGCMKPCIPAFGADQFDSADPVERLAKGSFFNWYYFSMNVGSLLSTTLLVWVVANIGWSVGFAIPMLLSGFGLALFFAGRKVYRYKKQGGSPLTRVSQVVVAAVRNHRLKLPDDSSLLHEVSKVTEDDYRTQLTTQFRFFDKAAILSDEISPAQWSPWRLCTVSQVEELKILLRMFPVWVSMVVFFVVTAQITSTLIEQGMAMDGRVGPFTLPAASIATFDVISVLVWVPVYDTVLVPLARRVTGKDRGISHLQRIGVGLALAAVAMAYSAVVEARRLGTAPAPVSIMWQAPSYLVLGVAEAFSVIGMMEFFYEQSPESMKSLCTALGQLAIAVANYLNSGVLVVVAAATTRGGGAGWIPDNLDEGHLDYFFWMMAVVSVLNLLHFLHCSIRYRANNNTLSS

SEQ ID NO: 48688 - protein, 409 aa, Oryza sativa
MATEKKVNKLSVANLTSDDSFYPVIVPGNSKIEIQSRVRNLTVYAIKIPGSVAYNAMLLYSEGQQEKCLAVRRRSEHAHTLYEILRNCSHRNIIQPMGVWEEMETNLAFIVFPCSDGVVTSIPKEALFDVEDATNAESYTFGFSDQGCRIFREICMAVRYINVLYDEEKIPLKALDLDESKIFYQSKAKGDYHVLLTDIKMEISPTGNVRKNRRAKGKVSSTGVPTVDDVKTANWNGLGQFLKKLHKDLKLHIELSHLSEELGKESVKYEDLVWEPGLWESSTKVQLVRDVYWCYNKNKNRISTLKNKTALGLKSFIDKLEVNKSRAPDKQINDDNLYESLFFLRVYMVAHKDDTIKGYSGTMEMMHDKKAIVRLLMIERPEYMVTLISAIRKLGWIRQSPFCAWITST

SEQ ID NO: 48689 - protein, 398 aa, Oryza sativa
MSSSSSPPAASAAARLDLDGNPIAPLTICMIGAGGFIGSHLCEKLMAETAHVVYAVDVYCDKIRHLVDPAPPHLHGRISFHRLNIKNDSRLEGLIKMADLTINLAAICTPADYNTRPLDTIYSNFIDALPVVKYCSENNKRLIHFSTCEVYGKTIGSFLPTDHPLRKEPEFYVLKEDESPCIFGPIVKQRWSYACAKQLIERLIFAEGAENGLEFTIVRPFNWIGPRMDFIPGVDGPSEGVPRVLACFSNNLLRREPLKLVDGGQSQRTFVYIKDAIEAVHLMIENPARANGQIFNVGNPNNEVTVRQLAEMMTEVYANVSGEPPLDEPMIDVSSKQFYGEGYDDSDKRIPDMTIINKQLGWNPKTPLKDLLETTLTYQHKTYKEAIKRQMSQASASS

SEQ ID NO: 48690 - protein, 943 aa, Oryza sativa
MVKRRLFLLLFLCLLAGSRIASADTNPQDAAALRSLMKKWTKNVPASWRKSNDPCARWDGITCDRNSRVTSLNLFGMNLEGTLSDDIGNLTELTVLDLSSNRGVGGTLTPAIGKLANLRILALIGCSFSGNVPSELGNLSQLDFLGLNSNQFTGKIPPSLGKLSKVTWLDLADNQLTVPIPNSRDHGSGFDQLLKAQHFHLNKNKLQGSVPDFLFNSSMDLKHILFDRNNFNGSIPASIGVLPKLEVLRLNDNAFTGPVPAMNNLTKLHVLMLSNNKLSGLMPNLTGMDMLENVDLSNNSFIPSEVPSWFTSLIKLMTLKMQSVGLSGQLPQKLFSNPNLQYVVLSDNQLNGVLDMGNISDELHVDVRNNKIISLAVYNSFTGETLELAGNPVCGDSLLSSMKPCTDLTTEPLHKPPSIDVQCANPFVETIVFRAPSFGDVVKFLPSLQANLSSKLNSCTPNNLGLVYSNDDAYLNVDIRACPVNQKRFNYSQVLNCFNLTLQTYKPPEIFGPYYVKAHPYPFHDKTSRAVLIGVVTGSLLLVIGLTLVGVYAVRQKKRAQKLVSINDPFASWGSMGQDIGEAPKIKSARCFTLEDLKLSTNDFREINAIGAGGYGTVYRGKLPDGQLIAIKRSKQGSMQGGLEFKTEIELLSRVHHKNLVGLVGFCFEKGERMLVYEFIPNGTLSEALYGIKGVQLDWSRRLKIALDSARGLAYLHDHADPPIIHRDVKSTNILLDERMTAKVADFGLSLLVSDSEEGQFCTNVKGTLGYLDPEYYMTQQLTAKSDVYSFGVVLLELIVAQPPIHKQKYIVREVKTALDMGDQTYCGLKDVMDPVLQKTGDLRGFARFLKLALQCVEDLGTDRPSMNTIVREIEVIMQDNGIRTGMSSTSSSFSIDSRTMMAAPKYPYSNASTSSTAFDMDSRAFEYSGKFPSEGSLKNRGT

SEQ ID NO: 48691 - protein, 572 aa, Oryza sativa
MASPELAAGDGSYNFHLRSLSAASRDSAAAADPASDPNLLESVRRVCEMCKEAKGASDEMVARAFPVMSKLFQRCAAAPTQSVASSGVLLLTILQFFLDFGEAVLHDADGSLRTFFRSCLSREFADPIVAERTLEFLIANKTKILSSFPTLIPQFFPLLLKLIASNGERLERKFSEVLPLMMSAGSFLPLFLSLMDLPMLVVALEKVERSSGTLIGSSIATIQKSAAPEMLLALMDEAYTGSAIEDAIGNAGSDDSGPLDLADPMFLDLLKDENDGIAAKHWTSPTISSTLQAAVNSPQSDRLKQSLKMAPRFLTLYFATALRDVNDSLLCALIPVVMSRYAAMFPDKVYSFEVRKRLSDFILAAFQRSPDIIALLKKPITDRLGEAHDNPAKTELALHLCWAIGEHGAGGKNRKDVARELFENLELLLYENLATSRLGLSQDTGFDPMGASSRKSSQARLLCFVVTAIAKLATFHNELLPRARVSLAKVARSRTSDRRVWQRACDYLGLLNEPAICLSVLGPSTAQGNGPGIVNWSEGGTKMVAHIPFYLLAEQKGAPIHDFSFDDLVPTE

SEQ ID NO: 48692 - protein, 109 aa, Oryza sativa
MSGVWVFKNGVVRLVEKQQATAGTAVAGGRRKALVHTPCGQVVSSYAALEARLTALGWERYYEDPSLFQFHKRGSLDLISLPADFSAFSSVHMYDIVVKNRDSFRVVDA

SEQ ID NO: 48693 - protein, 202 aa, Oryza sativa; identical to SEQ ID NO: 40444

SEQ ID NO: 48694 - protein, 380 aa, Oryza sativa; identical to SEQ ID NO: 48346

SEQ ID NO: 48695 - protein, 249 aa, Oryza sativa
MEVEQVLSITSNPKVDSITNGDNVIIIPSVSTEEKEHINGAAETNHVVMITAASMDRTDGDDRTMKEEETDGIAIARSASSNGSRQQDKKRGAFGLFRAMFMSFNGSASIKKRAAAAAATMGYQKKAEAAGGGAAADVERSSSDVASWKNLVDGMRPLRLHGHLEYYPPPSPDRSDGTSMTSSYSSAQDLQELVNGHGKEDEEEEKNSLETEDGGCSPNPIDMQAEEFIAKFYEQFRLQKSDSFNNRAY

SEQ ID NO: 48696 - protein, 210 aa, Oryza sativa
MGKRSAPRYPDDGGGGGGGICCVLCWCCCFLFLIVAALAGAAAYALFLYKPKAPSYSVSNMSVSQFDFNSNDLTLYTKLVATVRAENPNEMIGIIYGDGSRTVVSYRGTPLCSGHLPTFYQGFKNVTVMEISMEGRHGFGSGLQSALEESEKEGNVPLDVFVSVPVSLRFGSFDVREVRVNVHCALVVDSISPKKKPTIKSATYQGNVEF

SEQ ID NO: 48697 - protein, 578 aa, Oryza sativa
MEKVLVLSLICISLCQGWVVQSLEYDHTASIECLRDPMKPLYNGGIIQNGEFNSGLMGWSTHRDIKAGLSSSPSGNKFAVVQRADSLSGAAVPSRSVYQKIQLQGDTHYSLSAWLQVSAGAAHVKAFVKTPNGERVVAGSVSAQSGCWSMLKGGMTAYSSGPGQIFFESDAPVDIWMDSVSLQPFTFDEWDAHRQQSAAKVRRSTVRVVVRGADGAPMANATVIVELLRAGFPFGNALTKEILDLPAYEKWFTSRFTVATFENEMKWYSNEWAQNNEDYRVADAMLKLAQKYNIKIRGHNVFWDDQNSQMKWVTPLNLDQLKAAMQKRLKSVVTRYAGKVIHWDVVNENLHFNFFETKLGPNASPMIYNQVGALDKNAILFMNEFNTLEQPGDPNPVPSKYVAKMKQIQSYPGNSALKLGVGLESHFSTPNIPYMRSALDTLAQLKLPMWLTEVDVVKGPNQVKFLEQVLREGYAHPSVNGMIMWAAWHAKGCYVMCLTDNSFKNLPVGTLVDKLIAEWKTHKTAATTGADGAVELDLPHGDYNLTVSHPSLGTNATVRAMTVDAASLASERLVNIKV

SEQ ID NO: 48698 - protein, 475 aa, Oryza sativa
MSMEGSTYPDGKGILKDAFQRVVDLMKLNHVVDGANPSSFVLTGVNVVVHSPEDELKFGVDESYNLSVPTAGYPLRVQIEAQTVFGALHALQTFSQLCYFDFTSKLIELISAPWRISDTPRFPYRGLLIDTSRHYLPVTVIKKVIDTMAYSKLNVLHWHIVDAQSFPIEIPSYPKLWNGSYSFSERYTTSDAVDIVRYAENRGVNVMAEIDVPGHALSWGVGYPSLWPSDSCKEPLDVSNNFTFGVIDGILSDFSKVFKFKFVHLGGDEVNTSCWTATPHIKKWLDDNQMNVSDAYRYFVLRSQKLAISHGYDVINWEETFNNFGDKLDRRTVVHNWLGEDVAPKVVAAGLRCIVSNQDKWYLDHLDATWEGFYTNEPLKGIDDPEQQSLVIGGEVCMWGEQIDASDIEQTIWPRAAAAAERLWTPIEKIAEDPRLVTSRLARFRCLLNQRGVAAAPVAGYGRTAPYEPGPCVRQ

SEQ ID NO: 48699 - protein, 408 aa, Oryza sativa; identical to SEQ ID NO: 34733

SEQ ID NO: 48700 - protein, 360 aa, Oryza sativa
MASEWDSPCQFCGKNFKRRGDLLNHELTCKYISDVHPQTESSGDAQARKDILGFHIPRQKRTVPAFPASDYAQGGINGATSEVKVDWDPEEETDVLEALLLLREQPAYPGEETFSDDEPGAGNVDDEPAASNNPDQVLKMCSDKGSSPVECYGGDERRVGACAIAGVEEDDLSPNVGCRGVTDCVDESDVIQKQKRKPDLSVADLRDLVEMKQQNMKADTNIHDQGHPSVMQMQKNELSLDLLPHKNSSDHEVPTLSVSSMDDPDGLVSTDTNSDKETETVNVGIDINIPEQRESSVTRMQNEKLGLNLLPRNDSSGHEVPILSVSSTDDLNSLIPTDTSSDKDTNSNVADRLGHCPAQE

SEQ ID NO: 48701 - protein, 174 aa, Oryza sativa
MELERSFGGEAANLVKSAGNSAATLIELITRHFPGFRDHSLYKGHQVFLYKRAQIFVADLWGAFKGQNYGEFHDIKSITIFADYIVPAVLRELGILKYGSNLSCSIDSSSEIVPGSEEEVEIRACSVYAVEKMRELINKKFGKQLLSIDIDLWLWSCGVQNMALSHHRTLSIYY

SEQ ID NO: 48702 - protein, 701 aa, Oryza sativa
MGENTGDNPNMSILQRIATSDVPLVKEYGLPGIIGAILLAVVIPIMLSSIFNKKGKKRAVQADVGGEAGLAMRNSRFSMLVEVPWEGATTMAALFEMASKKYPRHRCLGTRKLINREFVESPDGRKFEKLHLGEYEWDTYAEAFSRACNFSSGLIKLGHQRDSRAAIFADTRTEWIIAAQGCFRQNLTVVTIYASLGEDALVHSLNETQVSTLICDSKQLKKLPAISSKLQSVKHVIYIEDEPVEAEVLNQMKHWTTFSFGEVEELGKTSHTDARLPSSTDTAVIMYTSGSTGLPKGVMITHGNMVATTAAVMTIIPKLGTGDVYLAYLPLAHVFELAAETVMLASGAAIGYGSALTMTDTSNKIKKGTKGDVSALKPTLMISVPAILDRIRDAVFKKVGEKGGLTKKLFDIAYKRNLGAIEGSWFGSWAPERMIWDNIIFKPIRSMLGGRIRFVLCGGAPLSSDTQRFMNICLGVPVGQGYGLTETCAGAAFSEWDDTSVGRVGPPLPCCYVKLVSWEEGGYKISDSPMPRGEVVVGGYSITKGYFNNEAKTNEVYKVDERGMRWFYTGDIGQFHPDGCLEIIDRKKDIVKLQHGEYVSLGKVESALTTSNYVDSIMVYADPFHNYCVALVVPAHQALEQWAQNSGINYKNFDELCHNDQAIRRSSNLYQRLQKQRGLRSLKYQQRLCCCLNHGLQSLGW

SEQ ID NO: 48703 - protein, 719 aa, Oryza sativa
MDPYRSSSSSASSPAAALAMGRRHYYLPARPARPISFEDSPDWADDDVDSIHLATASASASLPTTAYPSPSPTPSSSSAACRGGERKVAGATLVWKELSVSLTRSRSGSGSADRRVVKSSTGYALPGTLTVIMGPARSGKSTLLRAIAGRLRPAERMYGQVLLNATNTRLPYGSYGFVDRHDVLIDSLTVREMLYYSAHLQLPGLFSSKTSIVEDAIAAMSLADYADNLIGGHCFINSLPAGERRRLSIARELVMRPHVLFIDEPLYHLDSVSALLLMVTLKKLASTGCTVIFTMYQSSTEVFGLFDRICLLSNGNTLFFGETLSCLQHFSNAGFPCPIMQSPSDHFLRAINTDFDRIIAMCKNLQDDQGDFSSVSMDTAVAIRTLEATYKSSADSVAVESLVAKLMEKEGPHLKSKGRASNTTRIGVLTWRSLVIMSRNRKYFWSRFALYMLLALSVGTIFNNAGHSLSSVMVRVSAIFVYVSFVILLSVSGVPAHIDEIKIYSHEEANQHSSTMVFLLGHFLSSIPFLFLVTISSSLVFYFLIGLRNEFNLFMYFVVTMFMCLLANEALMMIVAYIWLDTYKCTLTLICLYVIMMLVGGYFRIRGGLPCTVWKYPLSYVSFHVYAVEGLLENEYVGTSFAVGAIRTIPGVQAVGGSYDISSSANAKWVNLLVLFVMAVGYRVVLYVLLRLNVRKHMRLLGSWCCWSWTPQSDYYSSN

SEQ ID NO: 48704 - protein, 519 aa, Oryza sativa
MAAATSQSFLSPAPNPLLRPRILPFPAGGSVSLRGRRPAFPSVAAASTSMASSESEERKETKLWGGRFEEGVTDAVEGFTESISYDWQLYKYDIMGSKAHASMLAAQGLITAGDKDIILEGLDQIEKLIQDGKFEWRTDREDVHMNIEAALIEKVGEPAKKLHTARSRNDQIVTDLRLWCRDAIDKILFRIKQFQVSLVLLASKYVDLIVPGYTHLQRAQPVLLPHLLLSYVEQLERDAGRLVNCRERLNFCPLGACALAGTGLPIDRFKTAKDLKFTAPMKNSIDAVSDRDFVLEFLAANSIAAVHLSRIGEEWVLWASEEFGFLTPSDSVSTGSSIMPQKKNPDPMELVRGKSARVFGDLMTVLTLCKGLPQAYNRDLQEDKEPLFDSVKAVLGMLEVCTEFAQNISFNSKRIQSSLPAGYLDATTLADYLVKKGVPFRTSHEIVGRSVALCVSKNCQLAELGLDDLKSVHPVFEGDVYEYLGVENAVNKFISYGSTGSEQVKKQLEDWRTQLGISS

SEQ ID NO: 48705 - protein, 239 aa, Oryza sativa
MVLLDRWCLIADLPNASTGVGTTSTGLRIQATFHPARPPLLSRFCVHCPGLDFRRVVPKIIASDADLVLLCVPVNPDSIANARGLDYFVYRPRAHRLDLLPNPHPVYLHDSMTALLSRQDGAWYAVAALGLGPPVYKGGAPVSWDFYLHLYRSTSSSKGWTSKRLSVTEFIRDKFIPIPASVDRLYHETGKTITVGGEGGTVAWVDLWRGIFLCDVLDEFPALRDIPLPCPARSNRISS

SEQ ID NO: 48706 - protein, 260 aa, Oryza sativa; identical to SEQ ID NO: 32920

SEQ ID NO: 48707 - protein, 65 aa, Oryza sativa
MGTIQSMHLCIFSQMAYTLKLPTLKVKEKLANCNNQRKLLSVTASVSWNRLWRKFRVKILKNQVA

SEQ ID NO: 48708 - protein, 678 aa, Oryza sativa
MEPARRSTAASDGGGGSSAAGSDGEDDRYLSASSALGTPSSLATLLPSSDLWDHQMDLLLLDDPVAGFPKAHQLTRLHPPPEPPRPDPPAPAAAGDAVLPRPPEPDPTQVDNLDDNHLFDDMVQEMEHILLNSGEPHESASFTDYRANNSSQAHHFRDGSTTASTSGTDDAYVYPLPHHPSKIDWVEVVGAKQRTGDVSFGERMVGVREYTVYLLKVKSGEDDWEIERRYREFYALYQQLKLLFAEKGFSLPPAWRNVEKESSKLFGNASPDIVNERSSLIQDCLCSLLVSSYPFGTPTPLVSFLSPGSPAYEYSLLKTLIPRSLQRLSSDSHSKGSSCNGTSHKDSASMGKTISLVVEDRPRKSTRQLLELQHYNCAGCHRHLDAGRTMLQEIVQTIGWNKPRFCAYTGQLFCASCHTNDTAVLPAKVLHHWDFSLYPISQLAKAYLDSIYDQPMLCVSAVNPFLFAKVPALLNIMSIRKKIAAMLPCVQCPFRNSIFRGLGARRYLLDGNDFFALRDLVDLSKGAFAALPVKVQTISNRILLHITEQCLVCYDSGVPCAARQACDDPLALIFPFQEDEATKCGSCGSIFHKQCFRKISICPCGKGAASKGRKIVALEQAVRDDASRPSTQLIQPSSFSSSSGFFSDIISKARPDKLWKPRNSSPVILMGSLPDTST

SEQ ID NO: 48709 - protein, 523 aa, Oryza sativa
MDHHHHHLPPPPPRSPMENSASSKPPTPASTPSSRLAAAPSSRVSSAAPHPSPSSSAPTPASRTVYSDRFIPSRAGSNLALFDLAPSPSHHDAAAAAASPGAPPPSGSTPASSPYCALLRAALFGPTTPDRVASSASACSSSSSAGASPVGSPATGNIFRFKAEVPRNAKRALFSDGDDEGVLFPGVFTTRGTGPRKIPRSPYKVLDAPALQDDFYLNLVDWSSHNILAVGLGNCVYLWNACSSKVTKLCDLGVDDNVCSVGWAQRGTHLAVGTNQGKVQVWDATRCKRIRTMESHRMRVGALAWNSSLLSSGSRDKSILHHDIRAQDDYISRLAGHKSEVCGLKWSYDNRQLASGGNDNRLYVWNQHSAHPVLKYTEHTAAVKAIAWSPHLHGLLASGGGTADRCIRFWNTTTNMHLNCVDTGSQVCNLVWSKNVNELVSTHGYSQNQIIVWRYPTMSKLATLTGHTYRVLYLAISPDGQTIVTGAGDETLRFWNVFPSPKSQSSDSLSSIGATSFVRSYIR

SEQ ID NO: 48710 - protein, 320 aa, Oryza sativa
MLQLFGKELVALIDRSIQEINREHGQARGASEMRRLLKLAVVITMLPTSPDLLPVILRLYATLGTFPIDQLNGITKELRKCVRKILRRVCSLSQTQSGLYHVAQRGGVHKITLYVMNYVKFLWEHDSVINNIIAYQADGESENGEEWTQVDSFVQHFIGRLDALLERMARHESMMGLECISLLNNAHFILNRLRKLEVKSALQQDWILRYENQVKHQITRYLELSWLPVMSCLDAHTPTQALFPCFHLPLTTRFYEMLESTCAEQQNWRIEDPKLRNNVRKAVSSHVVQCYQAHLQKKGMKLHKYIPQEIENKLMELFEG

SEQ ID NO: 48711 - protein, 582 aa, Oryza sativa
MGGRARSILRWLRHHRSRRVSSSSFHLTTTGDDTVKDLHDPRREDAEGDGWEEVHEGPESDPEEYIALVSEDAGTHLPVRTEPRRMDPSKKEPDFFTEYGEANRYKVSEVIGKGSYGVVAAAVDTQTGERVAIKKINDVFDHVSDATRILREIKLLRLLRHPDIVEIKHIMLPPSRREFRDIYVIFELMESDLHQVIKANDDLTPEHHQFFLYQLLRGMKYIHAASVFHRDLKPKNILANADCKLKVCDFGLARVSFNDTPSAIFWTDYVATRWYRAPELCGSFFSKYTPAIDIWSVGCIFAELLTGKPLFPGKNVVHQLDLMTDLLGTPSAESLAKIRNEKARRYLSNMRKKPRVPFTKKFPGVDPMALHLLERLLAFDPKDRPSAEEALTDPYFNGLANSEREPIAQPISKLEFEFEKRKLAKDDVRELIYREILEYHPHMLQEYLRGGDQMSFMYPSGVDRFKRQFAHLEEGVSKGEKSSPQLRQNASLPRERAIGNKHGDDEYHAKLNVGEKPCHASVTDGISKPLMSARSLLKSESISASKCIGEKPKQDRDQEDSLTESMDETADEVSEKVAQLKT

SEQ ID NO: 48712 - protein, 252 aa, Oryza sativa
MGAEAVRVLVVDDSPVDRRVVELLLRAHCGGGGGAAAGEAAPFHVTAVDSGKKAMELLGRRRGDRDHLTPSSPAAAAAANDQAIDIVLTDYCMPEMTGYDLLKAIKALGSPNPIPVVVMSSENEPQRISRCLTAGAEDFILKPLKMNDVQRLRKCSGATRPKSAVAGDDDRCCNTAKKAAAAAAATPEQQQQQQRSSHLAGLAMVMNASSFEVSHYFQLIFKLILLAYAVLCLSQLLHRWSNGSSLLSLWCA

SEQ ID NO: 48713 - protein, 254 aa, Oryza sativa
MAPVSSAGEAVLRMRSRRSQRQSLRRSRSRSRILTRRQSLGQKMSPSRSQRQCLRRSRSRSRQLTRSLSPNQRQSLNQNQSQRQSPRHNQKQSQSLSLSQSQSPSYTQNQNQSPSLSHSQNQIPRLRRSQSLNPSLNLNRSLPHRLNQRQNRNQNQRQSQSLSRRLNRSQSESHTQSQNQNQNPSQKQKQNHSQSLSPSQNPSQPQRRKRLRRPTHDGDPWRSRASCLLHDLATDEIILLRVGALGNGHWPFLE

SEQ ID NO: 48714 - protein, 261 aa, Oryza sativa
MGRVIRAQRKGAGSVFKSHTHHRKGPARFRSLDFGERNGYLKGVVTDIIHDPGRGAPLAKVTFRHPFRYKHQKELFVAAEGMYTGQFVYCGRRATLSIGNVLPIRSVPEGAVVCNVEHHVGDRGVFARASGDYAIVISHNPDNGTSRIKLPSGAKKIVPSSCRAMIGQVAGGGRTEKPMLKAGNAYHKYRVKRNCWPRVRGVAMNPVEHPHGGGNHQHIGHASTVRRDAPPGQKVGLIAARRTGRLRGQAAATAAKADKAT

SEQ ID NO: 48715 - protein, 363 aa, Oryza sativa
MEEEVEAANRAAVESCHRVLALLSQQQDPALLRSIASETGEACAKFRKVVSLLGNGGGGGGGGGGGGHARGRMAGRSRPSAVLREKGFLESSSGGGQLGMVMSGAATPSTSSAAHLRNRIGGGSGVPPDSLRGLDLVSSSSKGGAHQFDPPKLVQPLSVQFQFGATAHRYPFQQHQHQQKLQAEMFKRSNSGISLKFDSPSATGTMSSAFMSSLSMDGSVASLEGKPPFHLISGPVASDPVNAHHVPKRRCTGRGEDGSGKCATTGRCHCSKRRKLRIKRSIKVPAISNKIADIPPDEYSWRKYGQKPIKGSPHPRGYYKCSSVRGCPARKHVERCVDDPAMLIVTYEGEHNHTRLPTQSAQT

SEQ ID NO: 48716 - protein, 179 aa, Oryza sativa
MASTDPMTRRFAVACGVLSQYVKANSSQPSTAAPVAQGVSGLMAAAAAAAAAPVVQEPGCEVDGGGQQFTIFYAGKVVVIDRCTPAMAAELMRFASAAQGGGGAPEAPPALVDMPIARKASLKRFLAKRKATPASARSSYVVRAAAAEEEQPPAKKAKAAVERREDWLALGSLGHMHSR

SEQ ID NO: 48717 - protein, 365 aa, Oryza sativa
MSSLCPFAKLASAGATCPVKSDNKTTSCPVTANNHTDDDDNEKTGNANTDPRVVPAKCPFGYDSNNTFKLGPLSCVVCHALLHQSSKCTPCSHKFCKACILRFKDCPLCGADIQGIEPDDELQGLVDRFIDGHARIKRSHAAGDGEAASDKTKVIYEHVSMERGAFLVQQAMRAFRAQNIESAKSRLSMCAEDIREELKSKEDNQELCSQLGAVLGMLGDCCRTLGDAPSAITYYEESAEFLSKLPKKDLELVHTLSVSLNKIGDLCYYDGDLHSARSYYARSLDVRRSAVKEHSAVASQVIDVATSLAKVADVDRNLGNESMAVEGFEEAIKCLENLKLESGEASLEQRRLSVLDFLQKQLDDK

SEQ ID NO: 48718 - protein, 37 aa, Oryza sativa
MQVKAMRALADALAAAQLSSSTPQQAEAAADETEMER

SEQ ID NO: 48719 - protein, 373 aa, Oryza sativa
MGGNPAMRAGLALVVVVVAVVVGDVGAALPRFAEAPEYRNGEGCPAAVAGAGVCDPGLVHIAMTLDAHYLRGSMAAIYSLLKHASCPESIFFHFLAAADGGEGCGGGVGELRTAVAASFPSLRFEIYPFRADAVTGLISASVRAALEAPLNYARNYLADLLPKCVPRAIYLDSDVLAVDDVRRLWETRLPAAAVVAAPEYCHANFSRYFTETFWSDPQLGDRVFAGRRRAPCYFNTGVMVIDLRRWRVGNYRRRIEVWMELQKEKRIYELGSLPPFLLVFAGEVEAVDHRWNQHGLGGDNVLGSCRPLHKGPVSLMHWSGKGKPWDRLDAGKPCPLDHTWKSYDLYIAEGDSSSASAPFALSSSALPAAAFSW

SEQ ID NO: 48720 - protein, 144 aa, Oryza sativa
MLQTLLGLDLCLLDRPLQQRPQRRTFQLGPQPSRLLRSLRRRHQGRSLGLDGGKVWPSMRSRRCKDLQSLLKLLPKAAQLPPNKRESPIHQHLRLVCPQWRHHHPRLVRPQWRHHHPRLVCPQWRHHHLHRHVNHQSLKINPVN

SEQ ID NO: 48721 - protein, 145 aa, Oryza sativa
MLPFEGQAHYDRELDAWVGICRYGEGTGHLCCCDVPPSPAADAACTTTLPAWKFCKEVMFKKGFTGYWGATLVYMGDSRFCLVDCRVPDDCDVRTTLRVLTITSFGLKYDKAGELVTTRYRAYASISYQIAGKFKRLEDPIAFWM

SEQ ID NO: 48722 - protein, 29 aa, Oryza sativa
MLQKKKCSKLRLRAWKLKSPSGHNSPELQ

SEQ ID NO: 48723 - protein, 343 aa, Oryza sativa
MTVEVEAVTMAKEEQPEEEEVIEKLVEKITGLAAAIGKLPSLSPSPEVNALFTELVMTCIPPSSVDVEQLGAEAQDMRGRLIRLCADAEGHLEAHYSDVLAAHDNPLDHLALFPYFNNYIQLAQLEYALLARHLPAAPPPSRLAFLGSGPLPLSSLVLAARHLPAASFHNYDICADANRRASRLVRADRDLSARMAFHTSDVAHVTTDLAAYDVVFLAALVGMAAEEKARMVEHLGKHMAPGAALVVRSAHGARGFLYPVVDPEEIRRGGFDVLAVHHPEGEVINSVIIARKPPVAAPALGGGDAHAHGHGAVVSRPCQRCEMEARAHQKMEDMSAMEKLPSS

SEQ ID NO: 48724 - protein, 464 aa, Oryza sativa
MHVRSPARSMDTSLSIAVAAAAVVLLLLVRGADAEIRTTLIVSDARPLILFEQFGFERGGKATISIRRSFWNLRRGSRRTAVDPSLMGFVLISGTQFPKINNASAYAAADPGDNGDDGGGSYCVLTSEYALPVLRLGDVPPGGVTTTVSIDDPDQYAVVFSNCQDGVEVTVDVYTEMYNVRDGISDGPRDYLPVGLRPLPTIYTVVSEVYFAFLALWACVCVRHRATVERIHAVMGALLLFKALKMACAAEDSWYVERTGTPHGWDVAFYVFGFFKGVLLFTVIILIGTGWSILKPYLQEREKNMLMIVIPLQVVENLLLVVIGETGPTGQDWVVWNQVFLLVDVICCCAVFFPIIWSIRSMREASKTDGKAALNLQKLTLFKRFYLVVVGYLYFTRIIASAFLALLSYKYQWGVNVAIEAASLAFYLFVFYNFQPVAKNPYLYIGDTVEDAAVEREMDDEGRF

SEQ ID NO: 48725 - protein, 84 aa, Oryza sativa
MAHLYERRMFPYPGDEEAVEEFIKSGGALGTTIGPKGFADSNMDSDNMQKQLQSKKFDQEAQKLWFRMRNEVVQELQEKGFDVE

SEQ ID NO: 48726 - protein, 127 aa, Oryza sativa
MVLMVVLMTIKDQFASYCCETLTVPTTSQCGQQLDEDIPSSHSSPPPNKRASDIVGPITRSRAKQLEKEIHSQVNANLVLTNQITLDEPMLLSTCFNVLRNDGVHERTWDDDGFYPPNIWTKEPGRA

SEQ ID NO: 48727 - protein, 278 aa, Oryza sativa; identical to SEQ ID NO: 31049

SEQ ID NO: 48728 - protein, 421 aa, Oryza sativa
MPWLEMWLPPAGSGGGGEGMAAGLFLDGEAAHGALLAAMPGISASFGVRQRRPGFVSLTMSVKGGRGFVSGPVGLLASGEEKGARAEEAEALVAGRRATEEEVAEASEGKVVEEVKEARAGAGAMNMTKHLWSGAVAAMVSRTVVAPLERLKLEYIVRAEQRNLFELIHAIATTQGLKGFWKGNFVNILRTAPFKAVNSYAYDTYRKQLLKWSGNDETTNFERFIAGAAAGVTATILCIPMDTIRTRMVAPGGEALGGVIGVARHMIQTEGFFSLYKGLVPSLISMAPSGAVFYGVYDILKMGYLHSPEGKRRVSTMKQQGQEANALDQLELGTVRTLLYGAIAGCCAEAATYPFEVVRRQLQMQVKATRMNAFATCLKIVDQGGVPALYAGLIPSLLQVLPSASISYFVYELMKIVLKVE

SEQ ID NO: 48729 - protein, 185 aa, Oryza sativa; identical to SEQ ID NO: 30119

SEQ ID NO: 48730 - protein, 403 aa, Oryza sativa
MGKNGKKTESHRQGRGRRASRFRGGGGGGDEDGDELPSSAYDAPPPHHEDSDGDDTDEAAAEDEHEGGVDGGDQEQREVGSMPSKFHLYQLSVQSPKGDISYLQKFFLMYVGGRVPLHFQEDFCGTALLSAEWLRTDARRTAVGLDLDLESLEWCLENNLSKIGADGYSRMLLFHGNVLQPNVARLVKQKICDAMQDLHVNNDNDSLASNICDQLDPASPKCSANSTMSDLVLPARDIICAFNYSCCCLHRRKDLVLYFRHAFNALSKRGGIFVMDVYGGTSSERKLRLQRRFPSFTYFWEQEEFDIISHQTRISLHFQAGKKQMLRHAFTYHWRLWSIPEIKDCLEEAGFKSIHVWIREMPNTQSSGNAKEYNANRDVKYEELQHFNQADAWNAYVVGVANI

SEQ ID NO: 48731 - protein, 84 aa, Oryza sativa
MHIGPHVYTRAHQLKNVTKKSRKNHTHTFNCITPRVKILTSNSLYFSRNKKNKKSDSFKVAILSEFYLFCYSLCRMNLNMRLCT

SEQ ID NO: 48732 - protein, 80 aa, Oryza sativa
MSGEYFPWKKHDGCGGNRKLCSRPCPRTLLRLKMLDPRSKSELDLSPSPWPEEEERVQKRYSLLLRFVRTGVVREAESFG

SEQ ID NO: 48733 - protein, 95 aa, Oryza sativa
MIPGQGTPLTMEQSQKGDRTCLMVFDCRGCEPIDFAFGNGWKAESLEGTSFDIDCSEGEFADYDEKGECPVGVGKLRSEFRVVKKQESRGKTKYV

SEQ ID NO: 48734 - protein, 220 aa, Oryza sativa; identical to SEQ ID NO: 30687

SEQ ID NO: 48735 - protein, 78 aa, Oryza sativa
MLPPFMTSSLVPHEDSTRNKIQDDASWSEQFRENSIEPEDLHKPSIHCFKLPSVSSNIILSNLCSVLLELINELSSKA

SEQ ID NO: 48736 - protein, 790 aa, Oryza sativa
MHLKQISMVHPDISFVSMGLGKTLLVVFSLLHALVLATSVGVEHATDDVSTYIIHVAHVHATPPTHASQCMDQHAIAHYTSFLQGILPSHLSEPTPRLVYAYSHAATGFAAKLAKHQATHIVHHPSILAIFPDKRNELQTTLSPSFLGLSPSNGLVQASNDGGTGAVIAVVDTGVYPKNRRSFTVDPSLPPPPSTFRGHCISTPSFNATAYCNNKLVGAKYFCRGYEAALGHPIDETQESKSPLDTEGHGTHTASTAAGSAVPGANLFGYANGTAQGMAVRAHIAIYKVCWAKGCYDSDILAGMDEAIADRVNVISLSLGGRSEQLYNEPTSVGAFNAIRRGIFVSAAAGNDGPDMSTANNLAPWMVTVGASSINRRFPANIILGNGETYVGTSLYSGRNIAASLIPLVYSGDAGSRLCEPGKLSRNIVIGKIVLCEIGYAPAQEAAVQQAGGVGAIVPSRNVYGQFFLSSPDLIPASTVTFADANAIYSYTQSAANPVARIEFRGTMISQSPYAPRVAAFSSRGPNRFVAEILKPDIIAPGVDILAAWTGENSPSSLSIDTRRVEFNIISGTSMACPHVSGIAAMLKVARPDWSPTAIKSAMMTTAYEVDNGGNAIMSSVNGRAAGPFELGSGHVDPNNALDPGLVYNATTDDYIAFLCGLGYTPNQIAIFTRDSTTTYCSRRPPIGDLNYPAFSMVFARSGGQVTQRRTVTNVGANTNAVYDVTITAPPGTRLTVAPMRLTFNAQRKTLDYAITLSAGSSNSPYNAWGDIVWSDGQHMVRSPVVATWK

SEQ ID NO: 48737 - protein, 295 aa, Oryza sativa
MPADARAAPPSCPFPTIRSHGAAVARSHAYDWLALLLLVAVDGLLNAIEPFHRFVGAGMMTDLRYPMKRNTVPIWAVPIVAVIGPMIVFAVVYFRRRNVYDLHHAVLGILFSVLITGVLTDAIKDAVGRPRPNFFWRCFPDGIAVFDNVTTGVICHGDASVIKEGHKSFPSGHTSWSFAGLGFLSWYLAGKITVFDRRGHVAKLCVVLAPLLVAAMVAISRVDDYWHHWQDVCTGGVLGLVVASVCYLQFFPAPSDEKGFWPHAHFRYITERGSENPTQQATEPLDAMETGRGGQ

SEQ ID NO: 48738 - protein, 244 aa, Oryza sativa
MGAVRGILVVAVVLAVAAILAGAAEGKVNGKAKGKYRALFNFGDSLADAGNLLANGVDFRLATAQLPYGQTFPGHPTGRCSDGRLVVDHLGAPLGFSARLDFDVCLLCVADGLVFWFGSQPTSSACRCCRRPSSRTPASLTAPTSPSPAPPRSTPPTSRPRGSAPSSGTPAPSSPKSSGSAISSPSSATPPRWNAMNSMRIRSSSSASLVATTTMRRCLRGRALRRPTSSCRMSSRLSPMASSN

SEQ ID NO: 48739 - protein, 422 aa, Oryza sativa
MAARARWRILALPLALLLAVGSSPGLVRQASSSAAAKPPVPKAISDLREAIVKGLGFQSEELKVSGFDVRDALVGQAVAYEFDIEVGRKVVPVRLLEDVNRWDFVDLPIFRSQADADDTALAEIRRGKSGKRAFDPTLPPFQLAGPMELWIQDGDDVRLALPHDVEAGTLKKVVLSDGAVVTVKGAKAVSLRLPLELPLPLNRTTYKGRLSSLISIAQTLRGAARSNQKPLLSLRIEGPTSLSSTPSMSPNDRLKLKRLAPGQVELSSRAIPAVTDDDGDGSHAAGLWPLLSLNGSDGSLQGFEELLASVLGKKAGEKGTFKLLKARASAQTYVKMGFAVEKRIADGEVNWSNFPEWKTKPKKLRAHYEVLARVEGGQAIPERIAQVQPFEADEAMSESVLTGNVSMSKTEVVHPPPVYFTL

SEQ ID NO: 48740 - protein, 132 aa, Oryza sativa
MDKSWMRLPDRFSREYIAGVNAFIEFACEHNGENSFIFFPCERCLNISQMGANDARTHLVLYGIQLSYTKWVFHGEVANNYDQDDELLEDEDNGDEFDGFDTIQDLLGDIHRATIGVAEQENQSGNNGDNVL

SEQ ID NO: 48741 - protein, 298 aa, Oryza sativa
MKKCPSELNFEAFFHGERGEDDADAAADQKPGGGPHPPPFAMFSAADLSSFGFADSVTSTITGVIPNHIWPQSQSLNARHPAVYTIESQSSICAAASPTSATTLNMKESQTLGGTSGSDSDSESLLDIEGGPCEQSTNPLDVKRMRRMVSNRESARRSRKRKQAHLADLETQVDQLRGENASLFKQLTDANQQFTTAVTDNRILKSDVEALRVKVKMAEDMVARGALSCGLGHLGGLSPALNPRQGACRVPDVLTGLDYAGDDPFTGLSPPEQVQMPGGGEVGDAWGWDNHSNGAMSK

SEQ ID NO: 48742 - protein, 151 aa, Oryza sativa
MAFTGEEKMKGCRPKLFGAKENKVSNRTDKPSCNTGKFGPSSSNAASSSPLRAFSVKGMRLSHFLAQTPNNTTTEPVRIFVATWNVGGKAPTAELNLDDFLPPDDHSDIYVLGWVFYCPFLNILDVENIFFVNFTKFSVHVIRLSPCMLIS

SEQ ID NO: 48743 - protein, 559 aa, Oryza sativa
MVSLKLRAILFPFQMEPRREMLLQELGEMWDQIGEAEEDRREMLHALEEDCLNVYRVKVAQVKQYRAQLQREIADSVAEVAAICATIGEPSTTVHIACSSLQSTGNLKEELGSITPELEEMRRRREERRRKFSEVTELINRIEQEMKPSKQLHLTMDNSDLTIRRLEELRAYLQDLQLEKDSRVRKMTELMGSLHSSSLVLGMDFRETNLHHDDEGDISDDAIARLVSEIGRLREIKRNRMQKLQDLLATMLDLWNLMDTPSEEQKRFQSVACNIAASEDEITERDALSMEFINNVEAEVVRLERLKECRMKDLVLKKYDELNEIRRRAHVPVENEDDAMMMFDAIDSDAKRSLILERLEVQISEAKDEEFSRKDVLEKMEKWQAALEEESWLEEYNRNENRYNVGKGTHLVLKRAEKARALVSKMPAMAEALITKVIAWEKERGAKFEYDGDGLLDMLEEYNNTRKEKEQERKRQRDQRRMLGQGTGESPVVRPPPKNIKNVTRTLSMGGTSTGGKKASASVSSRPSTPSFLKSPMSARRSDEGQMLLSRAVEEDDLL

SEQ ID NO: 48744 - protein, 274 aa, Oryza sativa
MRIYFPRSDILQALSGSSIALTMDVGNDQLGSLASDPSAAAAFVQNNIQAFPGVNFRYITVGNEVSGGDTQNILPAMQNMNSALSAAGLGNIKVSTSVSQGVTAGFPPSAGTFSASHMGPIAQYLASTGAPLLANVYPYFAYVGNQAQIDINYALFTSPGTVVQDGGNAYQNLFDAIVDTFYSALESAGAGSVPIVVSESGWPSAGGTAASAGNAQTYNQNLINHVGQGTPKRPGSIETYIFAMFNENQKGGDETERHFGLFNPDQSPAYSINF

SEQ ID NO: 48745 - protein, 278 aa, Oryza sativa; identical to SEQ ID NO: 31267

SEQ ID NO: 48746 - protein, 284 aa, Oryza sativa
MVRLTADLIWKSPHFFNAVKDRELDIRGNKIPIIENLGATEDQFDTIDLSDNEIVKLENFPYLNRLGTLLVNNNRITRINPNLGEFLPKLHTLVLTNNRLTNLAEIDPLASLPKLQFLSLLDNTVTKQPDYRLYVIHKLKHLRLLDFKKVKQQERIAAAQKFHSKEAEEEAKKVPAKTFTPGQVVDAQDTTMEEQGPKVVAPTPEQITAIKAAIVNSQTLEEVARLEKALSTGQIPAEFAIPKPDANMADASEETEKMETDGQNQENGADEKKQNEESTPIEED

SEQ ID NO: 48747 - protein, 343 aa, Oryza sativa
MRAESQIKMAAARRLPVLELVSFVAVLLISSPTAAAAELSVDFHAASCPPLEAIVRSSVQAALQQEIALAAGLLRIFFHDCLPQGCDASVYLRGGSNSEQGMGPNLTLQPRALQLVDDIRAKVHAACGPTVSCADISALATRDAVVVSGGPSYAVSLGQKDSLAPAPVRLVNQLPGPGTSSVQALLDKFGSKGLREAADLVALSGAHTVGRAHCDFFRDRAARQDDTFSKKLAVNCTKDPNRLQNLDVVTPDAFDNAYYVALTRKQGVFTSDMALIKDRITAPIVRQLAADKAAFFRQFAKSMVKLSQVPRTDRNVGEIRRSCFRTNGPRLVDLATGDEAASP

SEQ ID NO: 48748 - protein, 119 aa, Oryza sativa
MDATSMMGAACFDVQRAQLFPRNGADVTPTKSSASGTSGTITKPVAESTAVAVEHVFPATPASSAPLISSTAMMTPISLTMTKEADADMGKVILKKNNSIVEFTLINRVIEKKYSISTK

SEQ ID NO: 48749 - protein, 428 aa, Oryza sativa
MGFLSLLLVASMPIVQVLLIGVIGAFLASGYSKILTSSALRDMNKVVFTVFTPSLMFASLAKTVTLSDVISWWFMPVNIGITFIVGGTLGWIACKILKPPQHFRGMIIAFCSAGNLGNLLLIIVPAVCDEDGNPFGKDRSLCRSRGLSYSSLSMALGGLFIWTHTYSLMQKAGKMYHKMQSKSIQCPADSDEEHHPAQGHDQVKLDGETAYADEEAALLVSAKLAPEHNEENQMEAPLLTCEREIANKGGFWTNLKETVHQVVEELMAPPTVSAILGFVVGLVPWLKSLVIGNGAPLRVIQESLQLMGNGTIPCITLILGGNLTQGLRKSVLKRTVIITIVCIRYVIQPLIGMAVVHAAYGVGFLPHDPLYRYVLMMQFALPPAMNIGTMAQLFDVGQEECSVIFLWTYLIAAIALTTWSTIFMSILS

SEQ ID NO: 48750 - protein, 521 aa, Oryza sativa
MTPPLPPAMAPLSTACVPEAEVIDLESAECRSGATMAKSTGHSSGFHPKQQGHRKISLSPQSKALKVSGTRGSLNKTVARVVSRCQPKCVVNIIKEFDDRKEELIGEIGFDGLLDIKLTKVNRQFGAWLLSKVDPKSCATVKDVNQELPFGSNDVNAVFGLPCSGQPIIPCSQDELDGKKQILCEIFKIPNFSHLKISLLKRILKKQYGYPMTIDEKRVFMAAFVLYVTTKLLAPQSCANFISPRSIMAVSDVDNIKQYNWSQFVVDEVKKAAESMPTCFPNKAQLSINGCIIFLMVKYLRNLLFRKVGITCVKTCHISQFEDDQIARMIQQDVVSKHNPGFPFPRYGKLQLVKDPRENNPHVPELSPLNLCSCSKIPSRAIDGGKNLIKFLVSHFSSLDVHRSVGSQAYEELKSSVQDGFDRIDKILPTISDFVDISTMQTAIHASNLFKRAFKTNITVAVKIVIRAAITKVIDTIEDIQGPLHPWGDTTAMGYHTPTNYSTHATKDASQLDQPTNTVKR

SEQ ID NO: 48751 - protein, 339 aa, Oryza sativa; identical to SEQ ID NO: 32484

SEQ ID NO: 48752 - protein, 104 aa, Oryza sativa
MLVFSIPIRAARARFVSTSAAAAMASTAMVSPAPILSRSGMPFSLPASLLAAGTNARSYSGISAMEVSNSKVASEAGGTRREPTRASIAMPCSTDIELTCAVPV

SEQ ID NO: 48753 - protein, 146 aa, Oryza sativa
MPPPLDIGDRGDDATLPPSSSPGGGFSGRTLPLSKSSSAVFGSGAFSGRILPFSKSSSAVVRFSSGAALSTTVPNSKSVSHAAPPPPPPSPAFGVPGLSSQSNGTDEALTVYDARGRNPSSSSSSSSSSSSPSSRPPPLPPSAKCA

SEQ ID NO: 48754 - protein, 264 aa, Oryza sativa
MGISDQPVQPVIGGYMQPPPQVPIPNMAVPSISPSDASSRVFSDDDKSDHGGGGGRKPQPPKPEVPPVADPTNRAMYYNDRSPPAELKRDMPVGTDAASYRVPVPAQDAAAAAAAAAAAAQQPPAGYVYAQMHAPPPQQQPPPPQQQQPVPQQYVTAQNQHFIHNPATGTFIPIQSYYHHPVPQQAPQPPMPQPVPQPQQSHAFDPNTGMYYIPMRTNAPQAYSMPPGAAAVPPPTLVDTTPKPTVPIPQMAVKQPELQQPGLY

SEQ ID NO: 48755 - protein, 638 aa, Oryza sativa
MSPMESRPDDLVPPAMHKPAIQCAAAEDASLLRSPTVSSEEFIQFKRKATTILEEYFSTDDVAATANELRELRVPCYHYYFVKKLVSVAMDRHDREKEMAAVLLSSLYGDVIDRPQVYKGFGKLAESCDDLSVDTPDAVDILAVFVARAIIDDILPPAFLAKQLTCLPEGCKGAEVLHRAEKSYLSVPHHGEIILQRWGGSKSITVEEAKAKIADILEEYLAAGDIGEACRCIRGLKISFFHHDIVKRALTLAMERGGGAEGHILDLLKSASDEGIINESQITKGFNRLIDSVDDLTLDVPNARRLLKSMILKASSEGWLCASSLKPLGPEPKKAVVEDDAAVRQFKAKTLSIIKEYFLTGDIIEVMSSLEAENYACSSSYNAIFVKKLITSAMDRKSREKEMASVLLSSLGMPPEDVVSGFHLLIESAEDAALDNPAIVEDLTMFFARSVVDEVIAPSNLEKMEEEAGRGKPGGSSTGLLALRNARALLGAKLSAERILRCWGGGATGKAGWELDDVKDKIGRLLQEYDCGGDIREACQCIKELGMPFFHHEVVKKALVAIMEKRGKDERLWGLLAECYGRGLITPNQMTKGFERVAGCVDDLALDVPDAGKQLCCYVERAKKGGWLDASFPNGVRS

SEQ ID NO: 48756 - protein, 309 aa, Oryza sativa
MIEKRLLVFGGRGGAGPIMGDLWALKGVTEEDNETPGWTQLKLPGQSPSPRCGHSVTSGGPYLLLFGGHGTGGWLSRYDVYYNECIILDRVSVQWKLLATSNEPPPPRAYHSMTCIGSRFLLFGGFDGKNTFGDLWWLVPEGDPIAKRDLVPNVDSDSKPSNVTGGAQHSASQESQAGESPMIDLAKRLGISLSLEASASFVDEINDKELIELSSMLFGESPPTGDQHACIQALRDHWTSIPANSIQLQELGPLLRDYQRLILRRYLENSFTSFYEKEVHRFFHLKNASELRMDDIPILLMEYGKLLST

SEQ ID NO: 48757 - protein, 358 aa, Oryza sativa; identical to SEQ ID NO: 43005

SEQ ID NO: 48758 - protein, 683 aa, Oryza sativa
MEPVNDFQEGISTEHAFEAEPVPSLSETITPRSMVVSFILSVTLSIVAMKVTLSSGFIPSFSIPAGLLGFCVSRASIRILDYFAVAQLPFTRQENTIIQTCVVACTSITFTGGFGTYILAMGKKAAVGDVNAQNNVEEPSFARMITFLFLISFAGMFIIMPFRKVMIIRHGLTFPSGTATAHLINSFHTPQGVKQARKQVTLLFKSFGGTIAWSLFQWFFASGPGCGFKFFPTFGLEAYKHGFFFDFTMANVGIGMMCPYMIVFSVFIGTIISCGVIWPYIESKEGIWYPSNLGPNSLNGIRGYKVFIGLSMIMADCLFVFLCIMVRTTCAMIKRRRQAMQGGGGNAQPFQGIDIADQPVKSFDDRRRAQVFLRDEIPDSVTIGCYVLLSIISIAAIPHLYPQMRYSHVALIYLAAPVFAFCNAYGFGVTDMNLASTYCKIAMFAFGSWVGIKSGGVVAALVAGGITMSILGNAADVAQDLKTGYLTLTSPRAVFISEAIGTALGCVVNPTVFWVFYRVYKMGSGDMGDMPYAKLYRGFAMLSVGDGEQGLPRHSMLLFKVFFVLALALSVFREVASRKEWRIRRYIPSTIGMAITFFMPPRVPVGMCIGSLVAYLWEKMDAGRGRMLSPALASGLICGDGVGSILLSMLTLMGARAPICIKFLSRGDNVKLDAFLATLHDMR

SEQ ID NO: 48759 - protein, 63 aa, Oryza sativa
MLKISTCVFYDCLCTVLVILLFYASIPTFPESPNLQEKILKSSKVSKANHIDPKRPFEHVDPV

SEQ ID NO: 48760 - protein, 506 aa, Oryza sativa
MEIFLSAILGDLASRSISFLINKCSKPTVLTVEEKLQRLLLQACFIVEESDERLIINQAMLQQLNILRKEMYRGYYTLDSFRCHGHQEYNPKDLEVSSSFAPSMFNPAKRVRFCRVTGQRVQEHLLQQVFGRLEVTIEDMSEFVMFLNSYPRFCRQPYSMHLLLDECLFSRQMEMEHIMNFLLKEDTTGTENPGVLPIIGPGKVGKSTLIEHACDDERVRNHFSQIVLFNDDDLEDANILTLRDSGVIKHQNHATGGKRILIIIELTRDINEGAWRRLYSASKSHVASGSKIIVASRSEKIASFGTTQALRVKFFTQEAYWYFFKVRTFGSINAVEHPKLASVAMDIARELNGCFMGASIYSGLLKANINFQFWRRALAIIREFKKLNLLLYGAYFFDDPWQAVEPSYIRTVNKINSEYLLVLDDYQICSAPNMIHCHKNSAHSEDEVPMVNVKDFLFGNVKPQGKFKVLAWRSHLQPHYSYVFNCEVKRLHHMVTRKKRSQKLCT

SEQ ID NO: 48761 - protein, 543 aa, Oryza sativa
MPYMGYGGALGLTSQTFDNATAGYRFVAVEFDTYNNSFLDPDATYDHIGIDVNALRSVKTESLPSFILIGNMTAIVDYNSNSSIMSVKLWANGSTTPYNLSSKIDLKSALPEKVAVGFSAATGSSFEQHQLRSWYFNLTLEQKQPTGQHSRGGVVAGATVGAILFIVLLFTMVAILVRRRQRKKMREEEEDDSEGDPIVEIEMGTGPRRFPYHILVNATKSFAAEEKLGQGGFGAVYRGNLRELGIDVAIKRFAKDSSKQGRKEYKSEIKVISRLRHRNLVQLIGWCHGRNELLLVYELVPNRSLDVHLHGNGTFLTWPMRINIVLGLGNALLYLHEEWEQCVVHRDIKPSNVMLDESFNTKLGDFGLARLIDHAIGAQTMTHPSGTPGYVDPECVITGKASAESDVYSFGIVLLEVACGRRPMNLLDDQNNGLFRLVEWVWDLYGQGAVLKAADERLNGDYDATDMECVLVVGLWCAHPDRCARPSIRVAMAVLQSNGPLPMLPTKMPVPTYGPPVASSEGQHSSSTGISSSSLTQTSITPR

SEQ ID NO: 48762 - protein, 129 aa, Oryza sativa
MVGDVVAAGSGYLYRVQSLFGEALPRPPPDRGRPSPSRAPCGSHVVGGCRSRAGKHVRDLRLVEEDGGGAALDGTAVANVQSQMREFLRSSQISDTHLPQLHMLLLDPTGGELRRWRAFAPTARASSKM

SEQ ID NO: 48763 - protein, 402 aa, Oryza sativa
MGSVERITSMPRRQVQARDGSVASLAKRTGSPCQQEDDYEGTKTMTNPWTFLPEDIWYHIHSLLPLKDAARTACVSHTFLRSWRYRPNLVFSDAKLGLSGLSESDEVTKELNEKVDLIMKNHSGIGLRTFGLEYYNLVDASYLDRWLQIAVTPAIEELILMFFPEIKAKYYDFPFSLLFDRGGNSIKHLRLSYCAFRPTTSLNFLQRLHLFEVRITGDELGCLLSNSFALEQLKLTHCKELNYLKIPCVLQRLSKLTVFGCTTLQVIEIKAPNLSTFDYDGNLAGLSDGGLLPVKNLHLSSFYQHHTIQYTCAKLPSVAPTIETLTIFSESERFNTQISPFRFLHLKCLTISLSIYRGGFSPSNDYLSLAYFLDASPVLEIFTLTVSISFFMFFLLFDTIKF

SEQ ID NO: 48764 - protein, 248 aa, Oryza sativa
MASSSLEAYLVRLSGADAPDGQVHHPPGHEAPPHHLPRHRHRRLTSPAEAVHRAHHHPVEGLRAGVHVPLDAPSARPEPAVHDPPRHLLPPHRPVRALPPEVVAHVDGRRRRRRRARCVPRRAVPLGDHVEDVLRQRRHRCRLVAVSGGHPLRLLVPGRLAAVVRVPRWEVVAAAVVLRHGLQAVEAPEGGGGGEAEVRRQRVHGGQSERHDVSALREVELHEQLQLLAGAAAVRVQEHDVRARAAPR

SEQ ID NO: 48765 - protein, 76 aa, Oryza sativa
MQGVLILLILSRWTAPVHNILSTQSTTQLIIKLKKCSLLFLNKIFTQPESKISKEHWPDINDFFLTNVDYQCNAHA

SEQ ID NO: 48766 - protein, 849 aa, Oryza sativa
MEEGSEAQPPLQPEAVSAEASEPPPPVPMDQDEGQAAAAEAMEGEAEGAAAAAGTIEGEAGYAAADADPMEDEAADEAGAAEPMEDDPPTSSAPSATAAVDDSTIARKRRRRKKQFPGMIPTAGVRVLRAAASAPSAAHLNGVPRRRGRPPTSSSLRLARELDAEALIALAAGFPADSLSEDEVAAAVLPRIGGVDQTNYLVVRNHVLALWRSNPLSPVASNAALASIRAEHAHLVAAAHSFLSDHAYINFGLAPSVISLPPCPPPSLPPPSVLIVGAGFAGLAAARHLMSLGFKVAIVEGRLRPGGRVFTKSMRSTAAEYHDIAAAADLGGSVLTGINGNPLGVIARQLGFPLHKVRDKCPLYLPDGRPVDPDMDARVEAAFNQLLDKVCQLRQVVADSIPHGVDVSLGMALEAFRAAHGVAAEREERMLLDWHLANLEYANAAPLVDLSMAFWDQDDPYEMGGDHCFIPGGNSRFVRALADGIPIFYGQNVRRIQYGCDGAMVYTDKQTFRGDMVLCTVPLGVLKKGNIQFVPELPAQKREAIERLGFGLLNKVVLLFPYDFWDGRIDTFGHLTEDSGQRGEFFLFYSYSSVSGGPLLIALVAGESAIEFEKTSPAENVEKVLETLRKIFSPKGIEVPKPLQAICTRWGTDKFTYGSYSYVAIGSSGDDYDILAESVCDRVFFAGEATNRRYPATMHGALLSGYREAANIVRAARRRAKKVDSPKKMDVNNEVKYEVKVDNIDLDDLFRTPDAAFGGFSVLHDPSTSEPDSISLLRVGIGARKLGSGSLFLYGLIMRKNVANLAAMEGDEQRLSTLYRDFGTKLVGLDGLGDSGSSLISRIKAAARK

SEQ ID NO: 48767 - protein, 409 aa, Oryza sativa; identical to SEQ ID NO: 47558

SEQ ID NO: 48768 - protein, 174 aa, Oryza sativa
MGGMDCSMTSSILSANYNTILFEFGVILVTSLFESSKSSRRAGASSSSSASSVLGQEEVQAQVDDKFFAEFYRKHVAGSKAIGYMEKHVGDGTELVAVLRALQAEYRLFVVGRGRDRRSVLTEGLEEWAECLELGPVGDILASSDFSSTASVLIVQQYDAKKHYKVIDEEFMPL

SEQ ID NO: 48769 - protein, 331 aa, Oryza sativa
MSNIESSPEGFNMLRRMYETVQEPFLNATTMGGEGNTAPNPFSALLGNQGSNQPRDPATNAPNTGSESTTGTPAPNTNPLPNPWSSNAGGAQGATRAGSTGNARTGATGGLGGLGSADLSSLFGGLAGNTGTGATGGLGGLGSADLGSLLGGSPDSSSLSQILQNPVMMQMMQNIMSDPQSMNQLLNFNPNTRNLMESNTQLREMFQNPEFIRQLTSPETMQQLLSFQQTLLSQLGQNQPRQDGSQGGNATGMRGNVSLDTLMGMLSGLGAGGGIGVPNTSNVPPEELYATQLTQLREMGFIDTAENIQALVATAGNVNAAVERLLGNLGQ

SEQ ID NO: 48770 - protein, 143 aa, Oryza sativa
MGRKRKELLSSAPWRTGEAAEDDDEAARLSREGKVSVTSNPGETPTMHVPRNKRQDLDLAVDDLDEDEIDPELRYSFQRNSRFLRRVFSVDTLVKPLPPVMAYSVSRNVNFFFKIFTQFWDEEGIANAQKSLGLGNEDGSRRR

SEQ ID NO: 48771 - protein, 111 aa, Oryza sativa
MAAAATARSGFRRMFSISAFSPPKPPTPPPKADPSPNLFISGLSKRTTTDGLKEAFAKFGEVIHARVVTDRVTGFSKGFGFVRYATVEDAAKGIEGMDGKVCFILSYHFCC

SEQ ID NO: 48772 - protein, 401 aa, Oryza sativa
MASKRSVGTLTESDLKGKKVFLRADLNVPLDDSQKITDDTRIRASVPTIKFLMGKGAKVILASHLGRPKGVTPKYSLKPLVPRLSELLGVDVVMANDCIGEEVQKLAATLPDGGVLLLENVRFYKEEEKNDPEFANKLASVADLYVNDAFGTAHRAHASTEGVTKYLRPSVAGFLMQKELDYLVGAVANPKKPFAAIVGGSKVSTKIGVIESLLAKVDILILGGGMIYTFYKAQGYAVGKSLVEEDKLELATSLIEKAKSKGVSLLLPTDIVVADKFAADAESKTVPASAIPDGWMGLDIGPDSIKTFSETLDTTKTVIWNGPMGVFEFEKFAAGTDAIAKKLADITAKGVTTIIGGGDSVAAVEKAGLADKMSHISTGGGASLELLEGKTLPGVLALNDA

SEQ ID NO: 48773 - protein, 75 aa, Oryza sativa
MEARSMDRLSVHHNGGGISKPCHGGGKGGGGGGKGCRSSPAATPTSPTTTSTITTTTTSSSATTPSPPPRSAARR

SEQ ID NO: 48774 - protein, 303 aa, Oryza sativa
MLKSKVICCKLYISESQNAKVVDAITRIGQKDPEVVLLSKFEDDHYNRVRYTLASYIINENSTGEVKFSPMRRVLLEMIEKAFSTINLETHTGTHPRIGVIDDMSFHPLNQATMEDAAQLAKTVASDIGNFLQVPVFLYGAAHPTGKPVTAVRRELGYFQPNYMGIQWMGQVLPDILPVKPDEGPDHVSRERGAIMIGAAPLPLNYNVPVLSKDIPTIRRITRRVTGRGGGLPTVQALALSHGDDCTEIACFLDPDHVSADQVQQQVEQIAAEQGLEVEKGYFTDFSKDAMLEKYFKIVLSVD

SEQ ID NO: 48775 - protein, 112 aa, Oryza sativa
MGGTILYPLDLDAVRRSGVHRGSYWRRRCSDRWRRSRRVRDQRGRHDRSGRHTAARVVAPATNPHHEIPARPPCRSSMKMAKTACVIMARDAENGIEDGNKGRHTFCSSLFL

SEQ ID NO: 48776 - protein, 323 aa, Oryza sativa
MLMLGGASHYAQLMDLQERSCQHITDKQIQGGYSLMGCIKDIPTLKGDNYAEWKRKLDLAFILGEVDWVLTTPCPIEPADLVRGENESDADWQKRQRDNAPLVMSYDIEQKKWSLANKKCLAVVKNTIEPTILGSIPECDAVSEYLERIKSQFTGSSKTYATQLIKQLVTERYNGGGVRDHILRMSNMASKLKPMDLGITDDFLVHLVMASLPKQFDNFIVNYNISPEKWNFEKLIANCVQEEERIKESNGGSINYVKDKKKNHKSPTSKGKQSQHLPQQQQFAVEKDQCLHCKKTGHYKKDCPDFLKMIMAKKDSPQGLRQD

SEQ ID NO: 48777 - protein, 243 aa, Oryza sativa
MASPGPATAGELLRIDPVELRFPFELKKQISCSMQLSNLSDDYIAFKVKTTSPKKYSVRPNTGVVLPRSTCDVVVTMQAQREAPPDMQCKDKFLVQSVIAPSGVTVKDITGEMFTKESGNKVEEVKLRVTYIAPPQPPSPVPEESEEGSPSRVSESENGDSLGGGFTRALRERIEPQENSLEAGALINKLNEEKNSAIQQNHKIRQELDMMRREISKKRGGFSFIIVIIVALIGIFLGYMMKS

SEQ ID NO: 48778 - protein, 241 aa, Oryza sativa
MAAAARHRGTVKWFNDTKGFGFISPDDGSEDLFVHQSSIKADGFRSLAEGEQVEFAISESEDGRTKSVDVTGPDGSFVKGGAGGGGGGGGGFGSRGGGGSGGGGRSYGGSWGGGRRSGGGGPGGGCFKCGESGHMARDCFNGGGVGVGGGGGGGGGAGGGCFKCGEMGHMARDCFNSGGGGGGGGGGGGGGACYNCGETGHLARDCYNGGGGGGGGRFGGGGDRSCYNCGEAGHIARDCHK

SEQ ID NO: 48779 - protein, 442 aa, Oryza sativa
MAIPRRSAAAVAAVVALASVAAVAGEVFFQEKFDDGWEDRWVKSEWKKDDNRAGEWNHTSGKWYGDADDKGIQTSEDYRFYAISAKYPEFSSKDKTLVLQFSVKHEQKLDCGGGYVKLLGGDVDQKKFGGETPYSIMFGPDICGYATKKVHAILTKNGKNHLIKKDVPCKTDQLTHVYTLIIRPDAKYSILIDNTEKQTGSIYDDWNIIPPKNKRDPEAKKPEDWDDNEYIPDPEDKKPEGYDDIPKEITDPEATKPEDWDDEEDGEWTAPTIPNPEYKGPWNQKKLKNPNYKGKWKAPLIPNPDYKDDPYIYAFDSLNHIGIELWQVKSGTLFDNILITDDPEYAKKFAEETWAKHKDAEKAAFDEAEKKRLEEESANSKIDDSDDDASDDEDEADDDKADVVAEQTKDKGDEKPQDIKVSADEKPKSSKDDSSAAKKDEL

SEQ ID NO: 48780 - protein, 149 aa, Oryza sativa
MASSSTSSSLAAAAMVAVVLLLLGATATSTQAARLLDEELPTAAIPAIPGVPGVPAVGPGIPVIPGVPGVPVVGPGIPFVPVIPGVPVIVPIIPGVPMIAGMTTLPVPPFVPPIDPGAGAGFPGVPPASSTTVQEDPQPPMPSVVPPVP

SEQ ID NO: 48781 - protein, 53 aa, Oryza sativa
MSEGGCEMPVLIRILLSNNVCECLSINYVFSESWCHSLYAGLFCYCWYAASMK

SEQ ID NO: 48782 - protein, 193 aa, Oryza sativa
MFLVDWFYGVLASLGLWQKEAKILFLGLDNAGKTTLLHMLKDERLVQHQPTQYPTSEELSIGKIKFKAFDLGGHQIARRVWKDYYAKVDAVVYLVDAYDKERFSESKKELDALLSDDSLATVPFLILGNKIDIPYAASEEELRYHMGLSNFTTGKGRVSLGESNVRPLEVFMCSIVRKMGYGDGFKWVSRYIK

SEQ ID NO: 48783 - protein, 353 aa, Oryza sativa
MASCSKWLAGLMLLAAALACSLPAASRAQLQVGFYNTSCPTAEALVRQAVVAAVANNSGLAAGLIRLHFHDCFVRGCDASVLIFSPNGTAERDAAPNNPSLRGFEVIDAAKAAVEAACPRTVSCADILAFAARDSVNLTGNSFYQVPAGRRDGNVSIDTDAFTLPGPNLTATQLVDGFKLRNLTAEEMVILSGSHTIGRSHCASFLFKNRERLANGTISPAYQALLEALCPPTTGRFTPITTEIDVSTPATLDNNYYKLLPLNLGLHFSDDQLIRNATLLPFVDAFAANETLWKEKFVAAMIKMGNIDVLTGARGEIRLNCSAVNPSSSSSSSSAGRMIETVFPGAGGEVAAS

SEQ ID NO: 48784 - protein, 420 aa, Oryza sativa
MAAITLLRSASLPGLSDALARDAAAVQHVCSSYLPNNKEKKRRWILCSLKYACLGVDPAPGEIARTSPVYSSLTVTPAGEAVISSEQKVYDVVLKQAALLKRHLRPQPHTIPIVPKDLDLPRNGLKQAYHRCGEICEEYAKTFYLGTMLMTEDRRRAIWAIYVWCRRTDELVDGPNASHITPSALDRWEKRLDDLFTGRPYDMLDAALSDTISKFPIDIQPFRDMIEGMRSDLRKTRYKNFDELYMYCYYVAGTVGLMSVPVMGIAPESKATTESVYSAALALGIANQLTNILRDVGEDARRGRIYLPQDELAEAGLSDEDIFNGVVTNKWRSFMKRQIKRARMFFEEAERGVTELSQASRWPVWASLLLYRQILDEIEANDYNNFTKRAYVGKAKKLLALPVAYGRSLLMPYSLRNSQK

SEQ ID NO: 48785 - protein, 380 aa, Oryza sativa
MSFAPKDEHEAQVQFALERGIPAMSAVMGTKRLPFPGRVFDVVHCARCRVPWHIEGGKLLLELDRLLRPGGYFVWSATPVYQKLPEDVEIWEAMSTLTRSMCWEMVNKVKDRVNRVGIAIFRKPTDNSCYEARSAANPPICGEYDDPDAAWNISLQSCVHRLPTDPAIRGSQWPVEWPLRLEKPPYWLKNSEAGVYGKPATEDFQADYEHWKQVISNSYMNDLGIDWSAVRNVMDMKAAYGGFAAALRDLKLWVMNVIPIDSPDTLPIIYERGLFGIYHDWCESFSTYPRTYDLLHANHLFSKIKKSDRCKLVAVMVEVDRILRPGGRVIVRDSMETMHEVESMAKSLHWEVRKSYSQDNEGLLFVEKTMWRPNEVEAKL

SEQ ID NO: 48786 - protein, 320 aa, Oryza sativa
MSIFESLVPSDEEISKQKQLLATLSRLINKEWPNSKLYLYGSCANSFGFSNSDIDLCLSIDEKEMSKVDIILKLAHILHAGNLRNIQALTRARVPIVKLMDPNTGLSCDICVNNLLAVVNTKLLRDYSRIDKRLRPLAFIVKHWAKSRCVNETYQGTLSSYAYVIMCIHYLQSQRILPCLQEMEPTYYVTVDNNICAYFDQVDKLNGFGAQCKDTLSRLLWGFFRYWAYAHNYTKDVISIRTGRTISKNMKDWTRRIGNDRHLICIEDPFETSHDLGRVVDNRSIWALREEFERAAEILHLDPNPSITLFEPYVPSEAET

SEQ ID NO: 48787 - protein, 415 aa, Oryza sativa; identical to SEQ ID NO: 31935

SEQ ID NO: 48788 - protein, 493 aa, Oryza sativa
MAEAAAVFAGKAVVQPAITYLVKKIVDRIPDGDLCKRLQQKLPFVEAILYAVDRQQTLSNPSLSEVVWQLRDAIQEAEDALDTLEFLDLKSSANNRSKVSLSSLLSSISRKFNVADSSRATENLKDALKNLDAVLDNAGRSLPAIYPSSCSHGKAHIQDSASIQEVTKELRTTIFGRLKEKDAIIDWLGVLTPNIRDQKLSLCAIVGAGGMGKTTLAQFVCQDKKVQDHFANKIIWADVSKIFDPKVLVRKISGSFNRYKASADGLDTIMTDKFLLVLDDARDDAQSERWQQFLDLIRKNAPMGGKILLTTQIRPVANAVEGQMPPDTYKCLELGGLDQENTLKLFNHHAFGDLSPSDCFELQLIGEQIARKLKGCPLLARTIGRHLQGNTDHARWNTILNHDIHKVDDVATEIKKVLRLSYESLSNEVQVCFRYCSIFPPHYKFKMEEMVEMWVSSGLILQREDGINNREDIAIQYFNTLGKNHSFHLYPEN

SEQ ID NO: 48789 - protein, 346 aa, Oryza sativa; identical to SEQ ID NO: 28600

SEQ ID NO: 48790 - protein, 75 aa, Oryza sativa; identical to SEQ ID NO: 36100

SEQ ID NO: 48791 - protein, 236 aa, Oryza sativa; identical to SEQ ID NO: 37029

SEQ ID NO: 48792 - protein, 450 aa, Oryza sativa
MDACFSTQLIDGDGVFNVSGLENFMKEVKMGECGLSYAVVSIMGPQSSGKSTLLNHLFRTNFREMDAFKGRSQTTKGIWMAKAHNIEPCTLVMDLEGTDGRERGEDDTAFEKQSALFALAVSDIVLINMWCHDIGREQAANKPLLKTVFQVMMRLFSPRKTTLLFVIRDKSKTPLENLEPILREDIQKIWDGVPKPHAHKETPLSEFFNVEVVALSSYEEKEELFKEQVASLRDRFQQSIAPGGLAGDRRGVVPASGFSFSSQQFWKVIKENKDLDLPAHKVMVATVRCEEIGNEKIASFTADEEWQQFEEAVQHDYVPGFGKKISNLLDRCLSEYDMEAIYFDEGVRTSKRHQLESKLLQLVNPAYQNILDHLRTRTLEVFKESFDKSLEKEGFAVAARDCTKVFLEKFDKGSEDAAIQQVKWDPSKIKDKLKRDIEAHVASVRAKKTI

SEQ ID NO: 48793 - protein, 351 aa, Oryza sativa
MSYRRFVNLVLDKVQGNYTVRRMDMSRFFLPRKLATPLDAGAHDGAAAVEYGNLPCPVMSFRASVCPMETMEFMLLGGRHNKIVGTDLTGRTLLYDPDEHVVRSLPTLPMPKFSPVSLTIGDDDLYILDDIQGPFTGGHDHCFHALTYSRESFTDADGDWCCHTLPPPPYMVKQRGDFQFDSYAVVDGVDIWISKQGVGTYRFHTERGEWSAVASGGEWCAMPFTGLAVYVPEHGLFYGLASGTDNVLSASDLISGGRKPEQHSLLPLEYTPPKALTQVSSHLVHLGSANFCIARFFETGFFDADEQHNPELFAVFTAVEVERCDDTGVLRLVKHKSEMYKLISEIYYWVL

SEQ ID NO: 48794 - protein, 451 aa, Oryza sativa
MISQFFVLSQRGDHIVFRDYRGEVPKGSAEIFFRKVKFWNDDEAEEAPPVFNVDGVNYIHVKVAGLFFVVTTMVNVSPSLLLELLQRIARVTKDYLGVLNEDSLRKNFILVYELLDEVIDFGYPQTTSTEVLKSYIFNEPIMVDAGRLPPLGPAAMFMQGTKRMPGTAVTKSVVATEPGGKKREEIFVDIIERISVTFSSSGYILTSEIDGTIQMKSYLTGNPEIRLALNEDLSIGRTGSSSYDYRSSSGGGAVILDDCNFHESVHLDSFDIDRTLHLIPPDGEFAVMNYRITQEFKPPFRVTALIEEAGPSRAEVLLKIRADFSANVTANTIVVQMPVPSYTMRASFELEAGAVGQTTDFKEGSRRIEWNLKKIVGGSEHTLRAKLTFSQESYGNLTKEAGPVNMNFTIPMYNTSKLQVRYLQIAKKSKTYNPYRWVRYVTQANSYVARL

SEQ ID NO: 48795 - protein, 78 aa, Oryza sativa
MLCSILKFEGVDSRTESVLLLHLFMLKLFHMGWLQCVVISQHAVLHTCHCLFLAVRKHVLMTSFWRTILKRKLLRRAS

SEQ ID NO: 48796 - protein, 450 aa, Oryza sativa
MGKQGPCRHCGVTSTPLWRNGPPDKPVLCNACGSRWRTKGSLTNYTPMHARDDIDAEEPRASKLKPPTLKLKEQKQLKKNPSHITMENGPFSDQNFRKMGDPDLSNRSGSGSALSYSESCAPYGTADASEMTASAQSHAWESLVPSKRRSCVTRPKPSQMEKLAKDLNSIMHEEQLLYLSGSSEEDLIYHSATPVDSFEMGYGSMLLRPNSKSLEEESEASSIPADNKSYITSESYSGSVSFVYSESKATSNQNVITEQPKKFLVQTSDNARRANLHTENQDTLENANSPLVSLHMEGKDSEETRVKTSASNRLTKSTMNPLKRPHDTHFQSSVELRGTMRSPKRVSKYGDAMGLKCQASFMPKPGNGKDLACSDRALNLFMLPPDKLSMLVPPQYANTDSDQDLLLDVPLNARHPEAELLCQPSQLSSVAHSSTSEAGNAGGEGRLKQP

SEQ ID NO: 48797 - protein, 381 aa, Oryza sativa
MKEKACLFNCCFIFLRKNITCDAPSFKFYTCKTSFSWLLIKFLLLVYELYLNVVDLSVVRDKRTELSPHRVMDALSFYVGHFNLTREQDASEAFHHLLTSLRDEFSRCYVPNRSSLADITMFPSKVYSQREGNQPECKRWKQNLFGPFDGTIGSILSCRNCSSVLSLDFENFYCLPLSPVATINGDIINGCSLVDCLEHFTALEHLDNYRCDHCWHNVAAKYLSLKSEVDEEKINKLHTCVDYGTCSCRHIFTPEEMTCSISSQATKQLAITHFPKILCIHLLRASVGLDGEFVKRGGHISFPLLLDLSPFAGGALIPGQGPKPSAMNKQRHGQQTLHLWRQLNAEMPVNMFPAATDGDSSSHHCGDESINTLGRSFYGCR

SEQ ID NO: 48798 - protein, 520 aa, Oryza sativa; identical to SEQ ID NO: 32732

SEQ ID NO: 48799 - protein, 253 aa, Oryza sativa; identical to SEQ ID NO: 31598

SEQ ID NO: 48800 - protein, 239 aa, Oryza sativa
MKAIGSGGEWWWNLPSLRRKPDRRRRGRRNTDPRGRRRGPPPEPLSSSSSESIGQSRGWPIDFPFTQAVTAASLTLTGDTIAQVRQRIVDRRLRGPEPDSKGLVPDLLMSHDWLRALRMASYGFLLYGPGSHAWYQFLDQCMPKPTFANLSTKVILNQIALGPCVIGVIFAWNNLWIGKLSELPSKYRNDALPTLLFGFRFWIPVSIINFWMVPLSARVAFMSSCAIFWNFYLSTTMSK

SEQ ID NO: 48801 - protein, 280 aa, Oryza sativa
MGFGSREMACALVALVLGLCCVGGARATGRIDEGLEVMWGDGRGSVSPDGQVMALSLDHTSGSGWRSKNTYLFARVDLQIKLVANNSAGTVTTCYFMSEGEWDIHDEVDLEFLGNVTGQPYTLHTNVFANGTGGKEQQFHLWFDPTTDFHTYSIVWTSQHILVLVDGTPIREMKNHADKGIAYPSSQRMRLYGSLWNADDWATQGGRVKTDWSQAPFVARYRNFTATEAASSSSPAGYDQQMDATAQQAMKWARDNYMVYDYCADSKRFPQGFPPECSMP

SEQ ID NO: 48802 - protein, 120 aa, Oryza sativa
MSLRGGAQGRALRAGTSSTAVAFTPPPSSPNSPGRRSPPSLPSAGGVLSSHAPARRPLRRRFLLRVARWVEELGSGVRGLGNSWASVTNPYDAAASPLADPSGVTPHRPSGHTSSPLFQY

SEQ ID NO: 48803 - protein, 361 aa, Oryza sativa
MRGQMNKGGKLQQYRPVQKEKNQTEEKIATSAVTPQTATQQPTPPPNSRTGMQTNPQRIFCHRCKGFGHMARDCSNVVFCINCAKPTHRTEDCIYDKQPRPMAKLVGYGAPGLGCILIQNTKPDPPKEHNNPLAMISTVFGGELTEAQLEQGFTQQFKWNWVWKAKAMPNGSFQMRFRNKIKFDELANFDYFNVKGTDVQVNVKEWTQKSEAVGKLHIVWVKITGIPEEMKGYQALYEIGSNLGPVLEVDMATFRASNVIRAKVGMMELGVLPLKLVLTSPKGLLFQAHFSLEEVVELGWFSDQLDDTFEKIEIQENTLEGSSQREGKQVVVVDPMTEDHHVSKTGNGLLKFVRSKSWCQN

SEQ ID NO: 48804 - protein, 207 aa, Oryza sativa
MSAQIAPAEQVCYVHCNFCNTILAVSVPGNSMLNIVTVRCGHCTNLLSVNLRGLMHSAPALQDHHHHHLQESGLSGCFRDQSGYPEFGFSAASSSSKLRLPPAAAAMVSYSQQNQQLEQALHARPPEKRQRVPSAYNRFIKEEIRRIKANSPDISHREAFSTAAKNWAHYPNIHFGLSPGHEGGKKLVDVDPIPTAPSSKKIQGFYS

SEQ ID NO: 48805 - protein, 788 aa, Oryza sativa
MDPEFGRGMAPRKREPWRTTLLLAYQSLGVVYGDLSISPLYVYKSTFAEDITHSESNEEIFGVLSFVFWTLTLIPLIKYVSIVLRADDNGEGGTFALYSLICRHANVSLLPNRQVADEELSTYKLEYPPEVANRSRIKEWLEKHKTLQTALLIMVMIGTCMVIGDGVLTPAISVFSAVSGLELSLSRDQHEYAVIPITCVILVFLFALQHYGTHRVGFLFAPIVLAWLICMSMLGLYNIIHWNPQVYRALNPYYMLKFLRKTKKSGWMSLGGILLCMTGSEAMFADLGHFSYSAIQLAFTTLVYPALILGYMGQAAYLSKHHTLNSTYQIGYYISVPESVRWPVLVLAILASVVGSQAIISGTFSIINQSQSLSCFPRVKVVHTSENIHGQIYIPEINWLLMVLCIAVTVGFRDTKHMGNASGLAVITVMLVTTCLTSLVIMLCWHRSPALALVFFLFFGSIEVLYFSASLIKFREGAWLPIMLALILMAVMFIWHHTTIKKYEFDLHNKVTLEWLLALGDKLGMVRVPGIGLVYTDLTSGVPANFSRFVTNLPAFHRVLVFVCVKSVPVPHVLPAERYLVGRVGPAGHRSYRCIVRYGYRDVHQDVDSFEAELVESLATFIKLDALYHRCSDAGSGSEQLDDGRYERENALTVIGTNPLRRCLSYEASHDGVSSVDAARSPNGIVEVPAAAAAAPVTKKVRFVVEAASPEVEKGVVEEQQELCEAREAGTAFILGHSHVQTKPGSSLLKKLAVGVGYNFLRRNCRGPDVVLRVPPASLLEVGMVYVL

SEQ ID NO: 48806 - protein, 157 aa, Oryza sativa
MIKSNPSSPLTTQRESHKVSTHLVRPSASYSTQASEQNPKEGTKDLKTVEDPFDSPTYNIPEKPVTFAEGASYSLVIVAGLGIAAVAGYAVFKELIFEPKEYKIFGKALARVQNDSQVTAKIGYPVTGYGNESRNRAARQRIPNRFGQMRTVLNMWR

SEQ ID NO: 48807 - protein, 413 aa, Oryza sativa
MAAKWQEAPAPGVRVLLFAVAAAALLLVVSARKVGETCAADRNCDAGLHCETCVADGNVRPRCTRVTPVDPQTKARDLPFNRYAWLTTHNSFARLGTRSRTGTAIATAWNQQDTITDQLNNGVRGLMLDMYDFRNDIWLCHSFGGACQNFTAFVPAVEVLGEIERFLARNPSEVVTVFVEDYVESPMGLTRVLNASGLTKYVFPAWRMPKSGGDWPRLSDMVRDNHRLLLFTSKSAKEAAEGIPYEWHYVVENQYGTKGMIKGRCPNRAESAAMNDLSRSLVLVNYFRDLPNFPVACKDNSAELLDMLTTCHDLSADRWANFIAVDFYKRSDRGGAAEATDRANGGLVCGCGSVSACSGNGTCTTARHGGTPKGIFNATSGATALLRPPTATLQWQQLIILVPSTLAALLLSL

SEQ ID NO: 48808 - protein, 487 aa, Oryza sativa
MEEKPQHGSLGGLVAGVREEYESGRTKELEWRKAQLGGLIRMITEEEDAIFDALHDDLGKHRVESFRDEVGVLAKSVRNTLQNLKKWASPEKVDVPLISFPCNARVVPEPIGVVLIFSCWNLPIGLALEPLSGAIAAGNAVVLKPSEFAPSTAAFLAANIPKYLDANAVKVVQGGAEVGEELMEHRWDKVLFTGNARVGRIIMTKAAKHLTPVALELGSKCPCIVDCLDSKRECQVAVNRIIGAKWSTCAGQACVAIDYILVEEQFAPFLIELLKSTLKRFFTEPEYMARILNEKHFHRLTNLLEDDQVKSSIVHGGNADPKTLWIEPTIVLNPPFDSDIMMEEIFGPLLPIITVKKTEDCIAFLKSKPKPLAIYAFTNNEKLKQRIVAETSSGSVLFNDAIVQYGLDSVPFGGIGESGFGQYHGKYTFELFSHRKAVVRRSLLVEFMFRYPPWDEYKMGMLRRVFRFDYVSLVLALLAFWLLGIRR

SEQ ID NO: 48809 - protein, 884 aa, Oryza sativa
MLTSLDPGDSIVMAKAFSHMLNLANLAEEVQIAYRRRIKLKKGDFADENSALTESDIEETFKRLVVDLKKSPAEVFDALKSQTVDLVLTAHPTQSVRRSLLQKHSRIRNCLVQLYSKDITPDDKQELDEALQREIQAAFRTDEIRRTQPTPQDEMRAGMSYFHETIWKGVPKFLRRLDTALKNIGIDERVPYNAPLIQFSSWMGGDRDGNPRVTPEVTRDVCLLARMMASNLYCSQIEDLMFELSMWRCNDELRARADELHLSSKKDAKHYIEFWKKVPPSEPYRVVLGDVRDKLYNTRERARQLLSSGYSDIPEETTLTSVGQFLEPLELCYRSLCDCGDRVIADGTLLDFLRQVSTFGLCLVRLDIRQESDRHTDVLDAITTYLGIGSYREWSEERRQDWLLSELNGKRPLFGPDLPKTDEIADVLDTFRVIAELPADNFGAYIISMATAQSDVLAVELLQRECHVKTPLRVVPLFEKLADLESAPAAVARLFSIDWYRERINGKQEVMIGYSDSGKDAGRLSAAWQLYKSQEELINVAKEFGVKLTMFHGRGGTVGRGGGPTHLAILSQPPDTIHGSLRVTVQGEVIEQSFGEEHLCFRTLQRFTAATLEHGMHPPIAPKPEWRALLDEMAVVATKEYRSIVFQEPRFVEYFRLATPEMEYGRMNIGSRPSKRKPSGGIESLRAIPWIFAWTQTRFHLPVWLGFGSAFKHILEKDIRNLHMLQEMYNEWPFFRVTIDLVEMVFAKGDPGIAALYDKLLVSEELWPLGEKLRANCEETKQLLLQVAGHKDLLEGDLYLKQRLRLRNAYITTLNVCQAYTMKRIRDPDYHVTLRPHMSKEIMDWSKPAAELVKLNPTSEYAPGLEDTLILTMKGIAAGMQNTG

SEQ ID NO: 48810 - protein, 305 aa, Oryza sativa
MAMATTSVTSLAMAMAAAASADATQAPHKLSALPFHHLLFSRAPPLLRASRRLPLAPLVASSDAAAAAEAGVEWSETEEADEGSQEEEEEEVVEEQAEAEEEVVASVEEEEEEAVEEEFAAEPPEEAKVYVGNLPYDVDSEGLAQLFEQAGVVEVAEVIYNRETGQSRGFGFVTMSTIEEADKAIEMLNRYDINGRLLNVNRAAPRGSRVERPPRQFAPAFRAYVGNLPWQVDDSRLLQLFSEHGEVVNASVVYDRESGRSRGFGFVSMASKEELDDAISALDGQELDGRPLRVNVAAERPQRGF

SEQ ID NO: 48811 - protein, 556 aa, Oryza sativa
MASRNPSPASLSTPLLSDSISPTPTTNGHAGHHNHDDDDEESPTVCGGDGGGGGDPFAFPSEDRPAWWSPRGVSPADPFRNGTPGWCGAYELVRALVCAPVAAARLVLFGLSIAVGYAATWVALRGWVDVRERAAQEGAGPMPAWRRRLMWITRISARCILFSFGYHWIRRKGKPAPRELAPIVVSNHVSYIEPIYFFYELFPTIVSSDSHDSIPFVGTIIRAMQVIYVDRFSPASRKSAVNEIKRKAACNSFPRVLLFPEGTTTNGRFLISFQHGAFIPGYPVQPVIVRYPHVHFDQSWGNISLGKLMFKMFTQFHNFMEVEYLPVVYPPEIKQENALHFAENTSYAMAHALNVIPTSYSYGDSMIMARAVEDGKVNCSNYMVEMAWVKETYGVSTSEAMALLEDFLCMSPDKDGRVNAQDFWAHFGLNCTPLCKKIFQYFDFEAKESITFRQFLIGCAHLRKQPSFQDACETAFERCRNPLTSHIGREQLADVLRSSMLELMTDNGMMKLFKTLDVDDDDGISKDDLMASLRKLPFMIALFAGRINGEVYIEIV

SEQ ID NO: 48812 - protein, 275 aa, Oryza sativa; identical to SEQ ID NO: 31807

SEQ ID NO: 48813 - protein, 344 aa, Oryza sativa
MAAAVVCVTGAGGFIGSWIVKLLLARGYAVRGTSRRADDPKNAHLWALDGAAERLTMVSVDLLDRGSLRAAFAGCHGVIHTASPMHDDPEEIIEPVITGTLNVVEVAADAGVRRVVLSSTIGTMYMDPRRDPDSPLDDSFWSDLDYCKNTKNWYCYAKTIAERKAWEVARGRGVDMAVVIPVVVLGELLQPGMNTSTKHILKYLTGEAKTYVNESHAYVHVVDAAEAHVRVLEAPGAGGRRYICAERTLHRGELCRILAGLFPEYPIPTRCRDEINPPKKGYKFTNQPLKDLGIKFTPVHEYLYEAVKSLEDKGFIKKTSNTKELHRQSSPPQNSPASMLMSKL

SEQ ID NO: 48814 - protein, 365 aa, Oryza sativa
MAATSLLSLPSLRLTHRLLVPASSSAPASRSQFQTLAAKKAAVATGTGEGGGGGRGAGGGLLSVLDRAMADEEEYRRARAQVHRKGVEVEGYAIEGVSVGGHETCVTVPSLNVAFDIGRGPLFAVSQDYLFITHAHLDHIGGLPMYIATRGLYNLKPPVVFVPPCIKDDVEDLLQIHRRMSQVDLKVELVALDLGETFEIRNDLVARPFETHHAIPSQGYVIYSVRRKLKKQYAHLKGNQIMKMKQSGAEITDTILYPEVAFTGDTKSDFILDPRNADALRAKVLITEATFLDDQIDVDHAREHGHMHLSEIMEHSQWFRNKAIVLTHFSNRYSLEDIRQAVSKLQSKLSSKVVALTEGFKSDYR

SEQ ID NO: 48815 - protein, 359 aa, Oryza sativa; identical to SEQ ID NO: 34985

SEQ ID NO: 48816 - protein, 225 aa, Oryza sativa
MDWIGHGGSDGLHGYVPSLDYVVEDIDVLLGKIVLENPGVPCFLLGHSTGGAVVLKASLFPRIRAKLEGIILTSPALRVKPAHPIVGAVAPIFSLLAPKFQFKGANKRGIPVSRDPAALLAKYSDPLVYTGPIRVRTGHEILRISSYLLHNLKKVTVPFMVLHGTADRVTDPLASQDLYNEASSRHKDLRLYDGFLHDLLFEPERDEIATDIIDWMERMLALQTV

SEQ ID NO: 48817 - protein, 22 aa, Oryza sativa
MCRRSLTRRRGTRRRPRRRRMR

SEQ ID NO: 48818 - protein, 46 aa, Oryza sativa
MVGSSATMDPIGSPHPARIPPPTHPAHMDPMHGSSGGDGRRGWRRR

SEQ ID NO: 48819 - protein, 327 aa, Oryza sativa
MVLPSSNTRATSSMAYPVSLSSLHHHPNNHHAFFLPSKTNHDNTHKPIESPRISRRSLIFLPVLPSLLYASSSPALDDANIPSTSAIDTTITDRIFMDFSVCPSYFRSDRTLGAELATCPDSEPLGRVIFGLYGRLLPLTTANFKAACTSAAYRGTLVHKLLQGQFFVAGRQGPRRDRGEVQPPTGLVRNAETIDPKAFELKHARPGTLSLCLGQNDDDDDIKLNPNYHNVEFLVTTGPGPCPELDGQNIVFGTVLEGMNVITSIATIPTYKPAERIRFFNDFAQLIGDERAQTARALWDRPLKTVYISDCGELKVTKPSLSPPSLP

SEQ ID NO: 48820 - protein, 46 aa, Oryza sativa
MQLHTLLGVKAGVHIIALHMHLFTLLGVKAGVHIIALHMYILQDVT

SEQ ID NO: 48821 - protein, 107 aa, Oryza sativa
MKPVVGIVVSNKMQKSVVVAVDRLFHHKMYNRYVKRTSKFMAHDETEDCNIGDRVKLDPSRPLSKRKHWVVAEILRRAKVYSPSAAAAAVSAQPGATVQQAEAASKS

SEQ ID NO: 48822 - protein, 520 aa, Oryza sativa
MAEQQQQQAPLLQRPAAAPPSSSRLPDFKQSVKLKYVKLGYHYLITHGAYLLLAPLPGLVAAHLSTFTLGDLADLWQNLQYNLVSVLLCSTLLVLVSTAYFLTRPRPVYLVDFACYKPDDERKCSRARFMNCTERLGTFTPENVEFQRKIIERSGLGEDTYLPEAVLNIPPNPSMANARKEAEMVMYGALDELLAKTGVNPKDIGILVVNCSLFNPTPSLSAMVVNHYKLRGNVVSYNLGGMGCSAGLISIDLAKDLLQVYPNTYAVVISMENITLNWYFGNDRSMLVSNCLFRMGGAAILLSNRGSARRRSKYQLVHTVRTHRGADDRCFGCVTQREDADGKTGVSLSKDLMAVAGEALKTNITTLGPLVLPMSEQLLFFATLVTRKVLKRKVKPYIPDFKLAFEHFCIHAGGRAVLDELEKNLQLSDWHMEPSRMTLHRFGNTSSSSLWYELAYAEAKGRIKKGDRTWQIAFGSGFKCNSAVWRALRSVNPAKENNFTNPWIDEIHRFPVPVPKVSAI

SEQ ID NO: 48823 - protein, 401 aa, Oryza sativa; identical to SEQ ID NO: 31157

SEQ ID NO: 48824 - protein, 357 aa, Oryza sativa
MQAYMAVAAAPAPPASLTLLPRTTTVIRDRERFDAAVPVAPLVLRHGAGVKHKAVVVMGATGTGKSRLAVDLALRFGGEVINSDKMQIHSGLDVVTNKVTEEECAGVPHHLISVARPDDEFTAADFRREAARAAAGAVERGRLPIIAGGSNSYVEELVEGDGRAFRERYECCFLWVDVDLEVLRGFVARRVDEMCRRGLVREVAAAFDPRRTDYSRGIWRAIGVPELDAYLRSRGDGADEEERARMLAAAVAEIKLNTFRLACRQHRKIERLDRMWRARRVDATEVFRRRGHAADDAWQRLVAAPCIDAVRSFLFEDQERSSIAAGKPPLFAAGKATSGNISVFASAAAAMAAAAAI

SEQ ID NO: 48825 - protein, 171 aa, Oryza sativa
MPPPLLLLFFLLAGVGATTTVEEPPAALSPPHKNATLSEILLRYGLPPGVFPTSITAFTLAANGSLAVDLQGPCYSHYEYLTYFEARVVGLLRYGSLTDLSGVKVRRFLVWFDVIRVKVDLPPPPHYVYLDIGWITRKLPADEFESPHKCDDSKKCRLSSALATAAVWFQV

SEQ ID NO: 48826 - protein, 132 aa, Oryza sativa; identical to SEQ ID NO: 29137

SEQ ID NO: 48827 - protein, 220 aa, Oryza sativa
MSGFNRMGSDGNFGKGPRELTGAVDLISRYKLLNHHSFFCKKPLPLAISDTNYLHNVVGDTEIRKGEGMELDQLFQDAYLREKTSYIQPFDMETLGQAFQLRETAPIDLPSAEKGTPTISGKSKIKSKDKVKKHKRHKEKDKDKYKDQKKHKHRHKDRSKDKEKEKEKEKEKEKKKDKSAHHDSGADRSKKHHEKKRKQEGLEDLASGHNPKKVQKRKNQ

SEQ ID NO: 48828 - protein, 125 aa, Oryza sativa
MVTHHVWLFLYMQMLMHNVHHLRGGQLVDLNRVNAGPDHNRGVPANGAHQFNWSGFSLMLFGAAPMMVLPWQVVHVPWPLLLLALMTWFIGCLRLYGFQIAFPVYYHQHGGNNSQGVAAPASTGR

SEQ ID NO: 48829 - protein, 158 aa, Oryza sativa
MAPAFVSDERAVAVSVERLWKVCLDVHSLPKVCAGFIDAVEVEGNGGPGTIHIMKLNPAADAGSVYKTKIVVCDSATHVLKVEVLEVKSRVGNLKSHSTETKLEATGDATCVAKLTVEYELEDGASLSPEQEKMIVDGYFSMLQMIEAYLVAHPAEYA

SEQ ID NO: 48830 - protein, 360 aa, Oryza sativa
MADAHGHRRRVALPCAVRLRLCLLEAAIDATQRRDGAINRPLFSLYDRRAPADPRPDAAGVSSTDVTVDASRGLWARVFTPTAPEHEHSSSSSTTTPRPVIVYFHGGGFAMFSAASRPFDTHCRTLCAGVGAVVVSVDYRLAPEHRFPAAYDDGEAVLRYLATTGLRDEHGVPVDLSACFLAGDSAGSNIAHHVAQRWTTTSAATPPPPSDNPVHLAGVILLEPYFGGEERTKAERALEGVAPVVNIRRSDRWWRAFLPEGADRNHPAAHVTGDAGPEPELQEAFPPAMVVVGGLDPLQDWDRRYAGMLRRKGKAVRVVEFPEAIHAFYFFPEFAGDIRKLVGEIRAFVEDSIMSKQSIA

SEQ ID NO: 48831 - protein, 387 aa, Oryza sativa
MDGQWEEPQHAGRRRRQPEPGKNLIKIPSYQEVFGSGASSSAAPPSYNPPPTTAASSSSSSSSFSQAFSFLKSTEFYSPPPPPPQTTTPRPPQASSAAQAPKNAILVSHRQKGNPLLKHIRNARWTYADIVPDYVLGQSSCALYISLRYHLLHPDYLYYRIRELQKNFKLRVILCHIDVEDVVKPLHEVTRTSLLHDCTLLCGWSLEECGRYLETIKVYENKSADSIREHMDNDYLSRLTHALTSIRHVNKTDVVTLGSSFGSLSQVMNASMEELARCPGIGERKVKRLHDTFHEPFKRVSSRPNIVVPDTPDREKASGQPSSTNDGAQDAVEKPDASVNKKSSNVRSALTEAFAKYSEKIRNQNRDSTNVAGEGTSKSTMGDEKDQ

SEQ ID NO: 48832 - protein, 245 aa, Oryza sativa
MAPTTPASFLRPPPLPHHHHPRIVRLPPPSATFRVADLLGGRGLCNGEVGIRKELASDSPAAPPSTTTSSDEPAESPPPRPAASGVDPDAFDKEMMGLTGGFPGGEVGLKDFVAKNPPPPKPAHRKGLAAAATVERPRAPELPLFLPGMVVLVKNPNNAYHMYCGIVQRVTDGKVGVLFEGGIWDRLITFDLDELEGREKGPPMVNPKSVLLESLAAEMEDDVAKEEEGEEAKKKKEEEGTAAAA

SEQ ID NO: 48833 - protein, 246 aa, Oryza sativa; identical to SEQ ID NO: 31035

SEQ ID NO: 48834 - protein, 386 aa, Oryza sativa
MAPPELTDDVVEEILLRLPPDDPSCSARASAVCKPWRRLLSDPVFLRRHRAFHRRRAPPLLGFIHHVSDEPARRVPSFAQFVPTTAFRPAELEHKNCWPLDCRHGRALFQSSNVELTIWDPMTGDVRRQREPYGTLCTFATAAVLCAVPGCDHHDCHGGPFVLVFVGNDEDDDGEEIASASSYSSETGTWTAASTVHHDDSLELESKPSVLAGDAVHFLTYFGKAILRYDLTKLELSVILPPVAYGDGDALLMTAEDGELGLALFDGEASIHLWARVAGAGWVRRNVIDLYAVLPFFDPVHSLSLVGFAEGTDIIFLHAIHGDYRMELKSLQISKLWEKDRCFNIFPYMSFFVPGTSFTNLLALGFGDRSVQSFRMEHASCSIHQS

SEQ ID NO: 48835 - protein, 116 aa, Oryza sativa
MHTTEEQEHHATKHITRIQGKTKQNGKMQGQYLEMPTPPGAGGPAEAGGRPYRQEPEVQPRERLIGAAQHRERRRSVLHHPLLLLLLLVAQVNQNPSQISVGRDHKVLNCLDLWTD

SEQ ID NO: 48836 - protein, 69 aa, Oryza sativa
MMRITGSVHCPILLSILRDSTWEDGGCVEFLDGSMVTSKTSASSFLMLQRCQLMRFGSLESYLHSVNSA

SEQ ID NO: 48837 - protein, 528 aa, Oryza sativa
MSVVGSSSSSSSSRSARSSNYSSTVSSTESGAGSHRRRCKTGAASGGSFLRVVGFQVPGPRDIASQMVRDGFVLALIGAFGRAPGPVLERWFSELDVGWVLRPTDQQQQEEEEEEEAERLVWRWTRALTVMAHALSATQGHLHDERSAAAAAAAAVAVVGGVEFAISQPPHHTAPAVASSSDHELLLRGVVGGGDDLCLVRFTDTTISKMIAFAAALAAAGKAGTCPTPTADSFFGLMEVHTCISDVSEILMPALKQEALDLRLPDSEQMQSLVNKIGEAMANTQDSLGEAIRKTAKDAEAVTPVLSAMDSWEKFTQTEGIHRATRLIVDYASLFWGYRRVLESILCCYRSESSQNCWEIVQSLIEQMIITFLDQLEKKSESFSDPSLRYIFLINNSYFIQDQFLATNTDYSFPSSKGIRYWHYQNCYLDVSWEPVLSFLYLYNKMPKFFPKHSPQLLARFQSEFQKACRHQKLWKVPNTEHRNSLRKAISDKVITAYRKYLEGHLEPEKSSSDLLAMEDMVNELFEG

SEQ ID NO: 48838 - protein, 217 aa, Oryza sativa
MRSRRTPSCRSCPSTKSRLTPSYRSFPNLSCRHTPSCRSCQSTKSHHTPPSCRSCPSTKSRRTLPSCRSFPSTRSHHTLPCRSCHTQLCRRYRTRPELPKHEEPPHPVVPELPKPEVPHAAVPELPKPELPPHPAVPELPSTKSRRTLSCRSCPSTRSRRTPSCRSCRSLKSRTTPRCRSMNSRRSLRAITPRCRWPSHDRMAMQRLLIGPIISHPE

SEQ ID NO: 48839 - protein, 212 aa, Oryza sativa; identical to SEQ ID NO: 46398

SEQ ID NO: 48840 - protein, 69 aa, Oryza sativa
MPTTFWYKLCWHTLQEIAISSGYITYHWYSDVQVGVGSYAVHYFSTLVASILENFGLSEEMHNPVSLSS

SEQ ID NO: 48841 - protein, 71 aa, Oryza sativa
MGTSTEVRHEEIFCRFWGQMAAFVFIEESAVDLRGLSSWGKLETRRGNWLDAWTRIPYVDASPSAWGLWLV

SEQ ID NO: 48842 - protein, 196 aa, Oryza sativa; identical to SEQ ID NO: 32233

SEQ ID NO: 48843 - protein, 389 aa, Oryza sativa
MAAMASSPPTTPNLGSQPTWVPYEPTRDCSQGLCSMYCPQWCYFIFPPPPPAFDITGSSSDDSSGPTFSPLVIAIIGVLASAFLLVSYYTIISKYCGTFSSLRNRLLGSSAHRGSGGGADGGDNSRSQEPWSVALSDGMDETLINKITVCKYRRGDGFVDSTDCSVCLGEFREGESLRLLPKCSHAFHVPCIDTWLKSHSNCPLCRCNIAFVTVGMVSPEPEARVPREDRRDNHELVLTIDNPEHVREEPQNVVTGVAVGNGGRNHEAKDGPGRSEDANGTAEIREDGALMPPTRAPSSLSDTHREGRMSIADVLQASLEDELMVARESGLLAGSSGSSRRCHGEHSKDGGGRSGRALPDGANMKRLAPAGRSCFSSRSGRGKDSVLPM

SEQ ID NO: 48844 - protein, 395 aa, Oryza sativa
MGLIRRLIPSGFPAILRRRMRGRAAVFAAVLVVFLVACTAAAAAAAITISRKHQHRPASGAAAKAACDVFAAGSWVVDESYPLYDSATCPFIRAEFDCRRYGRPDKEYLKYRWQPSPPCSTPRFDGVALLRMWSGKKVMFVGDSLALNQYESLLCMLHAAAPNARTTVTPASGKVDPLTTARFEEFNVTIVYYLTHYLVDIVNEKAGRVLKLDAIDQARNWLSADVLVFDSWHWWPRSGPTQPWDYIQEGNTVVKDMDRTEAFSKALNTWARWVDANLLQANTRVFFQGISPSHYRGQDWGDTASATCMGQTRPVNGTAYPGGPIPQQAVLRSALAGMAKPVYLLDFTYLSQLRKDAHPTKYNGGIFGDDCTHWCVAGLPDTWNVLFYAALTGQH

SEQ ID NO: 48845 - protein, 99 aa, Oryza sativa; identical to SEQ ID NO: 34095

SEQ ID NO: 48846 - protein, 95 aa, Oryza sativa
MLAQRNGISRRGLLTFLTSTAAIPEAGESRKALLQEYLKKSKENKERNDKERLDDYYKRNYRDYFGLIEGPARQKNEDELTESEKGILEWLDKNK

SEQ ID NO: 48847 - protein, 92 aa, Oryza sativa
MLAEAECAGELVLEEIAAAAADEGELKETFAVFDADGDGRISAEELRAVLASLGDELCSVDDCRRMIGGVDTDGDGFVCFDEFARMMMYGCA

SEQ ID NO: 48848 - protein, 279 aa, Oryza sativa; identical to SEQ ID NO: 29997

SEQ ID NO: 48849 - protein, 336 aa, Oryza sativa
MRMLSKACSLVASSLPRCSSSAAPTIRGQPSLLPSVRKEWLGKPLLYGIGTLLVMPLRTLHGVGRMFGAGRFLCNMTSVSSSLQIELVPCLQDNYAYILHDVDTGTVGVVDPSEATPIINALEKRNQNLTYILNTHHHYDHTGGNLELKAKYGAKVIGSAKDRDRIPGIDITLSEGDTWMFAGHQVLVMETPGHTSGHVCYHFPGSGAIFTGDTLFSLSCGKLFEGTPQQMYSSLQKIIALPDETRVYCGHEYTLSNSKFALSIEPGNKDLQEYAANAADLRKRNTPTVPTTIGREKQCNPFLRTSSPEIKNTLSIPDHFDDARVLEVVRRAKDNF

SEQ ID NO: 48850 - protein, 341 aa, Oryza sativa; identical to SEQ ID NO: 37198

SEQ ID NO: 48851 - protein, 208 aa, Oryza sativa
MQSCHGNTFFLQVAREQIPKHRLPGKGEPPCRWHRRLRQPLPRHESNHPLFLPPAGPDERRHRCVRSDDGQRGFRVHVRLPGPLVSHRQAEKAPLLGSGFVVDVQQMDRWIDSLVKLLSTILSFQELIMDLFLLVGLASIISAVYVLLLLFSLTARSLFFKKKWFNSMCRWGCSVRQNERNAKRTTFRLGSQSQSFAFIYFLACRSAS

SEQ ID NO: 48852 - protein, 107 aa, Oryza sativa
MPAPAAPHSSRSRSRRTSDASLKKASDDDDLLSRSSSSVMERTCTMIRRALIHRSINAIKSSTEEESRSLCPAWRSRTHSTSSCENHLWRRASSWRRRPNARMSPCV

SEQ ID NO: 48853 - protein, 213 aa, Oryza sativa
MGEEAKAAAAWAEIAVTDAAAVPKPTPPPAAVAVDPRLQGISDAIRVVPHFPKQGIMFNDITPLLLRPGVFKDAVDIFVERYRGMAIAAVAGIEARGFIFGPAIALAIGAKFIPLRKPKKLPGEVISETYVLEYGTDCLQMHVGAIEPGERVLIVDDLVATGGTLCAAIRLLERAGADVVECACLIGLPKFKDFYKLNGKPVYVLVESREYEK

SEQ ID NO: 48854 - protein, 219 aa, Oryza sativa
MAHEVVVLDALTEPWASDLAAMDVMVISAGHWFPHSAVYYDDGEIVGVHGRPDMNRTEMSAPSVYRKVLRRTLEHVINATMADKLELVVVETIAPAHFDGRYSWNHRDACSRQRPYDGDVDGEAKVGDTEAELRKAVLEEVAAAATAARRRCPGLRFEVLDVTRLAAMRPDAHPGVYIYKNAYGGGPVPETAANDCLHWCAPGPVDTFNDILMQMIAGG

SEQ ID NO: 48855 - protein, 202 aa, Oryza sativa
MRDGAAEGGGGGAGGAGAAEGDDETGRWEDHAPATPLHAPVVRRRQRRGGAEAGGGGGGERRRRRGVLPVLRVASRLHREHPQEPGLRDHLRPPRHGGVRDGGGGGVDDGELAVQEAGHAGDRGGGRGVPRRGRRRRRVRVGVQRAHQDRPDVHAGLQRLRRLAHRQHRRGSLLRGRAAGLVRRRMNRRHQQFSIDRNDIHV

SEQ ID NO: 48856 - protein, 317 aa, Oryza sativa
MERKRVLVVGGSGYLGQHLLAALAAGGEVDVAFTHHRDTPPQPLLHALPGLRAFRVDLRSGDGLRAVSESFGQPHVIVNCAAISVPRQCETDPAAAMATNVPSSLVTWLLSFGNDNTLLIHLSTDQVYEGVKSFYKEDDETLPVNMYGKSKVAAEKFIIEQCSNYAILRSSIIYGPQTISPVAKSLPIQWMDSVLSQGQQVQFFNDEFRCPVYVKDMVDVVLSLTKSWLADGKAVQVLLNVGGPDRVSRLQMAESVADVRGYSHSIIKSVSASSVDRGVASPPDISMDITKLTQMLGIKPISFQDGVRATLAAEAST

SEQ ID NO: 48857 - protein, 538 aa, Oryza sativa
MEIERESSERGSISWRASAAHDQDAKKLDADDQLLMKEPAWKRFLAHVGPGFMVSLAYLDPGNLETDLQAGANHRYELLWVILIGLIFALIIQSLAANLGVVTGRHLAEICKSEYPKFVKIFLWLLAELAVIAADIPEVIGTAFAFNILFHIPVWVGVLITGTSTLLLLGLQKYGVRKLEFLISMLVFVMAACFFGELSIVKPPAKEVMKGLFIPRLNGDGATADAIALLGALVMPHNLFLHSALVLSRKTPASVRGIKDGCRFFLYESGFALFVALLINIAVVSVSGTACSSANLSQEDADKCANLSLDTSSFLLKNVLGKSSAIVYGVALLASGQSSTITGTYAGQYIMQGFLDIRMRKWLRNLMTRTIAIAPSLIVSIIGGSRGAGRLIIIASMILSFELPFALIPLLKFSSSKSKMGPHKNSIYIIVFSWFLGLLIIGINMYFLSTSFVGWLIHNDLPKYANVLVGAAVFPFMLVYIVAVVYLTIRKDSVVTFVADSSLAAVVDAEKADAGDLAVDDDEPLPYRDDLADIPLPR

SEQ ID NO: 48858 - protein, 129 aa, Oryza sativa
MCQLGDGRSILFWEDCWMQEGGIRAIAPSIFEHVPVRIRKRRTVAEALLNKAWIRDISGSLGVQAIREYLKLWSLLQNAGCNPSEQDVICWKWDSSGQYSSKSAYRALFLGRVPFQSAPIWKSLAPPRC

SEQ ID NO: 48859 - protein, 554 aa, Oryza sativa
MSSRRSMGALAAVCVCMFVFVSSARAEDPYRFFDWEVTTGNINPLGVQQQGILINGQFPGPEIDCQTNDNLIVNVHNRLSEPFLLSWNGLQHRKNSWQDGVSGTNCPIPPGQNFTYQMQAKDQIGSFFYFPSLAFHKAAGGFGAIRIRSRPLIPVPFDPPAGEYTMLIGDWYKTSHKALQAMLDSGKQLPSPDGILINGKGPNGASFTVEQGKTYRLRVSNVGLQSTLNLRIQDHNMTLVEVEGTHTVQNTYSSLYVHAGQSLSVLFTANRPPGVYQITVSTRFAKRALNSSAVLRYAGSSATISSPPPPAGLADDIDFSLDQARSIRTNLTASGPRPNPQGSYHYGSINVTRTIRLANSAGRVAGKQRYAVNGVSFVEADTPLKLADYYRISDVFRLGGIPDAPPAGAAAAPRSEAAVMDSDYRSFLEIVFENSEDSVQIWHLDGYSLFVVGMDRGVWSEQSRKSYNLVDAVSRCTVQVYPRAWTAVLVALDNVGMWNLRSEDWARRYQGQQFYLRVYTPSHSFRDELPIPSNALRCGRATNASGRSRTLSRY

SEQ ID NO: 48860 - protein, 494 aa, Oryza sativa
MAERRYTEQEEALEISSLRRIIAAYANYHDAAERDVKRYERSFKRLPPAHKELLFNLGLKYQRLRWCISMNASFIMDMLEAFEPPFDMSQHVDMDGHDCAENMHGHCHADCAHSVDRGDCFRSSISVSNSELHEPDGCPRKDDKTHELSRETDNKDEVVDMESCSRPVGDKLGASQVEDKSCNGDKAMDAAANCQDTDCVACSADENVIPQQFMAPSLQLNVPPIDVDKVRCIIRNIVRDWAQEGQKERDECYKPILEELNRLFPNRSKERPPSCLVPGAGLGRLALEISTLGFVSQGNEFSYYMMICSSFILNHTQETNEWTIYPWIHSNCNSLSDNDQLRPVSFPDIHPSSSGITEGFSMCAGDFVEVYNEESQESSWDAVVTCFFLDTAHNIVEYIEIISKVLKDGGVWINLGPLLYHFADSYGPDDDMSIELSLEDVKRVAYHYGFVMEVEKMIDTTYTANMKSMMQNRYRAAFWTMRKNASRSKAQKHQ

SEQ ID NO: 48861 - protein, 670 aa, Oryza sativa
MPVLKTVGRFFRRYPSIFSSLVFLVILYKFFFGWFTFLLETSPIFLFAGFFLGIILAYGEPNIPENDHVYKKIEKAYNRNVRDNSKSTGGVTLPSIASSEERLAKHNNTEKVTNGRSHIGAFSSESGSGESDGSETDTHPMLHTFHHLRSATSSSRSSQDGDSNDSSIEDGNESQEGKDDNEHEEKNGKVVAWTADDQKNILNIGCLEIERNQRLENLIARRRARKYIDRNLIDFGSSDSLPKIEELSKFNVQIPAIFAPRKNPFDLPYNEDNFPESAPSAPLNMLSKFDLPFDEANESSSTGGANSNHVDSTTVFSQSQKDTMFRRHESFTPGASFLSDFWQDTQPSRFRPYFVTEKMANEGISVPNLEGEASEKSSVEDSDSTSSVTDQENHKLVLEDSPNQNLGPQMSQMDEQPHRSQNAREVPLALDIEPPLLISDSSDDDISLPGGNINDREEAQENGNLNLSQNASLEDPSVIEYPHQMEMISNEFHQLSPHSNDNDSLSSSTEATEPPELNSIELPANEVEFINEIPIADPIYDISPSRSEKPASIGSTIDAVLLQEGNTHTSDVEMSMDGEDSVSRIEASEIPAPSLASVQESKPREKETSEVKEQDNSGHDGGNQDSVSHANSKVPMISSKPSISGLSNPVKSGSKMISSSKKAVFGLFKK

SEQ ID NO: 48862 - protein, 840 aa, Oryza sativa
MKMPEPVVLPHFKPADYVDILAQIHEELESCPPDEKSCLYLLQFQVFRGLGEVKLSRRSLQSAWEKASTIHEKLIFGAWLKYEKKGEEPISDLLSSCGKCSQEFKLLDFVSQISTGSHEISYDDESDVFWGSPVVHFRIRDDMIACDRRKLAALSTPLYAMLNGGFRESHLEVIDMSRNGISSIGMRAISKFSLTGRLPYLSADAILEMLDFANKFCCNGLKDACERKLASFICSRQDAIDFMECALELGCSILAAACLQVLLNELPECLNDEQVVRIFSCASKQQRSTMAGNASFSLYCLLSEVSMSINATSDVTVTFLEKLVDSASDSRQKQLALHQLACTRLLRKDYAEAERLFNAAFTAGHLYSVVGLARLASMRGNKHFSLKLLDSVMSSRWPLGWMYQERALYLEGDNKLENLNKATELDPTLTYPYMFRAASLMKRQSVEAALMEINRILGFKLVLECLELRFCCYLALEDHRAALCDVQAILTLAPDYRMIGGRVSAKQLRMLVMENVEQWTTADCWMQLYDRWSSVDDIGSLSVIYQMLESDAAKGVLYFRQSLLLLRLNCPEAAMRSLQLAREHAASQHEQLVYEGWILYDTGHCEEGLQKAEASIAIQRSFEAFFLKAYALADSSLDPSTSATVVSLLEDALRCPSDRLRKGQALNNLGSVYVDCGKLDLAAECYINALKIGHTRAHQGLARVHFLRNSRTGAYEEMTKLIEKARSNASAYEKRSEYCDRELTKSDLQMVTKLDPLRVYPYRYRAAVLMDNHKEKEAIAELTKAIAFKADLNLLHLRAAFHEHVGDISSALRDCRAALSVDPNHQEMLELHHRVNSQEH

SEQ ID NO: 48863 - protein, 250 aa, Oryza sativa
MSGGGGGGGGGGGGSPNNTEWRFNQTLRNVQGMLKGRSFPGKVLLTRRSEPLSPPEYSPRYENDRDEYEQNEGSQEGKGQASGNTADSMSAKKSNPPSTSSTNSLPDAQGLVSGARATDSARIAKFTNELSRPAVILDKLRELSWSGVPPYMRPNIWRLLLGYAPPNADRREGVLTRKRLEYVECVSQYYDIPDTERSDEEINMLRQIAVDCPRTVPDVTFFQHPQIQKSLERILYTWAIRHQQVVMFKE

SEQ ID NO: 48864 - protein, 131 aa, Oryza sativa
MVSTMYKEAAATCGDGEHYSRLIRELCALLAAIISPSSSSSTAAAARSPGMSPAAAATMLLGASVALMLCGSVTFAIGLLLMPWVAGVALLFGLSAAVSTLSSGVFGKAAAAASSPVSHASSDNKPVLVVA

SEQ ID NO: 48865 - protein, 632 aa, Oryza sativa
MAHVSLNCPQLVELDFQSCHKLSDNAIRQAATACPLLASLDMSSCSCVTDETLREIANSCPNLSVLDASNCPNISFESVRLPMLVDLRLLSCEGITSASMAAIAYSRLLEALQLDNCSLLTSVSLDLPHLKNISLVHLRKFAELTLRSPVLSYIKVSRCSVLHRVSITSNALQKLVLQKQESLSSLSLLCNNLIDVDLSDCESLTNAVCEVFSDGGGCPLLRSLILDNCESLSTVELNSSSMVNLSLAGCRSMTLLKLSCPNLQNVNLDGCDHLERASFCPVGLESLNLGICPKLSDLHIEAPKMSLLELKGCGVLSQASINCPRLTSLDASFCRKLMDDSLSQTAEACPLIENLILSSCVSIDLNGLSSLHCLHKLALLDLSYTFLTNLKPVFDSCPQLKILKLSACKYLSDSSLDALYREGALPMLVELDLSYSSIGQTAIEELLSCCTNLVNVNLNGCTNLHQLVCGSDDCSSGDMPVDVCPPDSAPVRSEEISERSDRLLEVLNCTGCPNIKKVIIPSMTTYLRLSKINLNLSTNLKEVDLTCSNLYTLNLSNCSSLEVLKLDCPRLTNLQLLACTMLRDEELESAISRCSALEILNVHSCPKINVLDFSRLRVVCPSLKRIQSSLIT

SEQ ID NO: 48866 - protein, 109 aa, Oryza sativa
MRAFINREGIDFNDAQNMQPVQEWELAENLQGVLEYQTRYSRFQGVANLTLHFPENFGGDTTKIYYIGLRGEATQNKRDVVATIVYEIMPNPSDHKTKSETGGGFSHVE

SEQ ID NO: 48867 - protein, 213 aa, Oryza sativa
MGAGALGVVAMVAAAVVVAMAGANSEGDALSALRRSLRDPGGVLQSWDPTLVNPCTWFHVTCDRDNRVTRLDLGNLNLSGHLVPELGKLDHLQYLELYKNNIQGTIPSELGNLKNLISLDLYKNNISGTIPPTLGKLTSLVFLRLNGNRLTGPIPRELAGISSLKVVDVSSNDLCGTIPTSGPFEHIPLSNFEKNPRLEGPELQGLAVYDTNC

SEQ ID NO: 48868 - protein, 85 aa, Oryza sativa
MVNGRSESVLGRTRKECGWEANSQSIIALLICSDDTSIPTTSSKTSCIYSILSQKKKAAQHYIGVSPLSPKMKISLILIRSRADN

SEQ ID NO: 48869 - protein, 72 aa, Oryza sativa
MRQRQGRSVRSTRRRIQPRAISWINDSNERAQLYVLSCSVFGSISIQRLVCLLCQRSEQGKPDDVDWMNHEW

SEQ ID NO: 48870 - protein, 737 aa, Oryza sativa
MEIEHLGARAAAAAGEDDQSPVEQVRLTVPTTDDPSLPVWTFRMWTIGLLSCAMLSYINQFFSYRSEPIVITQITVQVAALPIGHFLARVLPKRKFTVFGRECSLNPGPFNVKEHVLISIFANAGAAFGNGGAYAIDIINIIKAFYHRSISFPTSLLLVITTQVLGYGWAGLMRKYVVEPAHMWWPQSLVQVSLLRALHEKENLRMTRAKFFLIALICSAAWYVVPGYLFPTVGAVSWLCWAFPRSVTMQQIGSGMSGLGVGAFTLDWATVVSFLGSPLVYPFFAIVNVWVGFVLLVYVMLPIAYWVLNLYQASTFPFFSASLFDHTGEEYRISEIVNDRFELDTDAYARQGKIHLSLFFATSYGLGFATIAATLSHVTLFYGTEMYRRFRQAARENPDVHTRLMRRYDDIPNWWFYGMLALAMVAALLLCTVFKDEVQLPWWALLCAVAVAAFFTLPISVITATTNTTPGLNIITEYVMGLIMPGKPIANVCFKVYGYISMNQAVSFLTDFKLGHYMKIPPRSMFLVQFIGTIVAGTVNMSVAWWLLSTVPHICDKKHLPEGSPWTCPGSRVFFDASVIWGLVGPRRIFGPLGYYGALNWFFLGGLAGPAVVWLLARALPRHAGWIRLIHLPVLLGATANMPPASTLNYTAWCSVGAVFNYLVFRRRKAWWQRYNYVLSAAMDAGVAIMGVLIYFCLSSRGITPDWWGNSDINIDHCDLSTCPTAKGVIVEGCPVF

SEQ ID NO: 48871 - protein, 120 aa, Oryza sativa; identical to SEQ ID NO: 30404

SEQ ID NO: 48872 - protein, 417 aa, Oryza sativa
MGTRRRSARARARPPLAMPLAVLLLFACSSGVAAAAAQGIERIKDDPVGKLKVYVYELPPKYNKNIVAKDSRCLSHMFATEIFMHRFLLSSAIRTSNPDEADWFYTPVYTTCDLTPWGHPLTTKSPRMMRSAIKFISKYWPYWNRTEGADHFFVVPHDFAACFYFQEAKAIERGILPVLRRATLVQTFGQKNHACLKDGSITVPPYTPAHKIRAHLVPPETPRSIFVYFRGLFYDTSNDPEGGYYARGARASVWENFKNNPMFDISTDHPQTYYEDMQRAVFCLCPLGWAPWSPRLVEAVVFGCIPVIIADDIVLPFSDAIPWEEIAVFVAEDDVPQLDTILTSIPTEVILRKQAILAEPSMKQTMLFPQPAEPGDGFHQVMNALARKLPHGRDVFLKPGQKVLNWTEGTREDLKPW

SEQ ID NO: 48873 - protein, 593 aa, Oryza sativa
MAEVTVVRAEREEESTLEQGLLAIPEESNQLTYTGDGSVDFSGNPVVKERTGRWRACPFILGNECCERLAYYGISTNLVTYLTKKLHDGNASAASNVTAWQGTCYLTPLIGAILADAYWGRYWTIATFSTIYFIGMAVLTLSASVPTFMPPPCEGSFCPPANPLQYTVFFLGLYLIALGTGGIKPCVSSFGADQFDDTDPVERIQKGSFFNWFYFSINIGALISSSFLVWVQDNIGWGIGFGIPTIFMGLAIISFFSGTSLYRFQKPGGSPITRVCQVVVAPFRKWNVHVPEDSSRLYELPDGASAIEGSRQLEHTDELRCLDKAATITDLDVKADSFTNPWRICTVTQVEELKILVRMFPVWATTIVFSAVYAQMSTMFVEQGMMLDTSVGPFKIPPASLSTFDVVSVIIWVPLYDSILVPIARRFTGNPRGFTELQRMGIGLVISIFSMAAAAVLEIKRLDIARAEHLVDQNVPVPLNICWQIPQYFLVGASEVFTFVGSLEFFYDQSPDAMRSLCSALQLVTTALGNYLSAFILTLVAYFTTRGGNPGWIPDNLNQGHLDYFFWLLAGLSFLNFVIYVICANKYKSKKAA

SEQ ID NO: 48874 - protein, 199 aa, Oryza sativa
MLFSILNFDGANSRIESALLLLFMLIQLCWTGWLQYVVISQHLVLPMCHCFFLAVHRPVLMISFWRSILKKELIESRQLVRVVSVSEDGPSSAEPLTSMSVASGASTFEVLMTLPKWAAQVLKYLAQETSYKSLVPLGIASVNGTPVCSFDSQDVDWLLFFRTIQDEAIGTSLYPHPPRWSASLAKNRVKGSMVSKPAR

SEQ ID NO: 48875 - protein, 415 aa, Oryza sativa
MAASEQRVVAVIMVGGPTKGTRFRPLSLNVPKPLFPLAGQPMVHHPISACRRIPNLAQIYLVGFYEEREFALYVSSISNELRVPVRYLREDKPHGSAGGLYSFRDYIMEDSPSHIVLLNCDVCSSFPLPDMLEAHKKYGGMGTLLVNKVSAESANQFGELVADPETNELLHYTEKPETFVSDLINCGVYIFTPNIFNAIEDVLKQKKDRANLRRVSSFEALHSATKALPADYVRLDQDILSPLAGKKELYTYQTLDFWEQIKTPGMSLRCSGLYLSQFRHTSPHLLASGDGKRSATIIGDVYIHPSAKVHPTAKIGPNVSISANARIGAGARLIHCIILDDVEIMENAVVIHSIVGWKSTVGKWSRVQGEGDHNAKLGITILGEAVDVEDEVVVVNSIVLPNKTLNVSVQEEIIL

SEQ ID NO: 48876 - protein, 279 aa, Oryza sativa
MSQSKEVRYTARSITPPADRNGTSKSKSPTPVRRSTSRSPPPKKSDSRSPPPRRRSTSRSPRPRRHGRSRSRSRDRSRSRSRDDDLRNPGNNLYVTGLSTRVTEEDLEKFFSKEGKVQSCHVVLDPRTKESRGFAFVTMDSVDDARRCIKYLHRTVLEGRLVTVEKAKRTRERTPTPGKYCGRRGSQRSSRSPSPYRSRRRERSRSRDRQRDRSRSRDRRRDRSRSRDRRRDRSRSRDRRRDRSRSRDRRGSSPHDRDSHRRRGDRSRSPATNGNHKKD

SEQ ID NO: 48877 - protein, 41 aa, Oryza sativa
MTHVIPLLSPTVLCMDYQIKLKLKELKLHQIYLGVHCAMLC

SEQ ID NO: 48878 - protein, 76 aa, Oryza sativa
MTIHKRGKQSLCKGLLGFFVRIHSKPIVLYCYQHHVIYFLTNVFCIWTLHFASSPCTTPSTLCLCLSHGPSLLLKK

SEQ ID NO: 48879 - protein, 63 aa, Oryza sativa
MKSRRTIREGFKVPRAEEQFVKAPRSISLRRGSFLLHHPRIDTLRRHHQDFGDRLIFRLCSHV

SEQ ID NO: 48880 - protein, 85 aa, Oryza sativa
MATTTTTTDRSRRRRRRTDRQTEGGKVIAAAVYIATTARGGGRRRRRVERGRRVGGSEGDGGTRDTQASCMHGNTYVSANLSYYY

SEQ ID NO: 48881 - protein, 408 aa, Oryza sativa
MSIVRGGFTPIDVFAVEWIQSGTIHFGTTVSYFGFVSDVLELSERYQKRFGPLRYFVAGFLKFLCLPKYNFELEYLPISDGGGGEHKIVEGQDKVDASDLYDDVVRRSRVECLPRASSLSSIDSIMSTGIMSGGDLEVSSPHANNEPSELVRALDPKSKRLSLGRTSTFKEPEEVIHPQAHVSSTPNWRRSKSKSRTEKAWPGSGATNDANSSRGTTTHDKEDASSTISDPGPVWDSGPKWDDEPKWDNQPNWEPETPIDLPGPLDDIELGLTKELVPSLDERWTVRKGRYLGVLVCNHSCKTVQSLSSQVIAPKAEYDDNCLDLLLVGGSGRLRLLKFLVLLQFGKHISLPNVEYLKVKSVRLKAGPNTHDGCGIDGELLHVKGQVRCSLLPQQCRLIGRPAKNPVQ

SEQ ID NO: 48882 - protein, 198 aa, Oryza sativa
MYGQGFADHLADVDRWFRTLAHRGVRQLDVDMLYTVPAPLLPGSILEFSSLEILRVFNCNFLDLSLPVLRLPVLRTLDLSNVSMSQGFLQAMMSNCPSLECTKLKNITGLDKICVRSRNLVRLFGDFSYLKELVVEDAPNLEELVGIGLPLAAAKVKIVFAPKLRVLGYLGKSVRPLVIYDTVFDGGIVQFRTLMRSV

SEQ ID NO: 48883 - protein, 344 aa, Oryza sativa
MAPPLLPAAEEDGGCVARWMRRDVLLGLALGQFVSLLITSTGFSSSELARRGINAPTSQSLLNYILLSLIYGGILIYRRQPLTIKWYYYLILGIIDVEANYIVVKSYQYTSLTSVMLLDCWSIPCVIILTWIFLKTKYGLRKFIGVGVCVAGLILVVFSDVHASDRAKGPNPLKGDLLVIFGSMLYACSNVTEEYLVKKSNRIELVAMLGLFGAIISGIQISILERKELHSIKWNAGAVLPFLGFALAMFLFYSTVPTVLKICGATMLNLSLLTSDMWAVLIRIFAYHEKVDWIYFVAFAGTAAGLLIYSYKSSKEAEETAQVAGASDKQGKAGDEEAGMQNSS

SEQ ID NO: 48884 - protein, 206 aa, Oryza sativa; identical to SEQ ID NO: 31802

SEQ ID NO: 48885 - protein, 226 aa, Oryza sativa
MSRSSMAAVFLVVLIAINVVCLSPQGATAAPEGELHKLNLELPPPLPPGKEPSTEAYRFTQQVCGFGTSTFTEQMIGARCYDVLIPYGESFKGNQVKATQVATIILVTKIQALTSEAYAIRDMGIRDENINNCGSFFAIGETFSDTTNSTLYALERLTAAGEGKRSKEDLETVHKWTKNLETQYDETASKCKLGDLFKYGDKKVPTVWVIDLLTTTAIRLLNAIKP

SEQ ID NO: 48886 - protein, 123 aa, Oryza sativa
MRALLNYEAPEIHEAGTFTYRSDVYSFGVVMLELLTGRKPYDSSRPRAEQHLVRWADSQFHDIESISKMVDPSIQGECSEKVLSRFADIISRCIRPEPEFRPSMSEIVQDLARIISVTSEESE

SEQ ID NO: 48887 - protein, 385 aa, Oryza sativa
MGAVSMSTTTRLPLVAALLSAAACVAAAQPATAEAAPETPGVGIKVSFRPSVAIVVGIFTMIFSLTFLLLMYAKFCHPSSPVAAPAPTVVPAAAADDGVAKPVIESLPFFRFAALRGARQGLECAVCLARFDDADLLRLLPRCRHAFHLDCVDRWLESKASCPLCRARVDAEDAALGLKYASSARFVPAGGASESERFDGDQDLLGIFVERVPSSRMEPAAAAHCPDLDRYKHRIVVSDAVFKSRWSEINSSDLIALDTELLRSMETMEVEMEMELYKETEEEETDHDHQRKTLLAASGGRSSVDAAARARMISSSSSSGSVRSMSEMVSLPRLRAAMRERLAHEDRWVPIARRTARWFAGRESRHDEAAPVVDSPPASHSNSLV

SEQ ID NO: 48888 - protein, 353 aa, Oryza sativa
MTEQEHRAYARVGLLGNPSDMYGGKTLSFTISNFWATVHLAPSDDGGPLVIRPHPRHDLVDFASLPQLVTRLQNEGYNGGVRLLMAICKVFYSHCIQHGIALKEQNFTLSYDTNIPRQAGLSGSSAIICAALSCLLDFYNVRHLIKVEIRPNIILDAEKELGIVAGLQDRVAQVYGGLVYMDLGKEHMDTLGHGVYTPLDINLLPPLHLIYADNPSDSGKVHSTVRQRWLDGGEFIISSMEEVARLALDGRKALLDKNYRELARLMNRNFDLRRQMFGDDVIGTVNIKMVEAARSVGAAAKFTGSGGTVVALCPDGEAQVLLLEKACRDAGFLVQRIQVAPSPLPLTEGNPPF

SEQ ID NO: 48889 - protein, 360 aa, Oryza sativa
MADAASSSASASAAVAGTLPVAAAATGKDKEDRRRLVGRCGFAVVGIMSTLLIYGLLQEKIMRVPYGAEKEFFRYSLFLVFCNRITTSTVSALVLTASKKSLDPVAPLQKYCVVSVSNILTTTCQYEALKYVSFPVQTLAKCAKMIPVMIWGTIIMRKKYGGKDYFFAVVVTVGCSLFILYPASMDASPFNRGRENTIWGVSLMLGYLGFDGFTSTFQDKLFKGYDMEIHNQIFYTTMCSCVLSLSGLILQNQMIPAVDFMFRHPDCFYDVIILSSVATASQFFISYTIRTFGALTFATIMTTRQLVSILLSCVWFVHPLSWMQWVGAAIVFGALYTKSFLRSKPQKPAAANPSNSANNS

SEQ ID NO: 48890 - protein, 341 aa, Oryza sativa
MTAGFQLGVIGSLTLSVASSVSIVICNKALISTLGFPFATTLTSWHLMVTFCTLHVAQRMRFFEPKAIDGQTVILFGLLNGTSIGLLNLSLGFNSIGFYQMTKLAIIPFTVMLETIFLKKRFSESIKFSLLILLLGVGIASVTDLKLNLLGSVLSGLAIATTCVGQILTNTIQKRLKVSSTQLLYQSAPYQAAILFATGPFVDQLLTSRSVFAHKYTAPVVGFIVLSCLIAVSVNFSTFLVIGTTSPVTYQVLGHLKTCLVLSFGYTLLHDPFTMRNILGILVAIFGMALYSYFSVRESKKKSAGDPLPVSQMPEKEVEPLLATKDVNGDTKKANGVTHDC

SEQ ID NO: 48891 - protein, 218 aa, Oryza sativa
MTKLFDRAFASSAEDVKSDMEISEKIGLLQHFVRPHHLDIPKLLHNEAAWLLAVKELQKINSFKSPREKLSCIMSCCQVINNLLLNVSMSNDRTLSGADDFLPILIYITIKANPPQLHSNLKFIQLFRRETRLISEVEYYLTNLISAKMFIMNVNGHSLSMEESVFQTHMESARLGNHISVASTNSSQGLGTSTPGQNEESGDTEGLFLTLVDQFVSE

SEQ ID NO: 48892 - protein, 111 aa, Oryza sativa
MASSWRRHLILYPRSTREDGLASRRLDLRGSHGDRGPLGLHPPLLFYHWLLSMLEQQDGMDLMGRNEFVSFDLCVFFTDGLFHSFASNLLFLLTRGKTGLHLLTFCWLLLL

SEQ ID NO: 48893 - protein, 100 aa, Oryza sativa
MLQEYMKGGEQISFLYPSGVDRFKRQFAHLEENYSKGERGSPLQRKHASLPRERVGVSKDGYNQQNTNDQERSADSVARTTVSPPMSQDAQQHGSAGQNG

SEQ ID NO: 48894 - protein, 301 aa, Oryza sativa; identical to SEQ ID NO: 31281

SEQ ID NO: 48895 - protein, 446 aa, Oryza sativa
MAVAPPSPLSLVFVVLAAVSLSASAAAAPASVLPRGAIPTKSGYLPIPPANASLYFAFYEATEPVTPPATTPLLVWLEGGPGCSGFLSNFLQIGPYLLAGGSLSPNPFAWNRRFGLLFIDSPLGTGFSVAPSPAAIPTNQSVVADHVLAALQSLYSLEPSFRARPLYLTGESYAGKTIPAAGALIVATNPTLPEKKRINLRGVAIGNGMTHPVTQVTTHADIAYFMGLINGKQKREVEAMQARAVELIKAERWSEAYVAREGLLKWMENASGVPSLFDVEVTTSLEAEAAALAPLLNGAEAKAALGARGDAEWKMCSAAVGAAQHKDVMKSVKPEVEALLRRGTTPTRVLLYGGIRDVKDGPVSTEAWVRELEWDGLAAFQDADRAVWRHRGGELAGSVQRHGALVNVAVYGAGHFVPFSQGRAAQEMIEDWVFGKGLFGASGGKA

SEQ ID NO: 48896 - protein, 368 aa, Oryza sativa
MSRPHLPKDDHACANGFLFDGVARRPGEIEEAAAFAAAADVAITIAAEQSGSPSSSTAPPMSSCGQYMLHRVGKLDTLAGIAIKYGVEVADIKRLNGLSTDLQMFAHKTLRIPLPGRHPPSTYQQNGSYEGDDRECTPPRRLHDDILDSVLRTPKHKASPAMSLLQGYYGLTPPPKKDTTHEGTEMAVYRKGKSVFLDDDPWFGEPPDSDPFPFQHRKTRSLAIGSSLLNGETEENGDSEKLIRRRQKADGELLPREENGSSAVLARAGKGLALRPKSGSRQDLNKSQQNLIALAEPSFGDGLHAVRKSSSTPEFQEPESNSSSTSSSIWSTSKWTLKPDAFTLPLPLPLFDNIPKPIAAWRNKAARD

SEQ ID NO: 48897 - protein, 318 aa, Oryza sativa
MLRSTHPPPSSPSSSSSGGGGGGGSSASSSSEKTMVGGGGGGGGGSGSAAPSGAKLLQILNVRVVGSGERVVVLSHGFGTDQSAWSRVLPYLTRDHRVVLYDLVCAGSVNPDHFDFRRYDNLDAYVDDLLAILDALRIPRCAFVGHSVSAMIGILASIRRPDLFAKLVLIGASPRFLNDSDYHGGFELEEIQQVFDAMGANYSAWATGYAPLAVGADVPAAVQEFSRTLFNMRPDISLHVCQTVFKTDLRGVLGMVRAPCVVVQTTRDVSVPASVAAYLKAHLGGRTTVEFLQTEGHLPHLSAPSLLAQVLRRALARY

SEQ ID NO: 48898 - protein, 355 aa, Oryza sativa
MWRHAARRSSAQIRRSGVMSSSSSPAAPAAAAGAAVPGPCIVHKRGTDILHDPWFNKDTAFPMTERDRLGLRGLLPPRVMSFEQQYDRFINSFRSLEHNTRGEPDTIVALAKWRILNRLHDRNETLYYRVLIDNIKDFAPIIYTPTVGLVCENYSGLFRRPRGMYFSAKDKGEMMSMIYNWPAEKVDMIVVTDGSRILGLGDLGVQGIGIPIGKLDVYVAAAGINPQKVLPIMLDVGTNNTKLLEDKLYLGLRQPRLEGEEYLSVVDEFMEAVHARWPKAVVQFEDFQMKWAFETLQRYRNRFCMFNDDVQGTAGVALAGLLGAVRAQGRPLSDFTKQKIVVVGAGRIQCWDRCA

SEQ ID NO: 48899 - protein, 349 aa, Oryza sativa
MDDIKSINNCEGFGHSGKANGRLQTHDPSSVVCFHPSKFSKIEDDVQKTSSQNKHAKKMVLDKGAQDVMVSDSTASDYDSMDAGSSWSLSDGDDVESFSDAEIFRYCLDGTHERSKFLRAAAPSVNEDDLIKLANQVSLYSGCTHHRNQILISKQLLQEGADIWSIISKNNERALWSSAVPEMKAKFLEIVHPSNRGLSEQDFEVLRGIAGCGDDIGRDEFDKLWSWLYPVAIALSKDKINRLWDFTAHRWIEGLITLQETENALRSSRDRLMKPGTFVLRFPTTRSWPHPDAGSLVVTYVGSDNSIHHRLLPLDVSDAKSGNLEDLLLKEPELSQLGRVDRLPSSMQS

SEQ ID NO: 48900 - protein, 411 aa, Oryza sativa; identical to SEQ ID NO: 38005

SEQ ID NO: 48901 - protein, 728 aa, Oryza sativa
MDDDDSGIQEEPAPPPPPPPPPPPPPLRRLLTATRSGGSRWVDGSEVGSSESAPWSLDGDRSLRLSVDSAASAGGASGGGGGGGPLSRASSGAFRRRFGKQPRRVDSLDVEAMSVRGAHGHSSKEISMLSTVAMAFQTLGVVYGDMGTSPLYVFSDVFSKVPIKSEVEILGALSLVMYTIALIPFAKYVFIVLKANDNGEGGTFALYSLICRYAKVSLLPNQQRVDEDISSFRLKLPTPELERALSVKESLEKNPVFKNILLFLVLMGTSMVIGDGILTPSMSVMSAVSGLQGRVPGFGTDAVVIVSILFLVLLFSVQRFGTGKVGFMFAPILALWFINLGTIGIYNLAKYDISVVRAFNPVYIYLFFQTNGIKAWSALGGCVLCITGAEAMFADLGHFSVKSIQVAFTAVVFPCSLIAYMGQAAYLMKYPFAVERIFYDSVPEILFWPVFVIATLAAMIASQAMISATFSCIKQAMALGCFPRIKIIHTSKKVMGQIYIPVMNWFLMVMCIIIVATFRSTNDIANAYGIAEVGVMMVSTALVTLVMLLIWQTNLFLVMCFPVIFGSVEFVYLTAVLSKIQEGGWLPLAFSSLFLCIMYTWNYGSVLKYQSEMRGKISLDFILDLGSTLGTVRVPGIGLVYNELVQGIPSIFGHLLVTLPAMHSTIVFVCIKYVPVPYVPFEEGSCSEGLAKRTTICSVVLHGMVTRMSGKRNMASLSSFWLKPWRNF

SEQ ID NO: 48902 - protein, 147 aa, Oryza sativa; identical to SEQ ID NO: 33907

SEQ ID NO: 48903 - protein, 108 aa, Oryza sativa
MLSSNSKQYVAVQDGFKVLKLHYSAPNLHNKPTQARPRWQQRRRPHEVRHGHLPPRRARRAAWPRGEDGVASESVWVGEFMVPKFKVSFADSVVGILGQLGLRLPFSP

SEQ ID NO: 48904 - protein, 801 aa, Oryza sativa
MVDNQGCSPALEPVPTPPNPDPSSISPEAWDPLEAAAGAVVARIQPNPPSEDRRAAVIAYVQHLLRCTVGCQVFPFGSVPLKTYLPDGDIDLTAFGHSSDEILAKQVQAVLESEEARKDAEFEVKDVQYIHAEVKLVKCIVQNIIVDISFNQFGGLCTLCFLEKIDQKFEKYHLFKRSIMLIKAWCYYESRILGAHHGLISTYALEILVLYIFHLFHGTLDGPLAVLYRFLDYYSKFDWDNKGISLYGPISLSSLPELVTDSPDTVNDDFTMREDFLKECAQWFTVLPRNSEKNTQVFPRKFFNIVDPLKQSNNLGRSVSKGNFLRIRSAFDFGARKLGKIIQVPDNFTMDEVNQFFRNTLKRHCSRVRPDVQEIALDFNGERADNDSSPLYSNNSFGDLSDEFNNISISDSSNHGSLRQNGWNYVAENKERKSVSGGLLASKATNPAATNSTGMTNGSDSCEPASPSITGAHSLPSEEGHDALDLFNESESGTKAGIKYGTNPSHHGMSTVSYAGRSHQSFEEVDNDDRGTIDSNWSDLTGDYTTNFNNLLYAQGFHQDYPMNQYYPFGPVYYPIPSPPPARYQNRRSSNGHSRNNVYGYAGTNGIGPAPCPPGYLIMRPYSQIDDSNRARGTGTYFPNPNLSKDRSPSGRGGRGKTHFLPHNHQRPHHYGRADMSADLTPSEELRHIYDPDANDLGIPSSLRISIPSPSSEAPREIVHGNGFIQPPAKKLEFGTLGALPLEVTSQELGINRLNTASDSQPSASASPMSLANNPGISSNQMRNAQPYHLKDNGDFPPLSS

SEQ ID NO: 48905 - protein, 567 aa, Oryza sativa
MASKAVPDVVTDKKCDKTMAASSEMSQSQEVISRGGKLGTASSRETLLGDVATSSGVKEQDKDSCSVDESVKLDGNEDAEKSSLRGSVKDSSASAKGSDRASSLTKVSGSTKVSDHAADIVGSSKSSVYRASAGSDVSDESTCSSICSSASKPHKSNDSRWEAIQMVRTKEGSLGLGHFRLLKRLGCGDIGSVYLSELSGTKCYFAMKIMDKASLASRKKLLRAQTEREILQCLDHPFLPTLYTHFETDKFSCLVMEFCPGGDLHTLRQKQPGKFFPEQAAKFYVAEVLLALEYLHMLGIIYRDLKPENVLVREDGHIMLSDFDLSLRCAVSPTLLKSSNPGVDPNQKGNPSYCVQPVCIEPACIQPSCVTTTTCFAPRFFSSKSKKEKKAKTDIASQVRPLPELVAEPTDARSMSFVGTHEYLAPETIKGEGHGSAVDWWTFGIFLYELLFGKTPFKGSGNRATLFNVVGQSLRFPESPVVSFAAKDLIRGLLIKEPQHRLAYKRGATEIKQHPFFEGVNWALIRCATPPDIPKPVEIPRSVASTSQKATTTAEKGSDNYLEFDFF

SEQ ID NO: 48906 - protein, 414 aa, Oryza sativa
MSNHCVGGGAAGVDDLTDDLIAEILLRLRPSEPACLVRASAVCKPWRRLLTDQAFLRRYRDFHGAPPLLGFLHNVAGGGEDRYVPFTASPVSPPDIACPCWVALDCRHGRALLDEFPFSADFTVWHPMAGRRRRLPRPDLPYFMSYAAAVLCSAVGCNHLDCRGGGPFLVVVVGIDEPEQQNSRPWATVYSSDSDSWSPTTSDYLNLTLTPNCDVDRKPAALVGDALHFALAEGSGIIKYNMGECSLSRIHPPVVYKGGIVVMAMGGNLLGLGGIEGSILSMWSSDVSLDGGVRWEKNRVIKLESLLPSIDCVEAVACELAQPAPIGFVDGADIVFVRTDAGIFMIELKSMCVRKVCERGYFKAVFPYTSFCTPGVHLQQNRVQFSRKRLLELREGDVATGMQSNGKSHKGRQP

SEQ ID NO: 48907 - protein, 422 aa, Oryza sativa
MSVRAVYIQAVLKVITFCCNLYVERLSDSSKEVSVALNGLSMDQTVSGGSDAPIGSSNGQITVPRMMEKDPFSLKSVVHMINLIETTVGPLVECNEVEVLERARNLIGFVYSLREIQELKESKFDDDKHSRVKELVKNMQTVLSHEIGPVSLNAQEKVSLPDDLVLNENLAELVDIISEDDTTLSSSIVFYPRSCGSVETRDEPALSLGSSSLLSEHRKRHGLYYLPTGKAEDGPVDYPHANDPLLPASSESALDDKLKTIQPVTGGKKPKAVKSRPKVVKLDGEDFLSSMVASASVPKEDSLSGAVRGVLLGRDLKPSSSQKASDKAYEGIINKMDSGESSSQWKNNVDADFVGHPTSSSRPSIQQSHDKESTNPLESDGKEARKHRRSRSGHRQGKHKHRERHCTQPDVPQAPIIQDFLL

SEQ ID NO: 48908 - protein, 521 aa, Oryza sativa
MAAAAAEGGGGGGGAVYDRSYVPDSVKTFVAHMYRHVRDKNVYEIHQMYEGGFQRLSDRLFRDAPWPAAEAVSPYCDGDHVFLLLYRELWYRHAYARASSSSSSSAPLTAGQRAESWANYCDLFSVVLHGVVNMQLPNQWLWDMVDEFVYQFQSFCQYRAKLKNKSDDELHQLKQFDKAWNVYGVLNYLQALVEKSMIAQILEREKEGLEQFTATDGYDYQGGSNVLKMLGYYSMIGLLRIHCLLGDYRTGLKCLAPIDLNQQGVYTIVIGSHISAIYHYGFANLMMRRYAEAIREFNKILLYILKYKQYHQKSPQYDQILKKNEQMYAFLAVCLSLCPQHNLIDENVSTQLKEKYNDKMTKMQRFDEETYAAYDELFSYACPKFITPSPPALDQPLTNYNQDAYRLQLKLFLYEVKQQQLLSGIRSYLKLYSTITIAKLAQYMEVDEATLRSILMTYKHKMHAVDNNGKIVSSADFDFYIKEDVIHVMESKPIKRHGDYFLRQILKFEEMIGELEKVQFD

SEQ ID NO: 48909 - protein, 561 aa, Oryza sativa
MAAAAAGGGDGRWCVVTGGRGFAARHLVAMLLRSGEWLVRVADLPPAIALDRDEEEGILGAALREGRAAYASADLRNKAQVAAAFEGADVVFHMAAPDSSINNFHLHYSVNVEGTKNVIDACIRCKVKRLIYTSSPSVVFDGIHGIFDADESMPYPDKFNDSYSETKADAEKLVMKANGRDGLLTCCIRPSSIFGPGDKLLVPSLVTAARAGKSKYIIGDGSNYYDFTYVENVAYGHVCAEKTLSSEDGAKRAAGKTYFITNMEAIKFWEFMSLILEGLGYERPSIKIPVSVMMPVAHMVEWTYKTFARYGMKIPQLTPSRIRLLSCNRTFSCSRAKDQLGYEPIVSLKDGLKRTIESYPHLQAQNQRSISKASIFLGNGNLAKTVLWEDMKQTMTVLLLLAVIYYHLFTCGYTFITAMAKLFSLTALFLFIHGILPANVFGHKVEKLEPSNFHITQVEAHHIAHSVSSTWNSLVGVLKSLCRGNDWPLFFKVVFSLLVVSILSSMSSQSAFKIGISMAFLGFKAYEKWEDTIDDLVGNACSVVTHFVQGQKSSRQKHADN

SEQ ID NO: 48910 - protein, 505 aa, Oryza sativa
MTCAEMMRMISFGHKRPDKQRQDQIGRFGIGFKTGAMKLGRDAIVLTQTSSSRSVAFLSQSFNENKDNLEIPVVTYRKEGQYMEVDSSVQSEATAEYNLNAIKEFSPFNEYFIGEKLGIFGEDGTGTQIYIWNLDRWGADYTLDWSSGKPSEDPVHHGRGDILIRSRRVRLRPGQTSNNVPLDYSLQSYLEVMFLNPRMKISVQGSSVKTRPLAKTLNKTSVISGEIMGRTIQLTLGRSNVEWDRMNCGIFLYWHGRLIESYKRVGGQKHNADMGRGVIGVADITDLIDDEDGNSWVLNSKQGFQDCEMYAKLEEWLGRKADEYWDTNFDTLELRKGSERYKADHEWVQCYSCRKWRILNAGFDTKSLPDEWFCYMPPFNGKCEVAEQQMARGVIVIGEKRSEHDKRDRITQQEEVAKVNARETRSDDSQSQKFTQDEDVKDVKLISTVVNKKRKSSNGTRSMDKNNSEDKHDDAEGDSSQTQPGTPRPVLKRIRRGPARSCKQS

SEQ ID NO: 48911 - protein, 90 aa, Oryza sativa
MRIASPPVIGSCLYGIDTPSEGELISNRMDLEGVRRAIGCDSLAFLSLDKLHTIYGDEAHELCDACFSRNYPVLPTVPEPVPELVSAFED

SEQ ID NO: 48912 - protein, 291 aa, Oryza sativa
MAAPVVDAEYLRQVDRARRHLRALISSKGCAPIMLRLAWHDAGTYDVNTKTGGANGSIRYEEEYTHGSNAGLKIAIDLLEPIKAKSPKITYADLYQLAGVVAVEVTGGPTVEFIPGRRDSSVCPREGRLPDAKKGALHLRDIFYRMGLSDKDIVALSGGHTLGRAHPERSGFEGAWTQEPLKFDNSYFLELLKGESEGLLKLPTDKALLEDPSFRRYVDLYARDEDTFFKDYAESHKKLSELGFTPRSSGPASTKSDLSTGAVLAQSAVGVAVAAAVVIVSYLYEASKKSK

SEQ ID NO: 48913 - protein, 267 aa, Oryza sativa
MLGRAIRSMEVMVHSSTFLLPKLHQPANSPAKKYALVVLNQNLPRFVPRLWTHAKLRICADGGANRIFDEMFQMTNDPDYESTRKRYIPEIIEGDMDSIRPEVKQFYSSQGSKISDKSHNQETTDLHKCISRIHRCTPDHEKTNLCVLVTGALGGRFDHEAANINILYLFSDMRIVLLSDDCLIRLLPKTHKHEIYIESSVEGPHCGLFPVGAPSGSTTTTGLKWNLSEAKMRFGSMISTSNIVHAEKVTVQSDADLLWTISLRNLT

SEQ ID NO: 48914 - protein, 373 aa, Oryza sativa
MVKASMKPYFVAIIVQLIYTGMFVISKAAFNHGMNTYIFIFYRQAVGSLILLPAALLQRKSARQVMTLGVLIKLFFCALIGITLGVNLYHVSLKFTSATVASAVDSSLPAITFFLAVLLRTEYVKLRSSSGIAKVTSVALCLAGVFTIAFFTGPSISPINHHRAFASDAGSKNVVPRGVWIKWTFLMVIANMCWSLWIIFQAAVQKEYPDKMIVTLTQCLFSTVQSFVVAVVAERDFSKWKLRFDISLLAILYSGVMVTGVSYYLQTWCLEMRGPMFFASWTPLCFVFTIFCSSFFLGEIVHLGSILGGILLVGSLYTMLWGKSKEGNETDDVTDDDIEKSTHIYPREQQHTTTDQDKESTLTGSAALHVQEL

SEQ ID NO: 48915 - protein, 91 aa, Oryza sativa
MTNAKMTFAVQFSERYINKYIGSPIDDLMVSMAGTTQSYQMRLKRSKDSRAMLTTGWNQLIDAKAFDEGDVCLFHFKEVDDVLVLKVHVLK

SEQ ID NO: 48916 - protein, 541 aa, Oryza sativa
MSAAHLLRHSRKLRSLHNALDCERSGLVRYFSTASGSFPTKGNGAEKRIGGARFPQRKQPGKELETSKLSLGLNGSYTCRRSPNNFIPNTITGLNGSLSCGQIASARSFSSSADLPPHQEIGMPSLSPTMTEGNIARWLKKEGDKVSPGEVLCEVETDKATVEMECMEEGYLAKIIHGDGSKEIKVGEIIAVTVEEEGDIKKFKDYKPSTLAAPVAPSELKAQSEPTEPKVEEREPSKASELKAPRTEEPSRSGDRIFSSPLARKLAEDNNVPLSSVKGTGPDGRILKADIEDYLAKGCRKEALAAPGLSYTDVPNAQIRKVTANRLLSSKQTIPHYYLTVDTRVDNLIKLRGELNPLQESSGGKKISINDLVIKAAALALRKVPQCNSSWMNDFIRQYHNVNINVAVQTEHGLFVPVIRDADKKGLGMIAEEVKQLAQRARDNSLKPDDYEGGTFTISNLGGPFGIKQFCAIINPPQSAILAIGSAERRVIPGSANGQYEFGSFMSATMSCDHRVIDGAIGAEFLKAFKGYIENPTSMLL

SEQ ID NO: 48917 - protein, 424 aa, Oryza sativa
MGNCCGWGARIKDGSPQPGASGMFSRSGAKDGSRLSGCSSRASSASMPPTAKTECEILQSANVKIFSFSDLRIATRNFRPDSVLGEGGFGSVYKGWIDENTLSACKPGTGIAVAVKRLNQESLQGHREWLAEVNYLGQFCHPNLVKLFGYCLEDEHRLLVYEFMPRGSLENHLFRRGSHFQPLSWNLRMKVALGAAKGLAYLHSSEAKVIYRDFKTSNILLDTDYSAKLSDFGLAKDGPVGEKSHVSTRVMGTYGYAAPEYLSTGHLTAKSDVYSFGVVLLEMMSGRRAIDKNRPQGEHNLVEWARPYLTHKRKIFRVLDTRLEGQYSHVGAQTVATLALECLSYEAKMRPSMEAVVTILEELQESSHVDRKPAAERRQESTTGTGKKAPTANASKNSGKPRRKSLGETREKIGPNPTALVRSH

SEQ ID NO: 48918 - protein, 606 aa, Oryza sativa
MHRVAMAAAAAGDGGDGRGRTLGAVIKEKDEELALFLEMRRREKERGAAAAAAAAEQLLLSGDRVDVARDGMLLVDQPPPRPQPPAEHKAAAYRMTGGFRRAPGGADDFLNSDGGDKNDYDWLLTPPGTPLFPSLEESKKSPVSQTGTPKTRPTALKSRLANHPDPPSRTTLPLRATSSNNLNSAATTRRPSSSGGHTSNSSRPSTPTGRPALTNTSKGSRPSTPTSRATVPSKSGPPAPRSSTPTSRSTLTSARSTTPSRTSGPATRTSIPSGRASAPASRSSTPTSRSSIPATRSSTPSSRPSIPAQSKPVSRSSTPTRRPSATSTQHGSLAAPVRSTSISKPAPTMSKSSSPAKTIASTPSRGSSPTVKSRPWKPSEMPGFSLDAPPNLRTSLPERPTSATRGRPGAPSSRSSSVEPGPAARPRRQSCSPSRGRTLNGSVPSGSSVPAVRRSHLNSGDSVNPVQMGNKMVERVVNMRRLVPPKHDDQRSSLNGLSGKSSNSPDSSGFGRTLSKKSLDMALRHMDIRRSIPNNLRPLMTSIPASSVHSARSGSTRSRPISVSDSPLATSSNASSEPSVNNNLMCLDSIEIDDELCSDRAGQYRR

SEQ ID NO: 48919 - protein, 95 aa, Oryza sativa
MIHLQQALIYHHDESEESDCQVTPSTIYSPPKTATTVCCFLRILSYLYGEKAVTMVKDGFEGTTRHASSYNRAVTRIQASKTLGRLSFRRCQHNA

SEQ ID NO: 48920 - protein, 647 aa, Oryza sativa
MAAQEMEVMMVAMAAEAPVAVEVEAVPAVAGGLNATVPALYVGDLHESVREEHLLEVFGKIGTLTSVRVCRDNATSNSLRYGYVNYLSQADAAIALEKLNHSLILDKPIRVMWSNRDPDARRSGVGNVFVKNLNDLVDNVSLQELFCKFGDILSCKVAKNEDGTSRGYGFVQFALQESADASIQNLNNSHFCGRQLHVATFIKKSERSTNNDDKYTNLYMKNLDDDITEELIKLKFSQYGLVISVKIMKRDDGTSKGFGFVSFQNPESAKRAKESMNGMLLGSKTLYVARAQKKAERKQYLQRLHEEKRNEIITKSNGSNVYIKNINDEVGDDALRERFNEFGNITSAKIMRDEKGISKGFGFVCYNTPEEAKCAVSNMRGVMFYGKPLYVAIAQRKEERRAKLEQRFAELATMVGATSPVIPTGYPQFYFAHPSTHLPQSPGRQGFMYPPIGISQEWRHNMFPSSHNIQQIHSPIMRNTPRQYRNNRGRMNGNMMHFHHTVNYVPHAQPAKEFMSMSRQRFSHAKYIPNDIMANGLAIHHGDSISSMNDAFNNLLATAPPEEQKNMLGNRLYPLVERHHPDLASKITGMLLELGNSEVVMLLYSSNMLSAKIEECVKLLQEVKPKPEDQEALHPGFLLDSAGVNAN

SEQ ID NO: 48921 - protein, 110 aa, Oryza sativa
MATTKHFVLLIILVLLSIGMTTSARTLLGYGIGGEGGGGGGGGGSGGGGGGYGSGSGYGSGSGYGQGGGAYGGGYGSGGGGGGGGGQGGGSGYGSGSGYGYGSGGGGGHY

SEQ ID NO: 48922 - protein, 226 aa, Oryza sativa
MIQLLFLVLVAEAAVAAVLLFKTPLRKLAVMGIDRLKRGRRAPVAVKTVAGVVLALLASTLYSMAEISGRAGGDPESGGGGGGASLSPTDQVLFSRHLLEASLMGYSLFLALVIDRLHQYIRELRGLKKNVEAVTKHNKMLEEAKHGRSEETKKYQEEIGALNEDMKKLKLQVQEKTEEVHVAEDKALAIRKQSESLLLEYDRLLEDNQHLREQLQSIDHRLSSPK

SEQ ID NO: 48923 - protein, 607 aa, Oryza sativa
MSQPAAVAAGAAAGQQPQGRAQAARQAGGGLGQTIAGIVRMAVFWYFAAKFFGPKRPPAEPGMLMSNLFQKGEPLDMWMYLSENEKFNDFSNEDALVWHEANIPYAVWGPTSTRTHTLTYYPSEAIKNNGSLYAHVYFARSGYPVDPTDPEYEQSSAFGRTHPVVAYLRKPKDGKKKSLLGDSSESNEQPPPKENKDSVDKDEGPVEYISYWKPNVTINLVDDFTRYPHNNVPPNVAPYLNVDPSSNNYYPTVFFNEFWLLRDKLIALNETVEELPLNLEVGPISMTKWQIFLQMEQSFQVHRSYGSMLEGEADELKRVFLEGNPYFLGLTMIVSLFHSLFDFLAFKNDIQFWNKNKSMEGLSAKSVVLNFVCQLIIFLYLLDNETSWMILGSSGIGVCIEFWKIGKAMHVEIDRSGKIPMLRFRDRESYAQNKTKEYDAIAMKYLTYVLLFLVFCFSIYSLKYEKHKSWYSWILSSLTSCVYMFGFIMMCPQLFINYKLKSVAHMPWRQMTYKFLNTIIDDLFAFVIKMPMLHRLSVFRDDVIFLIYLYQRWVYPVDKKRVNEYGFGGEDEPQAPQTLEGSDLAAASQQAGAEAEAETSTEDKKTK

SEQ ID NO: 48924 - protein, 416 aa, Oryza sativa
MGCFNSKPNDTGAIRRRPGSIGEVAVFVPGLRVPESSDELPLQPLGDGLPRRLTERLAALRNRIIVMAAHEALYMTKPTWRITITQHGGSKSADLLQALEDYLPTLLGLVKDGSELEDKVQFAWMNQEDDAEDTSMPSAWYEVLSVLHLMALLRLSQANSLLVPKTSIEGYHAKVSEENKRASVEIFLKAAGYLECAIQHVLPKISPEKRKGLPVDLAEGILKAICMQALGQAIDVQLGLAIDSPKATLAVKRRLACEMVKCWQQAHGSISDLPLLDGWAEKHRLFVTWKHIEAKAAAYYYHGLILDEGNSEKSHRTAVAALQSAEELLKESEAACEAFHAASPVSRSPPLWGSMRYLQEKIHKESSCKVRINKDLYNKDNIIIHDHADSAPPLPDFAVALKPDEYRLPPPLTDTN

SEQ ID NO: 48925 - protein, 478 aa, Oryza sativa
MHLSENEGIEGVRFAVTGGQGFVGSALCLELLRRGAREVRSLDLRASSPWSDQLLGAGVRFFQGDVRKKEDVGKALRGVDCVFHLASYGMSGKEMVQAGRADEVNINGTCNVLDACHEHGVRRLVYVSTYNVVFGGEPIVNGNEALPYFPVEDHVDAYARSKSIAEQLVLKSNGRQTKSDKSSRLYTCSIRPAAIYGPGEERHLPRILSLAKLGLAFFKIGDPNVKSDWVYVDNLVLALILASMGLLDDIPDRKGIPVAAGQAYFICDGSPVNTFEFLSPLFQSLDYTVPRVRMDTSVALAISRFFVFMYTLLYPWLDSKWIPQPLLLPAEVYKVGVTHYFSYLKAREEIGYVPMVSPREGLAATISYWQERKRKELDGPTIFPWLFVTIGMLALFSAAYLPPVGPLKWVLDLHLFVFRSKLVIRLVFVIATALHVGEAVYAWFLAKKYDPRNATGWFWQTFMLGFFSLRYLLKRMRE

SEQ ID NO: 48926 - protein, 558 aa, Oryza sativa
MMQILELSYKSLPHHLKACFLYLGAYPEDCVISKVDLIKRWVAEGFVSHSPGQDAWVVAESYFNELVNRSMIQLPYQGYYNEVSHCKVHDMMLDMILMRCKEDNFISVIQDPRAAIEVQDKIRRLTIDLNGAMGDTMDMNITRKVSQVRSLGVFGGSKWIPPLLEFKFLRVLFLEFFLREMIIDLTGINQLSQLRYLKVECKECLMDGDIPSQVSIVLPSQIRRLQHLETLELPWVSKCSIPSISGIIDLPRLTHLVLRQHKGGLPDGIRKLKSLRTLHGFNLPVSSLENIDALGELTSLADMSLHCGKQDTKSTTPGWMTALSCSIEKLGNLKGLYVRSNSPSCCADAMSSWFSPPFLNLEKLDLLDWTFSKVPRWIGQLHSLRELALGGKKILQEDVSMIGTMLPFLTHLSLRIVTCNIAVKEIRIMIEGSIGFAALRFFCFDSNRMSHLEFGVGAMPQLKRLLLALDPWEWDEATPVGLKHLLYLEEIRVLTASTAVASAGSESMNGKSALVKGVFHDAANALQSRPAFTVLPRIRSLSDHVNCCKIIMETVACK

SEQ ID NO: 48927 - protein, 711 aa, Oryza sativa
MEADGAAAAAAAGEASTEAGARPLAPEEEALRRNTDCVYFLASPLTCKKGNECDFRHSDNARMNPRDCWYWLNSNCLNPKCPFRHPPIDGMFGAPTTGMPAVSSHYAPFNSGKQLVPCYYFKKGNCLKGDRCAFYHGPQSVGNNPSEQVVKVSSLPLEQLQTQKNDLLGIKDSVQSTNSIQHGAPITNERGKTAVDRSTVNSARTATVAIPVASNAMSCPKSEKVKSSTPAALKESFTTSSGGDHPECYQNHFPMDSDPVRDWNQSYEMPPADDLPQNSREADELLGESSPGFDVLVDNDADGAAYLHDEDFGGDMYPVEDYEYAPADFDVRAHHERERFNGMDEQDQMGHMYDGYERKRRRSSERSMERPFHSERRFLQRDRDRVEMDGSDLRHRLRRRRINESSLAISPERNGEQRRRDERYRERAHGHRSHRDHHQSSRGSTLSSRLQGRIKLPGRSPDRVDTRSEKERDRRRLRDRLSPVRRTEFQGTRHREAGQHEEQTQRRSSELALGSRNADGQHLTKDVPDSHNFPHRKNSRDSSKANGSVEPEASLDFEGPKPLSVILQRKREAAWANGTSACSPKQDKSAEVSHRQASLAEAEKEGDNIISSDEYKSGSGDEEFRDEGHIPVEGHGQSSSHGDKLEAEDIIEVDPVENQDADNYDQREGESYYEPIEGQDYKSDDEDAYEDDDEEYDDDDDFARKVGVVFS

SEQ ID NO: 48928 - protein, 484 aa, Oryza sativa
MALSTAQTGESMHSSTFASRYVRTALPRFRMPEKSIPKDAAYQIINDELMLDGNPRLNLASFVTTWMEPECDKLMMAAINKNYVDMDEYPVTTELQNRCVNMIAHLFNAPIGDDETAVGVGTVGSSEAIMLAGLAFKRKWQNRMKAEGKPHDKPNIVTGANVQVCWEKFARYFEVELKEVKLTQGYYVMNPEKAVEMVDENTICVAAILGSTLNGEFEDVKMLNDLLTAKNAETGWNTPIHVDAASGGFIAPFIYPELEWDFRLPLVKSINVSGHKYGLVYAGVGWVIWRNKEDLPDELIFHINYLGADQPTFTLNFSKGSNQIIAQYYQLIRLGFEGYKDIMQNCRDNATVLREGIEKTGHFDVVSKDSGVPLVAFSLKDSSRYTVFEVAESLRRFGWIVPAYTMPADAEHVAVMRVVIREDFSRGLAERLITDLTKTVADMDAHAVKKAAAEPAKKTVREIEKEVTTYWRSFVARKKSSLVC

SEQ ID NO: 48929 - protein, 390 aa, Oryza sativa
MATACPPLSLQPAYLSGRSTRARRPPPAVRCSAVGEVMAETAAVGTAEEPLLVSAIKGRKVERPPVWLMRQAGRYMKSYQLLCERHPSFRERSENVDLVVEISLQPWKVFKPDGVILFSDILTPLPGMNIPFDIVKGKGPVIFDPLRTAAAVNEVREFVPEEWVPYVGQALNILREEVNNEAAVLGFVGAPFTLASYCVEGGSSKNFSKIKKMAFSEPEILHNLLQKFTTSMANYIKYQADNGAQAVQIFDSWATELSPVDFEEFSLPYLKQIVDSVKETHPELPLILYASGSGGLLERLPLTGVDVVSLDWTVDMAEGRKRLGSNIAVRGNVDPGVLFGSKEFISKRIFDTVQKAGNSGHVLNLGHGIKVGTPEENVAHFFEVAKGIRY

SEQ ID NO: 48930 - protein, 279 aa, Oryza sativa
MTDGPSTTGDSPPPPPPESGGSISSMVASSAASAAAAAADFTRRGEAFGADMASAARAAMDTAIAHSQSTAIAAAEAASSAKADALAAFPSLTLNAKEEFEWLKKEYTVHEQVVFGKIKEGAIMAIEHPGIAAGSTAIAGIVLFKRPRSYLIQRVRRIFVSKETLLSGIQAGVNHMRQTVNLVSNESQKLLDRAATAEKRFQKGWNTLREEGRAIQSELNQISDIEKQAVGLKSILNQLPRAHASEFQSEISGLASQVKKEKRVLNNTLTKIANYGVPI

SEQ ID NO: 48931 - protein, 270 aa, Oryza sativa
MEDQMANLRLTDFEFFRIILPGSSKTKLKLPYKFARELGDRELREARLRVAGEGRRPWDVKVFDDDVSGDVYLGRGWQEFARAHDLRDGHFLVFRYDGAAAFTVTVFDETMCRRDYRRHHDAAESGSSSSSDSSDAAAAVATAAAEGVGDVALSQFAVTLRQCNLEDKQAQYLNVPMEFQEAHEYARREKVVLRMRGEAWTVRLKHSRRERGQRTAFRYGWHRFCVDNGLAVGDTCFFRVLREGDLRRGGAADDHVLKVAVRKADGTTLE

SEQ ID NO: 48932 - protein, 1058 aa, Oryza sativa
MSRTGGRRRIFDGLPIPADKSYLKEGLSRIDEGWAAARFDSLPHVVHILTSKDREGEIQFLKEQSDLIEDVVDEVVHAYHHGFNKAIQNYSQILRLFSESAESITGLKGEMAEAKKLLGRKNKHLGQLWYRSLTLRHVLSLLDQVEDVAKVPARIENLMAEKQLYAAVQLHVQSMLMLEREGLQAVGALQDVRSDLAKLRGVLFYKILEELHSHLYNNGEYSSVTLSMVDNEELPTSTATGRLVNSMQPLSRRTRSIKGDNHFGASADGIPKTSSVGGSSFDGPDDDSSIDMHESDGGRSRRDSKSISREVPIFLSCATPDEFLESVTKADASLSVKYLRTLVQCLSMLGKVAAAGAVICQRVRPTIHDVITSKIRAYSEETSKSNVNKAANENSDVSHSNGRAARYQLLKQKTKNGVSLMASQLVVSPISPAMAPTGDAQCAASQLLSAIFECLVDILENHITVGELLEQKSSTEVDNANTPHMANGDASWNPDSESSQATGGFTVAFSLSVVQSECQQLLCEILRATPEAATADAAVQTARLANKDPVKEKRDGSEGLSFAFRITDAAITAPNEGQGWRRNSTVPQEGYGTASVIPDQGIFLAASVYRPVFEFMNKIGLMLPQKYWQLGNDGLLAFVNNFLKEHFLPAIFVDYRKCVQQAISSPAAFRPRVHATSVYSPLVENGRPVLQGLLAVDIIAKEVLGWVQLMPNYATELVEYVRTFLERTHERCRASYMEAVLEKQSYILLSRNDVESLMRLDPANLSLQNSFGQLDHSIPDAEAVEVEIELSDLLLDMCPIKQENLIHDDQKLILLASLSDSLEYLADSVERLGESFINSSTMLENKNHIHQGRHTRSTSAIPKSLASLANEYRRLAIDCVRVLRLEMQLETIYHMQEMTKREYVEDQDAEDPDDFIISLTTQIARRDEEMAPYIAESKRNYVFGGISSVAANASIKALAQMKSINLLGVQQICRNSIALEQALAAIPSIDSEAVQQRIDRVRTFYELLNLPFESLLGFIAEHEYLFSAKEYLSVLKVNVPGREMPMDAERRISQILGH

SEQ ID NO: 48933 - protein, 939 aa, Oryza sativa
MTSKNVLTDRTHRDGSRVHKSRQDVNRTVDPKIGCVEDKLQVVASTRNSSSNKSTISPMNRLVAMEMSKGVESKRKPPSVVARLMGLDDDLPAKEPALQSSRRNLRRSHSLDNLAATNRPQQQQEQHYSRTTPNIHIGPKETVEFKDVYEVSEDPLKRHHILGQNFPWERSSGNKSDTRIEAVRQKFMEAKRLATNENLIHSKQFQEALEVLSSNRELFLKFLEEPSPAFLKQLDGLDTTPAPPPTKRITVLKPIKSVENNGIRETRTHQVINEENELVMGKTHQRSYSADDNFSKSTRIVVLKPSPGKPNRTGARLTARAAPSEQTRRIDFHGGLQDDASILGSRELLHGSVQHMPESRHRRDESLISSTYSNGYGGDESSFSGSEVDYIDEGGSPSDSDAVSPMSRHSWDYIRRHNSPHSASTFSRAHSHSPESSVIREAKKRLSERWAMVSYNEINQEQVPLRRSSTTLGEMLSLQVAKKEEAVAGIISVSSNRSSGTENELAMKDACKSTLREYDENGKSSPRNLAKSKSVPVSSSIFDNVAVNAQSANSEGTPKVFTKSGRAKLSFTGKISSFFFPGNKRPTKEKTSLSSDSSGEIFGCIGHMVPQSDHNLGPDEQMAFCKDEADNSTNHAPCSTKDAGSIEVPVSSDCVSGDVDEVKSNGDLKSIHDETSPTSILDTVFEDSNSNEPESSRRTSCTERVALRCPAIDSVARSFSWEDTNSGSPLLGGLKHSNVDDADYDDGELKCYSLVQEIVSSAGLCHLQLSMVFTGWYLPESPLDPALCDKFLDRKEEDAKSRERRSHQKLIFDCVNMALVEIGQDTLLCSYPWSRACLRTWREKLSETLGEEVWNIVSDWLYGDGSFAANKDDNAGIILERIMQEEVEGKGWIKLLTMETDEITEQIASEVLEDIVTDSVEHLSICCSEHGISMPVANL

SEQ ID NO: 48934 - protein, 353 aa, Oryza sativa
MATAAMTKVFVLLFLVAACYLPAHAAAAECDCATDTAGRDKAQALRLKVIAIFCILAGSTVGAALPSLGGRFPAIQPETDVFLSVKAFAGGVILATGLVHILPAAFEALSSPCLVGGPWKRFPFAGMVAMVSAIGTLIVDTVATGYFHRTDAKRKAAAVADEPADDLEASDEHSHGHAHGMSVMSVAPAGEEDLVRHRVISQVLELGVVVHSLIIGMSLGASDFPSTVRPLVPALTFHQFFEGIGLGGCIVQAKFRVRSVVTMALFFSLTTPAGIVVGIGISSVYDANSPTALVVQGLLEAAAAGILVYMALVDILAEDFMKTKVQRRGRLQLAMNVALLLGAGLMSMIAIWA

SEQ ID NO: 48935 - protein, 70 aa, Oryza sativa
MQLLVNIPSCYFMKCKCHGKVIFEVIAMYVRCIFSHLSYFHLIYISTICSSTYLFTISFNQFFTSKVLCK

SEQ ID NO: 48936 - protein, 105 aa, Oryza sativa
MGGAWVMRGCDDLGAVGPEMEESPLGPGVGSSGDRRQHLRDGDEGGQGPATAASSLPPVTVEPPHAASSPLQPPRQCLRTLRHSQQPPRRCPHDCRAATMDRRRR

SEQ ID NO: 48937 - protein, 330 aa, Oryza sativa
MAVHVCLICSSVVGAGRRLRGELRSRAMSSSTNSTVLAESVATGSSVDVELLPFVNDKHGGVIVEMTAPMDPQLFSASLKASLSKWREQGIRGVWIKLPISLANLIQYAVEEGFWYHHAEETYLMLAYWLPATTHTLPVNATHRVGVGAFVMNDKREVLAVQEKSGVLRGLGVWKFPTGVVEPGEDINLGAVREVKEETGIDTEFVEVLAFRQSHKAFFDKSDLFFVCILRPLSFDITKQDSEIEAAQWMPVEEFAAQPFVQKHELVKYILEVGLAKVDKDYAGFSPILIKSAFTDKKSFFYMNRRDLDKASESSSTQKKTEKPLFMEKL

SEQ ID NO: 48938 - protein, 198 aa, Oryza sativa
MAAALRFAARKVSGRALQQATAFVPPSPAVREEQRRLLPRLIPGAGGRMPLLRSFSSAGAAPNNKKHDHLPQSKHIVDVELELSRIPASIRPQVKTWYDRHFPHAEPTVNGESGISNKEPASLRAQVEEKKIELFHLLSQLKYSGENSNLEDERILRQLPPYRELKHLVNGYGIKLVVKRIAIASVLSAIFITAMVKM

SEQ ID NO: 48939 - protein, 84 aa, Oryza sativa
MASPAAPTATEFTQEAARQSLIEISQSLPEKPSAQNLEVKSPSPRAANEDHEDGAEKYRSKLISISYLSPDAQPTPCPPKNVLT

SEQ ID NO: 48940 - protein, 146 aa, Oryza sativa
MAEPPSQSPAQTPPQAAQQQQQGPGESARDDMMACVAALEAALLPCLPARELQAVDRSLQSSHQIDVERHARDFMEAAKKLQSYFISLQREDRPSTEEMLRKDIAIMEEELKTKSELIDKHKKLIEGWQKELKDQLGKHVTELERV

SEQ ID NO: 48941 - protein, 988 aa, Oryza sativa
MATESARPLSGGTGAGKWPPSKDTGSYDSIPASLSEDELAELAFMPNSGGIFGKWRGSVLERSGSAPPTMEGSLVALGHLTGQPSGNLGAILPNLGTEANNSESKENIYYDSACVKYYMSKVNLNPRFPPPLVSRNQFGKSEERKPFSLDDSSSRSLLLGHPTLPTHKEEPEDEKSPSLDSSSADDAQCDSAQSTSNLGGHSPNLVDSIKENFHRSNGLYDNSSDLLNANSGDGGSIYSGISSLKNSSLYVVQSSDLNGFPPDAHQRSPRPIRTPVSTKLTSDSLPASSPPTSSCSDYSTITEACQQRNPSMAVKPGEPVGTMLDSSDFSLKNLNISPDILSSSYVMQQWQKNAPVWNGLSNVVHGDHVPMIPPGINLPQVPFVDNSGFGHMKFPGDVQLMSQIGMATPFCTPNSFGIPCYPNLQSPSVWVPPFGIGGYGLPGPFVPPVITNFTPQLPGFPSAVNLAAATDLFHPYKMYEHLGVPMPSPVPDQSLTHYFQQPPIHPYGVGNPYDTMVSSNNFVGNPAGVFGSPIIDPSEQKFQIPVTTVAANASTPIKGGKPIGNYETASPYFGVPMPYPAGPTLHGQPASGTSPRDKRNDVKGFQPPRKNMPVSSEIQGQKGREKFDDPKAHFSVEELISSRTHRVELADIKGQIVKYSSDQNGSRFIQQKLENCTIEEKDLLFAEVLPHALELMTDVFGNYVIQKFFEKGSPQQKREIANKLAGHVFSLSLQMYGCRVIQKALEVIDLEQKIVLVGELDGHVLRCVHDQNGNHVIQKCIECIPLEHIGFLVSSFQCQVAKLSMHTYGCRVIQRILERCSNNSECLCIIDEILQSACILAQDQYGNYVVQHVLEKGNEHERGQIITKLAGQVVPMSQNKFASNVIERCFEHGGSAERELLVKEILKQTEGNNYLLVIMKDQYANYVVQKMLTTCNEQHKEILLSRVKIHLPLLKKYTYAKHIVSLVERLCGDGAVQSESKKTVTKGC

SEQ ID NO: 48942 - protein, 166 aa, Oryza sativa
MSMDTSPVIRNTNASAVVPSWDNSIAQPLSASRTQGTGAVATNNCSSSIESPSTTWPTSEAVEQENMLRPLRAMPDFAQVYSFLGSIFDPDTSGHLQTLKAMDPIDVETVLLLMRNLSMNLTSPNFAAHLSLLSSCNSGGDPIKSEGMENLGSPQSCHLPFMVTSE

SEQ ID NO: 48943 - protein, 54 aa, Oryza sativa
MASATFLEVLLAIFLPPVGVFLRYGLGIEFWIDLLLTILGYIPGIIYAVYVLVA

SEQ ID NO: 48944 - protein, 349 aa, Oryza sativa
MASIRRPHSPAKQQHLLRHGHLGPFASSSPPSSPLRHSSSSSSPRSAAHHHHHLLAAAGHTSFRRPLPRFAAFFLLGSFLGLLHFLSHLPRPLGPIPNPNSHHRHRDPFPILQHPHPPSTPHSNHKLLIVVTPTRARPSQAYYLTRMAHTLRLLHDSPLLWIVVQAGNPTPEAAAALRRTAVLHRYVGCCHNINASAPDFRPHQINAALDIVDNHRLDGVLYFADEEGVYSLHLFHHLRQIRRFATWPVPEISQHTNEVVLQGPVCKQGQVVGWHTTHDGNKLRRFHLAMSGFAFNSTMLWDPKLRSHLAWNSIRHPEMVKESLQGSAFVEQLVEDESQMEGIPADCSQ

SEQ ID NO: 48945 - protein, 262 aa, Oryza sativa
MVKTVVGEEAQLKALEETLSASASPAQVGLVVGKLSASSDRALAYSLIPTPPTDSGAPACSLLRAAPNPKAAKAASSDASSSLDFDVDWVAEHARQVSRMLLGGMTVIGIYIWASEASFKATSPAVLSQVLRAVSQVAPLYGTGVDERLLIHISYSPRRWACRICDMSSGRLRPCDFKYTKLLASLQTFRCTYNFEIRLPVVQAEPFKKVISKAISHLTKQVQNAKALIDGVLFLDDMDNTLEGPHNVEFLVPFKNNLPAEV

SEQ ID NO: 48946 - protein, 486 aa, Oryza sativa
MDTRLPLLLLLAGVVAAAAPLLATAQLSADFYSSTCPNVEKVVSTVIERKFKEDPTTSALLLRLLFHDCFANGCDASILIDPLSNQSAEKEAGPNISVKGYDIIDEIKTELEKECPQVVSCADIVALSTRDSVRLAGGPNYDVPTGRRDSLVSNREEGDSLPGPDIAVPKLMAQFSEKGFSADEMVVLLAGGHSIGKAKCFFIEVDAAPIDPTYRSNITAFCDGKDGDKGAVPLDPITPDVVDPNYFELVMDKKMPLTIDRLMGMDARTKPIVESMGKKTDQFDATFGKAMTKLSGMKVITGKDGEIRKSCSEFNNPVNTDDGPSVIRISSLNPEEMMGSFAPATGKSPSAASESRKVAPGGAMEERMAAGEAKTDASGGAMAERLAAGEAKTAAAASEDENQAAAGGAAGDEAAAEEEGTKSNKKKAERVTAEVPADEAAPAAKKPRAMGGQSFSMAGAGAGGEPAKKSTAMKSQSFSMAGQPQQ

SEQ ID NO: 48947 - protein, 500 aa, Oryza sativa
MATTQASEAATEKGLPLGMDVSMVDEYASQSKLLQEFVKIPTIGNAWIFNSKTENTSRAIVSVGQTDLLANKKRSFLLNSHISKNSSNSVDFQWSPFPIEMSGVSAVIPSPSGRKLLLIRNSEDDSPTKLEVWGPCQLENEIHIAQSVHGSLYVDEWFEGISWNQEETLVAYVAEEPPQPKPEFNDSGYKKAGSSEKDCKSWKGKGDWEETWGETYSKKRIPALFVVNISSGEVRAVKGIPRTLSVGQVIWAPSSSHSLVFVAWSSDNGYQKTPRKLGIKYCFNRPCALYAVPDPFMEEADKPSLNVSKGETAPTTKLTSELSSAFFPRFSPDGKYLVFISAKSAIDSGTHNATNSMHKIDWPADGKLEGLSVADVVPIVMCPQDGCFPGLYCSGILRNPWLTDGQTMILSSIWGSKEVILSVNVVSREVSRVSPQDSDYSWNVLALDKDNILAVSSSLITVPQIYYGSEVCQTGKPNQWEWQEIATPFLRVLLIRSVQY

SEQ ID NO: 48948 - protein, 194 aa, Oryza sativa; identical to SEQ ID NO: 32587

SEQ ID NO: 48949 - protein, 218 aa, Oryza sativa
MKAIKDRGMNKHCKQKEKSKAACGSKKKQVNRKDQLNPKKYIRGSVLLRHDSNYGSLLGPNRLPLFQVVYSTMRDMLQNLAHFDPNNYSDKHKRSMAALIIHTAETLKNKYISSLVLNSFNPHIGARLQALDDMGAAHINGWSTASELILKSIHLPSKVWDFQQQEFSKCNEFYKNQCWTTDPNVAMKSIVFLKGDAYTDSKLSVKDGDTITISHSLC

SEQ ID NO: 48950 - protein, 354 aa, Oryza sativa
MNYLAKMRKEVGKKINLRSAQTNAAFRKLFNLPPEEFLIDDFTCHLKRKMPLQGRLFFSPRIIGFYSNIFGHKTKFFFLWDDVDDIQVIPPTLSIGSPSLTIILRKGRGLEAKHGAKGTDPNGRLKYYFQSFVSFNDAHRIIMAIWKMRSLSPEQQGDMIEKESDTKELQLEEGGTLFTHEDVKMSEIFSSALSVDVESLMEMFSGGPLEHRMMQKAGCIDYSPTEWELVSRNIYQRQISYKFDKNLSRYGGEATTTQQRYALVNQEGWAIEEVMSLQGVLLGDCFNVQMKYTVVNVPSKPNTCSVQVLLGIAWLKSTKQQKKITKSVISNSSIRLKELFAEVEKDLTSRSGAS

SEQ ID NO: 48951 - protein, 497 aa, Oryza sativa; identical to SEQ ID NO: 37053

SEQ ID NO: 48952 - protein, 158 aa, Oryza sativa; identical to SEQ ID NO: 48829

SEQ ID NO: 48953 - protein, 250 aa, Oryza sativa
MFCNIPPELFLQIFKFLSSEDLISCALVCRFMNVVASDETLWRRLYCKRWGLSCNTKLRECAWKKLYIQQDREDMVEFVRNTPTEFKEYYIQMQASKRSQAPLPSEVNDDKVILDKTIADQVSSWKSSRGLTDDAVKGHSCSGNTCSYTQIGDAYICEKTGRVHVCDDACREFVLDQSSGLLLCTISGHCFERWLCPDDEWDADDDTDLQQAGMTDEAEPFMGSGRFARAYQLGYSCADEKELEYDLRFC

SEQ ID NO: 48954 - protein, 42 aa, Oryza sativa
MCVERSRRGAAVANLRRVERRGSRRLKRGATSSFHLYLSTKL

SEQ ID NO: 48955 - protein, 443 aa, Oryza sativa
MLAFAVIVSPSAWPRAVSSAFAAAVFAFLDVVDVLLCFVYGFLDAVFEDSPVSCYCHGSHSAAALDDDDEVSDTLYHRRSALRDALMGLVRGRSGGSPETETERRKGRSPRWSDCGCDSCRAWQRHDDGRLHFVANQPPPPPNDGAVTTTQQSGEEDAIFIHGFTSSSSFWATVFRESSILNNCRMLAVDLLGFGKSPKPANCMYRLKDHVEMIERSLIDPLNLSSFHLVSHSMGCIIALALAAKHPERVRSITLIAPPYFGACEEKASQVALKRLAEKKLWPPLQFGSAVMSWYEHIGRTVCFLVCKNHLLWERLFRLITGKRDVDFLLGDLTKHTHHSAWHTMHNVICGGAMLQDRNLEAVEAAGVPVQVIHGGDDQVVPAECGRHLKAKLPGAELRLMEGCDHKTVVFGRERGFAEELRAFWSASHQNKQLAASASGWAG

SEQ ID NO: 48956 - protein, 548 aa, Oryza sativa
MKRVSSHVSIASEAEINLDLSRLLIDKPRLTLERKRSFDEQSWSELSHRQNDGFDSIMHSPAFPSGFDSPFSLGTLGDPHPLVNEAWEALRKSVVYFRGQPVGTIAAVDHASEEVLNYDQVFVRDFFPSALAFLMNNETDIVKNFLLKTLHLQSSEKMVDRFKLGAGAMPASFKVDRNRNRNTETLVADFGESAIGRVAPVDSGFWWIILLRAYTKYTADTSLAESPECQNCMRLILNLCLSEGFDTFPTLLCTDGCSMMDRRMGIYGYPIEIQALFYMALRCALQMLKPDGEGKDFIEKIGQRLHALTYHMRNYFWLDFPHLNNIYRYKTEEYSHTAVNKFNVIPDSIPDWVFDFMPCRGGYFLGNVSPAMMDFRWFALGNCIAIISSLATPEQSVAIMDLIEERWEELVGEMPLKICYPAIENHEWRIITGCDPKNTRWSYHNGGSWPVLLWLLTAACIKTGRPQMAKRAIELAESRLLKDGWPEYYDGKLGRFIGKQARKFQTWSIAGYLVARMMLEDPSTLMMISMEEDRPVKPTMRRSASWNA

SEQ ID NO: 48957 - protein, 307 aa, Oryza sativa
MTRVITLSYTHLPSHLKPCFLYLSIFPEDFPIKRRCMVNRWIAEGFVDAKFGMAMEDVGNSYFDELINRSMIQPCRFYSHGVVQSCVLHDIMRDIAISISAEENFVFMTKGFVSGIPPENIHHLSIDGRQDSYLSFDLSHVRSLSFFYNPKEQLASLCSPQLRMLRVLDLEFSLCRVTQNDISNIGSFCHLRYLSVKKGSYIYHIPRSIRKLQGLQTLNLKRSLITKVPAEVTELRSFRSLRCSTLGVYSHFEFTTREPKKSLVTTMKLPLILPHLISGDKSSEVVAEFRKGERTKRNREPEGVTDS

SEQ ID NO: 48958 - protein, 169 aa, Oryza sativa
MEGARLSGASRIIGVDLNPAKFEQAKKFGCTDFVNPKDHSKPVHEVLIEMTNGGLDRAVECTGNINAMISCFECVHDGWGVAVLVGVPTKDDVFKTHPMNFLNEKTLKGTFFGNYKPRTDLPNVVELYMKKELELEKFITHSVPFSEINTAFDLMLKGESLRCVMRMDE

SEQ ID NO: 48959 - protein, 163 aa, Oryza sativa
MASSSGSGGSAVSAATAAAGGSSSAAEEELRALMEQRRAKRMLSNRESARRSRMRKQRHLDDLTAQVAHLRRENAHVATALGLTTQGLLAVDAENAVLRTQAAELAARLASLNDILSCINTNGAAAAAAAALTVAAATDPLLAFDSAAFDDLFRSSPELFQLC

SEQ ID NO: 48960 - protein, 301 aa, Oryza sativa; identical to SEQ ID NO: 31281

SEQ ID NO: 48961 - protein, 803 aa, Oryza sativa
MAVEAEAEVEVEVEAGGCLLQSFELYEAESKFYILGTNTGKTSWKVLKIDRIEPSELNIDESSTVYSHSGYLDLLKVLDEDHRSTGGVKFVTKCFGIIGFIKFLGPYYMLIITEQRKIGAIFGHPVYQVTRTAMIELSNSESRAKFLNSKDEDRYKKLLQTIDLRKDFFFSHSYNIMRSFQKNFNDPKEGWDLYDTMFVWNEFLTRGVRNILKSTIWTVALVYGFFKQDKLAISGKDIMLTLVARRSRHYAGTRYLKRGVNDEGSVANDVETEQIIFEDMLGPKQISSVVQNRGSIPLFWSQETSKLNLKPDIILHEKDKNYEATRLHFENLRIRYGNPIIILNLIKKRERRPRESILRSEFDKAIKIINNDLPGENHLRFLHWDLHKNSQRKSTNALQMLLKVAFEALNLTEFFYYQVPPARRAESSFNLHAPLKNGFGPHECDDSNNDDITDCIDNIDDMSQEDTCGSSDTSGNGTAEDIAEGNGSISVKPPKFQKGVLRTNCIDCLDRTNVAQYAYGLAALGHQLHALGSIESPELDLDSPLAHHLMHFYERMGDTLAVQYGGSAAHNKIFSAKRGHLKFAIQSQEFFRTLQRYYSNAYMDAYKQAAINLFLGYFQPCEGEPALWELEPVAGEGVLGENASKLMKRARSDGSILRKSNASMSSNGRNGVLKSSFIDSKSELQSPNSSSDAINEISSAPDNTVTVSKSRYTPTEPHVKHVSCELDYCNGSGDSNFLDIDWLSSSDNERPTTISTPDVNASADSVSAGVSSRRTEDHAAEIQAQGLSERFVQWIDQGETFWF

SEQ ID NO: 48962 - protein, 187 aa, Oryza sativa
MADQLSEEQIGEFREAFSLFDKDGDGSITTKELGTVMRSLGQNPTEAELQDMISEVDTDSNGNIEFKEFLGLMARKLRDKDSEEELKEAFRVFDKDQNGFISATELRHVMANIGERLTDEEVGEMISEADVDGDGQINYEEFVKCMMAKKRRKRIEEKRDHDGGSRTKSAGPSAAPASKRGQKCVIL

SEQ ID NO: 48963 - protein, 89 aa, Oryza sativa
MADNFDFGGMYLILSFCFLVKKSRIYPYVFFHAVLPTLCYKLHQAYRCSPTISNKGLGILIFLLDPKSHERVCICVLYLTMCDSLKIES

SEQ ID NO: 48964 - protein, 238 aa, Oryza sativa; identical to SEQ ID NO: 31892

SEQ ID NO: 48965 - protein, 172 aa, Oryza sativa
METPPENYRTNVGICLADPSLTKIFTASRIDIANTWQMPQGGIDAGEDPREAAFRELREETGVTSAEMVAEVPVWLTYDFPVDVKEKLNARWGGTNWKGQAQKWFLFRFTGKEDEVNLNGDGSERPEFCEWTWMTPQQVIEKAVEFKKPVYEAALKHFAPYLQSDPATTTSS

SEQ ID NO: 48966 - protein, 771 aa, Oryza sativa
MSKVLERRNSFGGSTPTSSASGSRKDEKTTPHYLRASTGSCHNLCKYGHKNPFEEEKKLSTSGGRRKKLPSHLNNLTLHRSAILDRSKDVRQRNLSLAKSSISLGESDRIAPKKTQANLKGSSDHLITRTSSSADHKNVNLDGRKKHLTVAQKTSADSGSSNGVPKFDKKSAMPVKGTIVPAKLKLAEMPQLEESRTMEKVTTVKQSSIKRPTSLPTKLNLIKQVPVPSQVSSHLLSSKAKRTVKGELTSSPATVTGVRRSNSDKTGRSSMNSSKPSINGKEGLHMARSSFSVESKMDVSVVIQEHDVQDSFIRGLHVESTLAGVSSDTTECVDESRSAPEEIIRPVSGDDGMESNRKNEASGGNEEPLQSSIVTGLLQSSDDQQLKNALSNLEAEENQTDDASPCQSSKNSIAVENAVLGDSLSTENSSEIEADGVKANASMESQDAEGNEEEEAHEGLQESIEQLALGEKHAKEPGSFLGSTSGNTVEDVKADEIFEGWTNNSPSHCQPISETSSDGELLGEPKSVQIQPSDSTLQTDGLVISSTGNTFEQDELKPGFFLQQSPEELSEDEFYEEYDFELSELDESGTEDEGPTINKNSYDHLKADGQRPKRISALEQDDDSATPYKLKFKRGKIVELQPDSNGPRKLKFRRRSASEFSSSEGLSARRIYKMNSTIDAGPSNLDVESPGVKLRHQDTQEKKDAQGLFNNVIEETASKLVESRKSKVKALVGAFETVILLQDGKPASTPHAGNSPHLFHDDEGNASEQAA

SEQ ID NO: 48967 - protein, 258 aa, Oryza sativa
MVPWEGYVSDETMGTFAPIALYWVYAGGYQLVLHRRPLERYRLHTRAEEEEKNLVALPAVVRGVLLQQLVQAIVAMILFMVTSDSSAVVVQPPIIIQAFQFLVAMLVMDSWQYFVHRYMHQNKFLYRHIHSQHHRLIVPYAIGALYNHPLEGLLLDTVGGAISFLVSGMTPRTSVFFFCFAVLKTVDDHCGLWLPYNIFQSLFQNNTAYHDVHHQLQGSKYNYSQPFFSIWDRILGTHMPYNLVRRKEGGFEARPLRD

SEQ ID NO: 48968 - protein, 209 aa, Oryza sativa
MGRGKIEIKRIENSTNRQVTFSKRRSGILKKAREISVLCDAEVGVVIFSSAGKLYDYCSPKTSLSRILEKYQTNSGKILWDEKHKSLSAEIDRIKKENDNMQIELRHLKGEDLNSLQPKELIMIEEALDNGIVNVNDKLMDHWERHVRTDKMLEDENKLLAFKLHQQDIALSGSMRDLELGYHPDRDFAAQMPITFRVQPSHPNLQENN

SEQ ID NO: 48969 - protein, 213 aa, Oryza sativa; identical to SEQ ID NO: 32992

SEQ ID NO: 48970 - protein, 181 aa, Oryza sativa
MSTSERSYGSKDGYYSEEEDSFLDMLVAALKAKLCVRAARWVSQQSGMEWVMETMENPSQCQAIFRLMPDQIHALFGLLTNRYNLHGSIEVCPMEALGIFLYIMAGGNSNRATNNRMNDEEFQPFAGAAGAVDGAHIHCIVAVDDSIQHRNRHHITSRNVRRYWIGRPCHFCRCWVARVCA

SEQ ID NO: 48971 - protein, 131 aa, Oryza sativa; identical to SEQ ID NO: 29691

SEQ ID NO: 48972 - protein, 1018 aa, Oryza sativa
MDCNKDEAVKAKALAEKKMREKDFAGAKRMINKAQNLSKDVDSNISQMLTVCDIHCASATKVNGEIDWYGILQVPVTADDTLIKKQYRKLALLLHPDKNNFAGAEAAFKLVGEANMTLTDRSKRSVYDMKRNASVRIGSARVPYQQSRRTAPVRPTTTPVNLHNVHQSQQHKPSNPSDSQTFWTICPTCGMRYQYYLSILKKALRCQNCLKPFVALDLNEQAVPSGANQRSAGVWKSSGAPQNFPGSQANVGQQAQNSANPVHANFGSHNAHVETKRGADGNEAGGLKNKRKFAKATGNSSKASSVAGSKKRRKAMFESSESSASDTSTDSEEEIIEDGPAASNVGPDQHPRRSSRQKQEVKYNEDSDGDDTDCHGNGDDGFVSSPSLKRLRKGGLFHGGENNETKLNADTTGPGHDGPTNGVNNYNNTEDIERGSACAEQIKRETMSGGGNSAEKEKLSHSVSNNGLESNSDDAPNEVICADSEFFDFNQLRHINQFKANQIWACYDSQSCMPRYYARITKVKHVPKFMLNFIWLEFDPKNKAEAAWSSGDLPVSCGRFKHGVSDTAKESSMFSHAIFYEKNKTRNSYEIYPRKGEVWALFKGWDIDWSADADKHKNYEYEVVQVLSDLTSSTSIIVMPLVKIKGFVSLFIQSKEASPYVIPQDDTLRFSHCVPRHTMIGTEKEGIPEGAIELDPAALPLNFGVAFASVVPESCCSVKVQGSGAEHIGSSSGNNCHKGSVDVGESQHATCANTGFATRTTKAEINEHNARSAVEGTDDDEEPDDFAQAEVLYPESEFFEFSEIRSIHKFQPGQIWALYSDVDKFPNYYACIKTVDVKNNELQVRWLDACPQSEEERRLVREDLTVACGTFKISSFHGIQTYNGTEYLSHPVQAKPGRRNEYEIVPCQGDIWAVFKNWRTGWTAKDYKKCDYELVEIFGHTDSSIQVQLLRKVDGYRAVFMPDRREGAVKTIRKDEYPKFSHQIPCFHLTNERGGKLRGFLELDPLSVPEMFLFTESI

SEQ ID NO: 48973 - protein, 93 aa, Oryza sativa
MRRKVLLVSLLNCLYPALPSYHIQVNCSFSLHMVHPKLPEYMPCDTSYFLRARVDDIAICMTVPFGYMPRMASVCTPSLRSNTICLEGLHYSR

SEQ ID NO: 48974 - protein, 224 aa, Oryza sativa
MRGAAPPPHPPPPPPPPGACRRATVSSHDDGSAFSRSIGRSPQLLDCHGLRFDAWVVVVDVCGCWLRSVHGVRRRGRGGRGGGGGARRRGGVQLPLLRRGLRLRRLLLPRRRRARRRGQERGICHILPSDTDCNRQYQIVVFVIGWILGPGLGFGNVQFVGTRANFFFRTGCLRRYQQVSTVTNQDQRKLAGFRSWNFGLFGWSYKIGCFGVWVGVFVCLIGEK

SEQ ID NO: 48975 - protein, 46 aa, Oryza sativa
MDGKDSTTTPAPAPAPAPAPAPAAEPQTTGNAPPSPETASDDRIER

SEQ ID NO: 48976 - protein, 624 aa, Oryza sativa
MGVRGGGSALGRAGASSSKRTKQGGRGGAKRTKQGGRQRATEPGDAHQVFDRLLKRGDRASIFDLNRALSDVARASPAVAISLFNRMPRAGATSAAPNIATYGIVIGCCRRLGRLDLAFATVGRVITTGLRMSPILFSPLLKGLCDRRRTSDAMDIVLRRMPELGCKPDLFSYTILLKGLCDDKTSQQALDLLHIMADHKGRCPLDVVAYTTVINGLLREGQLDKAYSLFDAMLDRGPSPDVVTYSSIISALSKTQAMDKATQVFTRMVKNGVMPDCIMYTSLVHGYCSSGKPKEAIGIFKKMCRHGVEPDVVTYTALMDYLCKNGKSTEARKIFDSLVKRGHKPDSTTYGTLLHGYATEGALVEMHDLLDLMMKKGMQLGHHIFNMIMGAYAKHNKVDEALLVFSNMRQQGLNPDIVNYGTVLDILCTAGRVDDALSQFNSLKSEGLAPNIVVFTTLIHGLCTCDKWDKVEELAFEMIDRGICLDTIFFNAIMGNLCKKGRVIEAKNLFDLMVRIGIEPNTNTYNTLIDGYCLDGKMDEAMKLLGVMVFNGVKPSDVTYNTIINGYSQNGRIEDGLTLLREMDGKGVNPGIVTYEMLLQGLFQAGRTVAAKELYLRMIKWDTV

SEQ ID NO: 48977 - protein, 432 aa, Oryza sativa
MLGDQRRKFLLESASSSSEEVVSRSRNLAVESSAVAVTAAGVRKGEEVEEEELLNRRSKKNKVASDSGNSGTGVWDSEMQDADQNGEANTSELIGAIGRELAITCLLHTPRSYYGMIACLNRSFCSLMRSGQLYRLRREARIVEHMIYCSCNVLEWDGFDPCRQRWFNIPSMPPIECFTLADKESLAVGTNILVFGKKVEAHVVLRYSLLSNSWTTGDMMNSPRCLFGSASFGEKAIVAGGIGDNGTLSSAELYDSEAKTWTTLPSMNRARKMCSGFFMDGKFYVIGGKADNHNEILNCGEEFDLEKGTWRLIPDMASGLNGGSGAPPLVAVVNNELYAADYAEKEVRRYDKVNNAWITLGSLPEKYTSVNGWGLAFRGCGDKLIVIGGMSAPGGGVIEICSWIPNNGQPDWKIIGSRRSGSFVYNCAVMGC

SEQ ID NO: 48978 - protein, 101 aa, Oryza sativa
MFAIKYDLVANHTKHGIEKPLMTCCGHGGPPYNYDPKKSCTANDKDLCKLGEKFISWDGVHFTDAANEIVASKVISGEFSIPRIKLTASVVRPKKAKNSRL

SEQ ID NO: 48979 - protein, 305 aa, Oryza sativa; identical to SEQ ID NO: 30954

SEQ ID NO: 48980 - protein, 489 aa, Oryza sativa
MPWVYHPQLELLAVPQQPESCPMAAAVTQPESPAMAGVDRLRLDGAMPPSYPSSWSVLPREVVVVDEIDDGEELRRWNILRCDRRAGYGVCEAVVEGVKLGARIVSDRGFSALCIIVSKAARAGTRGQVCAAVLAIKNHVIVLSVAFPRGDLFHSLKCACSSFYLVYDASDASITMIPDLQFSFHHHKVSSAVTKEPLPIACGVAHYLVLLGRAMTIKGMDQHIEDRVCLSPLQQSSLAHPSPSSSTNCSLWMTKSAIFPKEVVTRGFSANKMLSFDGLAMWVDLHQGILFCQHYDLFSNSNDSGSVPFYFVDLPPGCCNDDITTRPLSDSYPPEMYRSIVCVGDSIKFVTIEGYLRDSTAPIEDRMVTMWSLRPQESWSWRKDRDLSIGGICAQLFKKIPICATMLEPMPNMAPQSPILSTEDGSLHLLIVNDNSNEMLENQNIMVTVDMSKGYVISACLLPTDFGDQLPGLYGVMLPRMLGSNFFRF

SEQ ID NO: 48981 - protein, 272 aa, Oryza sativa
MQYQPLDSSGTDDDLPPTYQPRGPRVIFNGNGSLPQPNLHSNVDREIRQIEQQAYTGVLRAFKVQSDAITWEKESLITELRKELQISDKEHRVLLKGVTEEEAVCRIRQSRQTGGTQSSSHHSSVVHTPVPAKRQKKSHSVPVTPQAPVITMHAVVGKKGGRQASDRVLKRLPSNNSPMLGSSRRRGRLHPNELIKGYSPLDGFGIPNTGNVVMEVEKVLSNPNMLEIEKAMKLLRDQEQSLLDAIARLDEASDGENEDIVLVASQLGTTVA

SEQ ID NO: 48982 - protein, 428 aa, Oryza sativa
MAQHTLHRWIQCDGCGVTPIAGSRYKSNIKDDYDLCNTCFSRMGNVNEYTRIDRPSFGSRRCRDLNQNQMLFPHLRQLHDCRFIKDVTVPDGTVMAPSTPFTKIWRIHNNGSSMWPYGTCLTWVGGHLFARNSSVKLGISVDGFPIDQEIDVGVDFVTPAKPGGYVSYWRLASPTGQMFGQRVWVFIQVEHPVKTSSNKQSAAINLNMPPEGSNTEWKHSVDANIQSADIVGKYSGSTITDPLAHALYHEATKRMEPELVSSAVPSVPRAFESVLVPATDLLTSSAGAEKASKPAATPGPAPQAVPLPKPVSIPASGPAPAPVSATTAAPVGAAAAPISEPTAPAAAIGMPSATARAASCLPTEPSSDHISAVEDNMLRELGQMGFGQVDLNKEIIRRNEYNLEQSIDELCGILEWDALHDELHELGI

SEQ ID NO: 48983 - protein, 235 aa, Oryza sativa
MLPIEDIVTWSNRIGAKVLVDACQSVPHMPVNVQRLGADFLVASSHKMCGPTGVGFLHGKFDLLSSMEPFLGGGEMIADVFQDKSTYAEPPSRFEAGTPAIGEAIGLGTAIDYLSQIGMQKIHEYENELATYLYESLIAVPNVRIYGPAPCQTVHRAPLCSFNVENVHPTDIAEILDLQHGVAIRSGHHCAQILHRTLGINASARASLHFYNTKEEVDVFVDALKDTIDFLTSEH

SEQ ID NO: 48984 - protein, 328 aa, Oryza sativa
MWVEILCGLLAYKIIRRVFFADSDDPAHLADLDSAHSDLCFALASRLEKLYSARCFVGLRIPDPDAGERQHVDLVLLTNREVMVVAIHNISGFVEVDKDGNWTCPSDKKNKHGVIPNPVLQVNRLAANLQSYLEKRGAKLPDGHITGKIVLPNPNCRPSYAITLQPEVILYDQWKDLKADSKGGLSTWIKGAFSGSKGDMQDSLLQNLHFILSTSPMWDRLELKGDRNILGEFIEFKGRHDDIQALKCLKRSKVCRFIVQKSTLFGGFGRSRVQILYSPRDYRAEGTSSSEWKEISVKQYTEILFQPLHSKKVKKFKLSSVASVTLSA

SEQ ID NO: 48985 - protein, 166 aa, Oryza sativa
MECLLGLLKVRVMRGLNLAICDPLTHSSDPYVVLRHGSQKVKSSIRYHSINPEWNEELTLSITNMMLPVKIEVFDKDTFTKDDSMGDAEFGILDFVEIAKQDHSHLGDGAVMKTIHPDKENCFAAESHITWKDGKVSQDIVLKLRNTDTGEIILHLQWVNIPGVSR

SEQ ID NO: 48986 - protein, 188 aa, Oryza sativa; identical to SEQ ID NO: 45320

SEQ ID NO: 48987 - protein, 461 aa, Oryza sativa
MAATLLPTLSPPASRAAAALLLRRAPPFPSPLPAPLLRLLLAPAPSPPLRSSPTFRSLATMPSAAAAADLLMLGIETSCDDTAAAVVRGDGEILSQVVSSQEDLLVRWGGVAPKMAEEAHSLAIDQVVQKALDDANVSENDLSAVAVTVGPGLSLCLRVGVHKARKIAKSFRLPIVGVHHMEAHALVSRLVNKDLDFPFLALLISGGHNLLVLAHGLGQYVQLGTTIDDAIGEAYDKSARWLGLDMRKGGGPALEQLALEGDPNAVKFSVPMRQHKDCNFSYAGLKTQVRLAIESRNISTDDIPISSATKDDRQIRANIAASFQRVAVLHLEERCQRAVEWALKMEPSIKYFVVSGGVASNQYVRTHLNQIAEKNGLQLVCPPPKLCTDNGVMIAWTGIEHFIAGRFDDPPAVDEPDDMQYDLRPRWPLGEEYSEGRSASRSMKTARVHPSLTSMIQGSVH

SEQ ID NO: 48988 - protein, 278 aa, Oryza sativa
MACRGFFEWVLKLLNLVVMVVGLAMMGYGAYLLVAWLQLLPSPPPLPPAPAVAPGGGGGGEMVRLGRPLLLLLDVSSLPDGTAERLSAAWFIYAFIGVGVILFITSIFGCAGASRGGCCLSFYSFLIILFILVELAAGGFIFFNHSWKDVIPVDKTGNFDMMYSFLKENWRIAKWVALGAVLFEAVLFTVALIVQSGNQADYDSDDEYIAPRSSTRQPLVNKQPVADPRVPNLDYRPIRNDAWSQRMREKYGVDTFDPNRFQQATISPAEQRNRCAIL

SEQ ID NO: 48989 - protein, 167 aa, Oryza sativa
MASPSAPGPKLQKAMVAVDESEFSHHALEWALRNLAPTIAPPLLVLTVQPLLPLGYVSAASFGSPLGTPVVAPELIKAMQEQQQQLSQALLDKAKQICAQHGVAVETMIKVGDPKEMICQAAEESKVDLLIVGSHSRGPVQRLFLGSVSNYCMHHSKCPVLVVKKQE

SEQ ID NO: 48990 - protein, 204 aa, Oryza sativa
MSIFEYNGSAVVAMVGKNCFAIASDRRLGVQLQTVATDFQRVFKIHDKLYIGLSGLATDAQTLYQRLVFRHKLYQLREERDMKPQTFASLVSALLYEKRFGPYFCQPVIAGLGEDNEPFICTMDCIGAKELAKDFVVSGTASESLYGACESMYKPNMEPEELFETISQALQSSVDRDCLSGWGGFVLLVTPTEVKECVIKGRMD

SEQ ID NO: 48991 - protein, 638 aa, Oryza sativa
MAIATNTGVPWIMCKQTKAPGEVIPTCNGRHCGDTWPGPADKKKPLLWTENWTAQYRVFGDPPSQRSAEDIAFSVARFFSVGGTMANYYMYHGGTNFGRNGAAFVMPRYYDEAPLDEFGLYKEPKWGHLRDLHHALRHCKKALLWGNPSVQPLGKLYEARVFEMKEKNVCVAFLSNHNTKEDGTVTFRGQKYFVARRSISILADCKTVVFSTQHVNSQHNQRTFHFADQTVQDNVWEMYSEEKIPRYSKTSIRTQRPLEQYNQTKDKTDYLWYTTSFRLETDDLPYRKEVKPVLEVSSHGHAIVAFVNDAFVGCGHGTKINKAFTMEKAMDLKVGVNHVAILSSTLGLMDSGSYLEHRMAGVYTVTIRGLNTGTLDLTTNGWGHVVGLDGERRRVHSEQGMGAVAWKPGKDNQPLTWYRRRFDPPSGTDPVVIDLTPMGKGFLFVNGEGLGRYWVSYHHALGKPSQYLYHVPRSLLRPKGNTLMFFEEEGGKPDAIMILTVKRDNICTFMTEKNPAHVRWSWESKDSQPKAVAGAGAGAGGLKPTAVLSCPTKKTIQSVVFASYGNPLGICGNYTVGSCHAPRTKEVVEKACIGRKTCSLVVSSEVYGGDVHCPGTTGTLAVQAKCSKRPPRSAATAQ

SEQ ID NO: 48992 - protein, 363 aa, Oryza sativa
MAMAAPLTLVVVAAAVAVVFVGGGVEGWVLKEGFYEQSCPRAEALVKHYVEQHVPLAPSVAATLIRTHFHDCFVRGCDASVLLNGTDGAEAEKDAAPNLTLRGFAFIDRIKSVVESECPGVVSCADILALATRDAISVIGGPFWRVATGRRDGRVSIKQEALDQIPAPTMNFTDLLSSFQSKGLDLADLIWLSGAHTIGIAHCNSFSKRLYNFTGKGGPGDADPSLDAEYAANLRRSKCAAPSDNTTIVEMDPGSFLTFDLGYYRGLLRRRGLFQSDAALVTDAAAEANIASVVSARRRCSSRCSRGPWRSWAWSASRPAPRARSGSTAPSSTTSTTSIITSSSIFSSSVLDKISVEIYIHVT

SEQ ID NO: 48993 - protein, 310 aa, Oryza sativa
MLDQFNPLVQQFRLARDKLLSPSAPEIAIKLIGSDHSQSDHYSLPTISELATLIIPGASCEVSKFDVIVQKHSGELCQLSPIHPALMSLQYPLLFPYGDVGFHTGIKLREVDDQPPGSCDEASMLEFYRYESHYRKDEPNPFTCCGRLSDQLAANAFSCIETSRLTYHALNQKKLRSETHQGISDAVVRGDSDGKDVGTKVILPSSFIGGRRYMVQNYHDSMTICRSYGPPQIFSTFTCNSKWPEIIEAIRFEAGQKPSDRSDMVTHVYHMKLDEYITSIKNGEAFGPIKAGVLLVLFMIAVLSLRTSPS

SEQ ID NO: 48994 - protein, 90 aa, Oryza sativa
MVSPWPCDWRHCVSWFDIDSWNHLVVAKFSKHSVVSGDCLCVHCSNILSKRFLGYLPFNKGSQRHWGWIDGSSYFGNGSLIHLKIRCRKL

SEQ ID NO: 48995 - protein, 79 aa, Oryza sativa
MFMYRGDTPFCSEECRQQQIEVDRAKHRRKTRAAAHAVSVRKEHRNHHHHHRHHHQQPQPRPAIDANPWGTARGPALRV

SEQ ID NO: 48996 - protein, 252 aa, Oryza sativa
MASRAAAVAVLLLAVAAAPLFAAASAHGRGYLGAKSWPPDGSLSSSSSGEAAAADVDDGHTDWKCYSSCMSKCCHRHDDDDDDKANAKANATAGAAAVGLDDDYKCKKQCLGNCFKDVPAVCYHKCVDDWCAKLPPYSSAKVQCYKKCGDKCFHHGPKPGPKPKPKPSPPKPKPGPKPKPPKPGPKPKPPKPGPKPKPKPPKPGPKPKPKPPKPGPKPKPGPPQPWWPIPFPKPPCPPGADGSSSAVDDKNN

SEQ ID NO: 48997 - protein, 64 aa, Oryza sativa
MYLFLFLLVCIMPCFHHFFDNACRQSIGTEGDGSGARPARAPGPRATCWPTHFFLPFSTKRCFN

SEQ ID NO: 48998 - protein, 75 aa, Oryza sativa
MAHAPAWMTRRTTFLCSRLNPTSRMSEEARAAPPGRCRSALAFLQLPPMRMLSSRPTSMRSAGSLVLVSRLLRPL

SEQ ID NO: 48999 - protein, 789 aa, Oryza sativa
MTAQTKKRGGGESGNGGAGLGLAAFIANGEDLGPIVRHAFESGKPESLLQGLRSIVKMKEVEIEELCRVHYEEFILAVDELRGVLVDADELKGMLSGENLRLQEVASSLLLKLDELLELYSVNKNVEEALGMLKICLQVTSLCQMCNKDIAEARLHSALKSLELIEKDFLQNIPLKLLKKAVQKQIPIVKLYIEKKVCNEFNEWLVYIRRTAKEIGKVSISQASLARQKNEGIHSQQREAEDCSRIGFDEHAYALDLDLIGEEEVLEFDLTPVYRANYIHTCLGLGEKFREYYYNNRLMQLNLDLQIPTTQPFMESHQHFLAQIAGFFIVEDRVLRTADGLLSDSQVETMWGTAISKVTSILEEQFSRMDAANHLLLVKDYVTLLGATMKKYGYQTTSLLEILEKNRDKFYQLLLSDCRKKIDGIFTKDSYEQMIIKKENEYHMNVSAFQLEPIGVVPDFPYVAPFSSSVPDACLIVRSFIDDSVNYLSYDPMMDAYDVVKRYLDKLLIEVLNDGLLNLIHGGCLEITQMVQIAGNIAILEKSCDMFLFHAAQLCGVPRRLLDKPHSGLTARAVLKASQNAAYNGLIALANSKIDEFMLLLTSINWTPEETPEHVNDYMNEVVIYLHTLVSTAQNVFPREALYKVVCGAFSHISDSIMTVFLSDRVKRFNANAAAGIDIDLKKLEEFADDKFHSTGLSELRKETTFRDCLVEIRQLTDLLLSNQPENFMNPVIREKNFGSLDHKKVSIICDKFRDAPESLFGSLSGRSTVQSARKKSLDVLKRRLKDFS

SEQ ID NO: 49000 - protein, 223 aa, Oryza sativa
MIERPELRWAFIRKVYAIVATQLVVTVAIAAAVYSVPAIRRFFLARTPASLAAFVLVIVAPLIVMLPTMFLRKKHPINLILLALFTICMSCAIGLGCLSSKAGIAIIEAASLTFGLVFGLTLYTFWAAKRGHDFSFLRPFLVAAFLVLVLYGLIQMLVPTGKVATTVYGCVAALVFSGFIIYDTDNLIKRHAYDEYVTAAISLYLDTVNIFIAIFTALDASDS

SEQ ID NO: 49001 - protein, 69 aa, Oryza sativa
MSTEIGSICSRTIMCSSVPGLALLNTSISKSWSDEELVRFLAERKAADSLPENVVVGMNFSLIDPWNSG

SEQ ID NO: 49002 - protein, 65 aa, Oryza sativa
MSSGSTHRGEEKEKNIRYPCCTNVGSIWVGHAKEDKLCEYFLVMKSGQPLINITLLVNSVFIVNK

SEQ ID NO: 49003 - protein, 210 aa, Oryza sativa
MDITYKALQETDIGRHVNGLRKHPSGEVRLLVKQLIRKWKEIVDDWVRLHNSSGDASNSIITDGNSPEKIQGKNQQSSQVSEFKYSPSPSRHNNSSSERVSNGIASIAATKHRASPAPAHHNARQINNTHHSTTSSSAPARMVKEQKDSHLDLERLDSARKRLQENYQEAQNAKKQRTIQVMDINEIPKPKNRNAFIRKGNGGGFPARHR

SEQ ID NO: 49004 - protein, 126 aa, Oryza sativa
MASLFRRSSITHHATSAVASAAGAHRAFSPAMGGGIRPDLTNTEIDKLLLQKSAFNKAGIFSARGKITHANVEKGLVLSECLKILRREGEQQSWAKLWCKQIAAVVIFGVLFRSGEPEKHEPNASS

SEQ ID NO: 49005 - protein, 379 aa, Oryza sativa
MSEKETLHHHHHRRRLPSTAPSPSPSPLDDDDLLQEILLRLPPDASTLPTASAVCKRWRRLAFEPGFRRRFVASHEPPFLGFFFPYDFDPVFSFNAGFRSTTAQHHLPAHRFLPEREIGLRWEIVNCCKGLALFRITFRGGCKCKEFMVVDPISGDRRLLPFPLVDGKFLSATVVPAAADRRSFRVVAVFAERNTFTSVFASVYSSDAGVWSDYVSRLCLPWEVWVLRPSVLAGNAVHWFLDGYNVLMFDLESQKLGFSELPLDAKDDEDFPHRCRCQIIPAGDGRLGLAVIVGSTMQLWEREIGDGSDATWLLRRTLQLNFLPLEAEGRKLIVGVAEENSSILLWTRVGLFMVHLKFLQVRKVYGEISVDNYYPYSSF

SEQ ID NO: 49006 - protein, 511 aa, Oryza sativa
MELSSTSASLLLILLLTLVYFLYLHQDPKKKPRTHGLKSYPVVGTLPHFINNKDRFLEWSTGVMKRSPTHTMSFKELGLTGGVITANPANVEHILKANFGNYPKGELAVSLLEDFLGHGIFNSDGEQWLWQRKAASYEFNKRSLRNFVVDTVRFEVVERLLPLLEYAGRHGRTLDVQDVLERFAFDNICRVAFDEDPACLTEESMAAPQSAEFVRAFNDAQNAILDRFNSPAKSLWRIKKLFNMEPERRMRDSLATIHGYAERIVRERRERREARLERRDDFLSRFAASGEHSDESLRDVVTNFILAGRDTTSSALTWFFWLLSGRPDVEDKIVREIRAVRQSSAGSEGTRGATFSLDELRDMQYLHAAITESMRLYPPVPFDTHSCKEEEFLPDGTFAGKGWLVTYCAYAMGRVEDIWGADCEEFRPERWLDEAGAFRPESTFKYPVFHAGPRMCLGKEMAYIQMKSIVACVLEQFSLRYAGDAKGHPGLVVALTLRMEGGLPMKVTIRE

SEQ ID NO: 49007 - protein, 988 aa, Oryza sativa
MGVPAFYRWLADRYPQTVSDAVEEEPVELEPGAFVPVDLRRPNPNGLEFDNLYLDMNGIIHPCFHPEGRPAPTTYDEVFKSIFAYIDRLFGLVRPRKLIYMAIDGVAPRAKMNQQRSRRFRAAKDAADAAAEEERLRKEFEAEGRTLVAKEKSEAIDSNVITPGTPFMFVLSSALQYYIQLRLNHTPGWQSVKVMLSDSNVPGEGEHKIMSYIRLQRNLPGFDPNTRHCLYGLDADLIMLSLATHEVHFSILREVITMPGQHEKCFLCGQVGHLAAECRGSGQADKTVELPPIHKKKYQFLNIWVLREYLEKDLEIVDPPFKINFERVVDDFVFMCFFVGNDFLPHMPTLEIREGAINLLMNIYRREFTSMGGYLTDGGEVLLDRVEHFIQSVAVHEEQIFQKRARIQKAIQNNEERNRVQTENSEDNQYVDKVKLGEPGYRVRYYAEKFKEEAELKPIDQVQRDVVQKYVEGLCWVMRYYYQGVCSWQWFYPYHYAPFASDLKCLAELEITFFLGQPFKPFDQLMGTLPAASSNALPKYYGDLMNDPNSPLKSFYPKDFEIDMNGKRFAWQGIAKLPFIDERRLLAETQKLEETLTDEERFRNRTMFDILYVRETHPLAAQIAFLYQMCSQSPNASYIIPIDPAASGGMNGFLCLSERNCYSIVVTSPVKGFNGIAQNRVLNATYLNPQYHKHIPEPPEGVIIPAKILKPSDFKPFPILWHEDNSRRQPRERPQVSGALSGSVLGEAAHRLVKNSLQIKSGYSAGLLDMPYRGAPYGPGNRPRPAGPLGYERGFVENSYNGHMSRSVPNSHPQFFGDAQANRQNVRILERPNYRNNDSAIHSGMSQLTIQDGPRMHQNNRMQNSGFSPNQPHPNQYAGFPPQRPMQNSGFTPQRPAQYSGFPHQRPVQIGLQHQPAVNGIQPPLPPSAWIGRPISGVPAGVPAKQDPRMAMDRQPKQDNSRSQHDKRQQATKVVYRVKGQGPNGLSE

SEQ ID NO: 49008 - protein, 418 aa, Oryza sativa
MVEVEEVSNKMQVQMRLHPAAAAEEEDADLPLPALFDKASHLHSLASSSSLDQEGIRKGVDLLRRCDEMVSKVGLFSSNETKDDISTANLKYLLVPYYLGEMTERVAQEDRIPVLKASQDHLKEFISICEALELISEDELEISRQKQPDTMANRRAQKVARFKRQKAAETKLLEIKERKERRRRSLRAAALSAPIEAGEEDAFEDDGEEEREAWLATISLALCKAFDLLDMLKKEEEMLPAVKERKAKDGNAFAREMLDERTKRAEAWHHNAANRAPYSKPADPITCATFAQDVIEGRASVSQAHEHKHQPLIFGPASLVGGGLTSERERMAAQVFQPSYRLPTMSIEEAGLREMKMMEKWQERTAKMIQESNSAWHKDGSRSAQEDEDAEEEKARGWDDWKDDNPRGAGNKKLTPCG

SEQ ID NO: 49009 - protein, 216 aa, Oryza sativa
MLKKLLSKPKSKKKEAASSALPTLDRLHETLEMLEKKECFLQKKVSAEVEKAKDYTKAKNKSAAIQCLKKKKLYETQIEQLANFQLRVHDQIIMLESAKATTDTVDALRSGSSAVKAIHQSVSIDDIENAIEEANEHTENMRQIQEALATPIGASADFDEDELEAELEDLEEEELDHELPEPPQSTRMGPSARVTTSSQPANDLAELTKLQAEMAL

SEQ ID NO: 49010 - protein, 126 aa, Oryza sativa
MALHRAGLAEQRSSNRALLLSLAHGAFLHPLGQAGSYVQATKRPHSASTHSSQGLCRQPNTPSIPHPADNKVNIRVQTTGDPAIDVFKDGLQDLIVMCQHVRGTFDNAVVDFRSKVPAQQMDIDSK

SEQ ID NO: 49011 - protein, 590 aa, Oryza sativa
MASAAAHAATATAAAVLLVVFLAPLAAASDSDHKYQSEEKVMLWVNKVGPYNNPQETYNYYSLPFCHPSNNPVHKWGGLGEVLGGNELIDSQIDIKFGRDVDKGTICSIELDPDKAKQLSDAIESSYWFEFFIDDLPLWGFVGEADRNSDNKYFLFTHKNIVIRYNGNQIIHVNLTQESPKLIDAGKALDMTYSVKWEPTNVTFAHRFDVYLDYPFFEHQIHWFSIFNSFMMVIFLTGLVSMILMRTLRNDYAKYARDDDDLETLERDVSEESGWKLVHGDVFRPPRSLALLSALVGVGTQLSALILLVILLAIIGMLYIGRGAIVTTFIVCYALTSFISGYVSGALYSRHGGKNWIKGMIMTASLFPFMCFGIGLVLNTIAIFYRSLAAIPFGTMVVVFILWAFISFPLALLGTVVGRNWSGAPNNPCRVKTIPRPIPEKKWYLTPSVIALMGGLLPFGSIFIEMYFVFTSFWNYKVYYVYGFMLLVFLILIIVTICVTIVGTYFLLNAENYHWQWTSFFSAASTAVYVYLYSVYYYHVKTKMSGFFQTSFYFGYTLMFCLGLGTLCGAVGYLGSTLFVRRIYRNIKCD

SEQ ID NO: 49012 - protein, 351 aa, Oryza sativa
MPPVNSDGAGPSSGEDGSAAAVKKRNRPKYHRFTQQELQACKPILIPQTVILVLVFVGLIFIPIGLACIAASNKVVELVDRYDTKCVPRNMLRNKVAFIQNSSIDKTCTRVFKVPKDMKKPIYIYYQLDKFYQNHRRYVKSLNDMQLRNPKKVADTQYCSPEATANGRPIVPCGLIAWSLFNDTYSFTRGHGNETLRVNKDGISWKSERNRRFGKNVYPKNFQNGTLIGGGQLNPSKPLSEQEDLIVWMRIAALPTFRKLYGRIDMDLQAGDRVEVTMQNNYNSYSFNGKKSLVLSTAGWLGGKNAFLGRAYAIVGLACFLLALLLALLYFVFPMREEHLSLHYTPARLVR

SEQ ID NO: 49013 - protein, 87 aa, Oryza sativa
MRCKLSSRIFFWSQMMRLFDLLKGLGNFYFSALRRTLSLLQVHILVIGCNLPLLHMAQHWILQKCFCQLHFHEEVVQELLQRSNLQG

SEQ ID NO: 49014 - protein, 854 aa, Oryza sativa
MDEAAAAEAVQLIDGEGEFAADSAERFMAAAGVAGCGLSYAVVSIMGPQSSGKSTLLNQLFGTNFREMDAFRGRSQTTKGIWIARCVGVEPCTVVMDLEGTDGRERGEDDTAFEKQSSLFALAISDIVLINMWCHDIGREQAANKPLLKTVFQVMMRLFSPRKTTLLFVIRDKTRTPLEHLEPVLREDIQKIWNSVAKPEAHKDTPISEFFNVQVTALPSFEEKEEQFREQVQQLRQRFSNSIAPGGLAGDRRGVVPASGFLFSSQQIWKVIRENKDLDLPAHKVMVATVRCDEIAHEKFSCLTSDAEWMELESDVQSGPVPGFGKKLGYIVDVHMQEYDKEAIYFDEAVRTAKRQLLKSRVLNLVQPAFQKMLAHLRTRALEKYKTELNLTLESGKGFAAAVRDTTESNLNEFDQGCADAVIEQADWDYSKILEKVRRDVEDHTLSIREGKLSELTNHAKEKLRKALVEPVESLFDAAGPSTWASIRNLFKRETEAILPEFQKNLAGFEMESATSEGMVSKLRDYARSIVENKAKEEAGKVLIHMKERFTTVFSHDKDSIPRVWTGKEDVRAIAKDARSAALKLLSVLAAIRWDEKPDKIEKILTSTLLDGSVTPKSKGASASSDPLASTTWEEVSPKYTLITPSQCKSLWKQFKAETEFAITQAVSTQQAHKRGNGRLPPPWAMVAIAVLGFNEIMTLLRNPIYLFLLFVGYLLVKALAVQLDINREFQNGVVPGIISITAKLIPTLQNILNKVATEQQQQQGHHQDAAAEAPQQQQQPQPQPPPLLLSPRSPMSELRRPLHMPFSPVRKAVSPSPSSSSSTVTSPRNAGEDQKPRQMVQPDNESNNAYSIV

SEQ ID NO: 49015 - protein, 341 aa, Oryza sativa
MASHIHAAAAGDLPLTGMHDLRLRPRLLRRVLAECLPLPDPAADLQPTRSPADLARALSAVREQGLLAVEGAADPGLLEEWSAAVDAWVDRLVALLASDREHSCWVGTSFLGLTFEECSEDRFANSYSFWFEKIMKKIKVPSSNKMVSIATCTAMASLFMRLAKFSNLKDEATLLAQKVVQPLLRLLDKDGSVAEKATDLLGLIMKLFPSSVYRHFNKVESIIAAKIMSGQCNLQHSKKLASTLALLPCVRVSHNSLSLMIQKILVVVNNLLNGYTGFELMPLISPGSKPPPLSGGQTTYGDWNFHSAKKFCTFAVPTISALIHCCSMMLTTSYPIQCLRW

SEQ ID NO: 49016 - protein, 261 aa, Oryza sativa
MIDLSTPQRRRWRPRVGGSSTSQAERKVATKRKEFPLQRDDSSPCDKTTKLDIPSLPEDVNTPMVPNKFLYLRYLEMVFIGPRKESPPCYDFFSLVFFLDASPALETFVLHLDSVGTKNDRILEDSSELRKLPKCNYSNLKNVKITGLMSSKTLVELISHILDNTPSLEFLTLDTRIYGFKYEIRRFISWDCGIMMTTDDRMESELDRELLMSDSDLIEAYRAPQVIRRYIEGKVPSTVNFEVIEPCRKRVIVETSRGPRL

SEQ ID NO: 49017 - protein, 75 aa, Oryza sativa
MARSDSCLARVGAGVAIGGAVGGAVGAVYGTYEAIRYKVPGLLKIRYIGQTTVGSAAIFGLFLGAGSLIHCGKSY

SEQ ID NO: 49018 - protein, 142 aa, Oryza sativa
MADDDYNDMDMGYEDEPPEPEIEEGAEEEPENNEDGPDEVVGAEAEDKEQEKTQRPRKTSKYMTKYERARILGTRALQISMNAPVMVELEGETDPLEIAMKELRARKIPFTIRRYLPDGSYEDWGVDELIVEDSWKRQVGGG

SEQ ID NO: 49019 - protein, 114 aa, Oryza sativa
MIQGGDIVRGDGKGSESIYGGTFPDENFIVKHTHPGVIAMANSGPDSNGSQFYITTIKTSWLDGEHVVFGRVIQGMDYVYAIEGGAGTYNGKPRKKVVITDSGEIPKEKWAEEV

SEQ ID NO: 49020 - protein, 353 aa, Oryza sativa
MNWVEFLKPVVAMLVFDTLFALMTALVKKALADGLNHVVFITLRQFVAAVLLAPIAYFKERNTRPRFTTEIFAYMFMSALLGGLCAQYLFFLGLSYTTATLTATFSNMTPVFTFLIAIPLQLETVDVRSKAGLAKVIGTLMSVGGATLLGLYKGAALTHTTSSVQEHGAKGITSNSSSFSKERWMLGSVLLVLNCISFSLWMLLQGKLTKKYPAVFSSTAFMTSFSSMQAGVVALTTQRRLSVWLIRGNIQIIAVVFAGVGVSGIGYVLMTWCIEKKGPVFTAGFMPLIQIMAALIDLFFLHEQIFLGSAIGAALVIGGLYLLLWGKSKEASATALLAKAVEQDGEKKENLEA

SEQ ID NO: 49021 - protein, 198 aa, Oryza sativa
MGSNDYLNNYFMPAFYNTGSQYTPEQFADSLIADYRRYVQVLYNYGARKVVMIGVGQVGCSPNELARYSADGATCVARIDSAIQIFNRRLVGLVDEMNTLPGAHFTFINAYNIFSDILANAASYGFTETTAGCCGVGRNNGQVTCLPYEAPCSNRDQHIFWDAFHPSEAANIIVGRRSYRAESPNDAYPMDIATLASV

SEQ ID NO: 49022 - protein, 356 aa, Oryza sativa
MVDIGVPPSEAVYRCLIQGCCNHGELVKAKELISEMMNKDIPPPGVKYFSSIINNLFKEGRVAEGKDIMDLMVQTGQRPNVVTFNSLMEGYCLVGNMEEAFALLDAMASIGIEPNCYIYGTLVDGYCKNGRIDDALTVFRDMLHKGVKPTSVLYNIILHGLFQARRTTAAKKMFHEMIESGTTVSIQTYGVVLGGLCRNNCTDEANMLLEKLFAMNVKFDIITFNIVISAMLKVGRRQEAKELFAAISTYGLVPTVHTYNLMISNLIKEESYEEADNLFISVEKSGRAPDSRLLNHIVRMLLKKAEVAKASNYLSIIDENNLTLEASTISLLASLFSREGKCREHIKLLPAKYQFL

SEQ ID NO: 49023 - protein, 203 aa, Oryza sativa
MAAEAAAALEGSEPVDLAKHPSGIIPTLQNIVSTVNLDCKLDLKAIALQARNAEYNPKRFAAVIMRIREPKTTALIFASGKMVCTGAKSEQQSKLAARKYARIIQKLGFPAKFKDFKIQNIVGSCDVKFPIRLEGLAYSHGVFSSYEPELFPGLIYRMKQPKIVLLIFVSGKIVLTGAKVRDETYTAFENIYPVLTEFRKVQQ

SEQ ID NO: 49024 - protein, 502 aa, Oryza sativa
MDCHRNESQRELEMGTKPHFVVIPWLATSHMVPIVDIACLLAAHGAAVTVITTPANAQLVQSRVDRAGDQGASRITVTTIPFPAAEAGLPEGCERVDHVPSPDMVPSFFDAAMQFGDAVAQHCRRLTGPRRLSCLIAGISHTWAHVLARELGAPCFIFHGFCAFSLLCCEYLHAHRPHEAVSSPDELFDVPVLPPFECRLTRRQLPLQFLPSCPVEYRMREFREFELAADGIVVNSFEELERDSAARLAAATGKKVFAVGPVSLCCSPALDDPRAASHDDAKRCMAWLDAKKARSVLYVSFGSAGRMPPAQLMQLGVALVSCPWPVLWVIKGAGSLPGDVKEWLCENTDADGVADSQCLAVRGWAPQVAILSHRAVGGFVTHCGWGSTLESVAAGVPMAAWPFTAEQFVNEKLIVDVLGIGVSIGVTKPTGGMLTAGGGGGEETAEVGTEQVKRALNSLMDGGVEGEERAKKVHELKAKAHAALEKEGSSYMNLEKLILSAV

SEQ ID NO: 49025 - protein, 82 aa, Oryza sativa
MPQRCLPPAMLGWRRLPPAAPGCHRRAIFLPRRPTVTAIAAFCGLIPSARRRRTSATVVATKHGATTAILIYLSVPLPRFSS

SEQ ID NO: 49026 - protein, 61 aa, Oryza sativa
MMVMGYLLAPKKGGRRKDEFGFAQAGGLRVPCGEDDFEDLLRRLRRKNGGAAAAKAKKAIS

SEQ ID NO: 49027 - protein, 646 aa, Oryza sativa
MDDLKAILARPIQLAEQVIKWAEEAQTCRQECLDLKAKVERLASLLRQAARADLYERPARRILDDTGKALDKAAALLDRCRGHGLIRRVFTIIPAGSFKKTSNQLDNSLGDLSWILRVSNYSNADDLDDDHIGLPPIAQNEPILFLIWEQIAVLYTGNPEARADAAASIVSLARDNDRYGRLIIEEDGVPPLLRLIKEGSSEGQETAALAIGLLGRDPECVELMVLAGVCTAFAKILKDAPMKVQGMVAWAVSELATNHPKCQDAFLQSNVIRLLVSHLAFETVQEHSKYAVASKMSIHTVLMDKKNNGSTSSSHHHDALDAVDHAAATTTTTTAMAAKPTGGGAASSSGAGAGSAGTGTTSSSSVSVGGTVAGTKQHNASLSGTSTKAREFEDPETKAYLKANAAKALWQLAMGNAAVCKNITESRALLCLSVLLEKGVDDVRYNSAMALMEICLVAEQNADLRRSAFKPTSPAARAVVDQLLRVVHKADYDELLIPCIISLGCLSRTFRATETRIIGPLVNLLDEREADVSREAAAALTKFACTENYLHVDHSKAIIHHGGAKHLVQLVYFAEQAVQIAALLLVCYIAHNVPDNEELAQAEILTLLEWASKQAAMVQDPLIENLLLEAKIRMELYQSRGAKGYY

SEQ ID NO: 49028 - protein, 454 aa, Oryza sativa
MVKIMDNQSSIEELDEPLGRVPILSYGSGHMLNDITSSCWFTYLLVFLTDIGLSPSDAAVVMLSGQLADGFATIFVGELIDRFGHFKLWHAGGSILVAISFSSVFGSCLPCKLTGTISSTMETVGYSTFAAIFNVGWAVTQVSHMSMVNCMTSNPTSRVALVSCRNAFTMIANLSLYGIALLIFSLRQSVSVIVQYRWIAYVSIALGSCFVVVFLIGTEEPGLNQHCQNKRLSRISWTHWFKKVLYYQVALVYMFTRLVTNVSQALLAFYVINDLEMPQSSKALVPAIIYVCSLIVSVILQETRWSSWRLKNYFSAGAMLWILSGVGIVVLPSGMHNFMYALSITIGVANALMTVTSISMEGILVGEDLNGCAFVYGSLSFVDKVSCGLALYILESYQGSTNTRQNLELAFGYSVTRLGLGLVPAACSLLSAIIAYTMDLPDTRRRPLVEPLLA

SEQ ID NO: 49029 - protein, 160 aa, Oryza sativa
MAAADGTTGEEVKKTIDLVSKDGERFEVARDAALLCKTLRWMIKGGYGRIPLPNVASPILARVVDYLARHAAAAAAMDDDGLDRFDRDFLAGVDQDTLFDLLLAANYLQADGLLDLACKKVAAMMTGKSPEQMREIFHIVNDLTPEEEKEIREDIAWALN

SEQ ID NO: 49030 - protein, 293 aa, Oryza sativa
MDVFKNMLHELAVGRDNPDGADQGFLASYFPDLLDRPMFHPPVNGTKLEGTYRLPLGYQMDASYYYLKLRWSIPCGPNSVITFPSAPWFKPWYWWSWPVLPLGLSWHEQRRENLGYSSELPVVLIQALFYIGVIAVTRLARPSLSKMCYNRRMEKSTIVLLTTLRVVAAWSILAAYTIPFFLIPRTVHPLLGWPLYLLGAFSFSSIVINVFLLHPLAVLTTWLGIIGALFVMAFPWYLNGVVRALAVFAYAFCCAPLIWGSLVKTMSSLQILIERDAFRLGEPNQTAEFTKLY

SEQ ID NO: 49031 - protein, 66 aa, Oryza sativa
MNPSQTWHHYRTFILPAHITLSRTIKNQELVLPLKVQKYATRMKIKMDFMICKICHVQASIWVLQT

SEQ ID NO: 49032 - protein, 105 aa, Oryza sativa
MAPVSSAGEAVLRMRSRRSQRQSLRRSRSRSRILTRRQSLGQKMRSALSSPHRPAPEGKEQSEDDLPQVVAALLHHPHLGRRRHRRPRRGLPLQRQGEVPEVSFR

SEQ ID NO: 49033 - protein, 131 aa, Oryza sativa
MAIGGDAASMVAVGLVWGTTNALMRRGALVWDHRLRSLPATSSSVTGVLRRWAELLLTWQYSAPFAVNLAASAAFFSLLGAAPISVAVPVTNATTFAATAVAAALLGEGTRAAPAALGTALIVLGVWVCIS

SEQ ID NO: 49034 - protein, 265 aa, Oryza sativa
MGRGKIEIKRIENKTSRQVTFCKRRNGLLKKAYELAILCDAEIALIVFSSRGRLYEFSNVNSTRSTIERYKKASASTSGSAPVIDVNSHQYFQQEAAKMRHQIQTLQNANRHLIGESIGNMTAKELKSLENRLEKGISRIRSKKHELLFSEIEYMQKREADLQNENMFLRAKVAEAERAEHDDQQAAEDDEMAPAPAVGGGSSSGTELEALPATFDTREYYQPAPPVSMLAAAAAAAAAQYSSDHHQTALHLGYFKVDSGKGGLL

SEQ ID NO: 49035 - protein, 229 aa, Oryza sativa
MSRGTASMDAISLDEWELLPDNKSSYFMEEFTSDHGTVVDDETKNIFLPIHLSEEVYVGDPVIKFKDIDVVKIESYREEFVPKVTEIFDAEEEAEMIKSPVSAEEVDVDDDDEVMAMVAPDQCVEEEEGAQKDKEHNGFSVGKLRVNGVGALCSFGVAAATLCIFLLGGRQQQLHKTQNQKTPFQMYADNERIQQVVQQASRLNQAVSTVMGGASTRASISFGGYYDGF

SEQ ID NO: 49036 - protein, 82 aa, Oryza sativa
MFHPIGQSYILHSFLFQIFQHVILDLPGLAFFTTYAMLALFWAEISYQARGLETEGLRSGFYTINGVIYVIQVKQVISKSLY

SEQ ID NO: 49037 - protein, 207 aa, Oryza sativa
MSKKRGLSLEEKREQMLQIFYDSQDFYLLKELEKLGPKKGVISQSVKDVVQSLVDDDLVLKDKIGTSVYFWSLPSCAGNQLRTTYSKLESDLSSSKKRFIELVEQRENLKRGREDSDEREAALEELKAVEQHHKKLKEELTAYADSDPAALEAMNDAIEVAHAAANRWTDNIFTLQQWCSTTFPQAKEQLEHMYREVGITEDFEYLQ

SEQ ID NO: 49038 - protein, 506 aa, Oryza sativa
MAAAGEVVMLGGILLPLLLVVAVSGEPPPISRRSFPEGFIFGTASSSYQYEGGAREGGRGPSIWDTFTHQHPDKIADKSNGDVAADSYHLYKEDVRIMKDMGVDAYRFSISWTRILPNGSLSGGINREGISYYNNLINELLLKGVQPFVTLFHWDSPQALEDKYNGFLSPNIINDYKEYAETCFKEFGDRVKHWITFNEPLSFCVAGYASGGMFAPGRCSPWEGNCSAGDSGREPYTACHHQLLAHAETVRLYKEKYQVLQKGKIGITLVSNWFVPFSRSKSNIDAARRALDFMLGWFMDPLIRGEYPLSMRELVRNRLPQFTKEQSELIKGSFDFIGLNYYTSNYAGSLPPSNGLNNSYSTDARANLTAVRNGIPIGPQAASPWLYIYPQGFRELVLYVKENYGNPTIYITENGVDEFNNKTLPLQEALKDDTRIDYYHKHLLSLLSAIRDGANVKGYFAWSLLDNFEWSNGYTVRFGINFVDYNDGAKRYPKMSAHWFKEFLQK

SEQ ID NO: 49039 - protein, 265 aa, Oryza sativa
MVPRDRVNAAAAGGGGEGRLVQSGIVNKKCDKKAPKRIHKSEREKLKRDKQNDLFNELGNLLEPDRQNNGKACVLGETTRILKDLLSQVESLRKENSSLKNESHYVALERNELHDDNSMLRTEILELQNELRTRMEGNPVWSHVNTRPALRVPYPTTGVFPVQHLPHLPVTTTAAFPQQLPVIIEQHYAATPRELQLFPESATSEDSEPSQEHGISDHVTRPQPRYPTPTATLPVNLFPVFPGRQDQQCSSGTSGTNEEDRIGRS

SEQ ID NO: 49040 - protein, 186 aa, Oryza sativa
MALASGTSCALPGAARPHLAVSPSPPASSIRFCRGGSRGGRAVVSLRASVPPAAAAATTSGSIAPAISLTEKALKHLNKMRAERNEDLCLRIGVRQGGCSGMSYTMEFEDRSNASPDDSVVEYDGFAIVCDPKSLLFMFGMELDYSDALIGGGFAFQNPNATKTCGCGKSFATGKETESTATACNN

SEQ ID NO: 49041 - protein, 339 aa, Oryza sativa
MERYEVIKDIGSGNFGVAKLVRDVRTKELFAVKFIERGQKIDENVQREIMNHRSLRHPNIVRFKEVVLTPTHLAIVMEYAAGGELFERICSAGRFSEDEARFFFQQLISGVSYCHSMQICHRDLKLENTLLDGSIAPRLKICDFGYSKSSLLHSQPKSTVGTPAYIAPEVLARKEYDGKVADVWSCGVTLYVMLVGAYPFEDPDEPRNFRKTITRILSVQYMVPDYVRVSMECRHLLSRIFVANPEQRITIPEIKNHPWFLKNLPIEMTDEYQMSVQMNDINTPSQGLEEIMAIIQEARKPGDGSKFSGQIPGLGSMELDDVDTDDIDVEDSGDFVCAL

SEQ ID NO: 49042 - protein, 241 aa, Oryza sativa
MGGFERRGVRQYNRSEVPRMRWTEEMHRQFVEAVECLGGQDEATPKRILQLMGVKGVSISHIKSHLQMYRSGSSNSNHPVSLQKLTSATVNNISKREFVNSEDRCIYASGDRNTASSDKNTYTILRCGRSSMPSIEEIFRNWEQTRGRLLPWNSNVITTEQATTRASRQTTNYSKPLKQLTDCDLTLSIGQLWDDAAGSDADGSSTISEEVAAPSRDEAFVSSADDHFAAAAAKKESNADH

SEQ ID NO: 49043 - protein, 513 aa, Oryza sativa
MSIEERTLSLINKTTALNPNAQEFVPSSLRSINDVSNRSDTSRISVSGSSKDTIADQQDPVIPSNPDEEAHRYWQEQLPDDITPDFKVLGQDEMPGPDNISLTGLSINDSIGASLFSPNQTSNLQHRASPFIRDTLSTRSKIEFPSPTYVEEQSRATIMSPTASAMSPTAAPWVKTVRNGVQYNANRRDASHYNGDSSIGAPVQNLTDAYFGSRRSFSSTMDIMSQLENKVDGRFNQNLRSLSFGHSSPPSPASYGQNGLANYNKEAFGLANNTYRSHSAVLADDILSPSAGREHISLDAPRGRYNTTNLPVSGLGSSRGSQFMASSFNGNHDIVSNNTLQNIAGVQTGPAWLEADTAANMFLESKDEAHDFASLRHALLEQDRQVLLTGANPLAKELNIKELYNLQSRLAQEKARDVYRQRFQMPEFQGLVQEQNTPTDLCGLHVSEAIHALNYELNNRRKIARSTGRRLQVIIISSTRTPARLTAAVEQYLLEHGIQYTQAQPGLFRVLLQ

SEQ ID NO: 49044 - protein, 117 aa, Oryza sativa; identical to SEQ ID NO: 44662

SEQ ID NO: 49045 - protein, 351 aa, Oryza sativa; identical to SEQ ID NO: 30199

SEQ ID NO: 49046 - protein, 154 aa, Oryza sativa
MELLKELVPGCSKVSGTALVLDEIINHVQSLQRQVEYLSMRLAAVNPRVDFGGLDNFLTTECGRITGLNYKNGMDLEQVTWPDMGVHGARNLMQLQQQFWHGDLAHPLQPPSQWEKRTDTNPPVFSNSSSSLFGYDLASSGAPAQTGNKLKTEL

SEQ ID NO: 49047 - protein, 475 aa, Oryza sativa; identical to SEQ ID NO: 32381

SEQ ID NO: 49048 - protein, 554 aa, Oryza sativa
MAADDLSSPARKRGRDEEEEEEEEVIDGEAAQKRARGEDPEGGALLGLANYEEDEEDEEAAAAAGRRRANGRHEEEEEEDDDDDEVDNDVRRAPERRPRQVELRRDCPYLDTVNRQVLDFDFEKFCSISLSNLNVYACLVCGKYYQGRGLKSHAYTHSLEAGHHVFINLQTEKAYCLPDGYEINDPSLEDIRHVLNPRFTTEQVRNLDRNKQWSRALDGSNYLPGMVGLNNIKETDFVNVTIQSLMRITPLRNFFLIPENYRHSKSPLVHRFGELTRKIWHARNFKGQVSPHEFLQAVMKASDKRFQIGVQSDPVEFMSWLLNTMHSKLKSRKRNRSIIHDCFQGELEVVKEFHKKHIVEKKEDGDEQNGDAGSDIVTETSRVPFLMLGLDLPPPPLFKDAMEKNIIPQVPLFNILKKFDGETVTEVVRPSIARMRYRVIRLPKYLILHMRRFTKNNFFVEKNPTLVNFPVKNLELKDYIPLPKPKDSEKLRSKYDLIANVVHDGKPGEGCYRVFVQRKSEEAWYEMQDLHVTETLPQMVALSEAYMQIYEQHE

SEQ ID NO: 49049 - protein, 276 aa, Oryza sativa
MVSGDVGVVVYYLLLVLVVVQGCKGSSAVQGEGRWYNESEAIGGAAAWGNAKATWYGQPNGAGAADNGGACGFKKVNQYPFMGMTSCGNQPLYKGGKGCGSCYRVRCNRNPACSGNAQTVAITDMNYFPLSQYHFDLSGIAFGRLAKPGRADDLRRAGIIDVQFARVPCEFPGLKVGFHVEEGSSPVYLAVLVEYENGDGDVAQVDLKEAGAGGGRWTPMRESWGSVWRLDSNHRLRAPFSIRIRSDSGKTLVAPDVIPLNWTPNTFYRSFVQYSS

SEQ ID NO: 49050 - protein, 275 aa, Oryza sativa
MGKDKQCETVDAVGMVPMEEEKKSKEEIHLKIKSKDKSSGDEDEKKEIEIEVKAKIVDKEEVKLDSDDGAKSAVKSKDSKKDKENKKSDKKDDEHDDEDEEGKKKEKEMKEKKKDKSDKKEEGKKKKDGDEEEGKKKEKKKDKDGDEKEGKKEKKKDKDGDEEEEGKKKEKKKKDKGDKEKTNDPAKLKAKLEKIDTKIQDLQAKKEDILRQLKEQLKEELEGGKSKNAIEEKPAQTLEKGIEHNKPIEEKPAETVEGSRECKNNEKEETHVAAA

SEQ ID NO: 49051 - protein, 677 aa, Oryza sativa
MDSRSPKIPRRSPDDSKDKDSDRNRGRDEKNDWDSSRTYGSETDCKEERCDTNKRKGSAMGEDVGDDSRSVDRSHETEVHVFNDKQDKAVEIKNILHDGVGQSDYGQRQLGLDNERRNGTVDKSRVDAHIDDKLGSGRDRNWTGKTQEPEGSVDYLRSCKSQDSKEASDSEWKNAQERQDGGGFHGRVGYRRDFRGRSESTRGSSTYGSRYDTSDSIEIRPNNSLDFGREGSVSGRYDVGVGAHRDVTYGTNGDKVTNSEPDQSGSASMISQFPQHGHKGDRPSRGGRGRPNGRDSQRVGVTLPIMPPPFGPLGLPPGPMQHIGPNIPHSPGHPLLPGVFVPPFPGGPLLWPGARGVDVNMLSVPPNLPIPPPVAGEHSFTPGMGAGPNIHLNQFGSGIGAPTNMSGLSFHQLGTQSREMVHGKPPVGGGWTPNRNSGPTRKAPSRGEQNDYSQNFVDTGMRPQNFIRELDLTSVAEDYPKLRELIQRKDEIVAKSASPPMYYKCDLRQHVLSPEFFGTKFDVILVDPPWEEYVHRAPGITDHIEYWNGEEIMNLKIEAIADTPSFVFLWVGDGVGLEQGRQCLKKWGFRRCEDVCWVKTNKKSATPSLRHDSHTILQHSKEHCLMGIKGTVRRSTDGHVIHANIDTDIIIADEPTDGIVSYVLFKDASCSSYMLVY

SEQ ID NO: 49052 - protein, 473 aa, Oryza sativa
MPTSYGISVLVDRQKSSMLCLAHMPSFFTPWTIVEEIPTEISGSLPLYIFNFVDFEDLDERARHPNGLVDVIGQLTVVHPLVQSNGLNGPSVRRNVELRDLSDRLLEITLWAEHATSFEDEFLIETIGKDEPVIIVFAGLNMKLFSGAPSCRSSAATKWYINIDIPEINAFRTSLQGRGCEVLLVPSDGAALGAANEADANRKSISELLSLNPHDNNDVRFTCDARIKEIDVSSGWWYKACSICRKGVKPTLQGFECVNCDNTEPIITPSYKLNVVIEDNTDRAKIFMFGGMAEQVVRRTAADLVEESSANQLLLPSPLRALIGRRFVFQIVISEQTFRTGQLCFQVRKVFNPPPIDGQNNGVHATLGNSLSHATLARTSGAQKKCDPTPLMEASGSSSNKASTLQTYGVTELPTDPKGSATPPPPFAHGAITKTSPQKGNEISEEHGTPVGKRSRSTRKELFSTKKVKASDD

SEQ ID NO: 49053 - protein, 927 aa, Oryza sativa
MAGAGGWDPLVGSEIHGFLTYPDLNYEKLVAEAAARWFRPNEIYAILANHARFKIHAQPVDKPVSGTVVLYDRKVVRNFRKDGHNWKKKKDGRTVQEAHEKLKIGNEERVHVYYARGEDDPNFFRRCYWLLDKDLERIVLVHYRQTAEENAMAPPNPEPEVADVPTVNLIHYTSPLTSADSTSGHTELSLPEEINSHGGISASSETGNHDSSLEEFWANLLESSIKNDPKVVTSACGGSFVSSQQINNGPKNSGNIVNTSMASNAIPALNVVSETYATNHGLNQVNANHFGALKHQGDQTQSLLASDVDSQSDQFISSSVKSPMDGNTSIPNEVPARQNSLGLWKYLDDDSPGLGDNPSSVPQSFCPVTNERLLEINEISPEWAYSTETTKVVVIGNFYEQYKHLAGSAMFGVFGEQCVAGDIVQTGVYRFMVGPHTPGKVDFYLTLDGKTPISEICSFTYHVMHGSSLEARLPPSEDDYKRTNLKMQMRLARLLFATNKKKIAPKLLVEGTKVANLMSALPEKEWMDLWNILSDPEGTYVPVTESLLELVLRNRLQEWLVEMVMEGHKSTGRDDLGQGAIHLCSFLGYTWAIRLFSLSGFSLDFRDSSGWTALHWAAYHGRERMVATLLSAGANPSLVTDPTPESPAGLTAADLAARQGYDGLAAYLAEKGLTAHFEAMSLSKDTEQSPSKTRLTKLQSEKFEHLSEQELCLKESLAAYRNAADAASNIQAALRERTLKLQTKAIQLANPEIETSEIVAAMKIQHAFRNYNRKKAMRAAARIQSHFRTWKMRRNFINMRRQVIRIQAAYRGHQVRRQYRKVIWSVGIVEKAILRWRKKRKGLRGIASGMPVVMTVDAEAEPASTAEEDFFQAGRQQAEDRFNRSVVRVQALFRSYKAQQEYRRMKIAHEEAKIEFSEGQLGAACRS

SEQ ID NO: 49054 - protein, 166 aa, Oryza sativa
MPLDWRDGRVLAALVPMTKIITHEGDEGEFVPFPRRDDVTDLAVCDPISRRYVIIPAIPGDLITSGEQRDCLFDFNAFLAPATEEEMADSSFRVVATAQCKSKLFVFVFSSRSEEWRKLSIRQWEHLRRGCELVGAGSGRFLLGPALLCTLPLVLGAEGDGQVARS

SEQ ID NO: 49055 - protein, 91 aa, Oryza sativa
MVRVGAAAAVLVLAAAAAAMAAEPPTDDGAVRVAAGLTKCVSGCGSKVTSCLLGCYGGGGGAAAAATAMPFCVIGCTSDVLSCATGCSTSL

SEQ ID NO: 49056 - protein, 322 aa, Oryza sativa
MEPWAIRVAYFIVFSFLVTARFGSCAPHSEEGRALPGYRESEQDQSIGSLSNWGEGKLIGRVFNLLLKENMFASETPSESKEHSSISESVPHDSAGFEPCRKCLAKTVHNATPRRLLQARELASNQTQTHPKSQSSPVQSSASHLVPRWAIYALPVAGVLFIAAVATAIYVFFSRRKKDNTVMPWATGLSGQLKKAFVTGVPSLERTELEAACEGFINVIGTLPECTLYKGTLSSGVEIAVLSTSVNSSQQWSAQSEEQFRNKISVLSRVNHKNFMNLIGYCACEEPFTRMMVFEYAPCGSLFEHLHSKPPNNNFLYVFDLD

SEQ ID NO: 49057 - protein, 379 aa, Oryza sativa
MHTRCERRSERATMGSCTLSSGGVCVVVVLLCLAACCLTCARGAVPAIYVLGDSQADVGNNNYLLHSLLKANFPHNGIDYPGGKPTGRFSNGYNFVDLIAISLGVPSPPPYLSISSKPMNSSVYLKGVNFASGGAGVSNLTNLAQCISFDEQIEGDYHRVHEALGKQLGIPGAKAHLAKSLFVVAIGGNDIINDLLLSPVSELLRSRDEIVSNLENTLKRQLQTLYDLGMRRLFFVGIAPLGCCPLIRELNPTKECDAQANYMATRLNDAAVVLLRDMSETHPDFTYSFFDTYTAVLQSIRYPEAHGYKEVKAACCGLGDNNAMFLCSPASVYCDNRTSYMFWDVVHPTQAAVEKLMKIAFDGSAPLVSPKNIKQLTES

SEQ ID NO: 49058 - protein, 257 aa, Oryza sativa
MGRGKVELKRIENKISRQVTFAKRRNGLLKKAYELSLLCDAEVALIIFSGRGRLFEFSSSSCMYKTLERYRSCNYNSQDAAAPENEINYQEYLKLKTRVEFLQTTQRNILGEDLGPLSMKELEQLENQIEVSLKQVRSRKNQALLDQLFDLKSKEQQLQDLNKDLRKKLQETSAENVLHMSWQDGGGHSGSSTVLADQPHHHQGLLHPHPDQGDHSLQIGYHHPHAHHHQAYMDHLSNEAADMVAHHPNEHIPSGWI

SEQ ID NO: 49059 - protein, 331 aa, Oryza sativa; identical to SEQ ID NO: 31729

SEQ ID NO: 49060 - protein, 69 aa, Oryza sativa
MCCIAYRISHLYIVLSRDVDPTGINSRGDRNKFSPLYFAGAGMGMHSSTGNSYLPYLAGIKKSGALISC

SEQ ID NO: 49061 - protein, 261 aa, Oryza sativa
MQHLHGDVLESAVERVPAPDLAAAALVSREWLRAVRAALRRRMLRLPWLVVHVIHLRGQRRLAAAYDPRSGAWLAVPTAPPARHGATSPPQPHSHVRLMRGASGDRVCALSLSGLAVARDALGMDDDALVVALKAPGVWRVDPVLAAVGDRVVAMGGACRLALGDGEDTSAVEVHERGGWTHCGAVPTALRESAAAAATWLSTAATDQRVYVADRATGTASWFDPAKQQWDPPPASALTPPSPHGASPPAAPAPRRSSCSE

SEQ ID NO: 49062 - protein, 147 aa, Oryza sativa
MPSPAPVSPSASPEFLRPPLRPCPCAGRRRRLLRHRSGKVALGLASPPPEPHRCSLSSSPFVLVDDSSGRSFLLAGSSSRCAATIVVIAAACSTLSSHPCSYCRLPLSPPRRPRSSSSSTSSSRRSRSSWRSSLRQAVRVRRPWFVK

SEQ ID NO: 49063 - protein, 184 aa, Oryza sativa
MDRSMETVEEEVEEYSWREVLLPRLVPVVSDAAPELERETGERRRGRELLVAVDFGPNSKHAFDWALVHFARMADTLHLVHAVSSVNNDLVYEKSQELMEDLAIEALKTSLVRTKARIVEGDAGKVICREAERLKPAAVILGTRGRGLIQSVLQGSVSEYCFHNCKAAPVIIVPGKEAGEQSVL

SEQ ID NO: 49064 - protein, 255 aa, Oryza sativa
MAAAGSIGVYRAVFAALGALMLGTLVYTCVTDGSPFRLELLTPWLVATLIDFYVNVTAISTWVIYKEVNWISSFFWVVLLYCFGSIATCAYVVVKLFEIKTSGPSQDPLDLLFLRQGDLSERKSSFVIIGRIIFSILGAMMAAVVIYTVITDGLPFRKDLLTPWMAATLIDFYINVFAISVWVAHKESNWISTAIWICLLICFGSITTCGYIVIQLFQVSYRDPIYHVLLNSHNKSLNAEQGRLPSIIPPSSAKV

SEQ ID NO: 49065 - protein, 142 aa, Oryza sativa
MGRKLGFEKVLDCFSLALCTNACVCIHSVEDDEEEAIEREALVSSQLEELVKLKDLVGGAKTLAFHLEPKTVELRVSMHCYGCAKKVQKHISKMDGVTSFEVDLESKKVVVIGDITPYEVLASVSKVMKFAELWVAPNSQGC

SEQ ID NO: 49066 - protein, 236 aa, Oryza sativa
MRVAPKVLVLVRDAAGYGAALADALRPTPGLTRESTPLELPLAKYGLDGEKASGELVNFSDSSGDPQVSFFVLPDYKPPVAACAMNEILALVSSEAPSTQPTLIVPFMTRSPNYYHGAKTGQLATLHGAEIGATTEFTQMLVDGTTKLPQSLQVRSEPILCLLEMVRVLNIPTVILFASGGQHQGKSSTDVDLEVLQCVGDHLAKHINLEFSKETVLQRGIEKSPVFQEPWRELYQ

SEQ ID NO: 49067 - protein, 205 aa, Oryza sativa
MLRHAARRLATTRAAAAAGRSSRALSTAEVPAEAATDSAFAEAWKKVAPNIEAPATPMSLMQPRPPTPAAIPSKLTVNFVLPYKSEIANKEVDMVIVPATTGQMGVLPGHVSTIAELKPGVLSVHEGNDITKYFVSSGFAFVHANSIADIVAVEAVPLDQIDPAAVQQGLAEFNAKLGSASTELEKAEAQIGVDVHSALNAALAG

SEQ ID NO: 49068 - protein, 132 aa, Oryza sativa
MNDTCFAHLSHGSSSNGSELERSEAPLPHGAQKVARNNAAIGCHHHPQLNDGQLLLPRDGRDPHHHAVHRNVGGGGDEAVVVAAERQGLAVERQVGVVHHLPLLGVHVEGACALVILLLLLRRPHRHREEDV

SEQ ID NO: 49069 - protein, 375 aa, Oryza sativa
MGASAATGMQMVAARPCISASQGMLTSRAAVSRIGRALSTTTGFATCPRICYSSPLGSSKRSGVAIRAMSSESGPQGLPIDLRGKRAFIAGVADDNGYGWAIAKALAAAGAEILVGTWVPALNIFETSLRRGKFDESRKLPDGSLMEIVKVYPLDAVYDSPEDVPEDVKGNKRYAGSSNWTVKEVAESVKNDFGSIDILVHSLANGPEVTKPLLETSRRGYLAALSASSYSFVSLLQHFLPIMNPGGASISLTYIASERAIPGYGGGMSSAKAALESDTKVLAFEAGRKGKIRVNTISAGPLGSRAAKAIGFIEKMIEYSYVNAPLQKELLADEVGNTAAFLVSPLASAITGSTVYVDNGLNTMGLAVDSPTISS

SEQ ID NO: 49070 - protein, 282 aa, Oryza sativa
MQIDLRGWLLNYSPSFQYHSLLQIQNCVAGLREYFSQTDETHITPRIPVMENMVDTSAVQKDDKKSTEEVDSKTKTPDRGQADSKNMGIIDEETDEDEDYQVPEANIEEDPNKDAKRADEPPEKIDLSCFSGILRCDADEKSRNCWTVPDSKLFKVRSKNFPHDKSKIPAASYLMELAAIDWFKDSKRMDNVGRQKGCVAQVAAEKGMHTFVANIQIPGSTHYSLVMYFVTKSLKKGSLLQRFFDGDDEFRNSRLKLIPSVPKGSWIVRQSVGSTPCFFLRG

SEQ ID NO: 49071 - protein, 390 aa, Oryza sativa
MDIGPHSIQLIAPPSLYHAASAAAMGDHRDPAFPAAAGGCRLPKTSSVSVTESVTAVHDFKVTGYSLIEGLGIGRYVSSSTFTVGGVDWAVRFYPDGSTVTCLGNASAFLYYCGREKEVRTRFTLNLLGKDGKLSQVTNSYMKHTFSPASDNWGFIKFAEKSKLQSSPFLHNDCLTIRCLLTVVRESHTKDVEVNSVVVPPSNLHTDFENMLQDGEGSDVTFAVGGQEFRAHKCVLAFRSPVFKAELFGPMKENGTQCIKIDDMEPEVFEALLLFIYTDRLPDSCRDGKAAAMQHLLVAADRYGVDRLRLICERRLSETIDVETVATTLVLAEQHHCSQLRQACIGFVASPNMLGPVIESDGFKHLVESCPLIMKEILSKVSHIWIDKSC

SEQ ID NO: 49072 - protein, 208 aa, Oryza sativa
MVKHNNVIPNGHFKKHWQNYVKTWFNQPARKQRRRIARQKKAVKIFPRPTSGPLRPIVQCQTLKYNMKSRAGRGFTLEELKAAGIPKKFAPTIGISVDHRRKNRSLEGLQANVQRLKTYKAKLVIFPRRARKVKAGDSTPEELATATQVQGDYMPITRGEKRSVEVVKVTDDMKAFKAYAKLRVERMNQRHIGARQKRAAEAEKEEKK

SEQ ID NO: 49073 - protein, 367 aa, Oryza sativa
MEEHRLGGGGGGGGGGGRPPIPGAAGRKLPGLSRHASFVRSPANSTKSGTEKTFENMDAVAYMPVVRSGGWADIGSRHTMEDVFICSDNLMKEFGVESFEDGPSAFYGVFDGHGGKHAADFVCSNLARFIVEDEDFPREIEKALSSAFLQTDAAFADACSVNSSLASGTTALAALVVGRSLLVANAGDCRAVLCCRGKAIEMSRDHKPSCNREKVRIEASGGYVYDGYLNGQLNVARAIGDWHMEGMKACDGLGPLSAEPEVMIRNLTEEDEFLIIGCDGIWDVFRSQNAVDFARRKLQEHNDPVTCCKELVDEAIKRKSGDNLSVVVICFNSRPPPVLTTPRPRVQRSISAEGLRELQSFLDSLAD

SEQ ID NO: 49074 - protein, 67 aa, Oryza sativa
MFPVVLRQELSTNHIRQLIPFLQTKLVTAQDHLFSDLLCQAKCKVTWAIHLQKAICKRLMNLVTCQM

SEQ ID NO: 49075 - protein, 322 aa, Oryza sativa
MNMDEFVANIWNAEEFQATTGGCKGAMEEAKVVDSGSGSGGAGGSGLCRQGSFSLPLPLCQKTVEEVWTEINQAPAHTSAPASALQPHAGSGGVAANDRQVTLGEMTLEDFLVKAGVVRGSFTGQAAMGSGMVNGPVNPMQQGQGGPMMFPVGPVNAMYPVMGDGMGYPGGYNGMAIVPPPPPAQGAMVVVSPGSSDGMSAMTHADMMNCIGNGMMIENGTRKRPHREDGCAEKTVERRQRRMIKNRESAARSRARKQAYTVELEAELNYLKQENARLKEAEKTVLLTKKQMLVEKMMEQSKEKMNANRGGSQLRRSGSCMW

SEQ ID NO: 49076 - protein, 520 aa, Oryza sativa
MRLPVLLPLLLLLLAAAAAVAAAEAATLSARMVHRLSDEARLAAGARGGRRWPRRGSGDYFRALVRSDLQRQKRRVGGKYQLLSLSQGGSIFPSGNDLGWLYYTWVDVGTPNTSFLVALDTGSDLFWVPCDCIQCAPLSSYHGSLDRNLGIYKPSESTTSRHLPCSHELCSPASGCTNPKQPCPYNIDYFSENTTSSGLLIEDILHLDSREGHAPVNASVIIGCGKKQSGSYLEGIAPDGLLGLGMADISVPSFLARAGLVRNSFSMCFKKDDSGRIFFGDQGVPTQQSTPFVPMNGKLQTYAVNVDKYCIGHKCTEGAGFQALVDTGTSFTSLPLDAYKSITMEFDKQINASRASSDDYSFEYCYSTGPLEMPDVPTITLTFAENKSFQAVNPILPFNDRQGEFAVFCLAVLPSPEPVGIIGQNFMVGYHVVFDRENMKLGWYRSECHDLDNSTTVSLGPSQHNSPEDPLPSNEQQTSPAVTPAVAGRAPSSGGSTTLQNLLANSNMLLLLTMSVFFIS

SEQ ID NO: 49077 - protein, 132 aa, Oryza sativa
MAVERGERRGGGIGCLSCCFGGGDGDGEGEELGQRAARALRTSSRWVRDRAVELPEMVALAGGRRRKPHLQHHQQQQLAGEFRYDPVSYALNFEEDGDGEAQPFKYMAFSARLPASPPPPPPPTALPVDRGS

SEQ ID NO: 49078 - protein, 275 aa, Oryza sativa
MFRVQSSPNLPNAVGAGGGAFKQPPFAMGNAVAGSTVGVYGTRDMPKAKAAQLTIFYAGSVNVFNNVSPEKAQELMFLASRGSLPSAPTTVARMPEAHVFPPAKVTVPEVSPTKPMMLQKPQLVSSPVPAISKPISVVSQATSLPRSASSSNVDSNVTKSSGPLVVPPTSLPPPAQPETLATTTAAAIMPRAVPQARKASLARFLEKRKERVTTVAPYPLAKSPLESSDTMGSANDNKSSCTDIALSSNRDESLSLGQPRTISFCEESPSTKLQI

SEQ ID NO: 49079 - protein, 76 aa, Oryza sativa
MQKITEWQDEVVVVLPQTLHCSGGQVSPMMRHGFGPPGPQNLQGHFYLPAKVTVQMCSSITPSPEPQYHPPQSDDG

SEQ ID NO: 49080 - protein, 404 aa, Oryza sativa
MSNHNSPCDIPKPASVDEFVKNGKKKKSFMSSIFRKKGRSGTGSSDKKLLSRRDIVFGLDEKCDDRSELLDSSPAVRKSFSDRHCATKIESLTLSCLDSPHRQFDTREYRVFVGTWNVAGKPPNSSLNLEDFLQIEGLPDICLGVSGDRSSERRQRAGHRGQRASGQVAGPHIPSSEQAPGPVLRRRAVSAGDLRQPAGRRQRQPRLHTQVVERRHALLPEAVAEDAEQELPRGQRAGEDVHLPDRPVHHAAPGAGDAGVPLPHRGVAAAVVGVGGGGGRRRRGPGRRRRAGEEQRELLPDREQADGGHLPVRVGAAGARAVHRPPQGGLRRQRHHGPPRQQGLHRDEHDAAPDQRLLRLQPPRLRREGRRRGEEELRRRRDHQEHAVPADLQGAWPAYPRQDP

SEQ ID NO: 49081 - protein, 138 aa, Oryza sativa
MVTDRVSTACLLALLSQLYRPGLVFLMLLGLDITSHWFQMYSMFLSGKTSHKDVKDTGNWLLKLYYGHRPFMAFCCVASEVLYIILFLFADEKSTSLLNVCRCFLKGSPLTFFVFISTLVGWALKQVINIIQVSRNQH

SEQ ID NO: 49082 - protein, 399 aa, Oryza sativa
MSSSVSSVRLPLRAAPPLYGRREWRADGARAPSPALVAVKPLSCRAPASYRSALLLHRRRRYALPPVAATATSKPVLKDPKKYQEWDSLTAKFAGAANVPFLLLQLPQIILNARNLLAGNKTALFAVPWLGMLTGLLGNLSLLSYFAKKKETGAVIVRTLGVISTYVVIAQLAMAGSMPLPQFVATSAVVAAGLLLNFLNYFGWLPGTLWLLWEDFITIGGLAVLPQVMWSTFVPFIPNSLLPGIISGSLAATAVVMARMGKLSKGGINFVGSLSGWTATLLFMWMPVAQMWTNYLNPSNIKGLSAFTMLLAMIGNGLMIPRAVFIRDLMWFTGSAWASFLQGWGNLACMYCFDSISRESFLATTFGLLLWLGFTLWRDTIAHGNSSPVTSLKELLFGK

SEQ ID NO: 49083 - protein, 250 aa, Oryza sativa
MAMATSTFSPPASQLSLTRRRLHPGPDLLTLSSPRLRAGLRLARAAAGEAPVETVEAPPSKPEAEPSPAASNGAAVKAEKPPAAAAAPPLPKFRDSRWVNGTWDLRQFEKGGAVDWDAVIDAEARRRKWLEDCPEATSPDEAVVFDTSIIPWWAWMKRFHLPEAEKLNGRAAMIGFFMAYFVDSLTGVGLVDQMGNFFCKTLLFVAVAGVLLVRKNEDIETVKKLIDETTFYDKQWQATWQDESPSQPKK

SEQ ID NO: 49084 - protein, 291 aa, Oryza sativa
MARLAAEDPLVRDEAILDDDDDDVDTDEEESESEDDSGEEFHAEPSKKAVYNKEGILEKLEDIAWPENVDWRHKLTIEHDQGEKVDVNDDLARELAFYTQALDGTRQAFEKLQSMKVRFLRPADYYAEMVKTDAHMHKIKGRLLSEKKKIEEAEERKKAREAKKRAKEVQAQKEKERAKQKKEQIESVKKWRKQRQQGGFAKGNDDGPDLNFEGDEGFKQSKKKRPGVSPGDRSGGLAKKGKQGKNRKSRDSKFGHGGRKGLKKQNTAETTNDFRGFNQMDKSQNKRRKMG

SEQ ID NO: 49085 - protein, 248 aa, Oryza sativa
MAGKMSTIVMMVDLECDRCYRKIRRVLCKLQDKASIKAISYDEKNNTVTVAGPFDADEVSDRLCSSAGKVITDIRVVGGAKPMPGGGGGGAKAHANKPAGKDGSAGGGGGGGGGKPEMIKKHVKFEMADDMDDGRHHHHHDNRKPKVVTTTNHAAGALARMEGRRAEAPSMAMAAAMAPAPMPMTVQATATPSIWPAPAPSAPAPLEWGHSAPTYGAGWAPPPAYGYGGRSPYQPPYYDEEPAGCSVM

SEQ ID NO: 49086 - protein, 283 aa, Oryza sativa
MGIPRALLLLLLHVAVVVVLRSLPVSSADLYALVYKGCSNQSFPGGAVPPTVAALSSSLSDQSASAKFYKTSSSSSASSTSVFGLFQCRGDLSGSDCAACVSRAMSSWSEVCGASVAARVQLTGCLALYEISGFPQVSGTQMLFKTCGTGGGGGTDFEMRRDTAFAQMEASVGGGNGGFYATSYQQVYAMAQCEGDLSSGDCGQCVTQAVQHVEVECGGAPSGQVYLEKCYISYSYYPHGIPHGGGIGADSKDCSHCSRWSCRSGFCGHMLAFRQEPGQEEGG

SEQ ID NO: 49087 - protein, 453 aa, Oryza sativa
MSMDEGYGPTWDSDDEYDNFIRKMNPPRIEIDNDSCNDATIVRVDSANEYGILLEVIQVLIDLNLVISKAYITSDGGWVMDVFDITDKEGQKLKDKATIARIEDYICKSLGADSRYIPSRRRSVDVAASSDHNVIELTGTDRPGLLSEVSAVLASLKCNVVSAEIWTHNTRAAAVMRVTDEGTGSAVTDADRLERIRDRLSYLLRGGNLSRGAAMAVSTGTCSTHTERRLHQMMLDDGDHEQLHRHPPNQSQRPNVTVSNWNDKDYSVVTIRCKDRPKLLFDTVCTLTDLHYVVFHANIDAKDNQAYQEFYVRHVNGSPMHTEADRLRVIQCLEAAIERRVSEGVKLELCTNDKVGLLSEVTRIFRENSLTVTRAEVSTRGRMAVNTFYVRDSTGGTVDQKTVDSIRQAIGQNIQVKGQPEPSEPQKKESPTWFLFANLFRPRSLYSFGMFMR

SEQ ID NO: 49088 - protein, 487 aa, Oryza sativa
MVSQVVAEEKPQLLSKKAGCNSHGQDSSYFLGWQEYEKNPFDPVSNPSGIIQMGLAENQLSFDLLEEWLEKNPHALGLRREGGGASVFRELALFQDYHGLPAFKNALARFMSEQRGYKVVFDPSNIVLTAGATSANEALMFCLADHGDAFLIPTPYYPGFDRDLKWRTGAEIVPVHCASANGFRVTRPALDDAYRRAQKRRLRVKGVLITNPSNPLGTASPRADLETIVDFVAAKGIHLISDEIYAGTAFAEPPAGFVSALEVVAGRDGGGADVSDRVHVVYSLSKDLGLPGFRVGAIYSANAAVVSAATKMSSFGLVSSQTQYLLAALLGDRDFTRSYVAENKRRIKERHDQLVDGLREIGIGCLPSNAGLFCWVDMSHLMRSRSFAGEMELWKKVVFEVGLNISPGSSCHCREPGWFRVCFANMSAKTLDVAMQRLRSFVDSATGGGDNAALRRAAVPVRSVSCPLAIKWALRLTPSIADRKAER

SEQ ID NO: 49089 - protein, 347 aa, Oryza sativa; identical to SEQ ID NO: 28992

SEQ ID NO: 49090 - protein, 288 aa, Oryza sativa; identical to SEQ ID NO: 30703

SEQ ID NO: 49091 - protein, 485 aa, Oryza sativa; identical to SEQ ID NO: 31161

SEQ ID NO: 49092 - protein, 495 aa, Oryza sativa
MDVIDRFVHTERPLGADAAPDTDVWLRLSDDVEREADRWVKRGDVVRDVVSHPAARRVEELRISASAPAVDDDDDDGEVGRLVGVFHLDLRYVPSETLRVLDLSRCSGLRMPPAVETPRLTTLRLQACAVNVNDLQRVIDAAPALATVHLDSVSFDGMEHGCYRLRLPAATTALVLARCRTDAEPYRYRRSGRPLGTSSVEIDAPGLRSFRYAGYARRFSLASPPDMARADLHFFHDMYASASTSRDLFWRFVRSFRGIRSLKLKVSDLKHVAVAGRATRAELLVAFPNVEHLELEGHHESASETAAAVAIGNLLRCCPAARHLALHLATAPPRERDSAMNGRYGRDLLRARQQADLAESLDRFARRRRRKPNPPPPPPPPTPVNSMDEHLSIVGLSGRSFACLKNSLRRFVIQFRMDRPNCIGVKLIKFFAENAIHLEEMRIDGGNQRMHDHINHMVEGWISDSSSAKKRANHESSQGIDASTPRFRLLPLERR

SEQ ID NO: 49093 - protein, 181 aa, Oryza sativa
MGDERVKAEALQILGRFEALPRLVVFDLDHTIWPLYCDCCSIGDSPRLFRHAKGIMCALKEKGIAMAVASRSSTPDIANDFLDKLELQPMFVTKEIFDSWTHKTEHFQRIQRTTGIPYESMLFFDDEHRNFATVSKMGVTSILVDWDGGVNLEMFKLGLNNFAAKFAASSTDKDEQTSFNG

SEQ ID NO: 49094 - protein, 188 aa, Oryza sativa; identical to SEQ ID NO: 30380

SEQ ID NO: 49095 - protein, 43 aa, Oryza sativa
MRLSQVRESCAKLNKILHSIPNQEDELPRLCEENNKGAPALRS

SEQ ID NO: 49096 - protein, 219 aa, Oryza sativa
MARFEVYENNGGTCVAVAGADYCVVAADTRLSVGYSILSRDSSKIAHLADKCVLASSGFQGDVKALQRNLTAKELLYEHNHNKKMSCPAMAQLLSNTLYYKRFFPYYAFNVLGGLDSEGKGCVFTYDAVGSYERTGYSAQGTGAALMMPVLDNQLKSPSPLLLPARDAVTPLSQSDAVDLVKDVFASATERDIYTGDKLEIVVINSAGSHREFIELRKD

SEQ ID NO: 49097 - protein, 186 aa, Oryza sativa
MEQHQGQAGMDLPPGFRFHPTDEELITHYLAKKVADARFAALAVAEADLNKCEPWDLPSLAKMGEKEWYFFCLKDRKYPTGLRTNRATESGYWKATGKDKDIFRRKALVGMKKTLVFYTGRAPKGEKSGWVMHEYRLHGKLHAAALGFLHGKPASSKVHERTYAACVCLVVTSLIDRSIDRLSRPD

SEQ ID NO: 49098 - protein, 489 aa, Oryza sativa
MGSRPVDEVLDAAAAGVHYSTLRLDELNINGSMTGEEQPTTSGVENGHQEPFVIGVAGGASSGKSTVCKMIIDQLRDQRVVVVTQESFYYGLSDEELVHVHDYNFDHPDAFDTELLLSCMENLKHGKAVDIPNYNFKTYKSVASARKVNPSDVIILEGILVFHDSRVRDLMNMKIFVDTDADVRLTRRIRRDTIEKGRDIKTVLDQYSKFVKPAFEDFILPTKKYADIIIPRGGDNDVAIDLIVQHIRTKLGQHDLCKVHPNLYVIQTTYQIRGMHTIIRDAATTTHDFIFYADRLIRLVVEHGLGHLPFKEKQVITPTGSVYTGVEFSKRLCGISVIRSGESMENALRACCKGIKIGKILIHREGDNGKQLIYHNLPKDIANRHVLLLDPILGTGNSAVQAISLLLKKGVQETNIIFLNLISAPQGVHVVSKRFPRVKIVTSEIEFGLNDDFRVIPGMGEFGDRYFGTDDYQSSTPFFCDEKNRVRLL

SEQ ID NO: 49099 - protein, 193 aa, Oryza sativa
MNDITERSNFGWTKQQYVKEHQAPTFVDRMQKVKEDTEFSLSNGGYFKEQRTKGSVPVGIAEVPDTVYQQGRQPTRKARDLTSDNNMRNSIAYPIIRRVVPDEDEHLNELLQEEEDLVSAHRKQVEETLDMIKEEMNLLVEADQPGNQLDDYITRLSGILSQKAAGIVDLQARLAQFQRRLNENNVLLYAQCP

SEQ ID NO: 49100 - protein, 361 aa, Oryza sativa; identical to SEQ ID NO: 36981

SEQ ID NO: 49101 - protein, 475 aa, Oryza sativa
MPPRARTLLMPLAAATLLVASTIFLFAATGARWRPADTGLPVPAADFSAAVLESAVTDTTAAAKELSFVDENGRPDDPASSSAAAARCDPTHAAVRVFMYDLPPEFHFGILGWSPPTDGAADAAMWPDVGSGAAAPRYPGGLNQQHSVEYWLTLDLLSSSSPPCGAAVRVADSRDADVVFVPFFASLSYNRHSRVVPPEKVSRDKELQEKLVRYLMAQPEWKRSGGADHVIVAHHPNSLLHARSVLFPVVFVLSDFGRYHPRVASLEKDVIAPYKHMAKTFVNDSAGFDDRPTLLYFRGAIFRKEGGNIRQELYYMLKDEKDVYFAFGSVQDHGASKASKGMHASKFCLNIAGDTPSSNRLFDAIVSHCVPVIISDDIELPYEDALDYSKFSIFVRSSDAVKKGYLMRLIRGVSKHQWTRMWNRLKEVDKHFEYQYPSQKDDAVQMIWQALARKVPAIRLKSHRSRRFSRYDRGK

SEQ ID NO: 49102 - protein, 472 aa, Oryza sativa
MAAMGRTVLPSYVLLDRIVRSEEEAVEEESEWAAMECADWKSYGCHPGDKRYPRNAARVKGMLLLARLAEPPGLSELSIRLSAAAAVPRPPPASFPPGAAVPPIPNLPDASPAPLTYVEAAGDGLIALTSCFRDGCSCYLVYDVVGKSLSMIPGLPESCLTYCSMRPLPLRTAAAGGYALRSSYSLAIVAKDLRFDMEAGGDVYRDVLCLCPPRPSSSSSSRGGITPWQFKDAIFPSQMPRSFHGDKVFSFGGHAFWADLAKGVLFCRCDDALSGRNDDAVQFRYIPLPVECHLNISFAMRGDLQLCRTMSCVDGGGDSIKFVCISDGGSSSAHTGDRAITMWTLTLATGEWLKDAQLMVADLWELEGFDKARLPKAIPISPVLNPQEDGVLSFMLNDADAELYMVSLNMHSKKLLSSLTLSSCPDDIVPPLGLDLSKDLQNLSLRPIAAESVPAKTQGRPIATKRRRSSLP

SEQ ID NO: 49103 - protein, 165 aa, Oryza sativa
MQHHILSNYLELNYLKSISSRTKLKGKRVATLFTKIKHPCREETPVEAPPAPVLGEPMDLMTALQLVMKKSSAHDGLVKGLREAAKAIEKHAAQLCVLAEDCDQPDYVKLVKALCAEHNVHLVTVPSAKTLGEWAGVRYITLLLAIPCQLLYCVNLMSRLPDKIF

SEQ ID NO: 49104 - protein, 103 aa, Oryza sativa
MDPRYLQELGALLPRARGVTLPQVFVGGRHLGGAEEVRRLHESGELRRVVAGAGATALAACSRCGGERYVLCGSCNGSHKRYSLKEATVRGRLAPPLLPLPLS

SEQ ID NO: 49105 - protein, 452 aa, Oryza sativa
MARPKRTKPPPPSRKAEAAAAAAQRPSSSSSSPSPSLPEALLLATVCMVGLPVEVQVRDGSAYAGVLHTASVEGGYGVVLKKARKIANGNDNANIPLGAFVDSLVIHPDDLVQVIAKDFSLHTKDVCRTPVCDTVAASAYVKPQTSHVNVFPLKEVKKCSTPGEETNISIGRSSPASPTGYVGPRLSCNEIMSSAVVGSKDGNTKSAVLTTPTMSSDVKISPPATVAKTATPSKTIAKESKLNPCARVFSPSFASSRPVLAAAPSVNPIYISNSVAGVPTGLPVFETNSVPGGSSLSSKAVHYNNLAAANYAISPQYTQSTMGHNVSRLDPARIGTPYHPMQVGPAYISPSPQPVTGGKFNHVVYVHPFSQDVMHGAPVMPQGWSLPAPLNSHQASLQKFQGTAPVYVAPPIMATGNLPLVVPSPAPLVQPFQAVRPIMVPAASSMVPGKYM

SEQ ID NO: 49106 - protein, 306 aa, Oryza sativa
MEKKPRLLKAWVEQVRDLSFDIEDCLAEFMVHVGSKSLSQQLMKLKHRHRIAIQIRDLKSRVEEVSDRNSRYSLISPNTDEHDTLRDEFRYWSAKNIDEAELVGFDDAKESILNLIDVHANHGLAKVIFVVGMGGLGKTSLVKKVYHSINIVNNFSCRAWVTVSQSFVRTELLRGLIKQLLGGDSENEHFKGLQSMQRNEKVEDLVEDLKQGLKEKRYFVVLDDMWSIDALNWLNESVFPDSNNGGSRIIVTTRDASIIQNCAYPSYLYRLEPLKTDDAKQLLLRKSNKSYEDIKEARLRRCLIGY

SEQ ID NO: 49107 - protein, 546 aa, Oryza sativa
MSGFLAVVGKVGTFLLWLLFLVLQTATKIVGSLLAAGPPPADAQEAAAAAAARRRSPPASPHSGGGATDPYQPPQLWDPPPPSSPYSAGHAADEYSSSSSYRRRGASAPPAEDVVVSSSYSRPAAAVASAPQACTVSSAPPLRAVETRSPAPSRAAAAVGGKRPKLERKYSKIVDQYRSLDEVIEALAQAGLESSNLIIGIDFTKSNEWTGKRSFNGMSLHHIGDSPNPYEQAITIIGQTLSAFDEDNLIPCYGFGDASTHDQDVFAFYPDERPCNGFQEALARYREIVPHLRLSGPTSFSPIIEMATTIVEQSGGQYHVLVIIADGQVTRSVDTEFGQLSTQEQMTVDAIVQASEFPLSIILVGVGDGPWDMMKEFDDNIPARSFDNFQFVNFTSIMSKKISQSKKETEFALSALMEIPLQYKATLELGILGRRFAKSPERVPLPPPFASYNTISRAAPSRANSFRSMPSHPRDEAPVDSAITASVTSPPSVDARAAEPQLCPVCLSKPRDMAFGCGHQTCAECGPQVEHCPICRRPIDTRVKLY

SEQ ID NO: 49108 - protein, 454 aa, Oryza sativa
MKAPPPPSPVAKRARVSPFVFLLVLFLLLFSFLYGEDLKELLGSQAQARPSLHFNAAAAGDGIELPAATAATTEGRTTTRRWRGRLPFAANGDGEEEEEECDVFSGRWVRDEAARPLYREADCPYIPAQLACEAHGRPETAYQRWRWQPRGCALPAFDAAAMLDRLRGKRVMFVGDSLGRGQFTSLVCLLLAAVPDPAARSFATSPDQQRSVFTAAAYNATVEFYWAPFLLQSNADNAAVHRISDRMVRRGSIGHHGRHWEGADVIVFNTYLWWCTGLQFRILEDGPFDAGGNSSTTTWVSTEEAYAMAFREMLQWAREHMDFATTRVFFTSMSPTHGKSQDWGGGEPGGNCYGETEMIGDAAYWGSDSRRGVMRAIGEVLDGDGADVPVSFLNVTQLSLYRKDAHTSVYKKQWTPPTPEQLADPKTYADCVHWCLPGLQDTWNELLYTKLFYP

SEQ ID NO: 49109 - protein, 83 aa, Oryza sativa
MLQICNFLDMNCACFLCFVSAQPPQRRAGEIVSLLQNRLNMNITFKELQGHPASSAGEGDQPVLQAWTAVGDCGRHGGAVLSL

SEQ ID NO: 49110 - protein, 384 aa, Oryza sativa
MHVSSLIIDRQHLRPRVRQGPRDARPRPAGERLRLGVRPRHRGHSQPLHLPGVRVAVQEVDGARHGDHACAQRPARRPLPLGGHQGAQARARRRQRQGRRVVGHAARRPPVALHAEGDLLRRVAAARGAQLHPRRPRHLLGGALLVLLAGLHPPRRRAQDRPRALHRPGRVARRRRPGIVARRAAQLRGARPARLPQSGALGDPPPVPLRAGGLQARRRRRRPPRRHVRAGGVVGHVLHLLRGAHEDGVGRRLPGVPAGAVAVGRRHEVRAARLVQVRGVQRRATHLPREGPRVPADEEHRRQRAPPPPPGRGAGPPRRAEDVAHAVHEARAPDGGAPARPRPDRRRAPRRRGVRRRGARHRGLRLEDPGRWTKSIGNGKKICR

SEQ ID NO: 49111 - protein, 419 aa, Oryza sativa
MKQLNRQPTLSKQHRPHHHRLPLPRSLASYLLREHRLLFVLLGFLLASSCFLIYPSFTPLSSSSSPRDTVAARIRRGGGGGGGASSVVVSAAAAASRRLPVGVRKPPLRVVVTGGAGFVGSHLVDELLARGDSVIVVDNFFTGRKENVARHLADPRFELIRHDVVEPILLEVDQIYHLACPASPVHYKFNPIKTIKTNVMGTLNMLGLAKRVGARFLLTSTSEVYGDPLEHPQKESYWGHVNPIGVRSCYDEGKRTAETLTMDYHRGAGVEVRIARIFNTYGPRMCLDDGRVVSNFVAQTLRKQPMTVYGDGKQTRSFQYVSDLVDGLITLMESEHIGPFNLGNPGEFTMLELAQVVKETIDPSARVEFKPNTADDPHMRKPDISKAKSLLHWEPKISLKQGLPRMVSDFQKRIMDEKR

SEQ ID NO: 49112 - protein, 115 aa, Oryza sativa
MEFGSGGRDARARRQLQAAGRAAAYLGGGFLLLSAASSAAVRSLRSLSDANQRKFAAPCGACEGKGTYACRLCRGSSTIEWSPLHDPVFVNPCLCPTCDGTRVQRCLNCLGKGYA

SEQ ID NO: 49113 - protein, 408 aa, Oryza sativa
MQSAAAVGLLRPCGATTAAAPLQLRNPSPRGFGVGVGQPLLPPRGLRLSAVAPRAGISARRIGLVPASPEQEDERRRGARDVAVAATAAAAGEAGAEEGGGLAKTLQLGALFGLWYLFNIYFNIYNKQVLKVFPYPINITNVQFAVGTVIALFMWITGILKRPKISGAQLAAILPLAMVHTMGNLFTNMSLGKVAVSFTHTIKAMEPFFSVLLSALFLGEMPTPFVVLSLVPIVGGVALASLTEASFNWAGFWSAMASNVTFQSRNVLSKKLMVKKEESLDNITLFSIITVMSFFLLAPVTLLTEGVKVTPTVLQSAGLNLKQIYTRSLIAAFCFHAYQQVSYMILARVSPVTHSVGNCVKRVVVIVTSVLFFRTPVSPINSLGTGVALAGVFLYSQLKRLKPKPKTA

SEQ ID NO: 49114 - protein, 234 aa, Oryza sativa
MAVGKNKRISKGKKGSKKKTVDPFAKKDWYDIKAPSVFNVRNVGKTLVSRTQGTKIASEGLKHRVFEVSLADLQNDEDQAYRKIRLRAEDVQGKNVLTNFWGMSFTTDKLRSLVKKWQTLIEAHVDVETTDNYMLRLFCVGFTKRRPNQVKRTCYAQASQIRQIRRKMVETMVNQASSCDLKELVSKFIPEVIGKEIEKATSSIFPLQNVFVRKVKILKAPKFDLGKLMEVHGD

SEQ ID NO: 49115 - protein, 293 aa, Oryza sativa; identical to SEQ ID NO: 45056

SEQ ID NO: 49116 - protein, 463 aa, Oryza sativa
MAAERKDVGILAMDIYFPPTCVLQDELENHDGVSKGKYTIGLGQDSMAFCTEVEDVISMSLTVVKSLLENYKIDPKCIGRLEVGSETVIDKSKSIKTWLMQIFEECGNTDIEGVDSSNACYGGTAALFNCVNWVESNSWDGRYGLVVCTDSAVYAEGPARPTGGAAAIAMLIGPNAPVSFESKYRGSHMAHVYDFYKPDLASEYPVVDGKLSQTCYLMALDSCYNVFCKKYEKLEGKQFSIHDADYFVFHSPYNKLVQKSFARLYYNDFLRKCSTVEDGSREKLEPYSGLSSEESYQSRELEKVSQQVAKHLYDSKVQPTTLIPKQVGNMYTASLYAALASVMHNKNETLAGQRIVMFSYGSGLTSTMFSFKINEGQHPFILSNIAGILDVSKKLESRHVVAPEKFVAALKLMEHRYGAKDFTTSQDTSLLAPGTYYLTHVDSMYRRFYAVKGQAVTEVSNGH

SEQ ID NO: 49117 - protein, 89 aa, Oryza sativa
MHAYTYIYIYRRQCIVLYTYIPAEVELLMEEEEVDEGNHDLDDRDEGCREHRAPLPHTPCHYQVPYSRRHHPLHACAPTQLIHLYICAW

SEQ ID NO: 49118 - protein, 356 aa, Oryza sativa
MDDDIDSSCSTPFASAPSSPGRSPATGGGYFFSAPASPIHHLLLSSSSVASGVVSGAGYGGVGDAEFEFGGPGGPMISADELFHNGQIRPLTLPPLPDLDPGSDDDDGGGGDFRPGPVRGRELTLRSGSVHRRTRSMSPLRGASPRLKLLNALVPAPDLGSEPTPSHSAGSEEATPPVTASSRSSSSSSTSSSSSSSSSARGSRRWVFLKDMLLHRSKSEPGGAHAHDAPAKPEKAWQFSPSWASSRDRIAAKLRAARSPLPPQPQSEASSDAGGGEEAQATRGRARGGKGRRRSSTVAAAHERLYAARNRAQAEEMRRRTFLPYRQGLLGCLGFSSRGYGALHGFTKTLNPVFSR

SEQ ID NO: 49119 - protein, 380 aa, Oryza sativa
MASLLIASTGGAHRLAWKDAAALGPAPRLARPWPAAVAAPAPLLRISRGKFALQAITLDDYLPMRSTEVKNRTSTADITSLRVITAVKTPYLPDGRFDLEAYDSLINMQIDGGAEGVIVGGTTGEGHLMSWDEHIMLIGHTVNCFGAKVKVVGNTGSNSTREAIHATEQGFAVGMHAALHINPYYGKTSIEGLISHFEAVLPMGPTIIYNVPSRTGQDIPPAVIEAVSSFTNLAGVKECVGHERVKCYTDKGITIWSGNDDECHDSRWKYGATGVISVASNLIPGLMHDLMYEGENKTLNEKLFPLMKWLFCQPNPIALNTALAQLGVVRPVFRLPYVPLPLEKRVEFVRIVESIGRENFVGENEARVLDDDDFVLVSRY

SEQ ID NO: 49120 - protein, 247 aa, Oryza sativa; identical to SEQ ID NO: 31861

SEQ ID NO: 49121 - protein, 466 aa, Oryza sativa
MALGDGDDGAAAAAVPLISDRPKHAAIVRSGTEWTAAAHVITAVIGSGVLSLAWSVAQLGWLAGPGMMLVFAAVTALQSALFADCYRSPDPEVGPHRNRTYANAVERNLGSSSAWVCLLLQQTALFGYGIAYTITASISCRAILRSNCYHTHGHDAPCKYGGSYYMLMFGAAQLFLSFIPDFHDMAWLSVLAAVMSFSYSFIGLGLGLANTIANGTIKGSITGAPTRTPVQKVWHVSQAIGDIAFAYPYSLILLEIQDTLKAPPAENKTMKKASIISIVVTTFFYLCCGCFGYAAFGSDAPGNLLTGFGFYEPYWLIDFANACIILHLLGGYQVYSQPIYQFADRFFAERYPASRFVNDFHTVKLPLLPPCRVNLLRVCFRTVYVASTTAVALAFPYFNEVLALLGALNFWPLAIYFPVEMYFIQRHVPRWSPRWVVLQSFSVLCLLVSAFALVGSIQGLISQKLG

SEQ ID NO: 49122 - protein, 357 aa, Oryza sativa
MQKQHAADSAALVAAMGEVHRLRVQLAAAARADRKQDVVEAMATIDELRVKLKASEEAEAQARALHEECKQQLETSRATIDSLLTDGSKLMDSFSLVVKELEESRAKVKALEEEIAETSAAKAGERCNCSASASASEVAELRSELESTEARFQEERILSTVETQCAYELMDQIKMESDSRHGKLAAALESTKSEVIFLKASLFDKDSELRRALDANEKLQSETRTDNELKEQLQGALLENGQLKRELQQHTSEKKASAKATDAADAAAEAAKKGEMEAELRRLRVQAEQWRKAAETAMALLTVGKGGNGKVVDRSESLEGGGGGGGKYAGLWDELDDDAAARKNGNVLRRISGMWKK

SEQ ID NO: 49123 - protein, 293 aa, Oryza sativa
MGMGPLENAVVDAAAEAVAAKAAVGGVGVGGSYAVLQCGEDSEYVRKAYGGYFEVFRALLAEDGERWRVYRAVRGELPGEEEAAGIDGFVISGSCSDAHADDPWIVALVDLIRRQNAAGKRILGVCFGHQVLCRALGGKTGRSKKGWDIGVNCIHPTAAMARLFSPIKLPVHMPIIEFHQDEVWELPPQAEVLARSDMTGVEMFRLGDRAMGVQGHPEYSKDILMSIADRLLRNDLILDHQVDKAKASFDLRQPDKDLWKKVCRGFLKGRLQSSQQPQQQQHQKQQKAAQLEL

SEQ ID NO: 49124 - protein, 462 aa, Oryza sativa
MGAPNEVTSYSSLSKIDSNNQGGHLSSLVPANIYPAQGYLYEPSLEPDFPSEYDSREDPFVPTRASSNINLKTVLTGLAAIVSGTNKNQDNTLQQQSFSTDVSFLGFDKDGDVNVHPSVCVPSAPPLLETNALQYSAYREVLQADPPEWLPDSSTSVCLQCSLPFTALTRGRHHCRFCGGIFCKDCSKGRCLMPMKFRQRDPQRVCDACYDRLDPLQGILINYNSNAMQPAKHDVMDWTSTRSWLNLPVGLSMEYEIYKATNTLNRYCQVARLNPEKSIPSSILKGAKGLAVITVAKAGAVLTYKVGTGLVVARRSDGSWSAPSAIASVGLGWGVQFGGELTDFIIVLHDRKAVKAFSSRMHLSLGAGLSAAAGPIGRAFEADVRAREKGSGLCYTYSCSKGAFVGVSLEGNVVTTRSETNLRFYGDAYLTTTDILFGKVEKPRAAQPLYSALDDLFSKMVY

SEQ ID NO: 49125 - protein, 202 aa, Oryza sativa
MNISGNRQYSCKLTFKEQSFLDRNPRQVQGLVTDANGTKVAFLMGKWDESMSCIIGDDASKVNSRNANQSTGATLLWEKNVPPANPTRYNLSSFAITLNELTPGLKEKLPPTDSRLRPDQRHLENGEYEKANSEKLRLETRQRMARKMQESGWKPRWFQRDTEDGTFRYVGGYWEAREQRKWVGCNDIFGNNVSTLCTSASI

SEQ ID NO: 49126 - protein, 334 aa, Oryza sativa
MELPVADPGPVRAEGLLLQCPYCDSEAMHKLAQFLLPGLAAVCIDCTTGDLFRKPSVVAVDMRKEMVDYVTQRSETFISDSLIESEASQDQENEMPEDPFEIVSIFMDDFSSTKRNIIGHVSGWLMSDSREDKIDDFVQEMEMTRFWPLERREVIAEVLLKNVDLKTKYHCPEKYENEERLADHKAQCSFRPVTCPNDGCRAKVSVRCMQDHDSACLFKILTCEQNCEKRLLRHDMDRHCVTVCPMRPMKCPFGCDSSFPERNLEQHCSEFLQAHLHKLLKAIHKKGFTDEGLKDHALLLEKHDNDGKLAKSRDVRSLTNVVKNLEAKIKDDSS

SEQ ID NO: 49127 - protein, 313 aa, Oryza sativa
MGSEVKPAKLGLRRHLNAGFFAGFLLVLLTYVIVSQQFAMETPTAVTSRAPRIDENESVTKARVETEKKREQEWQRPKDTSGAVSAEEFSKRDSTNAKPIENGKVVCGSNGFYSDTCDVDGDVRINGTALSVTLVPASRRSERRREWKIQPYPRRTVSGIAEVTVTRQQDRAAAPACTVTHGVPGVVFALGGLTGNYWHDFSDVLVPLFVASRRYGGEVQFLVSNIQPWWLGKYEAVVRRLSRYDAVDLDRDTEVRCFRRVAVGLRMHKEFSVKPELAPGGQRLTMADFAAFLRDTYALPRPRRRARGGRGWW

SEQ ID NO: 49128 - protein, 152 aa, Oryza sativa
MGKLWTILTHVHSLAGPTVMLLYPLYASVQAMESPSKLDDEQWLAYWILYSFITLVEMLLESLIYWIPIWYELKLLFIAWLALPNFRGAAFIYNRFVREQLRKHGLAGAGAGAAASVGKKDKSSPSSSPKDKEKTKSKFLSFVTPKKDHEAY

SEQ ID NO: 49129 - protein, 403 aa, Oryza sativa
MRGSDHHQDVVAAPRGGGGGGDDGQAHDMVMPGFRFHPTEEELIEFYLRRKVEGKRFNIELIAFVDLYRYDPWDLPALASIGDKEWFFYVPRDRKYRNGDRPNRVTPSGYWKATGADRMVKVEGDRPIGLKKTLVFYVGKAPKGLRSSWIMNEYRLPHGDADRYQKEISLCRVYKRPGIEDNFHLTGTTTKSSGSKAAAAMGKKHAAANRTSSTAAAAAPRLAPMFDGGGGGHHSSALMGKATYNASHTAAEGTNAIAMSLSAAAALHPPAPAMFRSTASVASLSSTTSTEEDGTSLFHLKAGATTTNTTTMHHHHHHQQLPASTHALLNTNSSAMATIPIDELSRAIGSYSNIHHQPNSTTTHQSTALPPSQQSPLLPFASMEKIWDWNPLLESPKVCTNFK

SEQ ID NO: 49130 - protein, 362 aa, Oryza sativa
MGKAEARSREHGGGGGGGSGSAGKIFVGGLPRDTTEADFVKHFGQYGEIVDSVIMRDKHTSQPRGFGFITYSNPAVVDRVMDDIHEFNGKQVEIKRTIPKDSVQSKDFKTKKIFVGGLPQALTEDDFKHFFQKYGPVVDHQIMRDHQTKRSRGFGFIVFSSDQVVDDLLANGNMIDLAGAKVEIKKAEPKKSSNPPPSSHGSASRSAYGRDSRGHSSGNDYGGLANAYSNYNSGGFGPYRNHGVYGGGSLSGYGGIGEYGVQYGRYYTGLGGSGSMPSFGYASRVGPYGGGFDGPYAGGNLSGYRRGGDESFGGLSSSSFGGAMYGGAAYDPALGGYASGSTPERSRGNLAGGSGRYNPYGR

SEQ ID NO: 49131 - protein, 279 aa, Oryza sativa
MRKRERENPCGICGHYHKYELGEVCGVCGHRPPASAGAQAAAGAAQAAAPRQDSAFPSEILKDFLFLGSYDNASRSELLKTIGISHILNTVPLCQNLYRNSFTYHCLQDEKTLQFDDAIQFLEQCERDKARVLVHCMSGKSRSAAFVIAFLMKTKGWRLSQCFQWVKERRPQVQLADAAQRQLIEYEQKLFNSTVGIPAQAFVPTDAFPSLGFGFPKPSGDIQVPIFNQQASIFERVSPHNIPSNFTFGAERTTEVKLPDNNSFGVVNSSGGDSMMDSS

SEQ ID NO: 49132 - protein, 146 aa, Oryza sativa
MDFTSSYFHAFGNPDFAAVFSGGGSAQAIRPGTTTSSSGGAKAVNVGRGGAARQGAPSVFCVQDAEVEEAHHFLDECTLCRKGLAGDIFMYRGDTPFCSEECRREQIEMDRNRHRRKKQQYSPTAQAAAHHHRSERAPQRQLQPQR

SEQ ID NO: 49133 - protein, 85 aa, Oryza sativa
MAAHNTSMTCEGDYETEQKKQAAADVLFHYSQFIMVCIGEGVRPTDLRLHLMKEVSGMATSLTKEPQQAAASPDSSEPSSSGTTK

SEQ ID NO: 49134 - protein, 259 aa, Oryza sativa; identical to SEQ ID NO: 29047

SEQ ID NO: 49135 - protein, 492 aa, Oryza sativa
MNMPLLLLIAIVVVSLSHGNGEQTDLTRETFPAGFVFGTASSAYQVEGNALQYGRGPCIWDTFLMQPGVTPDNSTANVTVDEYHRYMDDVDNMVRVGFDAYRFSISWSRIFPSGLGKINKDGVDYYHRLIDYMLANNIIPYVVLYHYDLPQVLHDQYKGWLHPRIVRDFVRFADFCFKTYGHKVKNWFTINEPRMMANHGYGDGFFPPGRCTGCQPGGNSATEPYIAAHNLLLSHAAAVRTYRDKYQAIQKGKIGILLDFVWYEPLTDKEEDHAAAHRAREFTLGWYLHPITYGHYPETMQNAVKERLPNFTREQSEMIKGSADYIAINHYTTYYVSHHVNKTSISYLNDWDVKISYERNGVPIGKQAYSNWLYVVPWGIYKAVMHVKEKYKDPIIIIGENGIDQPGNETLPGALYDFFRIQYFDQYLHELKRAIKDGARVTGYFAWSLLDNFEWRLGFTSKFGIVYVDRSTFTRYPKDSTRWFRKMIKSEV

SEQ ID NO: 49136 - protein, 72 aa, Oryza sativa
MCELYPHLAEEVKLLEAAHPGLFKRDFGKLDDDKAHALDMKIKKQRIAEISVVLRRGDLTKEVTKVLAELVE

SEQ ID NO: 49137 - protein, 204 aa, Oryza sativa
MGKEMNLIREDEYGGGGVGFEPTEDELMLHFLRPQLRGFAPRVAGAVVEADPCGAAPWELLARHGRREEGFFFSARARRKPSVRRTVAGCGGGGGGGGAWMHSSTKNGQSVTDLGVVVRWCRINYCFYVRGEMGQQRSTGWMMAEYEITDPRCYRRADDGEEDDFWVLCHVRKSSRPQAAKISPAKPARRRKPAAAAAADVRAA

SEQ ID NO: 49138 - protein, 153 aa, Oryza sativa
MLQCRVFAYADTQRYRLGPNYLMLPVNAPKCAHHNNHYDGAMNFMHRDEEVDYFPSRHAPLRHAPPTPITPRPVVGRRQKATIHKQNDFKQPGERYRSWAPDRQERFIRRFAGELAHPKVSPELRAIWVNYLSQCDESLGVKIANRLNVKPSM

SEQ ID NO: 49139 - protein, 84 aa, Oryza sativa
MALKKKMPAPRKGKIMKRVTILIKARRMKKRKLHAKIGLRSTKKVWMTMRKVERIWTSIWMMKLKKVMTGSTKKHSLTTMRLWI

SEQ ID NO: 49140 - protein, 459 aa, Oryza sativa; identical to SEQ ID NO: 37023

SEQ ID NO: 49141 - protein, 55 aa, Oryza sativa
MRRRRQQAGEQVPVDDAGLLIDVDAAASLRDVALAVDDGGALQRRHHVGEVKLGL

SEQ ID NO: 49142 - protein, 389 aa, Oryza sativa
MMASLSTPPATAGVSPSPRPSLLAYKKAAGLTPSPWCGWRRAAVATAATSSNRTAAPAETIVTGNDVPLLSFAEVAERLDEFHASGTRNQNYMAMYSSIFGGITTNPSAMVIPIDDHMVHRGHGVFDTAAIMNGHLYELEQHLDRFLKSASMAKITLPFDRSTIRSILIQTVSASKCTQGSLRYWLSVGPGDFQLSSAGCANSALYAIVIESPSLPVPAGCKVITSSIPIKSQQFAVMKSVNYLPNALTKVEGEENGGFTGIWLDDEGFVAEGSNMNVGFVTQSKELLMPRFDKILSGCTAKRVLTLAKQLVADGRLSGISSRNVSVQEGKAADEMMLIGSGILVKPVVQWDDQIIGSGKEGPIAQMLFNLILEDMRSGPPSVRIPVSY

SEQ ID NO: 49143 - protein, 477 aa, Oryza sativa
MDPTAPNSGDANGGAAADATAPSNTTVTLPPLTLRDVPLLPSAAAATDTIPNPISRHPYFHPPATFYISPGDVSLRHAFFDLASASPSPLVAYRRAGPRAGVAVDPARARAAVVTCGGLCPGLNTVLRELVVGLRELYGVRDVFGVAAGYRGFYGPDADHARLDLAAVDDWHKKGGTVLKTTRGGFDLNKIVDGIVARGYTQVYAIGGDGTMRGAVAIFNEFKRRGLNISITGIPKTVDNDIGIIDRSFGFQTAVEIAQQAIDAAHVEAVSAVNGIGLVKLMGRSTGHIALHATLSSRDVDCCLIPEVDFYLEGKGGLFEFLYERIKQKGHAVVVVAEGAGQELIPRTDDQKREQDESGNIVFLDVGPWLKSELGKWWKREHPSELFTVKYIDPTYMIRAVPANATDNLYCTLLAHSAIHGIMAGYTGFVPGPINGNYSYIPLEDVAVAKNPVDVNDHKWAWVRSVTNQPDFMKPKY

SEQ ID NO: 49144 - protein, 481 aa, Oryza sativa
MAHALGCGAATAPAGVGLLHHHEKAGALFSAAGSIVRVQQLSGKGSKSQAIRCAMPSASEHGGISTATASSSDQKKGGLRGKLNKVVLAYSGGLDTSVIVPWLRENYGCEVVCFTADVGQGDIELEGLEKKAKASGASQLVVKDLKEEFVSEYIYPCLRAGAVYERKYLLGTSMARPVIAKAMVDVAKEVGADAVAHGCTGKGNDQVRFELTFYALNPELKVVAPWREWDITGREDAIEYAKKHNVPIPVTKKSIYSRDRNLWHLSHEGDILEDPANEPKEDMYMMSVAPENAPSKPEYLEIGIIAGVPVSINGKDLSPASLLAKLNEIGGKHGIGRIDMVENRLVGMKSRGVYETPGGTIMAAAVRELESLTLDRETMQWKDMLALKYAELVYAGRWFDPLRQSIDAFMENITATTTGSVTLKLYKGSVNVASRKGPYSLYREDISSFENGEIYNQADAEGFIRLYGLPTRVRAMLEKGI

SEQ ID NO: 49145 - protein, 239 aa, Oryza sativa
MHSGYALLSSVLLVLLALSIITLVPRMPSPQSFFRSPPPRLINSRVPHPSDASDCIFSDGKWVRDAAAVTAYREDCPFLDPGFQCISNGRSNSSFRYWRWQPHGCQLPKFNATDMLERSRNGRIVFAGDSIGRNQWESMVCMLAASVPAGKSRIYEQSGKPISRHKGYLAMVFADYNLSVEYYRAPMLVMIDRFPASSGAVRGAVRLDMLPRHANRWAGADVLVFNTGHWWNEHKTIKS

SEQ ID NO: 49146 - protein, 335 aa, Oryza sativa
MAEGFGRWEADPLFPAAECVQDSADRMEGVYRLLLHERKLIQDDTSHTKRRVSMQYERDVCTALGTTKWQLEQFEREVNAAALSNKSNSRENAILQFRQFIRAIAEQISQVEDSLESLRNDSIRTPKHSYLTEHDGDELASFLSGSNRKDNHVIYSTGTDEIVELKLDSVPAVNGYHSTQERTSCEFRYSGEDVEGAAKPQCSCGENACEGDHNGSSMRGLDSDDSIGRKHHFRSKLSRKYHSFMRNLWFTNRGRESFTKRRKDGEVMDSLRNGSTLPSFNLPPAGRAMYFWPELIKRRLSKFKCSTHHKHLQVRLATVLLIALAVLGLLVLHVR

SEQ ID NO: 49147 - protein, 307 aa, Oryza sativa
MERDITSLPTKRVAVVTGGNKGIGLEVCRQLAADGITVVLTARDETRGVEAAEKLSGMGLSSVVFHQLEVTDSSSVARLADFLKTRFGKLDILVNNAAVGGMEYVQGVDTNKEQFVSMDKKQRLAWLNKQGRETYDAAKNGVQTNYYGTKIVIQALLPLLLQSSGEGRIVNVSSDFGLLRVVNNEDLRKELDDVDNLTEERLDEVLDSFLKDFEAGALEAHGWPTAFAAYKTAKVAMNAYTRILARRHPELRVNCAHPGYVKTDMTIDSGFLTPEEGGRNVVTVALLPDGGPTGAFFAEGKEASFLG

SEQ ID NO: 49148 - protein, 50 aa, Oryza sativa
MPRWYPMQSLTLALSSCAIRAMALPHRNLQLWEAGVAWRVGWLWRCIYIV

SEQ ID NO: 49149 - protein, 365 aa, Oryza sativa; identical to SEQ ID NO: 48717

SEQ ID NO: 49150 - protein, 342 aa, Oryza sativa
MHRRCNLRFTLLTKIDLLPPSPSDPKSLVLLPHYHHSGDSAAAMHPSSSSSHPPDHPNPKSPPPPAPAMGYPANHPPPPPSSNAAYFASAAPPPAATNGTAAFAVAYPYPAPPPHSHSHPPPPPPHAYHHHHYPPPPPPHHHPYPPHPPPPTCLRRLLGLVVAAFLLLGAATFIVWLLLRPRVPAFSLASLTLSRVAYSAANSSLSASFDASLLADNPNSKLTVTYFSPLASVSLAPSSPIAVATLPPFAQPPRNTTTLAFRLEVDGAYVGPDDAAPLKGGGVGTMEVQVRLAAVAVFDRGGWRTRRRVMRVMCDGVPVAFRGKNGMEAAFTGPARRCDVVL

SEQ ID NO: 49151 - protein, 49 aa, Oryza sativa
MRPQVAGGWQVQVSLGALEVLNKTNLNLFLHFVSPIVEMLVQMSLEHFA

SEQ ID NO: 49152 - protein, 156 aa, Oryza sativa; identical to SEQ ID NO: 39678

SEQ ID NO: 49153 - protein, 191 aa, Oryza sativa
MEHPAVKYVQVFKNHGASAGASMAHSHSQMLGTPFVPPSVTTRLNCMKEVFERLGKCSLCEFQSKDILVRETHNFSAIVPFAASYPFEIWIIPRQHSSYFHEIDKDTALDLGSLLRTMLAKLSKQLNDPPFNFMIHSAPFGVSSSCLPYTHWFLQIVPQLSLIGGFEIGSGCYINPVFPEDAAKILWELDC

SEQ ID NO: 49154 - protein, 204 aa, Oryza sativa
MASSGGAAISAGPTPPSAAAASSSVDWHLRPPNPKNPVVFFDVTIGSIPAGRIKMELFADIVPKTAENFRQFCTGEHRKSGLPQGYKGCQFHRVIKDFMIQGGDYMKGDGTGCTSIYGTKFDDENFIAKHTGPGLLSMANSGVNSNGSQFFITCAKCEWLDNKHVVFGRVLGDGMLAVRKIENVATGPNNRPKLACVISECGEM

SEQ ID NO: 49155 - protein, 484 aa, Oryza sativa
MGLLSSASRSCCCCSWVRGGCASCCSWIRGFCGGGGGATTSAQDTAASDAKKRKKRKWVVRGVFGKAAREAEEPLTLETMKKRKSAATSPELEKNKWGTKKNWKKKKGKTQPTGLASLVKEISLENSTRNRAAAGEILRIGNHNIPSRVFTFRQLADATGSFSPENLLGEGGFGRVYKGFIPDTKEVIAVKQLDKDGLQGNREFLVEVLMLSLLHHPNLVTLLGYSTECDQRILVYEYMPLGSLQDHLLDLTPNSSPLSWHTRMKIAVGAARGMEYLHEIANPPVIYRDLKASNILLDGGFNAKLSDFGLAKLGPVGDKSHVTTRVMGTYGYCAPEYAMTGKLTKMSDIYSFGVVLLEIITGRRAIDTTKPTREQILVHWAAPLFRDKKKFVKMADPLLDMKFPLKGLYQALAISSMCLQEEASSRPLISDVVTALTFLADPNYDPPDDVEPLPIKAPNLDRESSQKEAEGGDNDSDEGGEEQV

SEQ ID NO: 49156 - protein, 329 aa, Oryza sativa
MTTLLGCWKSMSTVCLHRVAITDEELGFFLAGCLVLERLDLSFCNSIGALKIPSALRRLRSLRVRSCRMLRTIESGAPMLATVWYDGWPLLRFWLGGALETTHLEVHATRMGDVIQYAGSKLPSAALNLETLVLSTVYERLKAPVMHDKFQQLKHLVICLGQSTMFCAGYDFLSLASFVDACPALETFILRIAYGIRWYNDQNRGNPDDGASCRGREASKLRNGGIVGNLRKVTITGFCSANSLVELTCHILVIAALSLEHLTLDTSPGYDRKCSSYDRCRKMSTEALREAETALAAARKYVEPKVPDSVNLMVLGPCGRCHLGMEFGS

SEQ ID NO: 49157 - protein, 172 aa, Oryza sativa
MSSSTSVLSPLLAHAHGRASPTSRAQPLIASRLNLAGFSASSPRRILPAPRASGGGGGGEEEDSRVQELRVPGSWLTPAGAAQESEWLRETLHKWLDDEYCPEPANVDISNTAARSFYESLTAKESDLGEILLKMVGDLQKLSYKESFHGAFSAANAAVSLISQRMESSSDD

SEQ ID NO: 49158 - protein, 604 aa, Oryza sativa
MPKRVADEIAALPEPRGPLRRPCADLSRRVRLLAPLLDHLPASSSSSSSTPLADALGAARDILRKTRDGSKIDQAMRGDAFLDEFAGVNRQIHLALDALPYNTFHMPQEVQEQVALVHSQFQRASTRTDPPDTQLSMDLAWALTDNPSDPALLTRISHKLQLHTMADMKNESIALHNMVISTAGEPDGCVDQMSSLLKKLKDCVVTEDHANDALTTRSASIKHRSPIIPDEFRCPISLELMQDPVIVSSGQTYERSCIQKWLDSGHKTCPKTQQPLSHTSLTPNFVLKSLISQWCEANGIELPKNKQNSRDKKAAKSSDYDHAGLVSLMNRLRSGNQDEQRAAAGEIRLLAKRNVNNRICIAEAGAIPLLVNLLSSSDPRTQEHAVTALLNLSIHENNKASIVDSHAIPKIVEVLKTGSMETRENAAATLFSLSVVDENKVTIGAAGAIPPLINLLCDGSPRGKKDAATAIFNLCIYQGNKVRAVKAGIVIHLMNFLVDPTGGMIDEALSLLSILAGNPEGKIVIARSEPIPPLVEVIKTGSPRNRENAAAILWLLCSADTEQTLAAKAAGVEDALKELSETGTDRAKRKASSILELMHQANEA

SEQ ID NO: 49159 - protein, 186 aa, Oryza sativa; identical to SEQ ID NO: 33215

SEQ ID NO: 49160 - protein, 102 aa, Oryza sativa; identical to SEQ ID NO: 47342

SEQ ID NO: 49161 - protein, 211 aa, Oryza sativa
MLSHVEMAPAAGGFKLFGKVIMQCGVSEGTQDKAQGFVVAREKVEPEEEEEEEQRVPAAATSGQRASIKREAADRDEEQRQGGGDAAGQPTQRRLQDSAEARAAAAAPLPCPRCRSRDTKFCYFNNYNVNQPRHFCKACHRYWTAGGALRNVPVGAGRRKNRPLGPLAVAHHNHHHRAAAGFVLGFPNPSSPTSPSPVYTDRWPVTPDRPF

SEQ ID NO: 49162 - protein, 62 aa, Oryza sativa
MEPMAIVTVTGGVLGPVFVLLSRIRPVVDFFRRLCDCLRHPQRRPARPVRALWKRAAADEQN

SEQ ID NO: 49163 - protein, 177 aa, Oryza sativa
MLKDWTGMDKEKAKQYILSCQSYDGGFGLVPGSESHGGGTFCAVAALCLMGFIQVDLASNLQEPSSIDVRLLLEWCLQRQAADGGFQGRRNKSSDTCYAFWIGGVLKIIGAYRFIDHGALRSFLLYCQSPYGGFTKFLYDQFPDIYHSYYGLAALSLLEEEGLEPLCTELGILSAAL

SEQ ID NO: 49164 - protein, 115 aa, Oryza sativa
MGHAGGRPHCSLALKSWTKFPEAAVDGGQRPALKRLVYEVEKDCMKVLRFCGSYCDHGPAADIKKLFRISTDRHPRHGHRQRSSPAANMKGRGDAEMSTWDERAANNDWLRWQEI

SEQ ID NO: 49165 - protein, 225 aa, Oryza sativa
MSFLFGKRKTPAELLRENKRMLDRSIREIERERQGLQAQEKKLITEIKKTAKEGQMGAVKVMAKDLIRTRHQITKFYQLKSQLQGVSLRVQTLKSTQAMGDAMKGVTKAMGQMNRQLNLPGLQRIMMEFERQNERMEMTSEVMGDAIDDALEGDEDQEEETEELVNQVLDEIGIDINQELVKAPSAAVAQPAAAGKVAQAESAGGNGDGGIDADLQARLDNLRRM

SEQ ID NO: 49166 - protein, 291 aa, Oryza sativa
MEPDQSGAEQTSPRGNDWEVVQLTASTYASAPGPRMSEPSDEAEVKGYDTKGDDSAAALLMSGHFSVSPSEVESLLRGTDGKEHQKELSGQDAVSAEGDDEKFQDTCEHKLKDDLHWIPSFDKGKNLSLVDMEFDKAFQGMGLVGEEPLGFSSSRYNPIDANNEKKTEEPTVQNVNRVIDSSKVVASSEQNKPDDSEFPHEASWKKQLLSLYKNVRKSNKFWPIVVATALVGVTCFWRRWQKGKLQHQPVKLYPSSNEKINQAVGPLNRIKDILVANNHPAPAIHGHARLS

SEQ ID NO: 49167 - protein, 440 aa, Oryza sativa
MEKADREKALHEAQRELRNTRHRAMVAEEKSVELQRQLNLVKGVKHSMETEMEAMENRRNELEGRIELAHGEITSLLDKGRILEERLESEKALTLELAAKYQQMDALEAERRELRGHLEASQSEAKNLGDKITLLEKKLEEEKAFSTRLAVRCHGIEALEEKKKGTEHELESAREEIASLQKKVSILELKIQEERALSEKLATRSCDLEALGVQTNELRSQLQSANSEIAGLNEKVKMLEEAEEKHKPLTAGLESQLRLAQAEAMRLKDHVSSLEKKLESQKNLSSAYITALDASEAQKNKFASRFELKEAEVEELRRKIRLLEEEIHKEKAQSSELGVQCQNLKEQFTSRALSQPMKPMASKELHIKKEKELARAAGKLADCQKTIASLNRQLKSLADFDEFVPGFENDSVIAEGWEENGLKLLNSANYPAQLGCLAVK

SEQ ID NO: 49168 - protein, 438 aa, Oryza sativa
MDAKDILGLPKTAFPSVQEKKPRAPKEPQRKPDGVSREVYALTGGVGMAPLMPTIEASHLKRRPAVEKEKIAWQWLPFTSSARTDNLQLYHWVRVVNGAPPTGDYHFAKYNKKADVLKYTDEEYEKYLTDPAWSREETDKLFELCERFDLRFIVIVDRFPTDRSMEDLKSRYFSVTRALLIARARSFDEVAGNPLVKETFNAAHETERKRALSALLSQTKQQERKDAEILAEAKRIMETRAASKHTEEAGALAHFDNVDGVSPLSNTHPLSTATLPAAAVNNSIPASLRMLRVYLRTQALDQMVQAASASAGLRVIKRVDQTLQDLGVNLKPKVPTKAVCVEHLELRNEILTLLNLQKQLQNKEAEVSANRENSFTEAPSTPKRANRDVDRPFVPDTVGFAGERAGKRDHKRKTTGRFIDAPPSPPQSKRPRKLKASD

SEQ ID NO: 49169 - protein, 362 aa, Oryza sativa
MAPFMACASPPVLTLALLASCGALLATSMLPARATAGSCLDVGDMVMMDRFRAWQGAHNRSYPSAEEALQRFDVYRRNAEFIDAVNLRGDLTYQLAENEFADLTEEEFLATYTGYYAGDGPVDDSVITTGAGDVDASFSYRVDVPASVDWRAQGAVVPPKSQTSTCSSCWAFVTAATIESLNMIKTGKLVSLSEQQLVDCDSYDGGCNLGSYGRAYKWVVENGGLTTEADYPYTARRGPCNRAKSAHHAAKITGFGKVPPRNEAALQAAVARQPVAVAIEVGSGMQFYKGGVYTGPCGTRLAHAVTVVGYGTDASSGAKYWTIKNSWGQSWGERGYIRILRDVGGPGLCGVTLDIAYPTLTL

SEQ ID NO: 49170 - protein, 377 aa, Oryza sativa
MPATAGRVRMPANNRVHSSAALQTHGIWQSAIGYDPYAPENNKHQPPSSSVSANAAAANAAAASAPSASAPSSSSAAASSDNAYTSFQGLLALARITGSNSDETRGACRKCGRVGHLTFQCRNFLSVKEDLDMEDDIDAGIRAASQANAQAKLDEFRKKTSGGKDADEGSDDEDEDDEEDSDDSSDSDIDPELERIIAERERAKSGRKHSRDEEKKTSRHRSSSRGRSKHRRSTKRSDTEDDLEEERSKDKKKKSRRKRHERSDEDSESDSDKKRHRKSRKDRKRRRSHRRSDDTSDEDESGGEDRRRRRHRKRQHHHRKGASDGDSGSGASDSADDRKRSSRRRRHRKSESSGSDGDERHGQGAKRSKEKRGKEEC

SEQ ID NO: 49171 - protein, 377 aa, Oryza sativa
MLQFKTSRRPTSGTAEDGVHGRRLGQMLTMFRVDRIALFVCSLTRITIKRSSGGTTEECSKLWLVDLGGSERLLKTGASGLTMDEGKAINLSLSALGDVIAALRRKRSHVPYRNSKLTQILSDSLGDGSKVLMVVHISPSDDDIGETVCSLSFAKRARSIESSKELSEDIKKLKQKRIAELDKEICDAEQELKDLNEQIKRAETSLEERKKLSSSACQALSDEKGSPRSTLVVVGHIDSAESPQATEKTKSRASHGSVPHFMSPTVCSRQRHSSASHSATKTRLTKSVNRYPAAELSGSHSFSYSSCKNAAKARSVAFSSSMPKMKCLPLKSDQINMSNNSIDSTAASAPRRRESFISRPAQRAPLHQHRRRMSSLT

SEQ ID NO: 49172 - protein, 412 aa, Oryza sativa
MSARKEAKGSAGGDRIGALPDEVLHRVLSFLPAQDAVRTCVLAPRWRHLWKSATGLRVGEDESNLGSVKEQQEFLDHLLVLRDSAPLETCVLRFNWYDDDDFEDIFRLNVWFRYAIHRKVRFLRLDVWQEEEFGNPVPIDEQPIVSQHLTRLQLYGIVLNDGLLDFSSCPSLEHLVFESCVFECAKISSNSVKHLSITFSNFPAGTSRVRIDIPSLVSLRLDRIYDRKPVLERMPSLVDAFVSVPSSSEDFCGESDSGDCGRDGCESCYGFTNKNCVLLEGLSEAKMLVLINEDESFIFKRDLKWCPTFSKLKTLILNGYWCVPDDSHMLARILEHSPALEKLVFQLGYQAYKRTNKIKGILNPMERSAGISEHLQIVEVQCNAIDGQVLKVLKYLSTFKIYFSLEEATIES

SEQ ID NO: 49173 - protein, 396 aa, Oryza sativa; identical to SEQ ID NO: 37129

SEQ ID NO: 49174 - protein, 330 aa, Oryza sativa
MRTTRRHPLHDAIDAARWDAEPPLGRLVVVAHAAFLHAGFVPYSAGGSSSASRRPLPDEIGAVASSLSLRYTVPELLRRTTTQRRRSRAETAVLRLCAHGDHVVFYGYLTGDANQVQRLQTTRHWACIDALSVASVLLSGDLDATAHALADDGAGLWKKLAGGLARRLFVDMCRKNSRLLPPRLTSLPPDLQEDILRRLAVEDIAAMYFTCTGLRDLIAGSEVLNNNFQWGELWMNFAWSQGYLRRWLPSPARVVVGRRSQTTSFVAGDGEDRCRWRDPTKQMIERFVEKRSKVLAAGGDGGRRRPVMAARGRRRGDKGAASSRQKWMHR

SEQ ID NO: 49175 - protein, 337 aa, Oryza sativa
MGKIKIGINGFGRIGRLVARVALQSEDVELVAVNDPFITTDYMTYMFKYDTVHGQWKHSDIKIKDSKTLLLGEKPVTVFGIRNPDEIPWAEAGAEYVVESTGVFTDKEKAAAHLKGGAKKVVISAPSKDAPMFVCGVNEDKYTSDIDIVSNASCTTNCLAPLAKVIHDNFGIIEGLMTTVHAITATQKTVDGPSSKDWRGGRAASFNIIPSSTGAAKAVGKVLPDLNGKLTGMSFRVPTVDVSVVDLTVRIEKAASYDAIKSAIKSASEGKLKGIIGYVEEDLVSTDFVGDSRSSIFDAKAGIALNDNFVKLVAWYDNEWGYSNRVIDLIRHMAKTQ

SEQ ID NO: 49176 - protein, 278 aa, Oryza sativa; identical to SEQ ID NO: 32060

SEQ ID NO: 49177 - protein, 93 aa, Oryza sativa
MSSSGRGGKRQGAPPPAPFGAAAKRAQPHGGHLADDSIRASGDLSSPIGSAPNGRCLLFHRCFSGTSNLCMLLLCSMKWMNRLYMICQLAATL

SEQ ID NO: 49178 - protein, 316 aa, Oryza sativa
MSSSATGVNVSDRPISPDTTRVAWVGTGVMGQSMAGHLLAAGYALTVYNRTASKAEGLVSRGATLAESPRAAAAAADVIFLMVGFPSDVRSTSLDPSTGALAGLAPGGLLVDMTTSDPTLAAEIAEAAAAKSCAAVDAPVSGGDRGARSATLSIFAGGDAAVVARLAPLFKLMGNALYMGGPGAGQRAKLGNQIAIASTMVGLVEGMVYAHKAGLDVAKWLEAISTGAAGSKSLDLYGKRMLERDMAAGFYVRHFVKDLGICLSECQAMGLALPGLALAHQLYVSLLAHGEGGLGTQALILAIERLNNTCLDKKPE

SEQ ID NO: 49179 - protein, 238 aa, Oryza sativa
MLPSSRYLLAPAPLPAMVVRPPPPHPPSRGTSPLARPPLCRAMARAAPSLSAAASTAASSSTTPAKKKVLLPIAMGTEEMEAVILAGVLRRAGADVTLASVEDGLEVEASRGSHIVADKRIAACADQVFDLVALPLTKVDDNLERSIEVNEIEWSSDHNPHVLIPIANGSEEMEIIMLTDVLRRANVNVVLASVEKSTSIVGSQRMRIVADKCISDASALEYDLIILPVSYFSFHIFI

SEQ ID NO: 49180 - protein, 254 aa, Oryza sativa
MGREERFPVWEAALGAGVAAAFATGLVGVYLSMPDSDYSFLKLPRNLEELQILTGHLENYTSDYTIQVLVGYCSVYIFMQTFMIPGTIFMSLLAGSLFGQLRGVALVVFAASAGASSCFFLSKLIGKPLVFSLWPDKLMFFQKQVAKRREKLLNYMLFLRVTPTLPNTFINLASPIVDVPYHIFLLATLIGLIPASYVTVRAGIALGELTSLSDLYDTQSIALLFLIGIVSVTPTLLGKDEAQEKTTEIAVTAS

SEQ ID NO: 49181 - protein, 88 aa, Oryza sativa
MASSSSRLSCCLLVLAAAAMAATAQNSAQDFVDPHNAARADVGVGPVSWDDTVAAYAESYAAQRQGQCHFNSSSKRNNIARHHKEKYH

SEQ ID NO: 49182 - protein, 445 aa, Oryza sativa
MHTHTQDTTTLPLHLSLFITVVCLLLHPLCYLLFSFSSYLELAPYYQSSSMGDPYTNFLRGYHHHHRSHHPLHFPPPPPPPPPPYAASFSGLYSSYLHPPPPPSSPPIREALPLLSLTPSTTHDDDHHHRRHDQDHHHHHKQGQEKNSHGGGGAASCSNNDDKRESPSAAAAADDQAAEVTVALHIGLPSPSPSDAAAAAGNQAAAAAAAEASAAGGGSSRMQVEEEGGEEEDEDEAAAAAATATLPLGCASIGIGKLTKGQYWIPTPSQILIGPTQFSCPVCYKTFNRYNNMQMHMWGHGSQYRKGPESLRGTQPTAMLRLPCYCCAAGCRNNIDHPRARPLKDFRTLQTHYKRKHGIKPFMCRKCGKAFAVRGDWRTHEKNCGKLWYCACGSDFKHKRSLKDHIRAFGRGHAACGIDSFDDLDADDDPSSDLDHASASASRVG

SEQ ID NO: 49183 - protein, 315 aa, Oryza sativa
MRVAFDAKRAAVGVGARMLFYPTLVYNVVRNRFEPHFHWWDQVDEHVLLGAVPFPSDVLRLKELGVCGVVTLNESYERLVPRCLYEAHGIENLVLPTRDYLYAPSFENLCRAADFIHRNALCGKLTYVHCKAGRGRSTTVVLCYLVQYKQMTPAEAYEHVRLRRPRVLLASAQRQAVEQFYQLRVKKSGKSICLDSPIMKPPLFLATRNLIAFDEKTFVMVSKSDLEGYDADTLAVNVGSGLWEISLVYRVQFASQAAFAGFSYLWVRCRAPRKNKEALPVPESNNSVGSESCSLEAEQLAKPHPCLLQGVMVNP

SEQ ID NO: 49184 - protein, 36 aa, Oryza sativa
MPGKAGSPSSYTVEYMHGPRAPPPPATRRSCTYVCV

SEQ ID NO: 49185 - protein, 226 aa, Oryza sativa; identical to SEQ ID NO: 40600

SEQ ID NO: 49186 - protein, 195 aa, Oryza sativa
MAAAAVEKKSGSEMTVVRGLDVARYMGRWYEIASLPNFFQPRDGRDTRATYALRPDGATVDVLNETWTSSGKRDYIKGTAYKADPASDEAKLKVKFYLPPFLPVIPVVGDYWVLYVDDDYQYALVGEPRRKDLWILCRQTSMDDEVYGRLLEKAKEEGYDVEKLRKTPQDDPPPESDAAPTDTKGTWWFKSLFGK

SEQ ID NO: 49187 - protein, 318 aa, Oryza sativa
MGGVHGVCYGMNGDNLPSQSEVVQLYKSNGIGAMRIYSPDQKALDALRGSGIAVIIDVGGIGAVANLANNPSAAADWVRDNVQAYWPNVIIRYIAVGNELGPGDMGTILPAMQNVYDALVSAGLSNSIKVSTAVRMDAITDSFPPSHGVFRPDLQQFMVPIAQFLANTMSPLLANVYPYFAYRDNPRDIPLNYATFQPGTTVRDNDSGLTYTNLFSAMVDAVYAALEKAGEPSVRVVVSESGWPSAGGFAANVENARNHNQGVIDNVKNGTPKRPGQLETYVFAMFNENQKPGDETERHFGLFYPDKTPVYPITFPPN

SEQ ID NO: 49188 - protein, 466 aa, Oryza sativa
MAETVDDKVSYFQAVTGISDHDLCTEILAAHNWDLQLAVSSITANPSSPDPAPSAPLPPLAPREADLVAPHLPPPPQQQQQQQQPGIAWKLVTLPFYVVSGGVGLIAGSIRLGAWVAGGVLSRSLSILGLAQGGGGGGDRLLELPPSAAEAADFVAEFEREFGAGRGPHFVAEGFADALQRAQREYKLLFVYLHSPDHPDTPAFCGGCLCAEPVAAFIDENFVAWGGSIRRTEGFKMSNSLNASRFPFCAVVMASTNQRIVLLRQIEGPKSPEEMITTLQGAVEECSASLVAARIDAEERLNNQRLREEQDAAYRAALEADQARERQRREEQEKREREAAEAERKRKEEEEAQERAAQEAAEKEAALARRRQEKAMALGAEPEKGPDVTRVLIRFPTGERKERRFNSSTTITSLYDYVDSLDCLKAEKYSLVSNFPRVTYGPEKLSQTLEEAGLHPQASLFIEIEQ

SEQ ID NO: 49189 - protein, 240 aa, Oryza sativa
MPNQSLDGFYVIDAAKAALEKECPGVVSCADILALAARDAVSMAAGNINGASLWQVPTGRLDGRVSSAAEAVANLPSSFADFAKLKEQFGSKGLNVQDLAILSGAHAIGNSHCVSFAKRLYNFTGKGDADPTLDRAYAAAVLRAACPPRFDNATTVEMVPGSSTTFDTDYYRLVASRRGLFHSDQALLQDREAAATVRVMARSSRQAFFRRFGVSMVRMGNVGVLTGAAGEIRKNCALIN

SEQ ID NO: 49190 - protein, 413 aa, Oryza sativa
MACLELDSSQFLLNGDGSVIGSPFDIQLECNSFTGSKAVQDHSRYTLPSQCTNAPDPPPLPGTSYGTHRTSRNAKACRCVPEEIQDFWDRMFFEAYQYDLRVLTEDGNEIMSHSCVVGIKSPVLRAMLEEAKVQGGIRHILIPGVPSEAVHVFIRFLYSSRFEQYQMKRYVLHLLVLSHVFSVPSLKRVCINQLETSLLSPENVVDILQLARLCDAPRLSLVCTRMIIGDFKAITQTEGWRVMRQANPSLEQELLESLVEEDTKRQERARRLEENKVYLQLHEAMEALIHICRDGCRTIGPRDQTLKSSQAVCRFPACKGIELLLRHFSACKMRVPGGCANCKRIWQLLELHSRMCSALETCHVPLCRHFKEKMQHLSRKEEAKWNLLVSKVLESKATTSSISERRKFPSLKT

SEQ ID NO: 49191 - protein, 338 aa, Oryza sativa; identical to SEQ ID NO: 28478

SEQ ID NO: 49192 - protein, 423 aa, Oryza sativa; identical to SEQ ID NO: 33503

SEQ ID NO: 49193 - protein, 270 aa, Oryza sativa; identical to SEQ ID NO: 37268

SEQ ID NO: 49194 - protein, 128 aa, Oryza sativa
MASPAPPPTARLRPSQAASSASSSSFPTSICGLGSLGDASRVSSVSFRRRPPASPLVRCSQDPGKIEVFNTEGTEQSQGGSTGMMFALCTYWVCLAGQLQRLCSAAAAAATVEIVYCYCSCWLPSHTE

SEQ ID NO: 49195 - protein, 181 aa, Oryza sativa
MPRPRRRQPRPGGPRSCSGVHRRDRVRQLPDLLPAQLLHREAAERGDRARLGHQVRHQGLHLRQELQPPRHRRRQGHAAPDEGRAGRVQVLREREAVLPGDARHHGDARAARPAVQAGGAGVPQEGHHHVRGGDERGSHGPRHVGRGEEEGGQDDAEGGEGSAEICRGSDLGTRREEMGCG

SEQ ID NO: 49196 - protein, 425 aa, Oryza sativa; identical to SEQ ID NO: 37011

SEQ ID NO: 49197 - protein, 291 aa, Oryza sativa
MAMGDAKPSAVHIPMPARDRDRDRDRELLLVPPAAVATSASASASAAGRDSDSDDESKPSSASAAAAAAQTGREAFHKVVHSWASKKFMTGCVILFPLAVTFYITWWFFRFVDGFFSPIYAHLGINIFGLGFVTSISFIFVVGVFMSSWLGASILGLGEWFIKRMPFVRHIYNASKQISAAISPDQNKHAFKEVVIIRHPRIGEYAFGFITSEVLLQDYSSEEQMYCVYVPTNHLYIGDIFLVNSSDVIRPNLSVREGIEIVVSGGMSMPQVLSIVETEQNQWSRMRSSRS

SEQ ID NO: 49198 - protein, 364 aa, Oryza sativa
MSDGKDSLDLSGLGAAVPNAKELSAEDKANLVESIKNTLQGLAARHTDVLESLEPKVRKRVEVLREIQSQHDDLEAKFFEERAALEAKYQKMYEPLYSKRYEIVNGVVEVDGVTKEAADETPAEQKEEKGVPEFWLNAMKNHEILSEEIQERDEEALKYLKDIKWYRISEPKGFKLEFYFDTNPFFKNSVLTKTYHMIDEDEPILEKAIGTEIEWFPGKCLTQKVLKKKPKKGSKNTKPITKTENCESFFNFFSPPQVPDDDEEIDEDTAEQLQNQMEQDYDIGSTIRDKIIPHAVSWFTGEAAQDEDFEGIMDDEDDDDEDDDDDEDEDDEGDDEDDEDEKKGGRVPAGEGQQGERPAECKQQ

SEQ ID NO: 49199 - protein, 459 aa, Oryza sativa
MEGLTVQNALKGNRLFILDHHDHFMPFLDKINKLDGNFIYASRTILLLKDDGTLKPLAIELSLPHPDGQQHGAVSKVYTPANTGVESQIWQLAKAYASVNDSAWHQLISHWLNTHAVIEPFVIATNRQLSVVHPVHKLLSPHYRDTMNINALARQTLINADGIFEKTVFPGKYALEMSSVVYKNWKFTEQALPVDLVKRGVAVPDPTSPYNVRLLIKDYPYAVDGLVIWWAIERWVGEYLAIYYPNDGVLRGDEELQAWWKEVREVGHGDLKDQDWWPKMDTVQELTRACTIIIWIASALHAAVNFGQYPYAGFLPNRPTVSRRPMPEPGTEEYAKLERGGDEADLVFIHTITSQFQTILGISLIEILSKHSSDEVYLGQRDTPEWTSDAKALDAFKRFGSRLVDIENRIKDMNGNSALKNRNGPVKMPYMLLYPNTSDVTKEKGQGLTAMGIPNSISI

SEQ ID NO: 49200 - protein, 466 aa, Oryza sativa
MRKSWGLGRPSGDRRWLLPFAASLLVSATLFLAAACGLFSPPSLADGDDDSILIDVATWDTASAAESEIKNRLLDSNSDSDDGDNPDDAAVNSDASSADPPRIAYLLEGTKGDGARMRRALQAIYHPRNQYILHLDLEAPPRERIDLAMYVKGDAMFSEVGNVRVIAKGNLVTYKGPTMVACTLHAVSILLKEGLEWDWFINLSASDYPLVTQDDILHVFSSLPRNLNFIEHMQLSGWKVISRAKPIVVDPGLYLSKKFDLTMTTERRELPTSFKLYTGSAWIMLTKTFLEYCIWGWDNLPRTLLMYYVNFISSPEGYFHTVICNSDEFRGTAVGHDLHYIAWDYPPKQHPNMLSMKDFNKMVKSGAPFARKFPKDDKVLDKIDRELLHRSEGQFTPGAWCDGSSEGGADPCSSRGEDSVFEPSPGAERLRGLMKKVLSWDYRNGSCSSLGYDQTKRDWYVPKGRG

SEQ ID NO: 49201 - protein, 377 aa, Oryza sativa
MGGVTSSVAAKMAFFPPTPPSYALVDDPAAGVTTMTGQPHRENVEVLRLRTRRGNTVAAVYVRHPDAATTLLYSHGNAADLGHLYQLFLHLSFNLRVNVLGYDYSGYGQSSGKPSEHNTYADIEAAYKCLIENFGAKEEEIILYGQSVGSGPTVDLASRLHRLRAVVLHSPILSGLRVMYPVKRTYWFDIYKNIDKIPQVTCPVLIIHGTADEVVDWSHGKQLWELCKEKYEPLWLKGGKHCDLELFPEYLRHLKKFVNTVEKSPSPRNAWRESLDRIEPSRKSVDCFEPSRRSVDFFEPSRKSTDRREKSRPTRDRMRGVEHRYSNVEKTDKLKFSFDHMEKSRRSIDIFERPKKNIEQLDCGRKSVDRLDRIWAS

SEQ ID NO: 49202 - protein, 493 aa, Oryza sativa
MSGWASPSRMYASKGSKRDVLMGGLLVPGLDERTCASRYSSAMYRKNTARSPCRHLVKRLREQEALQRRCGPGTAAYWRAAERLGSRRNGTAGADDEGCKYLVLVPYRGLGNRMLAMASAFLYAMLTGRALLVDRGESLADLFCEPFPGTSWLLPPEFPIKNLQDLTGEAPESYRNLVQSDRPATSVSELPYVFVDLDHGCTYHDKLFYCDDERHFLHRAPWLLMRTDGYFPPALFLNPAYQDELDRLFPRKDSVFYLLAHYLLHPTNKVWGLITRFYDSYLRDSDERLGIQVRVFDGDTPFKHILDQITACTSQERLLPEVVEQEPSSFPAPAAAATAARSKAVLMTGLNSWYYDNIRSRYWQSPTATGEVVRVHQPSHEEHQLSGSTTHDMKAMAEMYLLSMTDAIVTSGWSTFGYVGHGLGGLSPWVMFKPENLTTPDPPCRRAVSMEPCLHGPPFYDCRVKRGADTGKLVPHVRHCEDMSWGLKLVHPE

SEQ ID NO: 49203 - protein, 244 aa, Oryza sativa
MGASASVLSLPTAAAIPGAATAIAGAAGCFALGYFLALSRFPRQVVAASPASGETSDEDSEEDSEEDDDDENSGRSRAAKRAPKRAGLRLLFWARNVVTKSDSAKEAERAKARTAASPLEVENLAEIIEDFKMVLVVRNDLKMGKGKIAAQCSHATLGLFKKLQQRAPKSLRRWERCGQVKVVVKIESEEDMLVLQGRAKSLNIPTHITIDAGRTQIAPNSRTVMAILGPADMVDDVTGGLKLL

SEQ ID NO: 49204 - protein, 140 aa, Oryza sativa
MSSAAAATRFIKCVTVGDGAVGKTCMLICYTCNKFPTDYIPTVFDNFSANVSVDGSVVNLGLWDTAGQEDYSRLRPLSYRGADVFILSFSLISRASYENVQKKWMPELRRFAPGVPVVLVGTKLGMLCYSLIHPLPSEIS

SEQ ID NO: 49205 - protein, 471 aa, Oryza sativa
MPSSGDAAGRRPRVVLIPSAGMGHLVPFGRLAVALSSGHGCDVSLVTVLPTVSTAESKHLDALFDAFPAVRRLDFELAPFDASEFPSADPFFLRFEAMRRSAPLLGPLLTGAGASALATDIALTSVVIPVAKEQGLPCHILFTASAAMLSLCAYFPTYLDANAGDGGGVGDVDIPGVYRIPKASIPQALHDPNHLFTRQFVANGRSLTSAAGILVNTFDALEPEAVAALQQGKVASGFPPVFAVGPLLPASNQAKDPQANYMEWLDAQPARSVVYVSFGSRKAISGEQLRELAAGLETSGHRFLWVVKSTVVDRDDAAELGELLGEGFLKRVEKRGLVTKAWVDQEEVLKHESVALFVSHCGWNSVTEAAASGVPVLALPRFGDQRVNSGVVARAGLGVWADTWSWEGEAGVIGAEEISEKVKAAMADEALRRKAASLAKAAAKAVAGGGSSHRCLVEFARLCQGGTCRTN

SEQ ID NO: 49206 - protein, 498 aa, Oryza sativa
MAETEDTQLQKAIFAQYIMMKKLFMELEEEREASATSASAALSMIRKLQKEKEEQRMEAWQYKRIAEEKISHSDKALEILQEVLQQKELENFYLRNQLLVYKHKLLDVGIDECDIADETITNNIPLFESKTVENLCRSIKRNFSLPTLQMKKLFAEKDTDRNVESTKSRLGGFVCNLSEDELKHISGNASDFKALEVQKSLLTDGDATEEHGEEPNPPSSDLSQQPHLLEESSCSSSLLSNHRDTSSERAIQVGENAEDTRHGDQLKQSHSGIGKEEVQSHPLEESSSCSSFSTSSNHRDICSEREIQVGRNAEDAPHGDQTKESHSGIEAEEVAVHPISDIVDTIKIQERSQGVEESSCTANEIITKESELSPKDVPKERRPQALSKLSATRKVGSMNNLYRNVHVITDKSSTPRGKNSTPRAGTERTRSRLKRVQSEKMVEMNDTRKNKEQIIMLKEVYEQLNMIESHMRPSTSQETPRNDQSLESVLEAALSFSL

SEQ ID NO: 49207 - protein, 179 aa, Oryza sativa
MSKQLVSRLLGMFRSRAQVGADKFGNRYFTRVEEVDGVMKEKRWVEFKGSDQDPTTVPVEWICWLNGQRKKAPTPEELAELEARRERVKQNIELLKKKEEEKKTGVRPVKTVGKFESPNLKSFIQQFPDTSLDQRKGHDEVSRSKDGTDTEDATIDTDRSSEPTGTGATFKPGTWQPPT

SEQ ID NO: 49208 - protein, 379 aa, Oryza sativa
MAGASPSARAEVVVPPEWAAATATAAAASSEPAPPVVVVCGPKNAGKSTFSRLLLNSLLPRYGRVGYLDTDVGQPEFSPPGCLSFHVVDEALTDLLNPTLRECERCCFFGDISSKRDPETYLNCLFHLYDYFVEKYRSGASEPLPLIVNTPGWVKGAGFDMLVEMLRYICPTIVVQIRISAQSKNLPDGMFWLDCGQTGPNMINIDAPFHDALNRSLLIQKDSYGMRERRLIEYFKQCFPSDISLTTNKELAYGLTSLPPYEVSISDVMVIHLHCQVPPSEVWHSLNATIVGLAISCGTIEAGRSIPWCAGLGIIRGIDVQRGILYVITPVPLEHLQRVDLLLQGLIEIPKSLLQVRGCVSPYMPTNVLHRISERDINT

SEQ ID NO: 49209 - protein, 457 aa, Oryza sativa
MLLEELLRCQIQEWYPAFRRHTVPTVILPLPAAFLRYLAGRPAYPDTGGEHPEGRDDDAEPLPFFLPAITSGRSAFPPAHAHHPDPVSLLDRDNSDLFFDSADDDDRDADSPLRPAFPELEAAVDSAIAELGGAALPKLNWSAPKDAAFMSADGTIRCTCFAEVAMLLRSSDCVAHDLACARPSCKDFAPPAGVRRNAATGADEGARPNVYKNTKDTTEEQTDQHEALETSGTGAPPNGGESSNDAGSMSDSKESADKGGNQSAVDGETDDAPQEDVGEESNWTWVDDGFQYYLALRKWYPGLRPELEFRCFVRQRRLIAMSQRDPSAYYPSLPGWSAEVQPKIEAFFEQVIEPQFASENYTFDVYVRADGWVKLIDFNPWGGYTLPLLFTWEELEQEEREEVEVRVVMQHGAVRPGLMTAVPYDMLDWGEGSGWDVFLKKADDELNKQMASLGADS

SEQ ID NO: 49210 - protein, 133 aa, Oryza sativa
MASSVFKAMAEKAGPSVRKQALTLTDAAASRVRQLLGVRQRAYLRLGVKARGCNGLSYTMNYADEKGKFDELVEDKGVKILIDPKALMHVIGTKMDFIDDPLRSEFVFMNPNSKGECGCGESFMTSTKNKGPA

SEQ ID NO: 49211 - protein, 175 aa, Oryza sativa
MHGVLTSPCLRPPPLLRRAFPSPATRLLPPQTLALRPLPLPRGLRSSPPPPRAAAEAAASAVGGLLAPLSTLEVGLRSVNLAPLRAPVAAAMSAVVRWLGVYREVLLVGVLFSWFPNIPWDRQPFSALRDLCDPFLALCREVMPPVFGRKLDLSPLIAFMAIDIIIMILRPQPRM

SEQ ID NO: 49212 - protein, 415 aa, Oryza sativa
MASAFSPATAAPAASPALFSASTSRPLSLTAAAAAVSARIPSRRGFRRGRFTVCNVAAPSATQQEAKAAGAKESQRPVYPFAAIVGQDEMKLCLLLNVIDPKIGGVMIMGDRGTGKSTTVRSLVDLLPDIRVVVGDPFNSDPDDPEVMGPEVRERVLEGEKLPVVTAKITMVDLPLGATEDRVCGTIDIEKALTDGVKAFEPGLLAKANRGILYVDEVNLLDDHLVDVLLDSAASGWNTVEREGISISHPARFILIGSGNPEEGELRPQLLDRFGMHAQVGTVRDAELRVKIVEERARFDRDPKAFRESYLEEQDKLQQQISSARSNLGAVKIDHDLRVKISKVCAELNVDGLRGDIVTNRAAKALAALKGRDTVTVEDIATVIPNCLRHRLRKDPLESIDSGLLVVEKFYEVFT

SEQ ID NO: 49213 - protein, 165 aa, Oryza sativa
MRRARRLLHGARPLRRHPQRRLPEHDVQREPAELHRPGERGDVPGEQVQRRPDGVRHQGGHRDGRVRRQDPPQARRRPIASHHVSHIHTLYSESVIVQRSLEVIKPRGGVHRWPWRGGAATRTRHARACWQLDHLWFVGVGIGPRLLVRQWRWPLATGRSNIMLC

SEQ ID NO: 49214 - protein, 460 aa, Oryza sativa
MAKGHVLVLPMPCQGHVIPFMELSHRLADEGFEVTFVNTEVDHALVVAALPPGGAAELRQRGIHLTAIPDGLAEDEDRKDLNKLIDAYSRHMPGHFERLIGEIEAGGGRPKVRWLVGDVNMGWSFAVARRLGIRVVYFSPASTACIAFMRKIPKLIEDGVLNEKGWPERQETLQLAPGMPPLHTSLLSWNNAGAAEGQHIIFDLVCRNNKFNDDLAEMTICNSFHEAEPAVFKLFPDLLPIGPLVADRELRRPVGHFLPEDAGCLDWLDAQPDGSVVYVAFGSMAIFDARQFQELAVGLELTGRPFLWVVRPDFTPGLSTAWLDAFRCRVAGRGVIVEWCSQQRVLAHAAVACFVSHCGWNSTLEGVRNGVPFLCWPYFCDQFLDRSYITAVWRTGLAVAAGEEDGVVTRDEVRSKVEQVVGDGEIRERARLLRDTARACVSEGGSSHKNFRKFIDLLSE

SEQ ID NO: 49215 - protein, 266 aa, Oryza sativa
MELESEQHGCEHYTRGCRIRAPCCGEVFGCRHCHNEAKNSLEIHLNDRHEIPRHEIKKVICSLCDKEQDVQQYCSGCGACMGKYFCEKCNFFDDDVSKNQYHCDGCGICRTGGVDKFFHCDKCGCCYSNVLRDSHHCVEGAMHHNCPVCFEYLFDSTKDISVLHCGHTIHLECLNVMRAHHHFACPVCSRSACDMSDAWKKLDEEVAATPMPEFYQKKMIWILCNDCGATSNVNFHVLAQKCPGCSSYNTRETRGCGRPAAARSTV

SEQ ID NO: 49216 - protein, 187 aa, Oryza sativa
MAVARGCPDLQELVLIGVNPTVQSLRMLGEHCRSLERLALCGCETVGDPEIICLAERCAALKKLCVKGCPVSDRGMWALNGGCPSLVKVKLKRCRGVSYECIENLKVVRGGSFSISLDIVLERDAGGAIENGGQEAGQVQITELTDQMAAMDLPTNASNAQSSAQASSRMRSVMSALRRRFGNPPAL

SEQ ID NO: 49217 - protein, 129 aa, Oryza sativa; identical to SEQ ID NO: 28694

SEQ ID NO: 49218 - protein, 436 aa, Oryza sativa
MPFKDAARAACVSHAFRRSWQHRPNLIFCIGTLGLDFINKIDRIIKNHSGIGIKSLQLEYDTFCNARRSASISYHLNNWLQIAVTPWIEELILTLSLSSYNVDYNFPCSLLSDGRGSSLRHLYLGSCFFHPTVNLELRNLTRLHLVTVHITGDEFGCLLSNSYALERLELKYCYGIICLKIPCLLQRLSHLEVFECRMLQAIENKAPNLCSFDLGARQVRLLLGESLQMKTLSLDYPSAVYYARAELPSNVPNLEILTICSDHEMVDTPMLPSKFFYLKCLTIDLAWRLSPAYDYFSLISFLDASPSLETFCLEDRMENELIIGDMSHMRQMLEHRHDNLQSVEIIGFCYTKSLIELTCHILDNTTSLKHLKLDTTRDVFSCSTGKHDKCFHMGKDMLTEAKKAVLAIETYIEPKVPSTVMLNVVKPCNRCHVAES

SEQ ID NO: 49219 - protein, 510 aa, Oryza sativa
MATLETWVGFGSAMAGVGLLWSRMPEHVHEEARYIISSVVPMVMSYFNPYEQITVSEYGEERFRRNKMFDAVSTYLRSACLGSATKLKAKLGNNIGDDPLVILDENQEVVDCLDGARMWWRLYPKASKNTGSTIISMFPGDTDEPRCYRLVFHKRHRQLVLKTYLPGIIRRWRELTAKDRQRLLFTNHSKQGEISMWTSVPYNPPSTFDMLAMDHAKKVEIMDDLRAFQKGKEYHSKVGKAWKRGYLLYGPPGTGKTTMIGAMANFLDYDVYDLDLTSVKDNAELRKLFLDTTDKSIIVIEDIDAIEVELTTKRKGKKMDNSDEVDNNHVLVELSNKTDDKSKVTLSGLLSFVDGLWSACGSERVFVFTTNHVDRLDPALIRPGRMDKHIEMSYCRLDAFKVLAKSYLDITEHSLFGEIGRLLDETDTTPADVADNLMPRGKRNGEISRLIDEIDAPADVAGNHMLRCKRKRDADECLAGLVETLKKAKMESATPPMDTIEEEANKEEQT

SEQ ID NO: 49220 - protein, 120 aa, Oryza sativa
MVTTTVRRSGAHELSAGGAARCERRACGGTGAPKRGLGVQARARKDGACAGARGRCCMLPGGGCTASLCLDVLRWFRAPIRVIGLDEFCDFGTVRDLPALPPLTTGEVACHRHCAPVVST

SEQ ID NO: 49221 - protein, 28 aa, Oryza sativa
MLLRPMVVSLCLLVLVNVPVKVMIFTGK

SEQ ID NO: 49222 - protein, 389 aa, Oryza sativa
MALKYHPDKNADDPVASDKFQEATFSYNILSDPDKRRQYDSSGFEAIEADSQELELDLSSLNTVNTVFAALFSKLGVPIKTTVSATVLEEALNGSVGISQLELGQSVFRKVEKQSAHFYSVDITDKEAKMGLVCRVQSTAKSKFKLLYFEPEENGGLSLALQEDSVKTGKVTSAGMFFLGFPVYRFEQNNSVAAAKDPDSAFFKRLDGFQPCEVNELKAGTHFFAVYGDNFFKSATYNIEVVCAEPFSTEKEKLRCVEAKILAKRSELSKFESEYREVLAKFTEVTSRYAQEMQTIDELLKERNAIHASYTNNTTLQRSSSSNKGKTSSKESKSDDDQTVKKEKKSKSKSMEGSRSDDDGPRKEKKPKERLRRKKWFNIHLKVDKRRPC

SEQ ID NO: 49223 - protein, 333 aa, Oryza sativa
MTGKRSTSTSTSTSTSSKRGCSATRTATAGSIAGVDHNTYHCLIVLVLFETPSGFAMFGMSGDRLIQPNALQEIWANFGVDYRVSKFIWLKEFREIKDKSSAINHDTGVSCDLAEMIMKWHHPGQKMAVGKPEYKEIIERSLSVPCMFDEIVMEVMWGLKNLMHVLVPQEKMKLSKDDYLPMSQGLYMLLNRYGLDVKPEMVTDSIIKLACFLLDCEYCDVKNSKHLRWTGEYIEKRSGIKCLDWDLMKLATGIKIICYPTERSTAEEAMFTQDELSKLVKDAHKYEGKIRKRSFMNAYSEMVEARQLIPMAQKQLEDLVKEAKDACEAEQST

SEQ ID NO: 49224 - protein, 317 aa, Oryza sativa
MEIRAPPTSLRLAPPPPASASFRRTALRTSFLNGSVSLRLIQVRQSNVNRFKCNGIRSNLLDRFSRVVKSYANAVLSSFEDPEKILDQAVLEMNDDLTKMRQATAQVLASQKRLENKYKAAEQASDDWYRRAQLALQKGDEDLAREALKRRKSYADNASSLKAQLDQQKGVVENLVSNTRVLESKIAEAKQKKDTLKARAQSAKTSTKVSEMLGNVNTSGALSAFEKMEEKVMAMESQAEALGQLATDDLEGKFALLETSSVDDDLAQMKKEISGSSSKGELPPGRTAVSNSGAARPFRDIEIENELNELRRKANEY

SEQ ID NO: 49225 - protein, 216 aa, Oryza sativa
MDEEEHEVYGQEIPEDGDMDGADVDMASGGDDAAKLQELDQMKRRLKEMEEEAAALRDMQAKVAKEMQGGPPGGDPSASTAEAKEQVDARSVYVGNVDYACTPEEVQQHFQACGTVNRVTILTDKFGQPKGFAYVEFLEQEAVQEALNLNESELHGRQIKVAPKRTNVPGMKQRPPRGYNPYHGYPYRSYGAPYFPPYGYGRVPRFRRPMRYRPYF

SEQ ID NO: 49226 - protein, 189 aa, Oryza sativa
MNCETCQLKELELEQDEIKDVLRCILHTIFFHRTLTLVRPKDVDCDLFEITYVQCGLPDLEKEVDEKINQFIAWVEKHPNRRSQVCLSFFDEKNKNPSWFTSKTERIYWEQWFINLHVISPKGHGKSRSSKASTSIRGKALEEASSKRAALGLLIQEVLFQIINFANEKKDHIPPISDRIFNHEISIPR

SEQ ID NO: 49227 - protein, 542 aa, Oryza sativa
MGSDSPPKKWGLREQREAYLRWFSLADDDGDGRVTGKDALKFFAMSNLSRPELKQVWAIADSKRQGYLGFSEFMTAMQLVSLAQAGNEISQDTLAHADLETLLPPTMEGLDKKLKNNSMSKSNSDIVVRHPSELPASANWFNSKSGKKIPLRSVTSIIDGLKKSYIEKLRPLEKTYQFDDFVSPLLTSSDFDAKPMVMLLGQYSTGKTTFIKHLLKTNYPGAHIGPEPTTDRFVVITSGPDERCIPGNTIAVQADMPYSGLSSFGTAFLSKFECSQMPHPLLDHITFVDTPGVLSGEKQRTQRSYDFTGVTSWFAAKCDLILLLFDPHKLDISDEFKRVIGSLKGHDDKIRIVLNKADQVDAQQLMRVYGALLWSLGKVLDTPEVMRVYIGSFNDKPIRETVAGPLGKELFEKEQEDLLSDLNDIPKKACDRRINEFVKRSRSAKVHAHIISHLKKEMPALMGKAKAQQRLLDTLDEQFAKVQKELHLPAGDFPSVDEYRETLSAYNFDKFERLKPKLVQGVDDMLAYDIPDLLKSFRNPYE

SEQ ID NO: 49228 - protein, 267 aa, Oryza sativa
MAEEQFLAVAVDAAKNAGEIIRKGFYQTKNVEHKGQVDLVTETDKACEDLIFNHLRKHYPDHKFIGEETSAALGATADLTDDPTWIVDPLDGTTNFVHGFPFVCVSIGLTVGKIPTVGVVYNPIMNELFTAVRGKGAFLNGSPIKTSSQNELVKALLVTEVGTKRDKATLDDTTNRINKLLFKIRSIRMCGSLALNMCGVACGRLDLCYEIGFGGPWDVAAGALILREAGGFVFDPSGGEFDLMARRMAGSNSYLKDQFIKELGDTS

SEQ ID NO: 49229 - protein, 511 aa, Oryza sativa
MRTSTDPSGSIESFHGLVHLRTAAPLLAAAVALYMLIEQLSYHRKKGSMPGAPLVVPFLGSAAHLIRDPVGFWDVQAALARKSGAGLAADFLFGRFTVFIRDSELSHRVFANVRADAFHVVSHPFGKKLFGEHNLVYLVGEEHKDLRRRIAPNFTPRALSTYAVIQQRVIISHLRRWLDRSASNGGKAEPIRVPCRDMNLETSQTVFVGPYLTEKARERFDRDYNLFNVGFITLPVDLPGFAFRRARLAGARLMHTLGDCARQSRQRMLGGGEPECLLDYLMQETVREIDEATAAGLPPPPHTSDVEVGALLFGFLFAAQDASTSSLCWAVSALDSHPNVLARVRAEVAALWSPESGEPITAEMMSAMKYTQAVAREVVRYHPPATLVPHIAVEAFQLTAQYTIPKGTMVFPSVYESSFQGFQDADAFDPDRFFSEARREDVVYKRNFLAFGAGPHQCVGQRYALNHLVIFMALFVSLVDFRRERTEGCDVPVYMPTMVPRDGCVVYLKQR

SEQ ID NO: 49230 - protein, 388 aa, Oryza sativa
MVESGSEAAAATAAAVLTAPLSLEGGLAAELRPANLVQRVLSLFRNVRPGSDLSHFQLPATFNLPKSQLQLYGEGVYCVGKDYLRRCAKGSDAVERFAAVVGWSISTTRPPIFGFAPYNPVLGETHHVSSGSLHVLLEQVSHRPPVSALHATDDDGEIELVWCQNPIPKFHGTSVEATVKGMRHVKLLKFSENYEIDCPNLLIRLLPAPSAEWSGTVRIVCKESELEAELIYYRSNAFLGLGGDPRCVKGKIFSSRSGEIICEIDGHWDRIVSAKDAKTGKVSVLYDAESAIADLKTPVVRNQEGVSPSESVVVWGEVSDAILKKDWERSSQAKRRVEDTARRLDRERNDKGEVWIPKHFSLSQDKNGSWECSPLEKSVPPAPIIVPS

SEQ ID NO: 49231 - protein, 342 aa, Oryza sativa
MTDEPAAEETTSCVVGSGVVAAGPVEEMEELDVIADGGVGSSCGVDADGAAHHKQDGVHAGESREVLQAMEKQEAATPDPCADNSVPADADDKQPLKESSIVNQGSAESVKRRRLPSLLQKPAKFSSPSSGSKGPTSSAKRRSRLHSAKENSSPPNNESDQQATSSVPQNRSILEAFQKSKNFGRCETGNAASSSKNLGTTIAARISQLESATGPVKHTDSALSQVKPPIEAFPKDVPEITSRTSQLEEQRSSHVTRVKEKLFGFTSQSAHQKANTPRKEKGKTQNESFKARPLPNFYRRNKQAKDSIHQSSQDVNNSHAHPTNKEASKDKQICCFPLRRLG

SEQ ID NO: 49232 - protein, 187 aa, Oryza sativa
MSSLPFFLPLLSLLPHLVAAPPRAGRARRPSEPAQVLPSSFSLHLCRRRRLRRGRTDAAPVVAVVAVSPPFFSLPFCQRRQPSPFVSLLSVSQRRRPPATAVLCQHLLRPPPLCPSAPLFPPTQIYGAAPWSAAQFLAGSDSLTGGERRSGRPARMEEADWQKLAVEISIKPVPFKHPGPTSSAHGL

SEQ ID NO: 49233 - protein, 169 aa, Oryza sativa
MVKYVGDDEEQNGLQMTGLNLMDKTLAVRGARIAFSIWDVAGDSQFLDHVPIACKDAVAILYMFDLTSRCTLTNVIDWYERARKWNKTAIPILIGTKFDDFAQLPLEMQWTIVNEARAYARAMKATLFFSSSTHNINVNKIFKFITAKLFNLPWTVERNLTVGEPIIDF

SEQ ID NO: 49234 - protein, 15 aa, Oryza sativa
MVLVVVDSFDRFEVW

SEQ ID NO: 49235 - protein, 452 aa, Oryza sativa
MASFLSRAAAVSLLAIVLVLTAATSTSPAAAAARFPEEARPTRSGYLNVTSTNSLYFAFYEATDPVTTQPAAVPLLVWLQGGPGCSSLIGSFAELGPYLLLDSTSALARNDNRWNRRFGVIFIDNPLGAGFSAPASGDDIPTDERTIAAHLLAALQSFMALDPAFRARPLFLTGESYAGKYIPAAASHILDANAKLTDDRRVNLQGIAIGNGMTHPVAQVTVHADQAYFAGLINAEQKAKVEEMQDKTVSLIKSKKWAAARRERNRIIAFLKNATGVATPFNYAREKGYPTRPLRDFLNTGEAKAALGARSDVEWARCSEAVSAALADDIMRSARGDVEAVFLAPDGVRVLLFQGVFDLHSGPASVEAWVRELAWPGLGAFLAAERAVWRLGDEQLAGYVQRSGALANAVIVGAGHMAAGDNRPAAQAMIEGWVLQTGPFDGSGQRVVGSLF

SEQ ID NO: 49236 - protein, 70 aa, Oryza sativa
MNSASLKAGAPARSSRPRSPRGSRRSIHLCHGSKPPSTIADMSFVCSLLLVCIAIKFLDSEMFVLPVVMN

SEQ ID NO: 49237 - protein, 129 aa, Oryza sativa
MRFRGVQVDLVYAGVCLPWCPTTWSGPQCDRSVLRGLDDLATARSLNGIRVADEILRLVPETAVFRTMLRCVKHWAKARGVYSNVAGFLGGIGWAILVARMCQLYPNTSPACCSRASSAALRGGSGPAR

SEQ ID NO: 49238 - protein, 406 aa, Oryza sativa; identical to SEQ ID NO: 31256

SEQ ID NO: 49239 - protein, 382 aa, Oryza sativa
MGEEAPEFRVESVALESKDCLQNAIDIGDKTYVISRSDDPKSSITIKILDKLTQTWVVPTVLGAPPNPTSSHSAVLVNNEKILIIEKGVPLNDSIWFLEVDTPFVKQQSKIKGTVVVAWSKGVIGEGQKPIVISGPSGVGKGTLIAKLMKEYPSKFGFSVSHTTRAPREKEIDGVHYHFTERSKIEEEISEGKFIEFAHVHGNVYGTSVEAVESVTDEGKRCILDIDVQGARSVRASSLEAIFIFVCPPSFEELEKRLRARGTETEEQIQKRLRNARAELDQSNSPGLFDHLLVNDDLEACYENLKKLLSLDDDHEDSNDSFIKDGKETACYSILSKTNSEILLQSETNEAEKGTTNLLSLDLSLSGGAPGRTRGLKISPVN

SEQ ID NO: 49240 - protein, 442 aa, Oryza sativa
MESCFVTPHEDTPETIEEEVKEMESCFVTPHEDTPRQGLWLSPLDIVMVSRGHTPTVYFYQRDTATVAADFFEVGRLKEAMAKALVAFYPLAGRLSVDGDGRPEIDCNAEGALFVVAQSKLTVDAFSDLKPSPELRRLFAPRIEPASIMLGVQVTFLSCGGVALGTVLHHVAIDALSAFHFFQTWSSFCRDGEAAMLELPCHERTLLRTRSPPIVHPDVHSMFSLKLNFCEPSDPISTKIFVISKNQLDALKQICGGLSTFCAMSALVWQCMCIARQLPLDAETRVIFPVNIRRRVKPPLPDRYFGNALVDLKVASTVRDIVLGTLDVTAAQIKNALGRLDDEMLQSAIDYNEMAGMPNKHTKGNLPDTELRMVSWLGMPVYDADFGWGKPEMMSRAESVRGGFVYMMDGIDNDGGGVRVLMCMEARKMEEFERLFYAKFAQ

SEQ ID NO: 49241 - protein, 253 aa, Oryza sativa; identical to SEQ ID NO: 37733

SEQ ID NO: 49242 - protein, 443 aa, Oryza sativa
MEGNSTNLDAAIESLLNVEKQMRLAGDVAGTRKAAIDIVELCYKAGAWKTLNDQIVVLSKRRGQLKQAITAMVQKAMEYIDLTPDMDTRIELIKTLSSVSAGKIYVEIERARLIKRLAKIKEEQGQIDEAADLMQEVAVETFGSMAKTEKIAFILEQVRLCLDRQDYVRAQILSRKISPRVFDADPSKEKKKPKEGDNIVQEAPAEIPSLLELKRIYYELMIRYYSHNNDYLEICRCYKSIYEIPSIKEDPSKWIPVLRKICWYLVLAPHDPMQSSLLNATLEDKNLSEIPNFRLLLKQLVTMEVIQWTSLWEFFKDEYANEKNFLGGALGDKAAEDLKLRIIEHNILVVSKYYSRITLKRLADLLCLSLQEAEKHLSDMVNSKSLIAKIDRPMGVVCFRTAQDSNGILNSWAANLEKLLDLVEKSCHQIHKETMIHKAVLKA

SEQ ID NO: 49243 - protein, 252 aa, Oryza sativa
MQQMSRPSVIIKLILGLLWFIVHLAISLCSLWFDLIYSIECYLISFGLIPKYRKFQLDRLKHLAVVVDSREAKNVAKINQLLCWLSNVGVKYVCLYDIDGVLKKTFAPAMNGSRYGNSGKYLDVGANTKALTCCHKEMTIECISGSDGKDGIAKAASLLCSTCVNGNRNTCGNGEIVFTEADMSGALKAIGCGGPEPDLLLVYGPARCHLGFPAWRLRYTEIMHMGPLNSMKYGAIVKAFYKFSKKYQNFGK

SEQ ID NO: 49244 - protein, 153 aa, Oryza sativa
MRELAGSPGTWSGLSLRVGQLVFAAASVCATASALGFAAYTAFCYLIASMGLQALWSLGLACLDCYALKFKKDLHSAVLLSLFVVGDWVTAILSFAASCSAAGVVVLFDRDIYACRNPQLPCGRFELAIACAFLSWAFSATSALVMFWLLASL

SEQ ID NO: 49245 - protein, 250 aa, Oryza sativa
METALFSAASLFRDADDDQDEMQVDADEQVQSVQYEERAHKFPGVELKIREFSSHQLNANMLWPGTFLFADWLVKNKSILHGRRILELGSGTGALAIFLRKAFQVDITTTDYDDGEIQENIAYNCKANDLGVLPHIRHTWGDQFPVLIPDWDIVIASDILLYVKQYPNLTRTLSFLLKEYKGCSQNAGSSASTAITNKSGTQVPVKFPIFLMSCRRRIGKDQSLFFEECEKAGLEVQHLGALVYLIYTKQ

SEQ ID NO: 49246 - protein, 89 aa, Oryza sativa
MASHLPAAVLSSPIQNRVFEHPPCSVPRWRLRPPRISSLLVGPVPRYRGQWTKHKYQNLFDLVKLDLQVKAYQNYDAGNRQIQHCLGGY

SEQ ID NO: 49247 - protein, 70 aa, Oryza sativa
MTRGNQRDRDRERAQARKPNAKGPQDGLTPEQRRERDKKALEEKAAKKAAQAAGGGTSTDNKNKAGGAKK

SEQ ID NO: 49248 - protein, 189 aa, Oryza sativa
MADFSFSSFCAGETIMGVRGRVPLPEREREMAAGGSVCCVGSFEGWLVGVKANKGRYFGDRRRFLMNSFSRDVIRLPLPSGASRSADAYTRSLPIINGSGVLHCTINAAKCVMLFWKVVLSSSPDSGSKCVVAATSMVKDAVKLALWRPGMKSWSVCDGDTIIRSIDIVFCHAKGTSTCSVSANSPLTS

SEQ ID NO: 49249 - protein, 499 aa, Oryza sativa
MGRVAPSVEEVGGEQPPPALGPGETVSGTVAELRAAYESGRTRSLEWRQSQLRGLLRLLAEEEAAAFRALREDLGKHQAEAYRDEIGVLVKSANAALREVGKWMAPEKVWVPLIAFPARAQLEPQPLGVILVFSCWNVPLGLSLEPLVGALAAGNAVALKPSELAPATAKFLGDNVGKYMDATAVKVIQGGPEVGEQLMEHRWDKVLFTGSPRIARVVMAAAAKHLTPVALELGGKCPCIFDTIGGSARDLQTAVNRVVGGKWSSCAGQACLAIDYVLVEERFVPVLIKALKSTLKKFFADSDHMARIVNARHFQRLSDLLKDKSVAASVLHGGTLDAKNLCIEPTILLNPPLDSAIMTEEIFGPLLPIITVKKIEDSIAFVRARPRPLAVYAFTKNAALRRRIVEETSSGSVTFNDAVVQYGIDSLPFGGVGESGFGQYHGKYSFEMFSHKKAVLTRGYLIELTARYPPWDDSKISMMRQLYRYNYVGFVLTFLGLKK

SEQ ID NO: 49250 - protein, 168 aa, Oryza sativa
MGESGENPTPSRHPTPKAGDSFGSIAGKKGCTKIAGGDRRLGLDEAAVTPGDRNVRSRTRDTEREARRGDDCQVLRLLHMSTSPPSDMSEMVTVQFLDLRIHRMPANDVLQLRRRLPPLELNCVQSVDQFKRFQAFVRKNEEKEKRDEEEAELNTSLPIFLLPLILAN

SEQ ID NO: 49251 - protein, 258 aa, Oryza sativa
MAHKIPLEVAHTLVEIAEVARYAIEHRRGHGPAHDGVSPPAVDGEEAERLRAENVILRARLADDLSILRELQGEPCVSQECPADLHNRLVAAVNNASFLAQLEKIRDESRHQQTELSPDNMTDIPYTEGGGKNGSWVLVACDKPGANMEEISGIDNENYVLVNDDDIIDGMTSFIARCILEDPKSKSISPVELQKAVAMALSTLNDKWKWMSIWEAGKVLYILATWGITIVGLYRSRHVLKIAAKGAVVSAKFVMKAL

SEQ ID NO: 49252 - protein, 384 aa, Oryza sativa
MQSRHRVFAEDLLLPREAEGEDHFDRVPDSLVLLIFNRLADARSLGRCSAVSKRFNSLVPLVDDACLRIDRVITDAADADDALGLAGPRPAGRGVLSHLLKAMLLAVLKPFGHCDAGVRGGGGGERAGKHGGGGGGCGAQQHHSPAQVLKNFSSIRNLRMELPVSDVGTDDGVLLRWKAVFGSTLQSCVILGGTRVDRAAAPAAAAATATAAGDSEASQGDDTGSIPESFYTNGGLKLRVVWTISSLIAAATRHYLLREIVKEHPTLERVALTDAHGQGTLSMGRDQIREFRDKPLAAAAAANRTQVPACNMKLRYAPMLELSDGTRIQGATLVVIKPVGEAGGIGGGRKELDEFVADAFDGPYREAVSALSKRRTYLLEMNGF

SEQ ID NO: 49253 - protein, 148 aa, Oryza sativa
MLHDVLVPVHHVRAGGGDGGQGVDVVRHQRRAVRAAGDGHRLPVRLLLRLPGQDARPVRPRRRRRLRRLLRPLLVQQVRAVPGVPRARRPRLRPQARMGPQRPARRRRRRSARRAAHGPLNGLASYSVTSYLSYHRSIVLWACEVVSS

SEQ ID NO: 49254 - protein, 462 aa, Oryza sativa
MPPPAADMENGAVGSPAAEVEAGASPGSSPVIKTKGRGLRRWRRIPREQRKEGSAASAAAGSGSAQLHKRRIPLPGGAPRGKLHEVVLEEEEEESSTASVESRFVPPAKLDPSLGVLLVASSGFSVGAGGADSDHSEDRSSGSRSSTAASAPRRHNDLSPFAADRAGRSSRAARARAAEAQYSLRCSNAVNSRRQSIAGNGIHKVLADHCDHGEETLLMARDYCNVENGSVVVRRLAQGSVDSDADAAQRSVGNNGDLGSGMKSSADPYAESISLLQRTQEALENEIKMFAVISKESNDNFDGNDDDWSGLVDLAEPLEGTSQNVKDPESRPEEASYLGRLFLEKTEAEIKSIILTRAAQTWAPLVDDQIALYNAQKSLSGDYKQLELKLQHTKNRAAMLEEMAEKLRAECRVLSGSSEVLRLQSRASRVSLFCFIQFVLLFTAVGTFLARLLPSPTEYVPT

SEQ ID NO: 49255 - protein, 358 aa, Oryza sativa
MVTARKGRGGRGPPRPRVVDGGGGSMVSRVAVLAFCVAGIWSAYITQGVLQETLSTKRFGPEARRFDHLAFINFAQNVVCFVWSFIMIKLWSSGGSSSAGRAPLRKYWGVSITNTVGPAMGIEALKFISYPAQVLAKSSKMIPVMLMGTILYGVKYTFPEYICTFLVAGGVSSFALLKTSSKTIKKLANPNAPLGYTLCFLNLAFDGYTNSTQDLIKSRYPKTNPWDIMLGMNLWGTTYNAVIMFVAPLLFSNWPYANGFEAVRFCQENPEVAWDILLFCLCGAVGQNFIFLTISRFGSLTNTTITTTRKFMSIVISSVISGNPLSLKQWGSVVMVFSGLSLQIFLKWKRKKVRDHKE

SEQ ID NO: 49256 - protein, 317 aa, Oryza sativa
MANLVQLILPSFELDLKEITHTFSKFACNAHTICDPELRPLGTGLYPVLSIINHSCVPNAVLIFEGRTAYVRALQPISKNEEVSISYIETAATTMKRQDDLKHYYFTCTCPRCVKDSEEDALLEGYRCNDQKCDGFLLPNAGNKGYTCQKCSTSRDGEELQKMASDVLLLSDKVSSLVSSGIDNSEVGSMYKTIEELERKLYHPLSITLLHTRETLLKIYMELQDWQTALMYCRLTIPVYERIYPPFHPMIGLQFYTCGKLEWLLEYTEDALMSLTRAADILRITHGTKSEFMKELLGKLEEVRAEASFRLSAGDEQ

SEQ ID NO: 49257 - protein, 378 aa, Oryza sativa
MGGDKENLDLSDLNASLPAAAAALSAEDRAGLVNALKDKLQSLAGQHTDVLEALSPNVRKRVEYLREIQGQHDEIELKFFEERAALEAKYQKLYEPLYTKRYNIVNGVVEVDGGNDEPASENAAEGKDADAKGVPDFWLTAMKTNEVLSEEIQERDEPALKYLKDIKWARIDDPKGFKLDFFFDTNPFFKNSVLTKTYHMVDEDEPILEKAIGTEIEWYPGKNLTQKILKKKPKKGSKNAKPITKTEVCESFFNFFSPPQVPDDDEDIDEDTADELQGQMEHDYDIGTTIRDKIIPHAVSWFTGEAVQAEDFDDMEDDEEDDEDDDEDEEEEEEDEDEDEDDEEEKSKPKKKSAGKPKLPSKGGAQGGADQPADCKQQ

SEQ ID NO: 49258 - protein, 276 aa, Oryza sativa
MLTLHGTALFIRPSAYQEVKSSPKHAIVPHNNLLGCSAFYNPVEGHHVQKPHIVPSCKVNFTRASHYLYRSLSERTTRHWLHRFHVNASSDEDFRSSRNIAISLFKRYKNVIDRGGGDNLKEFVSAGVNAYALGCTEEGLRKELMDIEDSGLEIEALRSNGGGTSLTFKVHSFEVRECILWLSIVFITILCTPQPTIIRWSTTPPVSADVLHQWKGFCALIANAYYTKGMAWLPVKTLQLEQMAVTGSSEEPSVVASRMQLVFSTLEVVSPQWPRV

SEQ ID NO: 49259 - protein, 135 aa, Oryza sativa
MASTACFVIVSKNDIPIYEAEVGSAPKREDQAYQHQFILHAALDVVQDLAWATNTMFLKSVDRFDDLVVSVYVTAGHTRFMLLHDSRSEDGIKSFFQEVHELYIKIFLNPLYLPGSRITSSHFDTKVRALARKYL

SEQ ID NO: 49260 - protein, 522 aa, Oryza sativa
MAAATAADVAEDTASVYSGKLTLYVFLTCGVAATGGLIIGYDIGISGGVTSMDTFLGKFFPSVLHQEQTAQGTSQYCKFNSQPLTAFTSSLYLAALVASFFVASFTRALGRKWSMFGGGVSFLAGATLNGAARNVAMLIVGRILLGIGVAFCGLSTPIYLSEMAPPRLRGMLNIGLQLMITVGIFSANLVNYGAAKIRGGWGWRVSLGLAAAPACVIAVGSLFLPDSPSSLINRGRHEQARRVLRRIRGTDEVDDEYGDLVAAASEIEVYSGCSARRRPWRDVLQRRYRPQLAMAVLIPFFQQLTGINVIMFYAPVLFKTIGLGGDASLMSAVITGLVNIVATFVSIATVDSLGRRKLLFQGGCQMLVSQVIIGTLIGVVFGTSGDGNISRALAVCIVVFICVYVAGFAWSWGPLGVLLPSEIFPLEVRPAGQSISVAVNMLCTFAVAEAFLPMLCHMRFGLFYFFSGWVLVMTLFVSAFLPETKGVPIEKMTVVWRTHWFWGRFYCNQDADAHVQVANSKV

SEQ ID NO: 49261 - protein, 324 aa, Oryza sativa
MGAGIRILVVMLAVAAAGSGVVAQLRRDYYASVCPDVETIVRDAVTKKVQETSVAVGATVRLFFHDCFVEGCDASVIVVSSGNNTAEKDHPNNLSLAGDGFDTVIKARAAVDAVPQCTNQVSCADILVMATRDVIALAGGPSYAVELGRLDGLSSTASSVDGKLPPPSFNLDQLTSLFAANNLSQTDMIALSAAHTVGFAHCGTFASRIQPSAVDPTMDAGYASQLQAACPAGVDPNIALELDPVTPRAFDNQYFVNLQKGMGLFTSDQVLYSDDRSRPTVDAWAANSSDFELAFVAAMTNLGRVGVKTDPSQGNIRRDCAMLI

SEQ ID NO: 49262 - protein, 99 aa, Oryza sativa
MAHSGFSGSLTSPRFDLAVDMGHPFLNRTVDGFLKIGAVGACKVAAEETFECLHRGDVSKHKVESALKKICKEGAYWGTIAGVYVGMEYGIERIRGHRD

SEQ ID NO: 49263 - protein, 471 aa, Oryza sativa
MAAAAVLLAAILLALSPLPMSLSAGGGGGGDTGTAEAAADRITALPGQPRVNFSMYSGYVTVDAAAGRALFYWLIEAADPASAPLVLWLNGGPGCSSVGYGASEELGAFRINPDGRSLYLNPYPWNRVANMLFLDSPAGVGYSYSNTTSDLFTAGDNKTAHDSYAFLVNWLERFPQYKYRDFYIAGESYGGHYVPQLSQLVYRNNKDVEKPILNFKGFMVGNAVIDDYHDYVGTFEYWWTHGLISDDTYQKLQVACDFESSAHASEACNKIYEVAEAEQGNIDAYSIYTPTCKKTSFLKRRLIRGNSPWLPRGYDPCTEKYSTKYYNLPEVQKAFHANVTGIPYAWTTCSDDLFYYWKDSPRSMLPIYRELIAAGLRIWVFSGDADSVVPLTATRYSIDALYLPTVTNWYPWYDDEEVAGWCQVYQGLTLVTIRGAGHEVPLHRPRQALKLFEHFLQDKPMPQPVHSIQSF

SEQ ID NO: 49264 - protein, 388 aa, Oryza sativa
MLHDDCIGEGLSSPIAAQILDFCDDGLGDDLFAAVATTSEQFAASSEDGSSSSTATPPLCSNSNDITAVADTAFSPLLSFDSTLSAFLEQEQNPDQDTKLLPSIDETFTAPAYYPAATEANIEQFSQIMVPEHTDAPMPPMQTNRTANALLPLASGYDDECFTAALAGGYMGLDGTLYDQTGVMIPNCNVETPQVGFFNHNSTSNNGMVMDLNNFGEYQRMMEGEGLTRTYSDTDSMHGAFNNAAEMQMGENTQHMVTGCNDSPLTLPSTEGSSLEDTPYKGVRLTAEQRKEKISRYIKKRNERNFSKKIKYACRKTLADSRPRVRGRFAKNDELCEATRSSSQDFEQYEHVVGMKGEDMLDSSNILAHLSGMNPYGYKYNSTVESWI

SEQ ID NO: 49265 - protein, 135 aa, Oryza sativa; identical to SEQ ID NO: 30382

SEQ ID NO: 49266 - protein, 385 aa, Oryza sativa
MAASATQEADCKASEDARLFFDAAKPPPFRIGDVRAAIPAHCWRKTPLRSLSYVARDLLIVAALFAAAATRIDVSVAWAAWPLYWAAQGTMFWALFVLGHDCGHGSFSDSAMLNNVVGHLLHSFILVPYHGWRISHRTHHQNHGHIEKDESWHPITEKLYRKLETRTKKLRFTLPFPLLAFPVYLWYRSPGKTGSHFLPSSDLFSPKEKSDVIVSTTCWCIMISLLVALACVFGSVPVLMLYGVPYLVFVMWLDLVTYLHHHGHNDLPWYRGEEWSYLRGGLTTVDRDYGWINNIHHDIGTHVIHHLFPQIPHYHLVEATKAARPVLGRYYREPEKSGPLPLHLFGVLLRSLRVDHFVSDVGDVVYYQTDHSLNGTDWAEDAKHK

SEQ ID NO: 49267 - protein, 303 aa, Oryza sativa
MTAGQPLRDDPQPRRHSPPALHPAVVPAYPPPESDADESWVWSQIKAEARRDADAEPALASFLYATVLSHPSLDRSLAFHLANKLCSSTLLSTLLYDLFVASLAAHPTLRAAVVADLLAARSRDPACVGFSHCLLNYKGFLAIQAQRVAHVLWAQDRRALALALQSRVAEVFAVDIHPAAAIGKGVLLDHATGVVIGETAVIGDNVSILHHVTLGGTGKAVGDRHPKIGDGVLIGAGATILGNVRIGAGAKIGAGSLVLIDVPPRTTAVGNPARLLGGKKGDDMPGESMDHTSFIQQWSDYSI

SEQ ID NO: 49268 - protein, 268 aa, Oryza sativa
MLAAAAAGYRAVAPDWRGYGMSGQPPEQEEATWDDLVADVLAILDALAVPGAFLVGKDFGAMPAYDFALRHTARTRGVACLGVPFSPAPASFDAMPEGFYVLRWRVRARRRRRHCRRRRLFLLLTRTRCVCGGRRRGGRRRTSGGTMCGGWCAPSTSSSPAPTSPSPRKGRRSWTSPTPPRRCRRGSPRPTSTSTPRSTRTPASASPSRCLTGTQAAAAAAAAAQPPCPPLSATNLEKNYLAPIDSNYLIIDLYITPFVSKYLTPLTF

SEQ ID NO: 49269 - protein, 419 aa, Oryza sativa
MLPPPPANAPAPAAGGIASGIAACPIPSFRCMLSRRVRKSRLRRRMLPTMSSLSISCSACGKTGWPEVLFRYDVTACETKVIPGNLGFVAQLNEGRHLKKRPTEFRVDRVLQPFDAAKFNFTKVGQEEVLFQFENGGGDDSFFVESSPISVADRAPNVVAINVSPIEYGHVLLIPRVLDRLPQRIDQESFLLALHMAAEAASPYFRLGYNSLGAFATINHLHFQAYYLTVPFPVEKAATKRIFLAEGTMNSGVKVSKLMNYPVRGLVFEGGNSLSDLANVVSSACIWLQDNNVPYNVLISDCGKKIFLFPQCYAEKQALGEVSQELLDTQVNPAVWEISGHIVLKRRSDYEEASEASAWRLLAEVSLSEERFEEVKAYIFDAAGLVQSDEEEVSEDEDATYTPVSIAPPAVAEGCLVLQ

SEQ ID NO: 49270 - protein, 82 aa, Oryza sativa
MGKIWCFWEVHIALCCSPIYAPTSFISVLMVATYFKLFSFFFFFFANLLSDLVLSNKLVLYDLENQAIGWADYNCKSLLIEN

SEQ ID NO: 49271 - protein, 227 aa, Oryza sativa; identical to SEQ ID NO: 47227

SEQ ID NO: 49272 - protein, 110 aa, Oryza sativa
MSPAPPPSRGRIRPWLVVGDLVVAAMWVCAGALVKLAVYGVLGLGGRPEADAVKVALSLVYMFFFAWLEGFTGGASYNPLTVLAGALASRAGPSLYLFAAFVRMPAQVFG

SEQ ID NO: 49273 - protein, 133 aa, Oryza sativa
MVAVQTVHAALLPSTTTTRRRPSPGRLPRRSPIRARAGSSETSSPRGRENWRVQEALARVAEIQVLKVRIASFLDDCSENLLWLAENAALDATAQDSLRVLDLDGAADDEIMERLYCKLGRSTTRKQRRSGWT

SEQ ID NO: 49274 - protein, 327 aa, Oryza sativa
MEEEFKDKGLPPTLLHLIPDGREWKVKEADGEGSRNTNLDADEDKELELKLGLPGVQQEERAADSREKIQQQQRESSSEPSIGCFPTHSKPTTSIGTTGAKRGFFAIVGATLEGYNQSHRDTEECGKELTLGDENMAGERKKGCCPSPPCSAAAHSSNPQGRGAIPPVVGWPPIRSFRRNLTNGSSFKQSPERQNDEADDKAKPICKKRPLVKINMDGIPIGRKVDLQIYDSYQKLSSAVEELFRGFLEAQKDLSCAESGEQGAEDKIFSGLLDGTGVYTLVYEDNDGDRMLAGDIPWKVFVSTVKRLRVMRRSELPHDMIGADPVK

SEQ ID NO: 49275 - protein, 143 aa, Oryza sativa
MFLSAQSMAVGTIMVRWVSKYSDPIMATGWHMIIGGLPLLVISVLNHDPALNGHLQELTLNDVLALLYTSIFGSAISYGVYFYNATRGSLTTLSSLTFLTPMFASIFGFLYLGETFSPVQLGGALLTLVAIYMVNYKSIVGEK

SEQ ID NO: 49276 - protein, 338 aa, Oryza sativa
MGAGNGEVRYGGGGAGAGEAAVMADDGTTVFRGTAQPPVRTTVALALWLGAIHFNAFLLLASLFLFPRRVAAMVLATQLFFMFAPVNDMSRLGRKIARFISKCVIGYFPVTLHVEDYKAFDPNRAYVFGYEPHSVLPIALGVLLELVGFMPLPKIKVLASSAVFYTPFLRQIWTWLGLVPASRKNFYSYLKAGYSCVIVPGGVQEMLHMDHDSEVAFLKSRKGFVKIAMETGSPLVPVFAFGQSYVYKWWRPGGKLIVKIARAIKFTPIMFWGKFGTPIPFATPMHVVVGRPIEVKKNAQPTFDEINEVHEQFVVALQELFEKYKTKAGYPNLHLRVL

SEQ ID NO: 49277 - protein, 557 aa, Oryza sativa
MQSSSRFVSGWIWDKTIPDPRYVSSLGVQWEDVYKTVENLNDGERKLKVGLLNFNSTEIGSWTQLLPDSDFSIIRLEHAKESITWQTLYPEWIDEEEETEIPSCPSLPDPIFPRGTHFDVVAVKLPCTRAGGWSRDVARLHLQLSAAKVAVTASRGNRGIHVLFVTDCFPIPNLFSCKNLVKHEGNAWMYKPDLKALREKLRLPVGSCELAVPLKAKARLYSVDRRREAYATILHSASEYVCGAITAAQSIRQAGSTRDFVILVDETISNHHRKGLEAAGWKVRIIQRIRNPKAERDAYNEWNYSKFRLWQLTDYDKIIFIDADLLILRNVDFLFAMPEITATGNNATLFNSGVMVIEPSNCTFQLLMDHINEITSYNGGDQGYLNEIFTWWHRIPKHMNFLKHFWEGDEEEVKVKKTRLFGADPPILYVLHYLGLKPWLCFRDYDCNWNNPILREFASDVAHARWWKVHDKMPKKLQHYCLLRSRQKAGLEWDRRQAEKANFTDGHWRRNITDPRLKTCFEKFCFWESMLWHWGESKNSTKENPVPATPTASLTSS

SEQ ID NO: 49278 - protein, 340 aa, Oryza sativa
MIAARAANLQVAMKALALAVLALAYAAATARAEQCGRQAGGARCPNRLCCSRWGWCGLTDDYCKGGCQSQCRVSRDGGDDDVAAVLLTAPGGGRAGVASVVTSDQFERMLPHRDDAACPARGFYAYRAFVAAAGAFPAFAATGDADTRKREVAAFLAQTSHATSGGPYSWGYCYKEVKGATSDFCVPNARWPCAPGKAYHARGPMQIAYNYNYGAAGEAIGADLLGNPELVATDPTVAFKTALWLWMTARSPSQPSPHAVVTGQWTPTPADSAAGRAPGYGLTTNILTGGLQCAGGNGGADRVAFYKRYCDVLGVGYGPNLDCFGQAPFDGDIMSASAAK

SEQ ID NO: 49279 - protein, 253 aa, Oryza sativa
MAATALQLPVASSQRLTLRRFPGSGSLGRYSGLRWPVAAQARRAAEEGFRLRVAFNPSGNFDLSLSTDQDDAPQVEPPPPPTEGRFEIVINTDIIRTLDLSPVHEVLGDLNSLTPAQTRNLLDRTVGFTINYEREDPYDVRELSEFPDIRLWFVRLDACYPWFPVVLDWRAGELARYAAMLAPHQMSMRLGVVFNPEALELFVMKKVFIVYSWLKQQEHPKPGLKTADMARMLGFGIGDELFDLIGKYPAGPS

SEQ ID NO: 49280 - protein, 135 aa, Oryza sativa
MGCCGSSTVDAEEHLDYSGGNVTLVTDQKNWDNTMEEVAEHGKTVVLKFSAIWCTPCRNAAPLFAELSLKYPDIVFVSVDVDEMPELVTQYDVRATPTFIFMKNNEEIDKLVGGNHEDLQEKFEQLNRPKLYDDV

SEQ ID NO: 49281 - protein, 419 aa, Oryza sativa
MPSPSHLAGALDAARPFLRGEEEQVDPALPKLAAVLRAAGAGECWHKHGTFLAHLLDVHRILRLWGAPDAVARCGLYHSAYSNSYVNLAIFEPDVGRDHVRPIVGAAAERLVHLFCVVPRHQLIHDDLLFHYADQDLVADLAASEASLQDARRGLFHHDGEAWRLKIQRLLPPHGITVKHIRTGEDVALSRRIAATFLLMTMADFSDQLFDWQDRLFDNTNGRLEFSGNTWTSLWPGTGKPGLWTASISRMGALYSLIVREEEIHIAQRKHSNNGQEDDRDEDIELVIPPVFNGCTQVLTADDQKAARDLYWDAVCSGGEDETDWRKVEEILRRCIGRNPFVGEPHLVLAQVLLNMEMYEEAEEQIEAGVKLLLEWGSSWDKRMPWEAWVSWGRAMLIKAKDKDWPHTSFGILSIGLVK

SEQ ID NO: 49282 - protein, 230 aa, Oryza sativa
MNDADVAKQIQQMVRFIRQEAEEKASEISVSAEEEFNIEKLQLVEAEKKKIRQEYERKEKQVEVRKKIEYSMQLNASRIKVLQAQDDLVNSMKEDATKQLLRVSHNHHEYKNLLKELVVQGLLRLKEPAVLLRCRKEDHHHVESVLHSAKNEYASKAEVHHPEILVDHDVYLPPSPSSHDSHERFCSGGVVLASRDGKIVCENTLDARLEVVFRKKLPEIRKLLFGQVTA

SEQ ID NO: 49283 - protein, 375 aa, Oryza sativa
MEKIQVTTPMADSSFNPEFLQAHAELWNLTFSYLKAMALECAIKLGIPNAIHRCGGSASLSELVISIPVPETRKPHLPRLMRFLAAVGVFSLDNPTIDEEVTEKGMGIYRLTPLSRLLVDGSIGGHGSLSPFVLSQTTKYHVSAAMNLSDWFMTEDKEVAIEMPFRAAHGTDLWGVMSRDANMNEVFNAGMGSDSRLAINFIISKCGEVFEGISSLVDVGGGTGTTARDIAKAFPHIKCSVLDLPNVIDTITVDGIIEYIAGDMMEQIPPTDAVLLKYILHDWYDEDCVKILKQCRNAIHAQKPGGKVIIIDIVVGSPSKDMFEAQVSFDLLMMVITSGKERDQHEWHKIFMDAGFSHYKTRPVLGFLAITELYP

SEQ ID NO: 49284 - protein, 74 aa, Oryza sativa
MRDLEEFRGGSAPPRDGDERTVASSSSTPWWSGDPEAKRRRRVAAYKAYAVEARVKASLRRGFRWIKDRFVRRW

SEQ ID NO: 49285 - protein, 394 aa, Oryza sativa; identical to SEQ ID NO: 33158

SEQ ID NO: 49286 - protein, 74 aa, Oryza sativa
MTGSYPTIIRQGKVCIFINGLKLSYHMTILSSKRKFLILSPDIWQMICTAFKHTVMYYLVMLIYFIFVTYFVDL

SEQ ID NO: 49287 - protein, 216 aa, Oryza sativa; identical to SEQ ID NO: 30559

SEQ ID NO: 49288 - protein, 392 aa, Oryza sativa
MLLRWLARPAERCLGRGGGGGGGGGGDGLLWHAELKPHASGEYSIAVAQANAELEDQGQVVTSPAATFVGVYDGHGGPEASRFISSRLFPHLHRFASEQGGMSTDAIKRAFHATEEEFLHMVKRSWLKQPQIASVGSCCLVGAITDNVLYVANLGDSRAVLGRRGPDGREVVAERLSNDHNVAEEEVRKELTEQHPDDSRIVIYTRGVWRIKGIIQVSRSIGDVYLKKPEFARDPIFRQYVCSIPLKRPVMTAEPSIKEHQLRQQDLFLIFASDGLWEQLTDKAAVDIVFKNPRAGIAKRLVRAALTEAARKREMRYTDIKHIERGSRRNFHDDITVVVVYLDHHKHGVRPNLGNRNSFRFTNAPVDIFSGSSEEVDHHPLRLNLAMDGAVG

SEQ ID NO: 49289 - protein, 478 aa, Oryza sativa
MASAAVAVAPVVSDLVDFLNASPTAFHAVDEAKRRLKAAGFSQLSEREEWAGLQPGRKYFFTRNHSTIVAFAIGAKYAAGNGFHIIGAHTDSPSLKLKPVSKVTKGGYLEVGVQTYGGGLWYTWFDRDLTVAGRVIVREKKDGAVSYAHKLVRVQEPVMRIPTLAIHLDRNISSEGLRINNQNHLVPVLATSVKNEMQKLVAENGSESSESKNTKHHPLLLQLIAKEANCKPDEICDFELQLCDTQPSTVAGAMKEFIFSGRLDNLCMSFCSLKALIESTSSEESLAHESGVRMVALFDHEEVGSDSAQGAGSPAMLDALSRITGSFNSSNSRLLEKAIQRSFLVSADMAHALHPNYMDKHEENHQPKLHGGLVIKHNANQRYATNAVTAFIFREIAERHHLPIQDFAVRNDMGCGSTIGPILASGVGIRTVDIGAPQLSMHSIREMCAVDDIKHSYEHFKAYFEEFTELDSKVKVDC

SEQ ID NO: 49290 - protein, 328 aa, Oryza sativa
MSQPCNGMVCAYDLKGAAEVLNPTTRKHLTLPASESVYQAQYSEYFLGYVHSTKEYKVVALRHWIKHLTFEVCTIGTLSWRTVRGSEEEELLKTTKPVVVNDEMHWLLLDDESSHFTRKILSFNLTDEKFSYLDVPDSVRDRDLELVEGEGKLHLWSMPCKGAAYTESEIWLADSTRQFWVHLHNIAHPSVLGTKPFFMYKSKLFLGSQKRFIYIDILDGTVCYVDIPSGENIISSGMFVESFVPALTGTGLVNSMTLLTGSRYAGSSSRGSGPSSRAAGSSSTRTRRSPAASRWSSAVVQSSKRAKRTINLVWKMYTEGTSKIQQGL

SEQ ID NO: 49291 - protein, 355 aa, Oryza sativa
MAPELSSPSSSPRYTVGYALLPEKVSSVVRPSLVALAADRGVRLVAVDVSRPLAEQGPFDLLVHKMYDRGWHAQLEELAARHPGVTVVVDSPGAIDRLLDRATMLDVVSGLRTPVSVPPQVVVSDAAADADELLARAALRFPLIAKPLAVDGSAESHDMRLVYRRDGVLPLLRAPLVLQEFVNHGGVLFKVYVVGDRATCVRRSSLPDVPARRLLDLDAEPSVPFANISNQPLPPPDDDGGAADDDTPAAGFVDEVARGLRRGLGLHLFNFDMIRERSEEHGDRYFIIDINYFPGYAKMPGYEAALTDFFLEMLRGTRPVPEQLGPGSGLDMEARKLEPGLGIGLRELESGRAQA

SEQ ID NO: 49292 - protein, 132 aa, Oryza sativa
MAAAAAVRSVAISLFVVALAVAAFAWSPSSLAGGASHHLRLEEVASAAGAGAAGHGSMSAAAGKDGGASAAAHGSAPAAAGIDKNGYLSFFAAMRRDSVPCTRKGASYYNCVPGAPPSPYNRSCEHITRCHG

SEQ ID NO: 49293 - protein, 333 aa, Oryza sativa
MSGFGDGYVGTAQDAVKIRRLEKQREAERRKIEELKNKSSDGQPGLLQFGSSTSEILETAFKKETVGLVTREQYVEKRVNIRTKIEEEEKEKLQKLQQEEEELQMQKRKKRRVRGDPRLSFCDEIENGSDEDEFENQEPQKKHGPVKLGKDPTVETSFLPDREREAEEQAERERLKKQWSREQELIKNEPLTITYSYWDGTGHRRVIQVRKGDSIGEFLRAVQQQLAPEFREVRTTSVENLLYVKEDLIIPHQHSFYELIINKARGKSGPLFHFDVHEDVRTIADATKEKDESHAGKVVERHWYEKNKHIFPASRWEIYDPTKKWERYTIHGD

SEQ ID NO: 49294 - protein, 176 aa, Oryza sativa
MSMASSGGYYSYYNGHQPAPYYYGYAQPARVAGGGGVGGSQRPSAHALLLVATLLLVAVTTLYARCEEAVESLLDQLRVLLILSPLLLIVAVQVWAASAAAAAADRRGAGGGLMYLLAQLMGMGDGGGSPYGRWHGGGGGASSSPWGVALVLVLVLFLVSYQSSFQSWWFPLLSRR

SEQ ID NO: 49295 - protein, 166 aa, Oryza sativa
MARRVGGVRLLARASSGSQRWRRFAEAAGAAGDDDGLRRRRLAAAAGDRPPPGSGGGGPVAAGGEPSGVVGNGVAGDGDGLRRWRMGEARGKRLRAPPIGRIRRHSARARRGHRRRWVGRERLGGDGRGAQTARAGPDRDLLPTPVACELSGARSVGYDWATADPG

SEQ ID NO: 49296 - protein, 282 aa, Oryza sativa
MAAPFFSTPFQPYVYQSQEGSVTAFQISGGDVQVLQVMVKSQEKLTVKPGTMCYMSGNIQTDNNYLPENDGGVWQWIFGKSISSSVFFNPGSDDGYVGISAPFPGRILPMDLANFGGELLCQADAFLCSVNDVSVTSTVEQRPRNIEIGAEVILKQKLRGQGMAFLVGGGSVMQKILAPREVITVDAACIVAMTTTINFQLKTPNQPRRVVFSGGNQLTASLTGPGVVFIQSLPFHRLSQRIASRSVAAPSLRDNPKFFIQIVMFFFLAYVMIVSSIILTDV

SEQ ID NO: 49297 - protein, 388 aa, Oryza sativa
MDAGGEEAKQERHLVLAHKLFLLSHPDLDDLAKVALRSDALDAVKSDGMAPLFESLAAAGVLEPDDALLAEMRARIDEEVRKLDEKIADAEENLGESEVREAHLAKSLYFMRVGEKEKALEQLKVTEGKTVAVGQKMDLVFYTLQIGLFHMDFDLISKSIDKAKNLFEEGGDWERKNRLKVYEGLYFMATRNFKKAASLFLDSISTFTTYELFPYDTFVFYTVITSIITLDRVSLKQKVVDAPEILAVIGKVPHLSEFLNSLYNCQYKSFFVAFSGMTEQIKLDRYLQPDFRYYMREVRTVVYSQFLESYKSVTMEAMAAAFGVTVDFIDQELSRFIAAGKLHCKIDKVAGVLETNRPDARNAFYQATIKQGDFLLNRIQKLSRVIDL

SEQ ID NO: 49298 - protein, 360 aa, Oryza sativa
MTSVATRIATLVRAAAAASRPLRLHRRPGGEDTRMVVIVGATGTGKTKLSIDAAKVIGGEVVNADKIQLYDGLDVTTNKVSLADRRGVPHHLLGAIRPEAGELPPSSFRSLAAATAASIAARRLVPVIAGGSNSLIHALLADHFDASAGDPFSPAAAFRHYRPALRFPCCLLWVHVDEALLDEYLDRRVDDMVDAGMVEELREYFATTTAAERAAHSGLGKAIGVPELGDYFAGRKTFSEAIDDIKANTRVLAAAQVSKIRRMSDAWGWPIHRLDASDTVRARLTRAGSAAESASWERDVRGPGLATIRSFLADQSPPPRSEGTNDYLYAMETEPEPPPPQTLPPRLLRLPRMQYCDMVG

SEQ ID NO: 49299 - protein, 40 aa, Oryza sativa
MAAERGRVPARPHRRRRARAELAPSERRRRREARAEDGPR

SEQ ID NO: 49300 - protein, 191 aa, Oryza sativa
MAGSTKLRPFLLTLLLLLSTTVASILAEYDPECDCDKPKHPSPTSPLASSATPTPVPSRSSSRTSSAASRPPATPARRGSPSSRSRSRRCTGARWHATSSSPSSRRRPRSSGSCSRRRCRRRRRRRSPRSWQHRSPSLSTRFLPRSPWTQRDRCVEYCGLDISITMLSMHLQHECLKTEIMCIFRRKSKQS

SEQ ID NO: 49301 - protein, 291 aa, Oryza sativa; identical to SEQ ID NO: 37143

SEQ ID NO: 49302 - protein, 65 aa, Oryza sativa; identical to SEQ ID NO: 40482

SEQ ID NO: 49303 - protein, 503 aa, Oryza sativa
MATAIPQRQLFVAGEWRAPALGRRLPVVNPATESPIGEIPAGTAEDVDAAVAAAREALKRNRGRDWARAPGAVRAKYLRAIAAKIIERKSELARLETLDCGKPLDEAAWDMDDVAGCFEYFADLAESLDKRQNAPVSLPMENFKCYLRKEPIGVVGLITPWNYPLLMATWKVAPALAAGCTAVLKPSELASVTCLELADVCKEVGLPSGVLNIVTGLGSEAGAPLSSHPGVDKVAFTGSYETGKKIMASAAPMVKPVSLELGGKSPIVVFDDVDVEKAVEWTLFGCFWTNGQICSATSRLILHKKIAKEFQERMVAWAKNIKVSDPLEEGCRLGPVVSEGQYEKIKQFVSTAKSQGATILTGGVRPKHLEKGFYIEPTIITDVDTSMQIWREEVFGPVLCVKEFSTEEEAIELANDTHYGLAGAVLSGDRERCQRLTEEIDAGIIWVNCSQPCFCQAPWGGNKRSGFGRELGEGGIDNYLSVKQVTEYASDEPWGWYKSPSKL

SEQ ID NO: 49304 - protein, 351 aa, Oryza sativa
MVSAAAQAGVVAACVVLFVPMGLAGWHLSRNKVLFFSGALFVSLAVGVHLSPYLPSLPHLLLAASFHPHPISSSSSSSAASSSCVPLLHRVSWADAGGESGVGRAWAWPPSLASTCGLARLSRDDASLLLNGSWVMVAGDSQARLLVLALLRLLLDPAAAAAAEPELFRRHSDYRATVPARGISVDFVWAPFESNLTRLLHEDLRLAPRTPDVLVLGSGLWHMLHVTDAARYGDALASVVDAAKSLRSPLPVPPPHMFWLGLPLLVNHMLNTDAKKVHMNDTILQAYDLEVEQRGLLQRDGGPFLLLDVGKLSRGCGQQCTADGMHYDGDVYDAVLHIMLNALVIESQQRI

SEQ ID NO: 49305 - protein, 218 aa, Oryza sativa; identical to SEQ ID NO: 30237

SEQ ID NO: 49306 - protein, 102 aa, Oryza sativa
MGDRWEAMQKGYQRTLTVLSRIRNALCKDGLADGGSLKVMLLCGSDLLESFSIPGVWIPDQIRTICKDFGVICIRREGKDVEKIYNIQQRDTERMQGQYHFS

SEQ ID NO: 49307 - protein, 425 aa, Oryza sativa
MAIGVGGCCAVLLAAALLFSSPATTYAYDSLDPNGNITIKWDVMQWTPDGYAAVVTLSNYQQFRHIQPPGWQLGWTWQQKEVIWSMYGAQAIEQGDCSMSKEGSNVPHSCKKHPTVVDLLPGAPIDLQIANCCKAGSLSAFSQDPANSAASFQIIVGHSGNSNETVRVPKNFSLMAPGPGYTCSRAMIVKPSRFLSPDGRRATQVLMTWNVICTYSQFLAQKVPSCCVSLSSFDNDKTVDCPTCSCGCRNEKSTTGKCVKKNAPDLQSIIHGPGRWTWQPLLQCTSHMCPVKINWHLMLKDKEHYRVKITVTNLNYRMNFTEWNLVVQYHPILDITQISGFNYKSIQVGKINDTTMLWGVKPYYDLLMQAGPLGNVQGELIVRKDFRASSTTNNNKGRAFPVRVYFNGDNCVMPPPDAYPVSITA

SEQ ID NO: 49308 - protein, 314 aa, Oryza sativa
MAAAALLSPPPSPSPSPTPSSLHPRQALRFAVGTGGGGRARATSTGTRRRAALVPCSSSVSARGPASGGDGLALERRRLLLSGLVSSFVLVLPVSDSHAVAEMDEDVKMATLVDPINAYSFLYPVELPGKKFTFKWVESRKPERYSSAAPLSPDARQRIVSERVDMIHNVVISVSIGPPNSRFPPSKDKSKWDPKDVADWILAEKSSLVTTGQRMTESSVLDAHSSDVDGEPYWYYEYLVRKSPTQSAPEPNLFRHNVACTAERDGYLYSLNASTLSKQWESMGPSLQKTVASFHLLPPTENYVPPYQDPWRFW

SEQ ID NO: 49309 - protein, 78 aa, Oryza sativa
MAGLSLFMLCVRPTRPNDVLAKASKATAIHSFHLSMTDEARRNHGRVPTRPGHYTINTSKTDGNRMHRCWAPTRQKQQ

SEQ ID NO: 49310 - protein, 219 aa, Oryza sativa
MDPSSAGAGGNSLASASCGDAQKRRVCCFYDPEVGNYYYGQGHPMKPHRVRMTHALLAHYGLLAPAKMEVLRPLPARGIDLCRFHSDDYVAFLRAVTPETQLGQVRALRRFNIGPDCPVFDGLYAYCQTYAGASVGAAVKLNHGTHDIAINWSGGLHHAKKSEASGFCYVNDIVLAILELLKLHEVTSSYSARTCVPFFFSIFFCFSCFFLVRLMFRID

SEQ ID NO: 49311 - protein, 290 aa, Oryza sativa
MGNASGKEGEENGHVAAGAAAGVAGSAGAAARAPPPLMPPDAVMRELPPPVPYVFTPQVPVAPLHIPTEFSPVFNNSWINESDESTNNHPQEKGIPTLISWSQGGNEVFVEGSWDNWTSRRVLEKSGKDHTILLVLPSGVYHYRIIVDGEPKYVPELPHVADEGGQVANLLDVHDYIPESLGSVAGFDSPPSHEHSYDLQLPGDEEFAKEPPILPPQLVMSVLGDTDNSEEQTLKPKHVVLNHLYIEKGWGSQSLLALGVTHRFQSKYVSFVLYKPLRRSSTAKRTKNGG

SEQ ID NO: 49312 - protein, 783 aa, Oryza sativa
MLLRVGLSRRRLTTAALPLSIAARGRRLSTGPSPPPPPPAAEWTDTVDYLDESGEVLSSAPGARAAVPGADATILSGSSAHPLPRPAAAARLAALALRFRSGPSLSAALSALPSQPDPALLLLAASSLPASDPTPLLALVAWARVQPWFVPSDDLSSLLAARLAPATHSSELLSLFDDTLALPDPAAFPKTLNAVLSALATHGLLEPAFFCFKRLRDAGFRVLETHAYNALLSLLLTRGLAFKAFEVLDEMSSSGCALDEGTYELVVPALARAGRIDAARKMFDEMRKREGIGRASAGMYGVLVDVLAKAGRLDAAMGMYREMVAVGHRASPAVSTAVVEGLVRAGKLDAGMELWEEMRRGGLRPSFGLYTMVVEANARSGRLDVATQLFGDMEKSGFFPTPATYACLVEMHASAGQVDAAMRLYHSMANAGQRPGLSTFTALLMMLANKRMLDLAAKVLLEMKASGFPIEVTASDLLMIYIKEGSTELALRWLRFMGSAGIRTNNFIIRQLFESCMKTGLYDSARPLLETYVAGAAKVDLILYTSILAHLVRCQDEGRERAIMDILSVSKHKAHDFMCGLFTGLEQRKKPVLSFVREFFQGIDYDNEESAARYFVNVLLNYLVLMGQMNRARCIWKVAYEDKLFAKAIVFDQHIAWSLDVRNLSVGAALVATVHTLHRFRKRMLYYGVVPRRIKLVTGPTLKMVVAQVLASLESPFEVSKVVLRAPGDSVLEWFKKPIVQQFLLNEIPSKADVLMHRLNVMFPSSAPEVRSLSIPRSLSMSR

SEQ ID NO: 49313 - protein, 376 aa, Oryza sativa
MIIVDDAGAFLPALNHSPWDGVTIADFVMPFFLFMVGISLTLAYKRVPDKLEATKKAVLRALKLFCLGLVLQGGFFHGVRSLTFGVDITKIRLMGILQRIAIAYLLAAICEIWLKGDDDVDCGLDVIRRYRYQLVVALLLSTMYTVILNGVYVPDWEYQISGPGSTEKSFPVRCGVRGDTGPACNAVGMLDRTILGIDHLYRRPVYARTKQCSINYPQNGPLPPDAPSWCQAPFDPEGLLSSVMAIVTCLIGLQFGHIIIHFEKHKGRIINWLIPSFSMLALAFSMDFIGIRMNKPLYTISYALATSGAAGLLFAGIYTLVDVYGFRKLTIPMEWMGKHALMIYVLVACNILPIFIHGFYWREPKNNLLKFIGVGA

SEQ ID NO: 49314 - protein, 18 aa, Oryza sativa
MENMGETLICFFSNLLTD

SEQ ID NO: 49315 - protein, 234 aa, Oryza sativa
MQALTFEANARASDPVGGAARVVVELCRQYEMLHAELAAVQHHLKLCRQQHAAAAAAAANDPLVANVDPLADPAAEMLFAGAVVPNQNDDAMVDAFYADQQTAGDGDQEQYLVKDEALAAQPPPQQPYEYLNYGTAGDEGSSHAWYTGNGGDADASPPMGLSDQLQQCQIGAAPPFDVKPELPATMEHGGSVFVEQPEQKILPAAGSSSSAAAHCQLELGCSSNAWKVGTHVIN

SEQ ID NO: 49316 - protein, 459 aa, Oryza sativa
MAAPAPKQEELQPHAVKDQLPAISYCLTSPPPWPEAILLGFQHYLVMLGTTVIIPTALVPQMGGGNEEKARVIQTLLFVAGINTLIQSFLGTRLPAVIGGSYTFVAPTISIILAGRYNGIADPHEKFVRIMRGTQGALIVASTLQIIMGFSGLWRIVVRLLSPLSAAPLVALVGFGLYELGFPSVAKCVGIGLPQIILLVALSQYIPKLVPLLGTAFERFAIIMSVALVWLYAFFLTVGGAYKNAAPKTQFHCRTDRSGLVGGAPWISVPYPFQWGAPTFDAGEAFAMMAASFVALVESTGAFIAVSRYASATPCPPSVMSRGIGWQGVGILLGGLFGTANGSSVSVENAGLLGLTRVGSRRVVQISAGFMIFFSILGKFGAVFASIPGPIIAAIYCLLFAYVGMAGVGFLQFCNLNSFRTKFIVGFSVFMGFVGSTVFQRVHLCCRLWPSTHSRKMVQ

SEQ ID NO: 49317 - protein, 603 aa, Oryza sativa
MAVSSPDRRRNWLRGHRKQIIGDYLAEARAALAAAAAAPLDGEGGEHSAATAALGLVEAVLEMSPRMEAALELRARSLLALRRYRAVADMLRDYIPSCTKPCSADDTSSSSSSSSSCSSASRTDLLSPARDRSDAASAASRFLCCFDISDLKHRVLAGFSKNTSADTQWRYLVLGQACFHLGLMEDAAALLQTGRRLASAAFRRESVCWSEDSFSPSNLTANAISAPASRRASKSGAAGSEAESVSQLLAHVKLLLRRRAAAVAALDADLPAEAVRHFSKVLDARRGVLPHPFATACLVGRAEALRSSGRAADAIADCNRALALDPAFIPALRSRADLLESVGALSDCLRDLEHLKLLYDAALRDGKLPGPTWRPQGGVRFSEIAGAHRALTPRIQQLRGRVAGGEACSVDYYALLGVRRGCTRSELERAHLLLTLKLRPDRCASFAERLELVDEHRDLEAVRDQARMSALSLYRMLQKGYSFIMSVVQDEEAAERQRAKDAAAATAAAAAAAAAAALAREQEETAAVPEKARISSVSVPSTNVQVQVTQAAAMPTAAMAAAAAMGSPVFQGVFCRDMAVVGTLLSRGGFDRPIPVKCEAMSC

SEQ ID NO: 49318 - protein, 180 aa, Oryza sativa
MTTTNHLVSPALLLLLALLGASVRRAGATTFEVGGEHGWAVPPAKDAGVYNDWASKNRFLVGDSVHFKYAKDSVMVVTEDDYNKCKAEHPIFFSNNGDTEVGLDRQGLFYFISGVAGHCERGQRMVIKVIGHDAPPPASPPPPPSNAPPTPPHPSGAASALGAGGLAVAAMLLPVFVYGV

SEQ ID NO: 49319 - protein, 321 aa, Oryza sativa
MGYTKEQLLARLQELNIEFSCYDHPVVLTVEEQAKHVGHLGGALSKNLLLKDKKHRLYVVSALAGTKVDMKILSQRLGLGKGGLRMAPEENLLEVLQVPLGCVTPFALLNESASAVSLLLDQGFKSKQSCYFHPLTNDVTIALSSSNLDKFLMSIGRQPAYVDLEASPVVGKDNPPDLADFVPSGVPNSAEPIEKVTPTNVPRQNDVPKEKTCLPVKAKPKVQNKGAEKTQSKIPTNGANVEKFVNDVFDIMSPLFLSEVSKKLNVKQEELSSIFDGFKEQATIDLESVTTSLKNAAYTAGFEAGFETMLNSGLKGQASRK

SEQ ID NO: 49320 - protein, 180 aa, Oryza sativa
MGFIGDTVESIRSIQIRQVLAQIISLGMIVTSALIIWKGLMVATGSESPVVVVLSGSMEPGFKRGDILFLHMSKDPIRTGEIVVFNIDGREIPIVHRVIKVHEREESAEVDILTKGDNNFGDDRLLYAHGQLWLHQHHIMGRAVGFLPYVGWVTIIMTEKPFIKYLLIGALGLLVITSKE

SEQ ID NO: 49321 - protein, 250 aa, Oryza sativa
MGDHVAVDVGGLMASRGAGEGETGALIGMVECRICQEEDLAKNLESPCACSGSLKYAHRECVQRWCNEKGDIICEICHVSYKPGYTAPPQVHHDETTIEISSGDWSISGNRLDLHDPRILAMAAAQHRLLEDEYDEYTATNNNAAAFCRSIFLILMALLLLRHTLTITSSDDEDDASAIFSLFLLRAAGFLLPCYIMAWAISIMQRQRQRQEEAMLLPTEVAIILHRNGRTMQFAVAPESPTTPHPEQGQ

SEQ ID NO: 49322 - protein, 166 aa, Oryza sativa
MESAMFGLETPLMTALQHLLDIPDGEGGAAGKQGATGGPTRAYVRDARAMAATPADVKDLPGAYAFVVDMPGLKSSDIKVQVEEERLLVISGERRRGGGEEEKEESCKYLRMERRMGKFMRKFVLPDNADVDKISAVCQDGVLTVTVEKLPPPEPKKPKTIEVKVA

SEQ ID NO: 49323 - protein, 117 aa, Oryza sativa; identical to SEQ ID NO: 31665

SEQ ID NO: 49324 - protein, 274 aa, Oryza sativa
MSSPTVIPLDKRSVTWNFDSGTSMSCPHVSGIVAVVRAVHPTWSPAAIKSALMTTAYMYDDTSDVMLAGGTLKAADAFDVGAGHVDPLRALDPGLVYDAGVRDHVLFLCGLGYTRYQIRQMVLPSPSLDTSCGGEGGGAAPPEYDLNYPAIVLPRLNATVTVKRTVTNMGPRRDAVYRAAVVSPHGARAAVWPPALSFSPYRDTASYYVTVAPAKLSRGRYDFGEIVWSDGYHRVRTPLVVRVTTMPDTDTGVDVDVAAARAMDTATATQLQDS

SEQ ID NO: 49325 - protein, 299 aa, Oryza sativa
MEPDASSAAAAQNPNPNPSTGLPPISAVIRSSRATTMMELEIELKKASDKLKSWDATSISLSAACDLFMRFVTRTSHLEHEKFDAAKSRLIERGEKFGEISLKARKTIAMLSQDFISDGCTILVHGYSRVVLEVLKLAASNRKLFRVLCTEGRPDRTGLRMSNELAALGIPVKVLIDSAVAYSMDEVDMVFVGADGVVESGGIINMMGTYQIALVAHSMNKPVYVAAESYKFARLYPLDQKDMTPAHRPIDFGVPIPAGVEVETSARDYTPPQYLTLLLTDLGVLTPSVVSDELIQLYL

SEQ ID NO: 49326 - protein, 573 aa, Oryza sativa
MDGGGGGNWRPTQGADPAASGGIDPNAPAPALAGGDWRSQLQSEARNRIVNKIMDTLKKHLPVSVPEGLNELQKIAVRFEEKIYTAATSQSDYLRKISLKMLSMETKTQQNPGNAQVIQNQNPPGSVPGLPQGSNPTQSSAIPLMSQQQARQPNSTSVQSSLTNLGQNLPGVNQTSTLQNMSGMPQNTMNNGLAQGASQDIYATQRQMAGRQQQQQQSQNQLIYQQQQIMMKQKLQQNSLMQQQSLLQPTQMQSSQQPMMQIPSSLQPGQSIPQTQPMVQSSSQGGIQQNALNSVPQSVQSLLQQPTQSAMRQQQHSQSSMHPQPSLQQAQPTQQPNIPLQHQLMGQQQNLQQNQLIGQQNGAVDMPQQQRLPVQSNNLLNMQQTQQMLNQQSMPSHQQQQLGSQANISTLQQQQQQNQQQQQLLGTVPNVPNIQRMHMLQTKAVQQPQQQQHAQQSSLGLMQPQSQHNQLQQSQQHLMSQFQAQPNQLQQQLGMPQQPPMQQRLQTSAGMLLQQNNIDQQKQFMQAQRGLQEVSSSTSVDSTAQTGSYRYRYRRLARGGISNGEELKGPIFS

SEQ ID NO: 49327 - protein, 403 aa, Oryza sativa
MSARDADTGEPPAKQRAINPVVPTKHPWNLPAQIPLLHCSCRPEDQVLVIPREANLPIDAETRKVVARVSQAVVSVVSFDVDGDRLYKASGFIIDFDKSSMIGTIISSATVNIHDPAFPDVEKINIYLFDGVSYDATIIACDHHWNLLVLSVLFYPVVKTMKFVEINESRTARDAYHGIAMLQPHSTRYKLCPGDTIIGLGRQSQEPFGLQANRGIYSVERWADLPKICQEMLRATFINTFTAIGGPAINKKGNVIGMLFHSMSFTPFLPSNIILKWWDYFKTTGKYCRPMISFVGYNLHVARSSRWVDVPTSLHEGLDGILVEMVSRELLSAGLQEKDLIIRCNGKRVTTNLQLFEVLVENIAKTVEVTIVKAENCNTQSIYLPVEEAIEKCFYQWPISRYY

SEQ ID NO: 49328 - protein, 186 aa, Oryza sativa
MRMSCNGCRVLRKGCSEGCTIRPCLQWIKTPEAQANATVFLAKFYGRAGLLNLLAAGPDHLRPAVFRSLLYEACGRIVNPIYGSVGLLWSGQWQACQAAVEAVLKGDPAAQGLRHPPRLQGRRGRRRRQPAPRRARRPHPLQARLLQLQLQARRQACRSSRRQARRVPQQQQPDARDGAGGGGRRR

SEQ ID NO: 49329 - protein, 561 aa, Oryza sativa
MEKLEIMIKLASDRNIDQVLLEFKEYATEVDVDFVRKAVRAIGRCAIKLERAAERCISVLLELIKIKVNYVVQEAIIVIKDIFRRYPNTYESIIATLCESLDTLDEPEAKASMIWIIGEYAERIDNADELLESFLETFPEEPALVQLQLLTATVKLFLKKPTEGPQQMIQAVLNNATVETDNPDLRDRAYIYWRLLSTDPEAAKDVVLAEKPVISDDSNQLDSSLLDDLLANISTLSSVYHKPPEAFVSRVKTAPRADDEEFADTAETGYSESPSQGVDGASPSSSAGTSSNVPVKQPAAPAAPAPMPDLLGDLMGMDNSIVPVDEPTAPSGPPLPVLLPSTTGQGLQISAQLVRRDGQIFYDISFDNGTQTVLDGFMIQFNKNTFGLAAGGALQVSPLQPGTSARTLLPMVAFQNLSPGAPSSLLQVAVKNNQQPVWYFNDKIPMHAFFGEDGKMERTSFLEAWKSLPDDNEFSKEFPSSVVSSIDATVEHLAASNVFFIAKRKNSNKDVLYMSAKIPRGIPFLIELTAAVGVPGVKCAVKTPNKEMVALFFEAMESLLK

SEQ ID NO: 49330 - protein, 467 aa, Oryza sativa
MADEKLAKLREAVAGLSQISDNEKSGFISLVARYLSGEEEHVEWAKIHTPTDEVVVPYDTLAAPPEDLEETKKLLNKLAVLKLNGGLGTTMGCTGPKSVIEVRNGFTFLDLIVIQIESLNKKYGSNVPLLLMNSFNTHEDTLKIVEKYTNSNIEVHTFNQSQYPRVVADEFLPWPSKGKTCKDGWYPPGHGDIFPSLMNSGKLDLLLSQGKEYVFIANSDNLGAIVDMKILNHLIHKQNEYCMEVTPKTLADVKGGTLISYEDKVQLLEIAQVPDAHVNEFKSIEKFKIFNTNNLWVNLKAIKRLVEADALKMEIIPNPKEVDGVKVLQLETAAGAAIRFFDHAIGINVPRSRFLPVKATSDLQLVQSDLYTLVDGFVTRNPARTNPSNPSIELGPEFKKVGCFLGRFKSIPSIVELDTLKVSGDVWFGSSITLKGKVTITAQPGVKLEIPDGAVIENKDINGPEDL

SEQ ID NO: 49331 - protein, 133 aa, Oryza sativa
MDVEALKKMNKNKKLVKKLAKKYHAFLASEAIIKQIPRLLGPGLNKAGKFPTLVTHQESLESKVNETKATVKFQLKKVLCMGVAVGNLSMEEKQIQQNIQMSVNFLVSLLKKNWQNVRCLYIKSTMGKPIRVF

SEQ ID NO: 49332 - protein, 307 aa, Oryza sativa
MPPPPPPSLTANTASSMGNAEAVVVLPANGGARRRADKVVHPAPMPDRAAGGAMEREGGGVGGGGEVGGWRRPEWCSAAGVAGVLRRHPAAAAFGCGLLLFMAVEYTIPMVPPAAPPVDLGFAATAALHAGIAARPWLNSLLAALNTVFVAMQAAYILWAILGEGRPRAAVAAMMMFTCRGALGCATQLPLPAEFLGSGMDFPVGNVSFFLFFSGHVAGAVIAAEDMRRAGRRGMARLYDALNLLQGVRLLACRGHYTIDLAVGVGAGLLFDMLAGRYLDGKNTVDGGAAVAPGSRCCSCHKALLSQ

SEQ ID NO: 49333 - protein, 331 aa, Oryza sativa
MEGSAGAPLRTRVCIIGSGPSAHTAAIYAARAELKPVLFEGWLANDIAAGGQLTTTTDVENFPGFPEGILGGELMDRCRAQSLRFGTSIISETVTAVDFSARPFRVASDSTTVLADAVVVATGAVARRLHFAGSDAYWNRGISACAVCDGAAPIFRNKPIAVIGGGDSAMEESNFLTKYGSHVYIIHRRNTFRASKIMQARALSNPKIQVFWDSEVVEAYGGEGGGPLAGVKVKNLVTGKISDLQVSGLFFAIGHEPATKFLGGQLELDADGYVATKPGSTHTSVKGVFAAGDVQDKKYRQAITAAGSGCMAALDAEHYLQEVGAQEGKAD

SEQ ID NO: 49334 - protein, 426 aa, Oryza sativa
MGTNMYPSSALLGQNKDESIAALPVDDLIEKADGFAGVFPEHKYEIVKRLQARKHICGMTGDGVNDAPALKKADIGIAVADATDAARSASDIVLTEPGLSVIISAVLTSRAIFQRMKNYTIYAVSITIRIVLGFMLLALIWKFDFPPFMVLIIAILNDGTIMTISKDRVKPSPLPDSWKLAEIFTTGVVLGGYLAMMTVIFFWAAYKTDFFPRIFHVESLEKTAQDDFQKLASAVYLQVSTISQALIFVTRSRSWSFVERPGFLLVFAFLVAQLIATLIAVYADWAFTSIKGIGWGWAGIVWLYNLIFYFPLDIIKFLIRYALSGKAWDLVIEQRIAFTRKKDFGKEERELKWAHAQRTLHGLQPPDAKMFSEKAGYNELNQMAEEAKRRAEIARLRELHTLKGHVESVVKLKGLDIETIQQSYTV

SEQ ID NO: 49335 - protein, 394 aa, Oryza sativa
MLFQVGGQGARPTFFEMSAAQQLPASLRAALSYSLGVFALRRPLLHKVLDYEDEFFALLMAVLESHSLRTTDGSFSESLYGLRRRPVKVSVKRSSSGAESNDKAYDSVLRKRQKVLSVVFLVVLPYFKSKLQSIYNKEREARLQASLWGQGDVRFDEADLVSDQGETSQAQVEATTGEVSNMARIKKNFAALIGVCYPWIHATNEGLSFAYQLLYLLDGTAFYSPALHALGLHVCRATGQELMESSSRVSRIRNRELERLRGPPWLKTMQRVLLNCMYTSLDYAQTGLIAAVFFFKMMEWWYQSAEERMSAPTVYPPPPPPPLPKVAKDGLPLPPDRTLCPLCCQKRNNPSVLSASGFVFCYSCIFKSVSQHKRCPITLMPATVEQIRRLFHDL

SEQ ID NO: 49336 - protein, 385 aa, Oryza sativa
MAGDSGNSDGGSNRDEEVQIQIADSSKAATSSTHEVPIQNSPVKSWQWWLMVGVNMFFLIAGQTASTLLGRFYYNQGGNSKWMSTFVQTAGFPILFIALFLFHSKTSSTQTVTSSPAPTISIPKITLIYVVLGLIIAADDLVYSYGLLYLPVSTYSLICASQLAFNAVFSYFLNAQKFTPLIFNSVVLLTFSASLLGVDEDSQGTTSISHGKYILGFLLTLGASATYSLILSLMQVTFEKVIKRETFSVVLNMQIYTALVATLASLVGLFASGEWMTLQGEMHAFQSGKLSYVMTLLWTAISWQVASVGVVGLIFVVSSLFSNVISTLALPIIPVFAVIFFHDKMDGVKIIAMLMAIWGFMSYGHQLYVDGKKGRKTTVSVEETS

SEQ ID NO: 49337 - protein, 344 aa, Oryza sativa
MSSAASASAAGGAGEEGAAAAAQPQQEGPVVTCKGVNGLDKVVLREVRGSSAEVYLYGGHVTSWKDEHGEELLFVSNKAIFKPPKAIRGGIPICFPQFSNFGNLDPHGFARNRTWSVENDPPPFPVPTSNKAYVDLILTHTEEDLKIWPHSYEFRLRVALGPGGDLMLTSRIRNTNADGKPFSFTFAYHTYFSISDISEVRVEGLETLDYLDNLQERNRYTEQGDAIVFESELDRIYLGTPSKIAIIDHEKKRTFVVRKGGLPDAVVWNPWDKKAKAMSDFGDDEYKRMVCVEAAAIEKPITLKPGEEWTGKLELSAVPSSYYSGQLDPDRVLQDSSVPEDSIS

SEQ ID NO: 49338 - protein, 364 aa, Oryza sativa
MATSFDRWEKDPFFPAAEEVQGSADRMESVYRIWVQDRSGGDSEAAAAAAAAAVGGGGLPAGELRRELHTALGTAKWQLDELERAIRSNDKVFSAGKDTKARHDDFVAAIGCRILEVENNLKESNVAEGRGALSWIDLDEDERNDLATFLSASSFQQRDKVVTIPSVGDIDVGNNAAMVKKDMYADSSKDSGSAELSSARVKEETHRGHRRAASAHADIGSWTMLCPNESESSADLPYDDKHQEPLLKIVKTCALTSALQSKPRTKKKGGAVKWAAVDQQDVEETIPLSSQMGQGSDRCFERSKSCVSTCDESTYNKKLYGCLGALHRRLQRSRYRIRYGRPVQLIVLAVAALLIFMCVFKKIW

SEQ ID NO: 49339 - protein, 395 aa, Oryza sativa
MDHHQRWHPTVNEREFIERALQSDLRVDGRRPFDFRRLKILFGREDGSAEVQLGDTRVMGCATAQLVQPYKDRPNEGTLAIFTEFSPMADPAFEPGRPGESAIELGRVVDRGLRESRAVDMESLCVVAGKHVWSVRVDLHILDNGGNLIDAANIAALAALSTFRRPECTVGGEDGQQVTVHGPEVRDPLPLTIHHLPIAVTFAYFGEGNIMVIDPTYKEEAVMGGRMTATINSNGDVCSIQKAGGEGVMSSVIMQCLRIASVKAADITSKIKNEVNSYTSAKALQKVKRLPASALKKDNAPDVAMKESSDGALETQSTKPSSDGQQINKEPPSVVEDNKQEDVEPMLSECNPEPQSESRLTAGGSDETQEAISPKSLKDAVKPKHKIKKKQHSKS

SEQ ID NO: 49340 - protein, 321 aa, Oryza sativa
MGENKWMGKRWEDMDTDVLVKIFKELNLVELSPVSQVCRLWHLACSDPLIWSTLDFGLLKSNYIQTRASPYIWVDDRSDKRLSRILRVAMSISYGNVSCLIFHYNLYMKDEHLHYISERSPHLKRLVMPAWNRITKFGICQAIQRWEELESLTMPTIGHPPYIMEEIARSCKNFAELKVMGSFDDLFASAIATHLPKLKVLSLRCSKVTMSALLWLLDNMANLEVLNISHCLLFEIVANGRRQVIHELDDQTLQKASRLREFHHCQSRSCLACQRMMADEGIMRWYRYEDWFWRRDEVSSLDLQDYGKLFDAECEALTAVE

SEQ ID NO: 49341 - protein, 439 aa, Oryza sativa
MTALTRMKFPKRYVIVLLTFICTNVCYIERVGFSIAYTVAADAIGVNQANKGMILSMFYYGYVLSQIPGGWAAQRIGGRRVLLLSFVLWSLICGLIPLDPKREVILVLSRLFVGVAQGFIFPAIHTVLAQWVPPQERSRSVSLTTSGMYLGAAGGMLFFPSLVKHMGAQSVFFVEAVLGVAWSVIWLKFSSEPPRTDLPKVSMPKVASREKIKAQAGGVVAPRTVKIPWRRIIFSLPVWAIVVNNFTFHYALYVLMNWLPTYFELGLQLSLQDMGSSKMLPYFNMFIFSNIGGVVADHLITRRILSITRTRKLLNTIGFVVSAVALMALPLFRTPSGTVLCSSISLGFLALGRAGFAVNHMDVAPKFAGIVMGVSNTAGTLAGIVGVGLTGSILEGAKASNMDLTNSETWKTVFFVLGYLCIFSSIIFLIFSTGEKIFE

SEQ ID NO: 49342 - protein, 117 aa, Oryza sativa; identical to SEQ ID NO: 32093

SEQ ID NO: 49343 - protein, 65 aa, Oryza sativa
MRCTRLGMGERRHVRWRPVWKDEGGPISCVEAKIFFLFVFIVTEAWLLLLLCLFHLEPWLFIQSF

SEQ ID NO: 49344 - protein, 339 aa, Oryza sativa
MERAAADRSGAEEGESEWREELRQQQSQVDALRERLVEVKVGMKCSEEDSRKELDHLCRRVKTIATLLAYLKSKARIMAIPHLAHTSCGIRHQDGVGYVDRNGVPLADWSKGGESASCEGLDDETSADSSRVAEHGDANEGDVDVEDILKSIHVVTDVMETLVKRVIVAESEAANEKEKVRMGLEEIRRKTIQVESMSAKVEEMEKFAVGTNGMLNEMRQRVEDMVLETTRQRQRAAENEQELSRVKHDFESLRTYVGTLVNVRETLLSSEKQFETMEKLFDRLVARTNQLESEKAQKEAEVQKVVEENVRLRAMIDKKEAQLQAMSEQCKFMALSRPN

SEQ ID NO: 49345 - protein, 81 aa, Oryza sativa
MVAAGGSAAASSTPVCLPPTAKAAAAAVGSGNGDSLRRLWWRRRRLRRPRTAMATAEGGCGDGWWRIRRLLLFYVYFCEVL

SEQ ID NO: 49346 - protein, 76 aa, Oryza sativa
MATLSPTSLPNWNRMRISVNTITQNRAKSLRRLLASLRNTYYVDDEVVPISFNMDSRVDAATLNAVNSSDAEPVLM

SEQ ID NO: 49347 - protein, 509 aa, Oryza sativa
MPHPRPRGGGDRLGALPDEALQHVLPFLPLPEAVRTGALARRWRHLWKSMPVLRITGEGRVLNRSGVRRLNRFVNHLLLLRDRSARLDACEINLGTFRSQDDPQINLWIRHVLLCEARDLRVHLSIDNNSFEMENLALVSRHLTRLELSNVVLKDHFLNFSSCPALEELVTRNCHIEAEEILSESLKWLTAVDCVFSSYPRTRISLPSLVALELTEPWGSTPVLESMPSLLTASIKLTDCDDHCGKEEFGGSCDDNACDNCGANGGSSGDCVLLDGLSEAKSLELIAKPRVFIFRSDLMWCPTFGKLKTLLLNEWSVAIDLVELICFLQHTPVLEKLTLQLCEGPVNWMENEGSYDPTENPFASKQLKVVEVKFEKFDLRVHKIIMIFSTYGVNIEQIYIQRSVVHSEEPTDDSGAGPSRVRTPPISTSENAQLKITIDQMLGQQQELLAQQQQQQHFLSQLQRRQQILCDITAQLSKYAAPPISQRPPQANLYPSGIYFSSPTIGFGI

SEQ ID NO: 49348 - protein, 388 aa, Oryza sativa; identical to SEQ ID NO: 29567

SEQ ID NO: 49349 - protein, 225 aa, Oryza sativa
MAARHLRSGLPLLRAHLSQEGSRGFASQVAKPTGKDIKVPEALYGGTGNYASALFLTAAKANLLDKVETEIRDVVEASKKSPLFSQFIKDLSVPKETRVKAITEIFAEAGFSDVTKNFLAVLADNGRLKHIDRIAERFVDLTMAHKGEVKVLVRTVIPLPEKEEKELKETLQDILGKNKTILIEQKIDYSIMGGLVIQFGQKVFDMSIKTRAKQMEMFLRQPLDI

SEQ ID NO: 49350 - protein, 108 aa, Oryza sativa
MALARVSPPAFSSPFLIHSLLRPFSSPSSVLRPRVTRVPHHRGFAIAAALSQASPLPSADGDGAVMEAPPRPSSRRPWKPTCLYYTQGKCTMVGFSFPFSRFTVVWLM

SEQ ID NO: 49351 - protein, 223 aa, Oryza sativa; identical to SEQ ID NO: 31873

SEQ ID NO: 49352 - protein, 445 aa, Oryza sativa
MESQQEKAVSAPAANGSGGAGGGELIGYVDVHVQSARDIQNICIYHKQDVYARLSLPGEGAPAASTQVINGGGRNPVFDQSLRLGVRAGDVDGALRCEVWMLSRVKNYLQDQLLGFALVPLPDVVAAEGGTLAREFPLSTNDIFHSHAGFLQLELSYIGVVPEVVPISPTPKPALADAEEHRAGGAANGKEYEKIEFPDLNLVEENQIMLSEYIGLPCSAVEPQSSESLLTSEEDGDGATAETHVAGVRVVQSFSTDNSTADSAGTFRSDTPVSSVSTTESPAAAAVPATPQSNSSGNAVSSAEQKEKAASDAADAEVESSRTVQSSASPAANSPGAMSESAVDKPPVIRVNLEQEVKVDQKEIMDMYMKSMQQFTESLAKMKLPLDLDNGSDKSAAVSGAGAAASDADSSGADSGAAAAAAAKKPMAGGPEKSPKVFYGSRAFF

SEQ ID NO: 49353 - protein, 420 aa, Oryza sativa
MRSPVGRREVVVSGVFTALLVLSILSLPSLLLTGPAYKSWPFLAAARDDSTTGSGGGAGYYPVSFAYLISASTGDAARAARLLAALYHPANCYLLHLDREAPAEEHRRLAELVSGQPVYARAGNVWIVGRPNLVTYRGPTMLSTTLHAVAMLLRLGRRWDWFVNLSASDYPLVTQDDLMDVFSRLPRDLNFIQHTSHLGWKIKKRARPVILDTALYEADRSELIRPANLTTNRRNLPTAFKLFTGSAWTMMSRQFAEYFTVGYDDNLPRTLLLYYTNFVSSPEFYFQTLACNSRRFRNTTVNHDLHFIRWDSPPKQHPLYLGPRDYRRMLLSAAPFARKFREDDPVLDRIDRDILRRDGAAPGRAFAYGGWCSEGGVRLCSNPQEAGRKGMIKAGAGSRRLRAMLNKMMNARNFRRQQCR

SEQ ID NO: 49354 - protein, 426 aa, Oryza sativa; identical to SEQ ID NO: 36967

SEQ ID NO: 49355 - protein, 384 aa, Oryza sativa
MERFVQFLRRGNGLMAASLAAGSCAEEVAKAEGAGCRDDAAALRLKGVAMATILVAGVVGVGLPLAGRKRRALRTDSAAFVAAKAFAAGVILATGFVHMLHDAEHALSSPCLPAHPWRSFPFPGFVAMSAALATLVLDFLATRFYEGKHRAETERVKAAAAAALAASSASDDDITVVTVTEDDNDNKAPLLQPHSHSHSHPHGHGHGHELAQPEGSGGEGEVPAQVRSVVVSQILEMGIVSHSVIIGLSLGVSRSPCTIRPLVAALSFHQFFEGFALGGCIAQAQFKTLSAAIMACFFAITTPAGIAAGAGVASFYNANSPRALVVEGILDSVSAGILIYMSLVDLIAADFLGGKMTGSTRQQVMAYIALFLGALSMSSLAIWA

SEQ ID NO: 49356 - protein, 415 aa, Oryza sativa
MGVTFKAVPLQSPLPPVEEIMSFIRSYVVPEGFPDSVTPSYVPYMTWRALKHFFGGAMGVFTTRTLLNSVGVAQSRATSGAVAINWILKDGAGRVGKMLFARQGKKFDYDLKQLRFSGDLLMELGAGIELATAAFPQLFLPMACIANVVKNVAAVTSTSTRTPIYKAYAKGENIGDVTAKGESVGNIADLLGTGLSILISKRNPSLVTSFAFLSCGYLLSSYHEVRSVVLNTLNTARFTVAVDSFIKSGHVPSLKEGNSQETIFNPPWRHQPVAIGSRFGEAFQEPASFVAIRPLFEDERYIVTYNPTKDKVYALLKDQAKPDDILKAAFHAHVLLHFINASHANLNARKRMNSNRSYQNANPLNMDFIPHIAESCKIVTSSYGVFKKKAREQGWIMSESLLNPGRARLCGIVPQ

SEQ ID NO: 49357 - protein, 256 aa, Oryza sativa
MADGGGRRAPGFRFYPTEEELICFYLRNKLDGLRDDIERVIPVFDVYSVDPLQLSEIHHEMLGGGGEEGEPWFYFCPRQEREARGGRPSRTTPSGYWKAAGTPGVVYSADRRPIGMKKTMVFYRGRAPSGTKTAWKMNEYRAFHYPDASSASASSAGAAAPPNHLPPQLRSEFSLCRLYTRSGGIRQFDRRPLAGGGDENPGPSMAAAAASPEENDGSGSSMQQLELMDQGGAVDPDWDQWDDLATLTALLYWPRD

SEQ ID NO: 49358 - protein, 390 aa, Oryza sativa
MAAAVRRLLRRGLSTATAPPPTPGSILNPSSPSTPLTSRQKSRLAISLLKSTPPPPPDQILSICRAAALSPDSHLDRVALSLAASKLSSAPDSVRDLASSLLTPHHAPHAIALFGQAGLLPDAVSTFKSSPSTRSLNALLFACLVSGNHAEAARVFQTFPDAYSVKPNTDTFNAIIKSFAESGTTRSFYSVLDEMCQKGVKPNATTFTTAIAGFYKEERFDDVGKVIELMKKHGCGESLPVFNVRVQGLCKLGRSGDAKALLNEMVKKGTKPSWLTYNHLIHGFCKEGDLEEAKRLYKEMAKKGLVGDSSFYYMLIYYLCKGGDFDTAVGVYNEIAARNWVPCFSTMKMLVNGLAGSSRVDEAKGIIEKMKEKFPDKAEGWKEVEDALPQ

SEQ ID NO: 49359 - protein, 321 aa, Oryza sativa
MFLTDKYHALLPFHASGGGVKDHRRRPGKAVPGAAGGGPGSARFGAALSARLGSLLPLPASPLAALARLADLLALALADAVPALAGEGDAAAVAAHLDAGVALLDACNGITARLDRLRRRRLLSRFALHLLSSSSPPLPSSVRRARAALADRDERAPASPPPPLPSLPFDQPRDRVSGAATVLLAVDAVSSLAAAAASAVLCGDALHQIAFPLVSGEFPWTEAFNAVSIQLAALATKPSEVDAVDEAVGKLKSVLDNGDGDLDEAALRAAVQEVERRTEELTAPLDRLSDAVNGVFRAALCLRNAELGSIMVGPAEKTPCK

SEQ ID NO: 49360 - protein, 412 aa, Oryza sativa
MSSKEKPTLGGQRIKTRKRNIAAPLDPASFSDAIVQIYLDNAGDLELVAKSIESSDLNFSRYGDTFFEVVFIGGRTQPGTIKPEEEGERHPYSVLDCAAQREAILPSVLYIQKTLRRRPFLIKNLENVMRKFLQSLEFFEENERKKLAIFTALAFSQKLSGLPPETVFQPLLKDNLVSKGIVLSFITEFFKEYLKENTLDDLIALLKKGKMEDNLLEFFPSAKRTSEALSEHFTKEGLTSLVEYNEKKMFEVKLKEIKLTLTTMINEEAEISEVTEAVKQQVKDAKFPDIEVVRMLWDVLMEAVQWSGKNQQQNSNSALRQVKAWAGLLNAFCTSGRLELELIYKVQTQCYEDAKLMKLFPEIIRTLYDQDVLAEDTILLWFRKGSNPKGRQSFVKALEPFVKWLEEAEEEE

SEQ ID NO: 49361 - protein, 323 aa, Oryza sativa
MAATKPPSCSTRLRSPATTAACFLPASLLLFLLLLLLRRPPMGSFPPTIPGGSVSSRRAELYGRMARDLDERGAAFLDGGETSQSLTLSELFDTRDGAVVPMLKAANPPVRANVLYLDPEFASVISKAVKEVFLPYFNQAIWFQNMSIYHFSMFHTSHHLEPIVATEDEIEAEVDAVKRVTDDVCPLKIILDQVVLTSTGVLLGLWQVESGTDPADIRSRLREALPRAPQKQLYDPVMLHTSLARILGHPKLPQEGNAQSLDHVKFFHDLVAQVNSKIRGFQATVKELWFVEEYDVLALALNGKMKVRRLQFGCKEGQGNGKI

SEQ ID NO: 49362 - protein, 325 aa, Oryza sativa
MAESGQSIASDVTALIGNTPLVYLNKVVDGCEAQIAAKLEIMEPCSSVKDRIGYSMITDAEEKGLITPGKSVLIEPTSGNTGIGLAFMAAAKGYKLILTMPASMSMERRIILKAFGAELVLTDPLLGMKGAIQKADELAAKMPNSYILQQFENPANPKIHYETTGPEIWKATAGKVDILVSGIGTGGTVTGAGKYLKEQNPEIKIYGVEPTESAILSGGRPGPHKIQGIGAGFVPGVLDVNLLDEVVQVSSDEAISMAKQLALKEGLLVGISSGAAAVAAIRVAQRPENKGKLVVVVFPSFGERYLSSVLFESIKREAENMVFEP

SEQ ID NO: 49363 - protein, 199 aa, Oryza sativa
MFPVWVSMVVFFVVTAQITSTLIEQGMAMDGRVGPFTLPAASIATFDVISVLVWVPVYDTVLVPLARRVTGKDRGISHLQRIGVGLALAAVAMAYSAVVEARRLGTAPAPVSIMWQAPSYLVLGVAEAFSVIGMMEFFYEQSPESMKSLCTALGQLAIAVATTSTPACSSWWRRPPRAAAGPAGSRTTSTRGTWTTSSG

SEQ ID NO: 49364 - protein, 471 aa, Oryza sativa
MRSSSDCKVVAAAARKKEKEAAAWPWSLWGFLLTGCLGGGGGGGKKKSGGKKVRPRGGGGGGLRRLSFTDLTGAADQDLSVSLVGSNLHVFTVAELRDATRGFVSGNFLGEGGFGPVYKGLVGDGVKPGLRPQAIAVKLWDPEGAQGHKEWLAEVIFLGQLRHPNLVKLVGYCCEDENRLLVYEYMEHGSLENHLFKQIPAVLPWSTRLNIAVGAAKGLAFLHDAEKPVIYRDFKASNILLDSDYKAKLSDFGLAKDGPEGDDTHVSTRVMGTHGYAAPEYIMTGHLTAKSDVYSFGVVLLEILTGRRAVDKTRPNREQSLVEYARPCLRDPLRLIRIMDPALEGRYSPAAAREAAAVAYRCLSGSPKNRPDMSAVVDALEPLLVATDDVPLGPVVLFVAPDQEADAAAAADDDEDDKARRRQRRTRKDEQHRRRSRLRTSPKGSPRKPAVAAACRNEEFWVWHVPADHKA

SEQ ID NO: 49365 - protein, 56 aa, Oryza sativa
MKNYSLGLHYYSIRHQRRSEMEQIHCWTLPLGLGPPQAQPGSQRARRRPTIPWSHR

SEQ ID NO: 49366 - protein, 111 aa, Oryza sativa
MILALFIYKPRHNHFNYHSYKGFNTSAKFDHQHKDKSIKMETSRKFFPTIVVLLLLVVTTAAQARECETPSNEFKGICMMVANCANVCLTEGFSGGKCSGFRRRCMCTKDC

SEQ ID NO: 49367 - protein, 73 aa, Oryza sativa
MWLLTSILCHCSLRARWYAFRVLFLGQMVRQDCWRLASSSHPIQPDRASEWPNSEWPNWRCVREEGEGRIGGG

SEQ ID NO: 49368 - protein, 345 aa, Oryza sativa
MEASLPFHHHHPAASSTAAHHAARLTPPPPPRDPRATARWVPPAAAPVRSRSPANLGLPPNPPRRLRLRLAPPRITAAVTGGPRRPRRRAPPPLECAGGSSSSLRRPREEEEEEEEEERSSTAHAGVSLVGENKVLQMSSIVPKASNIFWHDCAVGQADRQKLLKQKGCVVWITGLSGSGKSTLACTLDRELHTRGKLSYVLDGDNLRHGLNKDLGFKAEDRAENIRRVGEVAKLFADAGLVCIASFISPYRRDRESCRALLSDGSFIEVFLNMPLELCESRDPKGLYKLARAGKIKGFTGIDDPYESPLNSEIEIKEVDGVCPSPSDMAGQVVTYLEEKGFLHD

SEQ ID NO: 49369 - protein, 326 aa, Oryza sativa
MTWSVFLQIFVLALLGPVIDQNFYYAGLKFTGPTFACAMSNILPAMTFVMAVIFRMEKVDLKKVRCQAKVAGTLVTVAGAMMMTLYKGPLMQMAWTSHVQAPHGHGAEAPAAAAAIDPSGREWFLGSLFVIIATLAWASLFILQAHTLKKYSAPLSLTTLICFVGTLQAIVVTFAMEHRPSVWAIGFDMNLLAAAYAGIVTSSIAYYVQGLVIQKTGPVFASAFSPLMMIIVAGMGSFILAEKIYLGGVLGAVLIVVGLYSVLWGKHKETQEQDAAMMELPVASKGNDAEFTAATVVGDDDDAADCKKANGVKKSSSSNEQGASAV

SEQ ID NO: 49370 - protein, 227 aa, Oryza sativa
MEAGRPASAAGQGESSSSSGAMAVDAAGGVEKPRFEALMPSEMSGGRPQFRKVPVPQHRFAPLKKAWMDIYTPVYEHMKIDIRMNLKARRVELKTRQDTPDVSNLQKCADFVHAFMLGFDIADAVALLRLDDLYVDSFEIKDVKTLRGEHLSRAIGRLSGKGGKTKYAIENSTRTRIVIADTKIHILGSLVNIKVARDSLCSLILGSPAGKVYSKLRAVSARLAERY

SEQ ID NO: 49371 - protein, 555 aa, Oryza sativa
MAIAMHFELRVVKSDRSRFIAKCAREGCPWRVHVAKCHGVPTFTVRTLHGEHTCDGVRDLHHHQATVGWVARSVEATLRDNPQYKPKEILQDIREQHGVAVSYMQAWRGKERSMAAVHGTLEDGYRFLPAYCEQIVQTNPGSVAIYKGTGPDNSFQRLFVSFHASIHGFLNACRPLLEIDKADLKGKYLGTLLCASAVDAENMMFPLAFGIVDAESDENWMWFFSELRKMLGVNTDKMPVLTILSERQSQVVEAVEVNFPTAFHGFCLRYVSENFRDEFKNPKLLNIFWSAVYALTAAEFDSKVNDMVQVQDVMPWFQRFPPNLWAVSYFEGIRYGHFNLGITEILYNWAMECHEFPIVQTVEHIKHQLTCWFVERQNLALSYNSILVPSAEKLISEAIADSGCYQVLRANKVEFEIVSSERTNIVDTQARCCSCRRWQIYGIPCAHAVAALLSCGEDPRLYAHECFSIMKYRETYSQPIYSIPDRSQWNLPFSFAQGAGSKAYAVLRPPKIRRPPGRPKMKILKIESLKRPKRIVQCGRCHLLGHSQKKCSLRN

SEQ ID NO: 49372 - protein, 138 aa, Oryza sativa
MAIASGAAFSVRPSPAAARPCVAASASAAGAARFRGDGSGGGGGGGGGGKWWAPLLGWSGQPDYIDAQPAAREEARPNPMAAAEQRGGGGKRFGVLTEEKARQLRARMMETESFHDCMYHSAIASRLASAAPADDGKH

SEQ ID NO: 49373 - protein, 323 aa, Oryza sativa; identical to SEQ ID NO: 30512

SEQ ID NO: 49374 - protein, 245 aa, Oryza sativa
MKGGSKVVVVPHKRNGVFIAKAKEDALCTKNMVPGESVYGEKRISVQNEDGTKVEYRVWNPFRSKLAAAVLGGVDNIWIAPGTRVLYLGAASGTTVSHVSDIVGPTGLVYAVEFSHRSGRDLVNMAKKRTNVIPIIEDARHPARYRMLVGMVDVIFSDVAQPDQARILALNASYFLKNGGHFVISIKANCIDSTMPAEAVFASEVEKLKADQFKPSEQVTLEPFERDHACVVGGYRMPKKQKGTS

SEQ ID NO: 49375 - protein, 427 aa, Oryza sativa
MGIPNPSDEVVQVRHGDVAGEPTVVTISCPDKTGLGCDLCRLVLLFGLNIVKGDMSTDGRWCYIVLWVVARPGRAMAMRWDLLKDRLIQLCPVAAPFGLDNHHLAAAGLHLHDHDAPAPSPNIFLLKFFCYDRMGLLHDVTRVLCELELTIRRVKVSTTPDGRVLDLFFITDARELLHTKSRREETYDKLQSVLGDSLTSCEIESATEEMSSCLQASTLLPHSAVEEMFNVEVVEEQSRSCGGLSVAMDNSLSPAHTLIQIQCGDHKGLVYDIMRTLKDCNIQISYGRFYASQNGSCEVDLFAVQSDGKKIVDQHKQRALCCRLRTELHRPLRVALVNRGPDTELLVANPVEVSGKGRPLVFYDITLALKKLHKRIFLAEIGRHVVGDREWEVYRVHLGEGDHSSLRSKIVDGVTNMLMGWDDTPPS

SEQ ID NO: 49376 - protein, 528 aa, Oryza sativa
MRFFLIFFFASFAYYALPGYLLPILTFFSWACWAWPHSITAQQVGSGYHGLGVGAFTLDWAGISAYHGSPLVAPWSSIANTAAGFVMFIYLIVPLCYWKFDTFDARKFPIFSNQLFTASGQKYDTTKVLTREFDLNVAAYESYGKLYLSPLFAISIGSGFLRFTATIVHVALFHGGDIWRQSRSAMSSAAAKMDVHAKLMRRYKQVPQWWFLVLLVGSVAVSLVMSFVYREEVQPPWWGMLFAFALAFVVTLPIGVIQATTNQQPGYDIIAQFMIGYALPGKPIANLLFKIYGRISTVHALSFLADLKLGHYMKIPPRCMYTAQLVGTVVAGVVNLAVAWWMLGSIDNICDVEALHPDSPWTCPKYRVTFDASVIWGLIGPARLFGRHGLYRNLVWLFLAGAVLPVPVWLLSRAFPEKKWIALINVPVISYGFAGMPPATPTNIASWLVTGTIFNYFVFKYRKGWWQKYNYVLSAALDAGTAFMGVLIFFALQNAHHELKWWGTAVDHCPLASCPTAPGIAVKGCPVF

SEQ ID NO: 49377 - protein, 428 aa, Oryza sativa; identical to SEQ ID NO: 48035

SEQ ID NO: 49378 - protein, 465 aa, Oryza sativa
MVAVTPGRRRRPAGCAAGHHHQHQQQRLLAVAARLAAAKPAATTEAAVYGGVGGGGCCLEFLDCVLRAMGVATLAEIMPPADFRWAARPMRRRRRGGSSSSSSSPRDREPRDGRIAANGASAAASLYTMRGNKGVNQDAMLVWENFCSKEDTIFCGVFDGHGPYGHLVSKRVRDLLPIKLSANLGRDGHKETSTNIVTSSMTEGGGTERMDRDTETPLGTEENGDYPEMFAALRTSLLRAFYVMDRDLKFHKTIDSVFSGTTAVTVIKQGHDLLIGNLGDSRAVLGTRDEYDQFFAVQLTVDLKPTIPSEAARIRERSGRIFSLPDEPDVARVWLPKYNMPGLAMARAFGDFCLKDYGLISMPDVSYHRITEKDEFVVLATDGVWDVLSNSEVVSIVSQAKSEASAARFVVESAQRAWRTRFPTSKIDDCAVVCLFLNTDARNKPPGSGIKDLANAIELGGGNLS

SEQ ID NO: 49379 - protein, 81 aa, Oryza sativa; identical to SEQ ID NO: 35120

SEQ ID NO: 49380 - protein, 404 aa, Oryza sativa
MASAAMSTLNLSSSPLTKQQLRFGASTLSAEHVSGFSSARPAPSLCCSSSHWRAVKLRPRRRPWRRAGNRVVAQAGGYKVAILGAAGGIGQPLSLLVKMSPLVSALHLYDIANVDGVTADLGHCNTPAKVAGFTGKEELAGCLAGVDVVVIPAGVPRKPGMTRDDLFGINAGIVRELVEAVADHAPAALVHVISNPVKSTVPIAAEVLKRKGVYDPRKLFGVTTLDVVRANTFVAEMKGLPLADVDVPVVGGHAAATILPLLSKARPKTAFTDEEVEALTRRIQNAGTEVVEAKAKAGGGSATLSMAYAAARFLEASLRGLDGDADVYECSYVQCQAVPELPFFACRVKLGRDGVEEVAAAGAELRGLTEFEARALEALKPQLKKSIDKGVAYAQQQPATVAMG

SEQ ID NO: 49381 - protein, 163 aa, Oryza sativa
MASSLLSMAMFVVVLMCASAMAAQARLPPGSSPLVAACTAGPFSKLCVKDLGHRLLDIQTVLTSVSNHGAAIAGAPGQVDFRSLVAVAMEAATESGAVAATVFEGKLPGFNKSVPDFKACLDNCSVTVSSAMKEIHGAAAALKAGDDEVAKTLVLRAINDVTM

SEQ ID NO: 49382 - protein, 430 aa, Oryza sativa
MSWRWALARRVAALGATSGGGDGATAQAQRLFSSAAALLGRHPPPPSPPHYQIRSKVVGCRGATFVSSRWLHDAQYQVRQDGLSRSEEQQDPFELVADELSLLANRLRSMVAAEVPKLASAAEYFFKVGAEGKRFRPTVLLLMASALKFPLSDSTEVGVLTILANKLRTRQQNIAEITEMIHVASLLHDDVLDDADTRRGVSSLNCIMGNKLSVLAGDFLLSRACVALAALGNTEVVSLMATAVEHLVTGETMQISTSREQRRSMDYYLQKTYYKTASLISNSCKAVAILAGHTADVSMLAYEYGRNLSLAFQLIDDVLDFTGTSASLGKGSLTDIRHGIITAPMLYAMEEFPQLHEVVDRGFDNPANVELALDYLQKSRGIEKTKELAREHANRAIKAIEALPDSDDEDVLTSRRALIDITERVITRTK

SEQ ID NO: 49383 - protein, 374 aa, Oryza sativa
MSWWCCIPKSKKGENPYSHGVSGIPPEKNIGLFSYSELRSATENFNRSNKIGRGGFGTVYKGTIRNGRDVAVKVLSAESRQGVREFLTEIDVITNVKHPNLVELIGCCVEGNNRILVYEYLENSSLDRALLGSNSEPANFTWSIRSAICIGIAKGLAYLHEEIASPIVHRDIKASNILLDKLYNPKIGDFGLAKLFPDNITHISTRVAGTTGYLAPEYAWHGQLTKRADIYSFGVLVLEIVSGKSSSRSLLADDKILLEKAWELHEVGKLKELVDSEMGDYPEEEVLRYIKTALFCTQAAAARRPSMPQVVTMLSKPIRINERELTAPGYIHDYNGTVSKATNSSNSRFKHSASDTSDMFSTVVPPTVSEISPR

SEQ ID NO: 49384 - protein, 255 aa, Oryza sativa; identical to SEQ ID NO: 33302

SEQ ID NO: 49385 - protein, 87 aa, Oryza sativa
MWFCHRRLKDRKPPPKRQQLEEEVHVPVMAPPPVLPPPLPHSELTMAPGGMYGEQLLPSSSRRGTGRPSAILDMSDLQCLPLLTSHG

SEQ ID NO: 49386 - protein, 216 aa, Oryza sativa
MAHRVDNEYDYLFKIVLIGDSGVGKSNILSRFTRNEFFLESKSTIGVEFATRTLQIEGKTIKAQIWDTAGQERYRAITSAYYRGAVGALLVFDITKRQTFDNVQRWLRELRDHADANIVVMMVGNKSDLNHLRSVPEEDGHAFSEKEGLSFLETSALEAINVEKAFHTVLSEIHQIVSKKALAAQESASTNGRSMQGTTINVAEAPAATKGSCCSS

SEQ ID NO: 49387 - protein, 216 aa, Oryza sativa; identical to SEQ ID NO: 31219

SEQ ID NO: 49388 - protein, 360 aa, Oryza sativa
MTNGQSIKFPLLRETTDDVENNLYPFVNLLPDGNLFVFANDRSVVFDHRTGKVVRELPKLAGGGRNHPASAMSAMLPLDLRNLTRGADPEPEVIVCGGALKTAFRLGENNTYQPTLRDCARINLGKIDAVWAVEAMPVGRVMGDLLVLPTGDLLMLNGAAKGSSGWGFARQPILSPILYSPRHPEGSRFRPLAASTVARMYHSTSAVLPDATVLVAGGNTNAAYNFSGVDFPTEVRVERFAPPYLSRELTGNRAVIDVASVPAGGMRYGTKFTFRFHTPVAAVEWGDVRVTMYAPPFTTHGYSMNQRLLVLPVAGFSAQGQMYELTVDTPRKPELAPPGYYLVYVVSKDVPSEAAWVKIQ

SEQ ID NO: 49389 - protein, 502 aa, Oryza sativa
MAATRSTATAALALSRTLARRPAASSSSRRISLELSAPRGTNPFQSAAFSSTTTGDPPPPTMDSPIKVVSHIGGSGGDGGGGAIDAGRSARKPLSLWPGMYHSPVTNALWEARSSIFERMIDAGAAGKQQQQPPQTELLTKTPAGSRTSIVYKFATDDILREQYRDPWNEVRIGKLLEDLDALAGTIAVKHCSDEDSTTRPLLLVTASVDKMELKKPICVDTDLKIAGAVTYVGRSSIDIQIEVTQVDQDSDMQSDPIALTANFTFVARDSMTGKSAPVNRLSPETEKEKQLFAEREARDKLRKRKREEQKGVFENGINKLHVEAERLNSLLAEGRVFSDLPALADRDSILLKDTRLENSLICQPQQRNLHGRIFGGFLMHRAFELAFSTAYAFVGQRPCFLEVDHVDFLKPVDVGDFLRFKSCVLYTQLDNAEQPLVNVEVVAHVTRPELRKSEVSNTFHFTFTVCSDALKNGLKIRHVVPSTEEEARRILERMDAEGLFD

SEQ ID NO: 49390 - protein, 400 aa, Oryza sativa
MPYCEVDRYQNGDEWDGVRLFYRRFGRGATKVLLVIGLAGTHDSWGPQIKGLTGSLEPAADDEESGDAAAAEGDDGDGIEVCCFDNRGVGRSSVLPHKSYYSTVIMARDALALMDHLGWKKAHVFGHSMGAMISCKLAAMAPHRICSLALLNVTGGGFQCFPKLDGQMLSLAFRFLRARTPEERALVDLETHYTKEYLDEKVGSCTRRTILYQEYVKGISSTGMQSNCGFEGQVNACWTHNMTTKELDTIRSAGFLVSVIHGRSDIIAQLCHARRLAERLIPVARMVELHGAHLVSHERPEEVNNALMELIKATKSMMKPEEWSSQPENSSETGALISARPVSVTIRTDDGGNAAIAVYNLLAKLQLSFLYVIEVILMGFEHMRNIVKVMKPVRVAAIES

SEQ ID NO: 49391 - protein, 747 aa, Oryza sativa
MAFFARAIRYSSPYLRSRAPPPPAVAASCRWISPTAAAGSPEAGAAVAPADPETPPPREPVGGARVELPSNPEDALEVFVDGHAVRIPKGFTVLQACEVAGVDIPRFCYHSRLSIAGNCRMCLVEVEKSPKPVASCAMPALPGMKIKTNTPVAKKAREGVMEFLLMNHPLDCPICDQGGECDLQDQSMAFGADRGRFTEMKRSVVDKNLGPLVKTVMTRCIQCTRCVRFASEVAGVQDLGMLGRGSGEEIGTYVEKLMTSELSGNVIDICPVGALTSKPFAFKARNWELKGTETIDVTDAVGSNIRVDSRGPEVMRIVPRLNEDINEEWISDKTRFCYDGLKRQRLNDPMIRGTDGRFKAVTWRDALAVVAEVLQQVKPEEITGVAGKLSDAESMMALKDFVNKMGSDKVLCEGNGPSPPADLRSNYLMNTSIAGLEKADVFLLVGTQPRVEAAMVNARIRKTVRATQAKVAYIGPPTDFNYDHEHLGTGPQTLVEIAEGRHPFCSTLQSAKNPVIIAGAGLFDREDQDALFSTIETVAKKFNVVRPDWNGLNVLLLHAAQAAALDLGLVANPTESIKSTKFLYLMGADDVDLDKVPDDAFVVYQGHHGDKAVYRANVILPSSAFSEKEGTYENTEGCTQWTIPAVPTVGDARDDWKILRALSEVAGAQLPYDSLSGVRDRISMVAPNLVHVDEREPCTISSEVKPPVKQQVSSTPFKTVVENFYMTDAITRASKIMAQCSATLLKK

SEQ ID NO: 49392 - protein, 450 aa, Oryza sativa
MAAATAAAGAAAAVSLLACYLLLHRDGAKLPWVGPTTRSSRSSGRRTRRKGLVEAIGNTPLIRINSLSDATGCEILGKAEFLNPGGSVKDRVAVKIIEEALESGDLLCGGTVTEGSAGSTAISLAIVAPAYGCKCHVVIPDDAAIEKSQIIEALGATVERVRPVSITHRDHFVNIARRRALEANKSAAAQRESRYKETNGSAHVNTRIMHSKITASKGESNKALTNCSANSEIQYNGKCDHDSDSKGGFFADQFENMANYRAHYEWTGPEIWQQSKGTLHAFVAAAGTGGTIAGVSRYLKEKNTNIKCFLMDPPGSGLFNKVTRGVMYTKEEAEGKRLKNPFDTITEGIGINRVTKNFMMAELDGAYRGTDREAVEMSRFLLKNDGLFVGSSSAMNCVGAVRVAQDLGPGHTIVTILCDSGMRHLSKFFNDQYLANHGLTPTATGLEFLD

SEQ ID NO: 49393 - protein, 343 aa, Oryza sativa; identical to SEQ ID NO: 28570

SEQ ID NO: 49394 - protein, 331 aa, Oryza sativa
MKKYDDIPVWWFYSLMALSMTVALILCTVLKHEVQLPWWGLLFACGMAFIFTLPISIISATTNQTPGLNVITEYAIGLIIPGHPIANVCFKVYGYMSMSQAIAFLSDFKLGHYMKIPPKSMFLVQFIGTIVAGTVNLGVAWWLLGSIHDICQDSLPADSPWTCPNDRVFFDASVIWGLIGPIRIFGPHGNYSALNWFFLIGAAGPVIVYIFHKMFPNKKWITLTNLPVLIGATASMPPATAVNYNSWLLFGTIFNFFVFRYRKKWWERYNYILSAALDAGVAFMAVLLYFSLSMENRSIDWWGTAGEHCPLATCPTAKGVDLGPTSVCPVF

SEQ ID NO: 49395 - protein, 262 aa, Oryza sativa; identical to SEQ ID NO: 33290

SEQ ID NO: 49396 - protein, 45 aa, Oryza sativa
MAIQICIWSSGPLRYIQFNHSIRHCVYCYVHEVRTLNLYLFYTLP

SEQ ID NO: 49397 - protein, 145 aa, Oryza sativa
MAAVAGTLAPLFLLPLRRRPPLPHPISLMPTSPSTLRPRHRRRLAVALAANGGGGGDGDGGPPAEEGEEKRRKGPSLPALSEIRWGELLTPEPANAAAVALSAALAWAGASLLLQLALISFAIFTAAVKYSFVAALLLFVLIALL

SEQ ID NO: 49398 - protein, 550 aa, Oryza sativa
MTNAWISPSVVALCPSPLPSSRLPGSVLSCWPDSRGIRRGAGEGTAGQTLRPARGFTVEKLRNTAITRANSACLPMEDCVGIKYSSVNEGEERKGGHGVPKVSIIPLIFLIFYEVSGGPFGIEDSVKAAGPLLAIAGFLLFALIWSVPEALITAEMGTMFPENGGYVVWVSSALGPFWGFQQGWAKWLSGVIDNALYPVLFLDYVKSSIPALGGGLPRTLAVLILTVALTYMNYRGLTIVGWVAVFLGVFSLLPFFVMGLIAIPRIEPSRWLEMDLGNVNWGLYLNTLFWNLNYWDSISTLAGEVENPKRTLPRALSYALVLVVGGYLYPLITCTAAVPVVREFWTDGYFSDVARILGGFWLHSWLQAAAALSNMGNFVTEMSSDSYQLLGMAERGMLPEFFAKRSRYGTPLIGIMFSAFGVVLLSWMSFQEIIAAENYLYCFGMILEFIAFIKLRVVHPNASRPYKIPLGTIGAVLMIIPPTILIVVVMMLASFKVMVVSIMAMLVGFVLQPALVYVEKRRWLKFSISAELPDLPYSNVEEDSTIPLVC

SEQ ID NO: 49399 - protein, 504 aa, Oryza sativa
MGIQGNKATTREHDFLSLYTTAAKDPSLQLHDAKPPPPSQGFFLRTHDFLQPLEKPTPAPTPPPTSQLQQQQQQAFPGGIGTFSISHVAGARPVAAAVVKAEPTPFVLWGQPAAAAAAHPVAALGHHHHHHQWTLPFAGVGQVAATAARQQQEWKGRVGGGGFMDSGSRSSGGAGFDDDDGVAARREVSSSLKELTVRVDGKGGSCSGSGTDQRPSSPRSKHSATEQRRRSKINDRFQILRELLPHSDQKRDKATFLLEVIEYIRFLQEKVQKFEASVPEWNQENAKILPWSNIYFRSFWKNSQSKGQNPGDDLPDPSQFIRNGSSSGYNFTGKPDDNHNMVTSAAASGAQELVETDHAASVSYRSAETPTNITNNVTSQAQAQWASPAGVDDCAMNSEMLNNQQLAIDEGTISLSSQYSQQLLGTLTHALESSGVDLSQSSISVQINLGKRAVKRPGADGSSSSKELPSTSANNENMGHQLTMLGGGTEELPHPTKRHKSGNS

SEQ ID NO: 49400 - protein, 184 aa, Oryza sativa
MAHLVWMLGENGEEKSFENPNELLPLSRLEEIGVLYWHLDPKKSESEEELTKIRRERGYSYFDLTEICPDKLENYEEKLKSFYCEHIHADEEIRYCLEGSGYFDVRDKDDKWIRIWIKEGDMIILPAGIYHRFIVDSNNYIKLMRLFIGEPVWTAYNRPQEDHPVRQEYVKNVKGDTGFALAAH

SEQ ID NO: 49401 - protein, 388 aa, Oryza sativa
MASSSSSSSSSPPPPPPRRSVFDAAYIRAEFAAAGISPHFIPLIWKYVLQNPRCGDLDAVPSLPAAAYALLRQKFQPTTSTLTTAAESKDRTTTKLLIRLKNGESVEAVIMRYDTRLGKYDGKPRPGGVRSTLCVSSQVGCKMGCRFCATGTMGFKSNLSSGEIVEQLVHASRYSQIRNVVFMGMGEPLNNYTALVEAIQVLIGSPFQLSPKRITVSTVGIIHSINKFNNDLPNINLAVSLHAPDQDIRCHIMPAARAFPLVKLMNALQSYQNESKQTIFIEYIMLDGVNDQEQHAHQLGKLLEVFKAVVNLIPFNPIGSSNNFKTSSEHNVKKFQKILRGIYNIRTTIRQQMGQDIAGACGQLVVSLPDERSAGGATLLSDIEDIRI

SEQ ID NO: 49402 - protein, 373 aa, Oryza sativa
MSQVLVEANGVTRTLVLNRPKQLNALSSAMITCFLRCFTAYEEDDGVKLLIVKGKGRAFCAGGDVAAVVRSINNDSWKYGAHFFRNEFLLNYIIATYSKPQVSLLTGIVMGGGAGVSIRGRFRVVTDSTVFAMPETALGLFPDIGASYFLSRLLGFYGEYVGLTGVRLDAAEMLACGLATHFVPSDRLSLLEESLKKVDTSDPFAICGIIDQYSQQPSLKEKSALNRLEIINKCFSKKTVEEIIASLEQEAPNVADEWIASAIQSMRKASPTSMKISLRSIREGRTQTVGECLRREYRMVCHVMRGDFSRDFFEGCRAILLDRDRNPKWMPPRLEEVHDEVVEKYFSKVDDPEWEDLDLPPRRSHGRRLVPKL

SEQ ID NO: 49403 - protein, 164 aa, Oryza sativa
MDDATSSSSRAPRPKTEELDAALHAMGFEIERVSPAEVTGRLLVTPTCCQPFKVLHGGVSALIAEGLASMGAHMASGYSRVAGVQLSINHFRSAALGDTVLVRAAPLHVGRSTQVWAVKLWKLDPSTKEKGAQISESRVTLLCNLPVPESVKNAGEALKKYSKL

SEQ ID NO: 49404 - protein, 384 aa, Oryza sativa
MKSTTHLLAGGGGGGSVAPPTAATAPTLAMEVGDPSGALVGGAGGAGAGGGDGDARDALLRLVALGDRMAAVRRRIAASISGESGPLSSSDIHSVSSEISSAAHLVVLNAASLLSSTVASLPAPPPPPATTVQELPPVVVSVPQEPPQEAAKGDGDYDVVELDASELLAEHVHFCDICGKGFRRDANLRMHMRAHGDRFKTLDALSRPGQPKPPAGREVRFSCPYAGCNRNRAHRRFRPLKSAVCARNHFRRSHCPKLYACERCGGKKRFAVLADLRSHLRHCGEEAQWRCSCGTTFSRKDKLFGHLALFEGHTPAIAEPNKGVATAAAEASISMMEEGGVEANCDREEGEEGGFDPKFFQEWMEELRGGAVAPNWSAPSEAGH

SEQ ID NO: 49405 - protein, 122 aa, Oryza sativa
MCVCHGSSHSLRPRLGDRVHEEGAGGDLQEGRVARARRLQAERGERDGRHRGGRRQGGHLPGRGGDARRHARPGKPRPRQDQEGVLGQRQRLPRPSRVLPRAGREAHQGARQVNSICCSFAA

SEQ ID NO: 49406 - protein, 184 aa, Oryza sativa
MGDNASASASVLAPPVGAGEGDAPSFSYLAALGNCPLVAAVLAGAIAQFIKVLTTWYKENRWDAKQLVGSGGMPSSHSATVVALAVAVGLQEGFGSSLFATAAIFASVVMYDAFGVRLHAGKQAEVLNQIVYELPSEHPLAETRPLRELLGHTPAQVFAGGVLGFAVATFTGMIAGLGNTGSLP

SEQ ID NO: 49407 - protein, 103 aa, Oryza sativa
MVLLSHFSYSCARIFFFPYTTLISSPNASPRQLERKIGQLQDLKNSAQEVSSDDTLQMFHESILQSSHSLEEPHATLKRATDSSRLQFLSEDVAMLCCMNAQI

SEQ ID NO: 49408 - protein, 311 aa, Oryza sativa
MAALLLRRLAGTHRGRVPLAAAAAVTGGAALFCASSPPTIALMEEKGEDAAAKVALNPDKWLEFKLQEKATVSHNSQLFRFSFDPSTKLGLDVASCLITRAPIGEEVEGGRKFVIRPYTPISDPDSKGYFDLLIKVYPDGKMSQYFASLKPGDVVEVKGPIEKLRYSPNMKKQIGMIAGGTGITPMLQVVRAILKNPDDNTHVSLIYANVSPDDILLKRELDRLASSYPNFKVFYTVDKPSNDWRGGVGYISKDIALKGLPRPGEDSLILVCGPPGMMNHISGDKAKDRSQGELTGILKELGYTAEMVYKF

SEQ ID NO: 49409 - protein, 198 aa, Oryza sativa
MAAAAMILPLLLLLCWFLLLSVGDAMCWFNDDASASAPAGWLVSWTNGMGWYKGMPREFVDGHNQLRARYGLQPMRWDNKLARQARRWSDAMRGDCQIRHSTGNSFAESLYIGRNGWNARASDAVRCWGDEEHLYDRDTGKCTAGVDFHECGHFAFMVRPNFTRIGCARAECFNGGVFITCNYFKDEQHQPATPPTYS

SEQ ID NO: 49410 - protein, 984 aa, Oryza sativa
MVHSAYDAVELVSGVPGDIVAVAAYAGRLLVAGKDGSLRIYASPGHAGGGIPRDGPYALERQQPSLWRRGTPLAMEVSAGRELLLSLAECVNLHRLPGLETVAVIGKTKGANLFAWDDRRGLLAVGRWERLTIFRLDSGREFVEVKEFGVPDTVKSMAWCGDNICLGIRKEYMIINSMTGALTEVFSSGRNAPPLVVALPTGELLLGKDNIGVFVDQNGKLIQDGRIIWSDTPASVAIHRPYAVARLPRHVEIRSLRAPNALVQTVVLRDVQKLVETENCILAVLARSVYGLLPVPIGAQIVQLTASGEFEEALALCKLLPPEDSNLRAAKESSIHIRYGHFLFDNGSYEEAMEQFSDSHVDITYVLSLYPSLVLPQTHIIGEHDRLQDLPELARESSDVTDDMEPYSLQLHESDDKSPLEIKKMSHNALIALVKYLHKKRNGIIERATAEVTEEVVSGAVHHSSILSESYRSKKPNKKRAQTHTSSIAREMATVLDTSLLQALILTGQSSGAIELLKGLNYCDLKICKEFLEERSDYMVLLELYKSNEMHREALQLLNQLVEESKAEMGKNDFNKKFNPQMIIEYLRPLCRSDPMLVLESSLYVLERNPSDTIELFLSENVPADLVNSYLKQHAPNLQSTYLELMLSMSVSGINPNLQNELVQLYLSEVLDWHKILKEEGNWTEKTYSPTRKKLITTLENNSGYNTDILLKRLPQDALFEERAILYGKINQHLRALSLYVHKLQMPERAVAYCDRVYEEGAQQPSKSNIYFNLLQIYLNPRKAEKEFEQKIVPVASQYPGIQKVTKVRGARMGKKVVEIEGADDVRFSPSGTDSGRSDGDGDGDDVSDGGPIMLNEALELLSQRWDRINGAQALRLLPRDTKLQDLVLFLEPLLRNSSEHRRNYMVIKNLIFRANLQVKEDLYKRRQAVLKIDGDSMCSLCHKRIANSAFAIYPNGQTLVHFVCFRESQQIKAVRGVNSVKRR

SEQ ID NO: 49411 - protein, 290 aa, Oryza sativa
MDTTTTMAPLPLLTTTSLLLFFFLASSFAADVVVAGGGGGGGGYDGGGDGEGGGGGDGEGGGGGGGAKMPHVNHGRYKCGPWVDGHATFYGGRDASGTTEGGACGYKDADGYGAMTAAVSPALFDNGAGCGACYELKGDSGKTVVVTATNQAPPPVNGMKGEHFDLTMPAFLSIAEEKLGVVPVSYRKVACVRQGGIKYTITGNPSYNMVMVKNVGGAGDVVKLTVKGTKRVKWTPLQRSWGQLWKTEANLTGESLTFRVMTGDHRKATSWRVAPRDWTYDNTYQAKKNF

SEQ ID NO: 49412 - protein, 76 aa, Oryza sativa
MLHHVIAGKELKCYFHSHPQIPNVPNWSVDGIISHAKVNHTKPTTRGPTAVLYANKSICRLLMGDGEGALSDGDAE

SEQ ID NO: 49413 - protein, 316 aa, Oryza sativa
MAAMVGAPLAVAAAAAAPGARVFLARPLLRRSPRGVACALRRRPSKYKNKIQNEEVVVEDDIGGGGEDDDDALEALFKQLEEDLKNDDLSVEDDDDGISEEDMARFEQELAEAIGDIADADESGEGSSLGSEAYGNDEKTDEIKRPELKNWQLKRLARALKIGRRKTSIKNLAGELGLDRTLVIELLRNPPPKLLFMSDSLPDEDPSKPEIKEIEPSPVVDNADVTETKPQTELPVHVMCAEWSSQKRLKKVQLETLERVYSRTKRPTNTMISSIVQVTSLPRKTIVKWFEDRREQDGVPDHRVAFKRSLSETIAS

SEQ ID NO: 49414 - protein, 484 aa, Oryza sativa
MGLQVAAVAPSPCARSSASSSPPSTSSSRPALGGAGLARSRAPVNWGAGVMARRRGLRQPARCALSASLDGVGGGDAEFLRRIEELAAAVGVQPTGCGWPASVERSASSAGMPLSLRMLKRKKQQQQLVARQTRWDERLLGSAGDSVGRAFSSMVLIVRELQSFALQQMREAMLGDDLQSVLARVHGEMHASFVWLFQHIFAGTPALMVSLMLLLANFTVHSMGHSVAAAAAIPPAPPTSAAVAVVDTQHADPSLPRFDAASVKTFSIGRAASVGGSSGGGGKVRPVAGATGDDRWDESLARLSGVAPQQPAPPAGTGAGMAVDEQAIWERMVAEASNMQENARAEELSDPDVLGNLVAPVEAEIETEGHAEYTRTEQRYELAVSEEPNNPLILANFAQFLYLVQNDHDRAEQYFERAVRAEPADAEALSRYATFLWKARNDLAAAEDTYQEAIAADPGNAHHAAAYAHFLWNTGGEDTCFPLD

SEQ ID NO: 49415 - protein, 704 aa, Oryza sativa
MGEETLVAMPLAPPHHHHHHAHLPALPHLAAPPPPPPPPAETELTEQREEEVPVDDVVEAAADVPRREEGLVVDGGEDVYYARRMLQGVVLRPPPHLPQPEAPPGLTRALSAPAPDGYVEEEEEQRPVERSASVNSAASAVVVDVASIGRFFRDRRDVLSSAITRRISSLKEASSSPPPPVGMDTYGVQEIHLPNVKVTVRLKDAIEADAEEDDAVGGGGDDGYSFSGSHIKGRVSFFSRSGCRDCAAVRAFFRQSALPYVEIDLDVFPEREAEFASRAGASARVPQIFLNEKLLGGLVVLNSLRNSGEFERRVRDLAGRRCPDTAPRVPVYGFDNDPGKEGGDREDAMVGIVRVLRHRLPIQDRIVRLKLVKNCFSGADMVDGIVNHLECSRKKAVEIGRELARKHFIHHVFRENDFEDGSQNLYRFLEHDPAIPKYYNFIRGATNDGEPKLAAAIGQRMTKIMVAILEAYASDDRRHLDYSRIAASEEFRRYANMVQELQRVDMSALPAEERLPFFLNLHNAMAIHAVVRVGQPGAIDRRSSSNFQYVVGGHPYSLATIRNGILRSNRRQPYTIAKPFGSSDKRLELVQGKVNPLVHFGLCDATRSSPIVRFFSTQGVEPELRHAARKFFLNGGVEIDLESRTVHLTSIIKWYSVDFGQDRETLKWILNYLDPTKAGLLTHLLNDGGAINISYLNYDWSLNV

SEQ ID NO: 49416 - protein, 386 aa, Oryza sativa
MALALRCPAAASPSPAKSTFPPSSSPPPSRLPRRPPASCRCYYYGDGGGFRKNYDHIPKQFREENLKDGLMDNYKNVPQFLYGLSPAQIEMFMNDDNPYDRQSQRVTEESISASRSYDEFGMYNLSGMHEGPAGYSMGMGMGTMSMGRAGRGYRRMRSSAPDLPSLLLDSRIIFLGMPIVPAVTELIAAQFLWLDYDDRTKPIYLYINSTGTMDENNELVASETDAFAIADFINRSKSKVYTINLSMAYGQAAMLLSLGVKGKRGVLPNSITKLYLPKVHKSGGAAIDMWIKAKELDTNTDYYLELLSKGVGKPKEELAEFLKGPRYFRAQEAIDYGLADTILHSLDGSFKPKDLTAQLAKAQEMRQSGKRPAAGAGRWSTPSVPR

SEQ ID NO: 49417 - protein, 409 aa, Oryza sativa
MSHMEAFQNVVLLHKANSNSTLEDISSLSAASCCSLDQLLACVEGEAQKIFGDIQNLLADHRSEVAHFTQELRESFRISLDRTKDMSSFILGLFDKYVEETSKLQSHSNHTHEAQVKSLEDFQKAYEEQSKSEEQKLLADITSLVSKHVTRQRELVGGRLNSLGDAARGNKAFLDEHTSAMEVVTKDAKRKWEMFAEQAENDCKVGSNFSAAKHCRMETILQECACTVDTAAQQWKASHATVNDLCRKQIAEVEALVRSAIETNEQHEAEIASSRATAEEHASNSSKDLLQDVDNMLQEARNSSSRVVSTVEAHLGESQHLQESHSSHTAGINTHADNAFQSSYKDYEPTGETPVRSEPEVPSKDAIESLRAMPMESLMDEFRENHPYEPSKDRRPSLIPRSPLATINN

SEQ ID NO: 49418 - protein, 925 aa, Oryza sativa
MSRALLPRGSILLVLRPRVPSTPHRCFAIGAAAAVDGGETWRGQLRQGEGEGRSRAVKVSVWWDFQSCHLPQGANPCRVATRVTAALRDAGIRGPVDITALGDAYMLPRAVQEALAATGVAFSHVPSSGKGGPDQLFMADLTYWIAQNPPPAHFFLISGNKGLANILHRLRMSNYNVLLACPSADSSVLCSAATIMWPWDALVKGLDFSPKHFNQPPDGISFSWYSHYRGPLDDLFLNSESDDSMAESEDSLAESRDSKAFQPHTKSVKPPILPKSVANGVRQVLYSFPEGISLPNLRAELRKKHVFMDKGLFGFKNFSSLLQAMPDVVKFIDPLPGERNQPAVVGVSKRSMEPAEQIYKGKSSAQSSGEFKRLVQTLNEKPPSSHVPSSSSDILSADRKKVLAVDAPSSQSDLLSRNQEKAPPVDLTTQPETPASCMEADVESVAGASAFTGEQITVDKKGLFERICVLWNDTEPVKPMLSPSQDDTHSKGSNDLLTQYANSNEHNSLLTRTLKIFSTTDNSDGDNVDSTSAISSSFSNMTANDHSDKLNVKENVGNTIIHSSRSVDTSNAEHKVGFIEKSKGIFSWAAKWWASGKPDTDDNLSSVHINDGTREESEKESAFVKTAATASEQQVGVELFMKPYFWDALQQYLSTPHGSDLVSKAKTREELAHGLQKQGHWPLKSLGGKHHHQLVDLLISEKQWIKESSSQTSPFRLALPQRRARSPLLSFFTNGRPSGQRKHVDDRSPTLSRTSVHVLPTKNGKGQASCKSNENQSKSDDFLEKELGPVSDSGKPYRQNDKAVRHHPPTCSDDEFSDDENHEVVQEAGRDAAQSSLFKIIDSWNTSKTICSSKKQHGIGGIVDCSRINRGNGGDNSITENAEKATSLSKHSYMTSDSDSDSDEEKLFNSVLGSLQNAKNSSLPG

SEQ ID NO: 49419 - protein, 644 aa, Oryza sativa
MADGASSSGAASASGPGGGGGGESVVIDYGRRRTACGYCRSTGQTSISHGLWANSLRADDYQALLDRGWRRSGCFLYKPEMERTCCPQYTIRLKANDFICSKEQGRVLKKMQRFLDGELDPQVGSPQNKTSPTKHSLAEPMNMPVSKISKTLTNDFQAAKCPNLFEEDEFISCLSSKINEAVGMSFQVGTLGSDVQLPKAVVKTVKPQLKKKVGGASQDKKVGEAVQDLLYTCNISFQIVAEIRRALPKEKDANHNKVVADISPNSIAEKLAMTMECHGDIAGLAVKACNGHLNFYSVTNQTKQNKTSIIVSTHAPDKSSSSKQSSVNKNTVRVPQKRRKLEIKMRRSHFDPEEFALYQRYQTKVHKEKKVSESSYKRFLVDTPIVFVPPRSGDNTVPPCGFGSFHQQYRIDGKLVAVGVVDILPKCLSSKYLFWDPDFAFLSLGKYTALKEIDWVKTTQEHCPNLQYYYLGYYIHSCNKMRYKAAYRPSELLCPVRFEWVCYDSAKRLLDKSLYSVLSDFAQIQDEMPQPQNSHLDTELSKNDNCESPIDEDDEDLSYDDSDMMVDEEMVRSESNTDVMEDCSSIIDFENVMMDLNGSRVKYKDLLGVVGRIERRHLEQLERQLSKYVKVVGKELSDRMVYSL

SEQ ID NO: 49420 - protein, 190 aa, Oryza sativa
MEISGPGGGSNHTHLTERGEILEDAHDKKDELRAEDLELKLNEPFLNFMRLRLIPQWGQGFTSECQLKTAQDQLEWHSQIKPTRLPVLALHIGNKKFARTNECDIFVKFFYHKKSVIFQMSKDKLCRKVDIPFDDITSFCFVFGQQSDILTIEVKSSLIPLSAAKPLPGKFLDWKVDYSKDDEYYFPESK

SEQ ID NO: 49421 - protein, 160 aa, Oryza sativa
MKREDVPEFLEQLEAAVERHEGVADVLLGVLDLLPVDERRGGVGAVLAEHVHELLPHLERRPPGARRRDVDPHRRWQLQHASASAAAAAPPFAAAVLGLAVLLPGEPHEADAVPLQRRHHLVRHRRALRHLRLLQLQAPICKTRHRRRRRRHRHDMTLHA

SEQ ID NO: 49422 - protein, 224 aa, Oryza sativa; identical to SEQ ID NO: 37984

SEQ ID NO: 49423 - protein, 169 aa, Oryza sativa
MWRRLQTLAPALRRAASASASAAASGAAGPASLARAAPLSTAAAAAFRRTSPLLSGDKPATVEDVMPIATGLEREELAAELKGEKRFDMDPPVGPFGTKEAPAVIESYYNKRIVGCPGGEGEDEHDVVWFWLKKDEPHECPVCSQYFVLKVIGDGGDPDGHDDDDEHHH

SEQ ID NO: 49424 - protein, 194 aa, Oryza sativa; identical to SEQ ID NO: 29232

SEQ ID NO: 49425 - protein, 166 aa, Oryza sativa
MDMLEKKIGSLISESDELRVTLQSKDSLLQAERTRMEELLRKSEALESSLSQKDSQIGLLRRDRTSGQPSRFINLPGTSEIEQVNEKVSPAAVVTQIRGARKVNTDQVAIDVEVKDKPLDDEDDDKAHGFKSLTMSHIVPKFTRPISDRIDGMWVSGDRLLMRQQH

SEQ ID NO: 49426 - protein, 247 aa, Oryza sativa
MIERSTNLDWYKGPTLLEALDQINEPKRPSDKPLRLPLQDVYKIGGIGTVPVGRVETGVLKPGMVVTFGPSGLTTEVKSVEMHHEALQEALPGDNVGFNVKNVAVKDLKRGYVASNSKDDPAKEAASFTSQVIIMNHPGQIGNGYAPVLDCHTSHIAVKFAELVTKIDRRSGKELEKEPKFLKNGDAGMVKMIPTKPMVVETFSEYPPLGRFAVRDMRQTVAVGVIKNVEKKDPTGAKVTKAAAKKK

SEQ ID NO: 49427 - protein, 202 aa, Oryza sativa
MDMGAMSDPERMFFFDLACQNAKVTYEQNPHDADNLARWGGALLELSQMRNGPESLKCLEDAESKLEEALKIDPMKADALWCLGNAQTSHGFFTSDTVKANEFFEKATQCFQKAVDVEPANDLYRKSLDLSSKAPELHMEIHRQMASQASQAASSTSNTRQSRKKKKDSDFWYDVFGWVVLGVGMVVWVGLAKSNAPPQAPR

SEQ ID NO: 49428 - protein, 172 aa, Oryza sativa; identical to SEQ ID NO: 48965

SEQ ID NO: 49429 - protein, 102 aa, Oryza sativa
MSSSRPPSAVAVVVVAVAPHARAVAAIAAAAQGATAASASRAGAVATAAGSMGRCCHAGEKKWEEKEKEKEEEEEGNGDGRMTCGFLCDFGDVNRETVGAYI

SEQ ID NO: 49430 - protein, 237 aa, Oryza sativa
MAAETFLFTSESVNEGHPDKLCDQVSDAVLDACLAQDPDSKVACETCTKTNMVMVFGEITTKATVDYEKIVRDTCRGIGFVSDDVGLDADRCKVLVNIEQQSPDIAQGVHGHFTKRPEEIGAGDQGHMFGYATDETPELMPLSHVLATKLGARLTEVRKNGTCAWLRPDGKTQVTVEYLNDAGAMVPVRVHTVLISTLHDETVTNDEIAADLKEHVIKPVIPDKYLDPIRYLIFFRD

SEQ ID NO: 49431 - protein, 406 aa, Oryza sativa
MAYHGQLDGRQASGLMRDGAFPAASLSGRQPLDRAATALEILEKKLAEQTAEAEKLIRENQRLASSHVVLRQDIVDTEKEMQMIRAHLGDVQTETDMHMRDLMERMRLMEADIQAGDAVKKELHQVHMEAKRLIAERQMLTVEMDKVTKELHKFSGDSKKLPELLTELDGLRKEHQSLRSAFEYEKNTNIKQVEQMRTMEMNLMTMTKEADKLRADVANAEKRAQVAAAQAVAAQAGVAHVTASQPGAAQAVAVPAASNPYSSAFTGHPSAYHQGATQAGVYQQGTTQAGAYQQGSTQAGAYAYPTYDAATAYQMHAAQANAYAGYPGYPVAGYTQAALPGYPSAYAAPQQPISSGVATDVASMYGAISSAGYPAGVVQSSSGAANAGQAPATYPVAYDPTRAGQR

SEQ ID NO: 49432 - protein, 243 aa, Oryza sativa
MQQMRTDTVLLTKEEGGSPIRNPPTAAEDARLASLISLDNIIKQVKEVMRQSSARPLRKSKKKALLESLDDLLAQMPSLLDVDHPCAQKQIMEARKVVESLQEDPDEPATDLNSNTLGESEVSQWNVLQFNTGTSAPFIIKCGANSSCELVIKADQKIQEPKGDEIIRVVPKPSVLAEMSFEEIKGVFEELPEAISLLALARTADGTRARYSRLYRTLANKVPALKDIVAEMEKGGVFKDVRS

SEQ ID NO: 49433 - protein, 89 aa, Oryza sativa
MHLWPSLRIRDSFKHAYLDKLEFNLARMKRARGEDQDQDQQQPPGDGKAPLLEGLRAPRSSFVAGALELAMDAAMLLTCCCCCFCCGGM

SEQ ID NO: 49434 - protein, 337 aa, Oryza sativa
MMLLAKELGLSPPAAVTPHRRPPPARVPASPSGGSPVAVGDLWLRTKGAGGGGDGFGSHSHESEMDLAMLVTDFLENGGTGGADSRASSDSDSALSDHLADNISIYKQGGDEKENELLSMVHSLLFSIHESDLLAFKRGQCSASCIRHLLVKLLRYSGYDAAVCVSKWQGFDKIPGGDHEYIDVIMNSDTEYRLIIDIDFRSHFEIARAVDSYDSLLNSLPVVYVGTLPRLKQFLHVMVDAAKWSLKQNSMPLPPWRSLPYLQAKWHSKYERIDLHIEQDFHSTASDHALCIGHLKRLKSSLQSELDTERLLMMPIKTDMKRRAKFERRRRRSLLSF

SEQ ID NO: 49435 - protein, 91 aa, Oryza sativa
MRRASCSLQPPLIPRSAPSILLRVARPVVGARCLLLVHAPGPKQPCGGAVLCREMPTGRRRPRDEQPRPSASLSNMEEEDEVPPCVGPSAD

SEQ ID NO: 49436 - protein, 193 aa, Oryza sativa
MAAVQAAISTCCSSSCLSRPPPPFARRRRFKVTAMAPQKKVNRYDEKWSKQWFGAGIFAEGSEEVEVDVFKKLERRKVLSTVEKAGLLSRAEELGVTLSSLEELGLLSKAEDLGLLSLVEAAAAASPDALASVSLPLLVAAIAAVVLVPDDSAALVALQAVLAAVLLAAAAGLFVGSVVLAGRRSPTDRRRRV

SEQ ID NO: 49437 - protein, 1357 aa, Oryza sativa
MFSFKSKEADSMSRWSKYLSTEESPPSASLSWRAMGVDGPQGSASGQKHLQMEPVVQLSKVAEGLLAKMYRLNSILDYPDPNAHTFSEAFWKAGVMPNFPKICITLSKKFPEHPNKLQLEKVDKFALDALNENAEGYMQNLEQWITLLLDLLEFREQALRLILDLSSTVITLLPHQNSLILHAFMDLFCSFVRVNLFSDKIPRKMILQVYNILHIMLKGGRDCEFYHRLVQFVDLYDPPVKGLHEDLNFVSPRIGEVLEAVGPIIFLSTDTKKLRNEGFLSPFHPRYPDILTNSAHPMRAQDLANVTSYREWVLLGYLVCPDELLRVTSIDVAMVVLKENLVLSLFRDEYILLHENYQLYVLPKVLESKRMAKSGRTKQKEADLEYNVAKQVEKMLMEVHEQALVSADALHHERRILLKQEIGRMVLFFTDQPSLLAPNIQMVFSALALAQCEVVWYFQHVGIASSKSSRGRTVDIDAADPTIGFLLDGMGKLCCLVRKYIAAIKGYALSYLSSCAGRIRFLLGTPGMVALDLDATLKGLFQQVLHCLENIPKPQGENVPAITCDLTDLRKHWLSILMIVTSSRSSVNIRHLEKATVSTGKEGLVSEGNAAYNWSRCVDELEGQLSKHGSLKKLYFYHQHLTTVFRNTMFGPEGRPQHCCAWLGAACCFPECASSIIPEEVNKIGRDSISYVESLIESIMGGLEGLINILDSEGGFGSLEMQLSPEQAAIRLNNATRAKAVSGLLAPGHESYPDNSSSVKMLEAAMQRLTSLCSVLNDMEPICVLNHVFILREYMRDCIIGNFRRRFHSMIRTDSCLQRPSVIESLLRRHLSIIHLAEQHISMDLTEGIREVLLAESFTGPFPNLQVFETPTETHGGGSAIDIISNWYIDNFVKDASRTGVVFDASQNCFRSSQPIGGGYLAEAFTDKRELKALVRLFGGYGVDRLDKLLREHTSALLNCIDSALRSNRDALEGLAGSVNSGDRIERDANLKQIIDIETLADFCIQAGQAITFRRLLVEAVGAVLEEKVPLIYSLLKGLAMQLPEEVPDKNEIIRLRRVASSVGVGDKHDAEWVHSILAEIGSANDNSWTLLPYLCAAFMASNMWSTTAYDVNTGGFSNNLHCLARCVSAVVGGSEYTRMEREHRRSSLSNGHMDELQEPELLSRVSAEANIKSAMQLYVKLSAGLVLDSWNDTSRPYIVPKLIFLDQLCEMSPYLPRSTLEVHIPYTILRSIYHQLYGASLMATEPMEPSPRQSPLISLAHASPSMKQNRADTTPRSHTFEPGYHSSSGSQYDEGYEGDRRTGERQLRSMRRSGPLDYTGTRKVKFVEGSSSGSHGAGSGSLQRFAVSRSGPLSYK

SEQ ID NO: 49438 - protein, 362 aa, Oryza sativa
MGRSPRGRNLPARRRGSSSSSSDLPSCCWKMKGTCEQNDIALVSEKKEWKGASCPVCLEHPHDAVLLLCTSHHKGCRPYMCGTNHQHSNCLEHFKEAYAKEKLAHSVLIESSPGLSLSLNSQPASKQQCAMELACPLCRGDVKGWTVVEPARQYLNRKKRACMHDGCSFIGSYKELCKHVNSKHPSAKPREVDPAHADEWKKFECERERQDAISTIRSMTPGAVIMGDYVVEFNGGSNNNLLSDGDDLEERLNFFTSLDRTLNERLDFYESSDSSLDDSIDFLASLFGHGRRIASGDSYTRAYRRYRERPRRNVTASSVAASDIQHDSANTRRGRVSGIRAIGRTSRRYHPVVTHVRSTHGI

SEQ ID NO: 49439 - protein, 226 aa, Oryza sativa
MLDSLDMRRDVQEIFKMTPHDKQVMMFSATLSKEIRPVCKKFMQDPMEIYVDDEAKLTLHGLVQHYIKLSEAEKNRKLNDLLDALDFNQVVIFVKSVSRAAELNKLLCECNFPAISIHSGMTQEERLTRYKNFKEGHKRILVATDLVGRGIDIERVNIVINYDMPDSADSYLHRVGRAGRFGTKGLAITFVSSASDSDVLNQVQERFEVDIKELPEQIDTSTYMPS

SEQ ID NO: 49440 - protein, 529 aa, Oryza sativa
MQSVTRLTLLLCAAWAAALLYGEMGAYWAARLSCSWPSSSSSPPSSLSPNNHVKIAVVADPQLMDSTSLGLPPSSIALQAAEFYTDLNMRRSFQSVVLPFKPDMLLFLGDHFDGGPYMSNEEWHESLSRFKHIFSMNEHITNPNIPIYYLSGNHDIGYSAFHKIHPEVISRYEKEFGSRNYQFLAGKVDFVVVDAQTLDGAKESKERSSSWEFIKALSPGNKTNPKVLLTHIPLYRPDNSPCGPHRSSPVINQRVSNAAMDQGITYQNYLSKETSDLLLHLLKPVLVLSGHDHDQCTVVHPTPFGPVTEHTLGTISWQQGNLYPSFMLLSAGPKLPANSTDIEHEVLTNLCFLPKQTHIYIWYIFQFVVTLLLLILWPTNGLRSLPYVNSFVSFMRSVAAELFSRTKEKDDEEDGEYEMVWDAEGSMHLVKKAVARTPSTSSDSRTTGRGNVVARPTARKNQPEPDSSVLVEMSSEMISEDGGKVPRSSKLKIRRVLQRLFRVIQSIVVIAALNVPLYMMLLFKDWIDR

SEQ ID NO: 49441 - protein, 288 aa, Oryza sativa
MGGFLILNEYEQDTVGIVARLSECIASRGGNIHSVDVFVPDDKPVFYSRSEFTYNPMLWPRDVLRTDFLNLSQHFSAQRSTVRVPDLDPKYKISVLASKQDHCLFDLLYRWQEGRLPVDINCVISNHDRLKDNHVRRFLERHGIPYHYLPTSPGNKREQEILELVQGTDFVVLARYMQILSEGFLKAYGKDIINIHHGLLPSFKGGNPSRQAFNAGVKLIGATSHFVTPELDAGPIIEQMVERVSHRDTLQSFVVKSENLEKQCLAEAIKSYCELRVLPYELKKTVVF

SEQ ID NO: 49442 - protein, 707 aa, Oryza sativa
MTPPRDKWRGESERAFFAMVSLPCLVVLLLAAAVGVEAAGGGGGGGVEFVYDGFGGAALALDGMATVTPGGLLLLTNDTDMNKGHAFHPDPVRFVGGGGGGGGGVVASFSTTFVFAIVSEFLDLSTSGFAFLVAPSRDLSAAMPQQYLGMFNASGNGDARNRIFAVEFDTVRNPEFADINNNHVGVDVNSLNSSAAATAGYYDDATAAFQNLSLISRQPMQVWVDYDAAAAEVTVAMAPARRPRPKKPLLSTAVNLSTVVADAAYVGFSSASSIVLCKHYVLSWSFRLGGGGAAPALDYAKLPKLPRIGPKPRSKALTVALPIVTTAIVLTAVAVGFLLLRQRLRYAELREDWEVEFGPHRFSFKDLYDATGGFKDKRLLGAGGFGRVYKGVLPRSRTEVAVKRVSHESRQGMREFIAEVVSIGRIRHRNLVQLLGYCRRKGELLLVYDYMPNGSLDKYLHGCDEKPILDWAQRIYIIKGVASGLLYMHEDWEQVVIHRDIKASNVLLDSEMNGRLGDFGLARLYDHGADPQTTHVVGTMGYLAPEMVRSGKATTRSDVFAFGAFLLEVTCGRRPIEEEEEVAGAGADDDDRFVLVDWVLGHWREGAITDAVDAKLRGEYDAAEAELVLRLGLTCLHPSPAARPSMRQVMQYLDGSAPLPELPPTYVTFNMLATMDTHQNVYGAWSVRRSSAMSVATVSDIGLSGGR

SEQ ID NO: 49443 - protein, 300 aa, Oryza sativa
MEVAVKRCMTINEHQKKEFGKEMLILSQINHKNIVKLLGCCLEVEVPMLVYEFIPNGTLFDLIHGNHGQQISLATRLQIAHESAEALTYLHSCASPPILHGDIKSSNILLDRNLIAKVSDFGASILAPTDESQFVTLVQGTCGYLDPEYMQLCQLTDKSDVYSFGVVLVELLTCQKAFNLNAPEHEKSLSMRFLNAMKNNKLADILDDQIKNSENMPFLEEIAELAAQCLEMSGVNRPSMKHIADNLDRLRKVMQHPWAEQNSEELESLLGESSMVSSRYTSTGNFSIERKGVMELDSGR

SEQ ID NO: 49444 - protein, 305 aa, Oryza sativa; identical to SEQ ID NO: 29243

SEQ ID NO: 49445 - protein, 281 aa, Oryza sativa
MEHAVVEGESFSPDCSTLLMPALSIGNVGQLAVDLLVSSSRARRVAYLDEPSVLPCAGNDAFGPDAVGDLALALEAYESPSHRLAFIQQRSPIITGMVVSFAKNVANFISSIEKDHVVILSSLDSGKRRIIDASSDMQVYYLSSCNEDGSDPKCENLGWRKLEEYDPSQQRWKCLASLVEGGHLSEDMTGDPEEMTINDYYSSLPFAALFSACKAKGLKVTCVLCYCSEGDNMPESFQLAEAACKLVAQGPEQFHGNGSNGWTIPLSWKSVYGPPPDLSIF

SEQ ID NO: 49446 - protein, 114 aa, Oryza sativa
MVIPPPARAPAITKFLKPYVLKMHFTNNFVSAQVIHTPSATVACSASSQEKLLRPSMESTRDVAAAAKIGKLLGERLLFRGIPAVSVSMSRDQTYHGKVRAVMDSLRAAGVKLL

SEQ ID NO: 49447 - protein, 693 aa, Oryza sativa
MAQPLLLLLLAAAAAAAVAVVAVAQTNMADAEALMQLKKSFTNSSSLSSWLITNTDGDKSPCAPGSHEWHGVVCSRGKVTGLRLNGLRLGGTVDVGALVGFHNLRSVSFAGNNFSGPLPAVDRLTSIKSMFFSDNQFTGVLPDDFFSKLSHLKKLWLDHNELSGAIPASIAQATSLLELHLAHNAFSGELPPLPPPALKVFDISWNDLEGVVPEAFRKFDAGRFGGNQYLCYVPTSDRPCKRVQAAAASSSKRSPMAFVTLLVSVVVVALVLCLCCNRSSRVHDFDPAHRGGDGLDERPPVYMVKQFSTTGKRSASWLGKRTGSSLRGHRRAASAAKADELGGGAGDLVIVNNCKGVFGLTDLMKAAAEVIGSGGHGSAYKAVMANGVAVVVKRARDMNRATKDAFEAEMKRLGAMSHANLLPPLAYHYRRDEKLLVYEYIPKGSLLYVLHGDRGMDYAGLDWPTRLKVAVGVARGTAFLHGELAGHEVPHGNLKSANILLAPDFEPLLVDFGYSGLINHMQSPNSMIARRAPECAAGHPVGAKADVYCLGIVLLELLTGKFPSLYLQNAKGGTDLVMWATSAIADGYERDLFDKAITSAWKFALPDMARLMRVAVDCVETDADKRPDMKVAAARVEEVVAAAMATVRERHQAAGGESSRSSSHAQYVRDGSMQRITSVGERSSRRGSNDYSS

SEQ ID NO: 49448 - protein, 160 aa, Oryza sativa
MDSLHLVHVKLLAADLLSLASRHTSPPSFARCGRTVTRAEIVGVVVSRDRREKFLRFLVDDGTGCVPCVLWLNHHYLNAASSSSRASDSDPTAEMALRMSEVVSLGTLLRVRGRIVLYRGAIQIAVRDVVLEKDPNVEVMHWLQCIRMAKECYDLRPPSA

SEQ ID NO: 49449 - protein, 1251 aa, Oryza sativa
MASSTKSDLMSGSPDGHGYFSGQRGLYSAASLERSASFRESGDSYAAFPVSGSSRSPAVDSATLLQSLAMDLRTTTLEPKTSRLDVKKSISLILGISPEESTSTPCTGRNSSLPFEEIRRMKNNLSDISNKARERSRAYGAAVTKIERCCPNILRKRSRGDGSSNERSTALLSGGLISKMPPQGHLNADDTELVSPRGEERIKNAGQNRRLRTSMSEMDARTTVLSRGLGSTDRSADPGKVTGGGPAVPEEKIRGLATGIDGWEKPKMKKKRSAIKADVSMTGPSRNVDVDREQKPGMQHKFNNEARARMTNSPSFRSGTVSSVSSISKSDLLSGQNGVGRSLSRSDQDSGFHPTNKRDRQAVLDKEISAPKSHNKPSEDDGGANVTAVPKANGSTRGPRSNSGSLLKSSPNIHRLQANSDDWEHPSGMTKLNSTSGSGNPKRTKSTHSLSPPTQWGGQRPQKISRSARKSNLVAIITNTDGQSVSGSLESPSINEESAGLPRRASINCSQQTRRGDHGLSTGSEGDESGVAEKKLRDKSKRAGELDDGHSGFQKIAMLGHPSKRNKLSADDDVGDAARRQGRIGRGFTPTRPSTPASIDKLENAPTTKQRSVRTVTERNESKSGRPLIKKMSERKGNARPRHISSNAQLDSPVQSEDDHEELLAAANSALRSANSSPFWRQVEPFFSYLTTEDIAYLSQQIHLSDDSTASRSIEGDESRKYKGSLEYISQPSTPAGSNKDDHSALQNGYTLNEIDNDVGIAWETSCIEPILDQLVQGIGARGGASVGQRLMQALIDEDKVDNITNNIYRSETYPFDTHEIHFEEGGWKSHSQGYKLESLMNFEAAGKGSNGLMLDSDWKYHDELSHKGNNAMEKAKVWPEFQYSEMCFSDRIIIELSEVGVSIEPVPDLAQSEDEDINSEICKLEGQLHKEVVDKKNLLRKLDGILRTKKESQHREFSRRAMERLLLIAYEKYMAFCGSSSSKNVNRAGKHAALSFVKRTIARCQNYEESGACCFDETPFKDMFVSATSHRSDPDSASQDNITVPKSVQRASTSDASRASSHLTDLSFSKEDPWTNNVKQRELLLDEVVGSITGGTLKTSGLGTSLVSNTKGKRSEREGKGHNRDGSRSGRPSSSNAKGERKNKTKPKQKTANISAPVSSALTRDPQSQAKITPSGNGRDNTSAASARHEEPANASNDAEMPDLSNLELPGMDVDFGGWLNIEDDDGLQDLDLMGLEIPMDDINEINLMI

SEQ ID NO: 49450 - protein, 164 aa, Oryza sativa
MENYQGQHGYGADRVDVYGNPVAGQYGGGATAPGGGHGVMGMGGHHAGAGGQFQPVKEEHKTGGILHRSGSSSSSSSSEDDGMGGRRKKGIKEKIKEKLPGGNKGNNQQQQQMMGNTGGAYGQQGHAGMTGAGTGTGVHGAEYGNTGEKKGFMDKIKEKLPGQH

SEQ ID NO: 49451 - protein, 52 aa, Oryza sativa
MKILMMVAEKKVGATLAELFCKTFEEAHMRLVYKELNLDAAQRFLNAYEIRS

SEQ ID NO: 49452 - protein, 306 aa, Oryza sativa
MATGSVVAPPPSLAGGGRGLRRRGVLHRRLAASPMKDEPVASTNGGKDEMVTDSLSVARRASHPGLSSSLSNPMSEVTTPFHPAAPSDLRFNRLRPSVEESDCKYKRFFGCYVAREAIIDEEYWIAAWLRAENRYEDQSSDRYVESFKRKFASQEFHALKRRCSKLQGEKYICFVAVKNDDLKRTVLNSVVGTLDVCIRHPLHGETFPAEPGKSSFHCRIYQPDQPKFGYLTNVCVAKYARRQGIASNMLLLAIDAARLNGAEEVYIHVHKDNLPARRLYDQIGFRMVDFDGARQSSDLCLLSFSS

SEQ ID NO: 49453 - protein, 250 aa, Oryza sativa
MGSDSKELLGIEPLELRFSFETKKQISCSMQLTNRTDDYIAFKVKTTSPKKYCVRPNSGIVPPRSTSDVIVTMQAQREAPADMQCKDKFLVQSVVVTEGTTTKDVTGEMFNKGSGNVVDERKLKVVYVQPPRPPSPVREGSEEGSSPRASLSEGGNLNYQDTTRESDEPPLLSATRAHKDAEDVTSDSETSALISRLTEERNSAIQQNNKLLEEMDLVRREISKQNGGFPFVFVVVVALLGILLGYIMKR

SEQ ID NO: 49454 - protein, 82 aa, Oryza sativa
MFHFESWECIQLICRTFHFETWQCIQLICRMYSISLCFCSILFRVNISLGPNEDRYLMTGLHTVKDIYCSCCQQILGWRYVS

SEQ ID NO: 49455 - protein, 307 aa, Oryza sativa
MPLSRKVVENINLSGGSFLGVSRGGAKTSEIVDSIQARRIDMLFVIGGNGSHAGANAIHEECRKRKLKVSVVAVPKTIDNDILFMDKTFGFDTAVEEAQRAINSAYIEARSAYHGIGLVKLMGRSSGFIAMQASLSSGQIDVCLIPEVSFTLDGEHGVMRHLEHLLEKKGFCVVCVAEGAGQDLLQKSNATDASGNVILSDFGVHMQQKIKSHFKDIGVPADVKYIDPTYMVRACRANASDAILCTVLGQNAVHGAFAGFSGITSGICNTHYAFLPITEVITKPKRVNPNSRMWHRCLTSTGQPDFH

SEQ ID NO: 49456 - protein, 510 aa, Oryza sativa
MGNGGRCMVEVVILLVLMAMSQGCDAQNTTGGLTRKSFPNGFVFGTASSAYQYEGAVKEDGRGPTIWDKFAHTFGKIIDFSNADVAVDQYHRFEEDIQLMADMGMDAYRFSISWSRIFPNGTGEVNQAGIDHYNKLINALLAKGIEPYVTLYHWDLPQALEDKYTGWLDRQIINDYAVYAETCFQAFGDRVKHWITFNEPHTVAVQAYDSGMHAPGRCSVLLHLYCKKGNSGTEPYIVAHNMILSHATVSDIYRKKYKASQNGELGISFDVIWYEPMSNSTADIEAAKRAQEFQLGWFADPFFFGDYPATMRSRVGSRLPKFTEKEAALVNGSLDFMGINHYTTFYTKDDQSTVIEKLLNNTLADTATISVPFRNGQPIGDRANSIWLYIVPRSMRILMNYVKDRYNKPTVYITENGMDDGNSPFISLKNALKDDKRTKYHNDYLTNLADSIREDGCDVRGYFAWSLLDNWEWAAGYTSRFGLYYVDYKNRKRYPKNSVQWFKNLLASSS

SEQ ID NO: 49457 - protein, 318 aa, Oryza sativa; identical to SEQ ID NO: 37176

SEQ ID NO: 49458 - protein, 561 aa, Oryza sativa
MAIPPLAVSGVAVATLAVLGLAVFACRRWRRGASPAPPPPASSQDDDINMPLISDNLDDYSVSSNSSTVDESGIRIDRIITSPKTHGIVGKGATYPTESHVIEGETHVIDVTNSKTEELYLGNTLKRPAVANGPTPDVKHIRRDSGESNHNGTIPDIIVGSNLALEVIAGPSHGINHYMQSGNKSMLPVTLGRVPPSHLVLKDSEVSGKHAQIDWNANKLKWEIVDMGSLNGTFLNSRSVNHPDVGSRRWGEPAELADGDIITLGSSSKVSVQIELQNQQPVGVGIASDPMTARRTGKKLHMEDVSCCQYPLIGVEKFGLFGIFDGHGGDGAAIAASRILPQNIANILSQQETKERVLSCHSASDVLRHAFALTEAALHHQYEGCTATILLIWFDQNEDCFAQCANLGDSACIMSVNGEIITMTEDHRVVSTTERARMANSGQPLKDGESRICGLNLGRMLGDKFLKEQDSRFSSEPYVSQAVRMTKACLASALIASDGLWDVISANRAAQLVLEGKQKYSEQKTSADKVAHHVLSEARKLRTKDNTSVIFVDLDTLRSDP

SEQ ID NO: 49459 - protein, 268 aa, Oryza sativa; identical to SEQ ID NO: 30739

SEQ ID NO: 49460 - protein, 369 aa, Oryza sativa
MAMMVDPPNGMGNQGKHYYTMWQTLFEIDTKYVPIKPIGRGAYGIVCSSINRATNEKVAIKKINNVFDNRVDALRTLRELKLLRHLRHENVIALKDIMMPVHRRSFKDVYLVYELMDTDLHQIIKSSQPLSNDHCQYFLFQLLRGLKYLHSAGILHRDLKPGNLLVNANCDLKICDFGLARTNNTKGQFMTEYVVTRWYRAPELLLCCDNYGTSIDVWSVGCIFAELLGRKPIFPGTECLNQLKLIVNVLGTMSEADIEFIDNPKARKYIKTLPYTPGIPLTSMYPQAHPLAIDLLQKMLVFDPSKRISVTEALEHPYMSPLYDPSANPPAQVPIDLDIDENLGVDMIREMMWQEMLHYHPEVVAGVNM

SEQ ID NO: 49461 - protein, 343 aa, Oryza sativa
MKQCQEEQLMGHLGVVLYEYLGEEYPEVLGSILGALKAIVNVIGMTKMTPPIKDLLPRLTPILKNRHEKVQENCIDLVGRIADRGAEFVPAREWMRICFELLEMLKAHKKGIRRATVNTFGYIAKAIGPQDVLATLLNNLKVQERQNRVCTTVAIAIVAETCSPFTVLPALMNEYRVPELNVQNGVLKSLSFLFEYIGEMGKDYIYAVTPLLEDALMDRDLVHRQTAASAVKHMALGVAGLGCEDALVHLLNYVWPNIFETSPHVINAVMEAIEGMRVALGPAVILNYCLQGLFHPARKVREVYWKIYNSLYIGAQDALVAAYPALDDDGDNIYSRPELAMFV

SEQ ID NO: 49462 - protein, 336 aa, Oryza sativa
MSAKEKWLAGDVPAARAILQEAYASLPNSEEIWLAAFKLEFESNEPERARILLSKARERGGTERVWMKSAIVERELGNVDEERKLLEEGLKLFPSFFKLWLMLGQMEDRLGHGSKAKEVYENALKHCPSCIPLWLSLANLEEKINGLSKSRAVLTMARKKNPATPELWLAAVRAELRHGNKKEADALLAKALQECPTSGILWAAAIEMVPRPQRKAKSSDAIKRCDHDPHVIAAVAKLFWHDRKVDKARSWLNRAVTLAPDIGDFWALYYKFELQHGNADTQKDVLQRCVAAEPKHGERWQAITKAVENSHLSIEALLKKAVLALGQEENPNAADP

SEQ ID NO: 49463 - protein, 340 aa, Oryza sativa
MLPATSTVPPTSPLPHSRAAPRRHLRAGLLHGSVATAAVVRACGVTTGHRRRMGSVRASPRAGGWEVAMVDKEGVGVERLVEVAQRAADAAGEVLRKYFRQRVEIIDKEDQSPVTIADREAEEAMVSVILKSFPSHAVFGEENGWRCVEKSADYVWVLDPIDGTKSFITGKPLFGTLISLLYKGKPVIGIIDQPILRERWVGVDGMKTTLNGQEISVRPCNVLAQAYLYTTSPHLFAGEAEDAFIRVRDKVKVPLYGCDCYAYALLASGFVDLVVESGLKPYDFLSLVPVIEGAGGSITDWKGNKLHWPVSAESRPESFNVVASGDARVHKQALDALQWH

SEQ ID NO: 49464 - protein, 256 aa, Oryza sativa; identical to SEQ ID NO: 28831

SEQ ID NO: 49465 - protein, 208 aa, Oryza sativa
MLSFARTSFGGQTAHLPKSKSSGYKHFVSISSGLPCFLAIRRQSPGYSSVHTASFSSQHNQLSTDRSGTVMAERELIDKDKLILRGLQFHGFHGVKQEEKTLGQKFVVDVDAWMDLSAAGETDSISDTVSYTDIYRIAKDVVEGPSRNLLEAVAHRIASATLLKFPQISAVRVKVGKPHVAVQGIVDYLGVEILRYRKDVGGDRQELH

SEQ ID NO: 49466 - protein, 380 aa, Oryza sativa
MECAAKGLVAEPCAGEARRRCGGCGAVAYCSRAHQTVHWGFHKEECARLAEQMSRIDMLKQFPFTFSVESPAPNHTFPSLRCFLLESFKLHQKGLWKSECICDPEVTSVKDLSKTTDWSMGSALCPCTEPEHNVSTPLTSWKDYYRWRSLPLQSPVAVLLHWPLTLYHCVQLSHLQTSKYDGQDTLCIHYLGPEKELHQLAVFGELRALFPGVHIYIELVGPAVPKSRDGELVTISNYAHCCDESCFCKSSIGSKDLSCSAVTFKLRKGLYHERYSDIVKDSKPHLIVAPNAGIAAYPSWIPTIEIIRKVGIPAIFTDFCEEAAHLASSCITSITGQPLRVPIQVNPFRQPVAVDNSALCLPCYSNCFVFGMQNCKFVSP

SEQ ID NO: 49467 - protein, 381 aa, Oryza sativa
MESLLAASSSLPAAAFSPPSSLSSTSSSPHALRSAVAGAARAVRCSAAKDSILYALEHDEMFNSAEVIQWESGKSINSIAAAQGIRIRRRCRPRYPSEGSGADKAVPRNMLEQIIWDKEVEVSQRKAKKPLQKVIESSQHAPPARDFVGALTAAYSRNVAPALIAEVKKASPSRGVLREDFNPVEIAQSYEKNGAACLSILTDEKHFQGSFENLETVRNSGVKCPLLCKEFVIDIWQIYYARSKGADAILLIAAVLPDLDIKYMLRICKNLGMTALIEVHDERELDRVLKIDGVQLIGINNRSLETFKVDTSNTKTLLEKRGDLIRDKGILVVGESGLFTPDDVAYVQNAGVSAILVGESLVKQENPGQAIAGLYGKDLLH

SEQ ID NO: 49468 - protein, 439 aa, Oryza sativa
MATEGLVPITRAYLARYYDKYPLPPLPDAATALADRLRAISAALALAAAAPITPDEELLEKEANGIPAHKIDENLWKNREQMEEILLLLNKSRRPVALQQRSTAEDTETFIILDDVETKLKDMLKKLEQFQIKNADNVFNTVMTYMPQDFRGTLIRQQRERSERNKQAEVDALVNAGGSIRDRYALLWKQQMDRRVQLAQLGSATGVYKTLVRYLVGVPQVLLDFIRQINDDNGPMEEQRERYGPALYTLTKLVLAIRLYLHVSLARYGQRKIEKDDIAVLQQAVAIYTEEFEKFTEFIGEVFVNAPFFISAEDAGAESRNSDDYKETIIPAGKTHEVILSVEAVNSYIAWDFSLQQGALNMVLDIGFHVEYISPSGQKTLILPYRRYEADQGNFCTVSAGSYKLVWDNSYSSFFKKSLRYKVDAVPPVVAPAEPAAEP

SEQ ID NO: 49469 - protein, 450 aa, Oryza sativa
MRPSFLLLLVVFAGVLAGGARAGPPLAGENLPGQLLPGEKPPGQPLPGQPLPGQPLPGQSLPGQPLPGQPLPGQSLPGQPLVGEKPPGQPLPGQPLPGQSLPGQPLPGQPLVGEKPPGQPLVPGQPLVGEKPPGQPLGGDKLSPDYYAQTCPRAERIVAEVVQSKQMANPTTAAGVLRLFFHDCFVSGCDASVLVAATAFEKSEQSAEINHSLPGDAFDAVVRAKLALELECPEVVSCADILALAARVLITMTGGPRYPISFGRKDSLTSSPTAPDKEMPQSNFTMDQVIKLFQDKGFTVQEMVALSGGHTLGFSHCKEFAQRIYDYQGKPGNVDPTMNPVLSKGLQTACKEYLKDPTIAAFNDVMTPGKFDNMYFVNLERGLGLLATDEEMWSDKRTQPFVKLYASNPTAFFDDFSRAIDKLSLFGVKTGAAGEIRRRCDTYNHGPMPK

SEQ ID NO: 49470 - protein, 357 aa, Oryza sativa
MPSSAAAAADGGDIEEVDRLKKRIRTLEMEETKLNQHMERVIQGIEANEAYLVGMVLRIMEKGPEDETAEDDCDVGFHLQRKIIFRPIAGVVYPSKLKPGDLIGVDSTSNEHYCGIGGLEKQIEELVEAVVLPIIHKNCFQRLGIHPPKGVLLYGPPGTGKTLVAHAFASQTNATFLKLTGPQLAVKLIGEGARLVRDAFQLAKEKAPCIIFIDEIDAIGSKHFDSGDREVQQTIVELLNQLDGVGSYESIKVIAATNRPEVLDPAFLRSGRLDQKIEFPHPSEQARVRILEIHSRKMDKNPDVNFEELACCTDDFNGAQLKAVCFEASMLAFHRDATEVRHEDFVRAIAQVKDGNY

SEQ ID NO: 49471 - protein, 196 aa, Oryza sativa; identical to SEQ ID NO: 30487

SEQ ID NO: 49472 - protein, 297 aa, Oryza sativa
MEGAAVEDSAAAAPVVAPESAAEGDQRVEGAAGEDSVGPAVAPEASVDSDQHIEDAATEDGKHGSTEENFDVSPEEMRSVIEIIADTGKFWHDWSFLKRLLSLQLKQVLAEYSEGQVVSQEDGQLQNSFSGETYSELVIWLNDALLRFEEGPPFTLQRLCEILLDPKGTYTKLPKLALALEKNLLVTSTMTKCTDPYPAAHVSNLEATVMTENTSAVEVEPERLPEHPAAVPNGNVGGDADAEMADAEVEEPSNSHDVEMQEDKPDQISNVNPGATSDAAVTAETVDASEKSSDPQT

SEQ ID NO: 49473 - protein, 192 aa, Oryza sativa
MQAFENFIRAAKSGGGENLKGSMAELAEIGTLPSTSLVPAFPMAISQPEQPVKARAALSFLLSERGNFFREFILDEIVKAIDAVSREQLIQIAASFGLGNATPVFSMVPVRARALLPTITEEDRVILNNVEKVVKFLTAGNNPTTIDGDVNVVYLVQELLPVLPSISSKILPEVMSRLSSRVFARLVREAFL

SEQ ID NO: 49474 - protein, 428 aa, Oryza sativa; identical to SEQ ID NO: 33464

SEQ ID NO: 49475 - protein, 527 aa, Oryza sativa
MHSTNLLLEEPIRMASILEPSKPSFFPAMTKIVGTLGPKSRSVDTISSCLKAGMSVARFDFSWGDAEYHQETLENLKVAIKSTKKLCAVMLDTVGPELQVVNKSEASISLEENGTVILTPDQGQEASSQVLPINFAGLAKAVKPGDTIFVGQYLFTGSETTSVWLEVSQIKGDDVVCVIKNTATLAGSLFTLHCSQIHIDLPTLSDEDKEVIRKWGAPNKIDFLSLSYTRHVEDVRQAREFLSKLGDLSQTQIFAKIENVEGLNNFDEILQEADGIILSRGNLGIDLPPEKVFLFQKSALHKCNMAGKPAVVTRVVDSMTDNLRPTRAEATDVANAVLDGSDAILLGAETLRGLYPVETISIVGKICAEAEKVFNQDLYFKRTVKHVGEPMTHLESIASSAVRAAIKVKASVIICFTSSGRAARLIAKYRPTMPVLSVVIPRLKTNQLRWSFTGAFEARQSLIVRGLFPMLADPRHPAESTNATNESVLKVALDHGKVSGVIKSHDRVVVCQKVGDSSVVKIIELDD

SEQ ID NO: 49476 - protein, 331 aa, Oryza sativa
MERRGSLYGVAAAAAVVVVVAMAAAAGGEAARLSPEHYRSTCPGVESVVRSVVARKVKETFVTVPATLRLFFHDCFVEGCDASVMIASRGNDAEKDSPDNLSLAGDGFDTVVRAKAAVEKKCPGVVSCADILAIAARDVVAMSSGPRWTVELGRLDGLVSKSGGVAGKLPGPDMRVKDLAAIFAKNNLTVLDMVALSGAHTVGFAHCTRFAGRLYGRVGGGVDPSYDPAYARQLMAACPRDVAPTIAVNMDPITPAAFDNAYYANLAGGLGLFTSDQELYTDAASRPAVTGFAKNQTLFFEAFKEAMVKLGRVGVKSGKHGEIRRDCTAFN

SEQ ID NO: 49477 - protein, 462 aa, Oryza sativa
MLLAAATATAAPVSSSSSFFAATTRATTTTRFTAQLQLSLPRRCRSWWGNGKARRSSRRRSHHCWAGGGAATPEDHMDELPPGRGRYHPFEEIAEKLQVDDGEPAHLTDAESARAIVEWNKMQVNSKATVMISTLIDEGVHERIILPEFPYLTDENGDIYFEVDNDDALLESIMGDDKTAHVIIGLDNTQVFADLDLAAASATEFAQEDDDDDDDDDDSDDEESDFDDDFDGEGVFAVDDDDGDEDGEDEDLPRWTDLETMNSCHPLYFARMIAETSTKSSIDWLDRPPASLVVEGQLRPAFAEESTMVSRHLSNDEPRKDNKGSGATFFKVEVLSIELITAYGTEPKVKIGEYRKARPDIIAHSAPNIISRLRAGGDKISQALKSLCWRCKAIQIEEAAVIGVDCLGFDLRVCSGTQVQALRFAFPAKATSEFGAEKQIHELLFPRIQQEGQSPQTRQKES

SEQ ID NO: 49478 - protein, 198 aa, Oryza sativa
MEEIRSFVPYIIETISIAIERLIKHGAKSLVVPGMTPSGCTPLILAMFADQAGPDDYDPVTGCLKVQNELAILHNSLLQQSLRNLQARHPDASIIYADFFSPIMEMVQSPGKFGFEDDVLTICCGGPGTALCGNQGAITCEDPSARLFWDMVHMTEVAYRYIAEDWLRIRVTWEQNNLSVFRVHKKIYTESTKFSVLI

SEQ ID NO: 49479 - protein, 196 aa, Oryza sativa
MAGGKKRKAEAARLEETDRALYGAFRGAANSLSQLYTLAMGGQKLSFQAGERHAMEKLYEWILRQHENGLRLTVADIASHIQHEIQYGGDNASASPRSQHASQSTQATVPIPNTMSQQPSPNLFALGNTGLVQSKNSAVFSNALSSPVRRSLQPFHLEQGGDAGYFANGVNRDQNSTASNDSSMDMHSDSPAHDSY

SEQ ID NO: 49480 - protein, 102 aa, Oryza sativa
MCNNIRYQNCLVFNRAIMATCKKRGTISLRIITMVGSCLNCQISLKHHRMFDYVASAQSTIECHLEFSLLSFDHLINLSPWVLPYEFCKIISITHISIKIKC

SEQ ID NO: 49481 - protein, 180 aa, Oryza sativa
MDRATEEETAATGRRILVAVDEGDESVHALKWCLASFAKRGGGGGAAPPDTIILLYVRPPPPTYSVLDASGYVFSDEVAAAIDGYSKEVAEAVVEKAQKLCTLYGKEVGGDGEAGHEMKVEVKVAVGDARNVICQMADKLGADVLVMESHGYGLFKRALLGSVSDYCVRNANCPVLIVKS

SEQ ID NO: 49482 - protein, 36 aa, Oryza sativa
MLMNRKSLVISALLKYYQVAKLKITMNMRLVSFMLT

SEQ ID NO: 49483 - protein, 382 aa, Oryza sativa
MGGGGDLSPSSAPSSPSSSSEPLPHEFAEYAAVSPAIDGESDGCCVCDDPEVEAFLHGGRLQDRSLREAKELIRRYKPGDLVEGVCGTKSGDYVLPDITTFLLVGPRDSGKSALVNRITRVFDKDDDPDAPDRAQVSCNSKSTGTSFLREYRVPRNSNSICIYDTRSLSNNHENNFKMLQRWMTKGLSHGDIITWDNDNYSKIQNIKSMGRQYSFLRCKTRKVNFVIFVVNGASVLESIENNNKNYIDMLHKTFMYPFLSFGDDKPAVVVTHGDRLTAQQRMHVRNELVELLGIPLQQIFDISGCDDYETDLSVLDMLRYCIQHAEQNFPIKKNYLLEMHGRETLKQIAVGLMGFDAVIETAIIFLCIVILLLRVSDKLVQW

SEQ ID NO: 49484 - protein, 891 aa, Oryza sativa
MPPRKDPNGGAFPSEPAPPQPAKAKGKKKDENKDDDLSEEDQALKEQLELYVVRAQDPDPGVQKLALESMRQEIRSATSSMTSVPKPLKFLRPHYGILKAYFETMPESELKKYMADILSVLALTMSAEGERESLKYRMIGSEGDIGSWGHEYVRNLAGEIAQEFQKRQDDGMTTDSLKELVEQIVSFHMKHNAEPEAVDLLMEVEKLDLLVKHVDSTNYKRTCLYLTSSSKYLPAPDDMSALKIAFEIYMKFGDFANALRIALLLDDKSLELKQIFTATDDFHLKKQFAFIIARHGLSTDIDDDIAADENEKEALQDIISNIKLSEGYLTLARDIEVMEPKSPEDIYKVHLIDGRGATSSSLDSARQNLAATFVNAFVNAGFGQDKLMTAPSDSSGSGSSGNWLFKNKEHGKASAAASLGMILLWDSDSGLAQLDKYLHSNDIHVVAGALLGIGIVSCGVKSDCDPAFALISEYFSRDESIIRIGAILGLGIAYAGSQKEEVRENLTAFLSDSQVPLEVLVFAAISLGLVFVGSCNEEIAQTIICVLMEHSEPELAEPIIRLLPVALGLLYLGKQESVEATAEVSKTFDEKIRNYCDVTLMSLAYAGTGNVLKVQKLLGICSEHLEKGETHQGPAVLGISLISMAEELGAEMAVRSLERLLQYGEQNIRRAVPLALGLLCISNPKVNVMDTMSRLSHDADAEVSMAAIISLGLIGAGTNNARIAGMLRNLSSYYYKEAGHLFCVRIAQGLVHLGKGLLTLSPYHSDRFLLSPIALAGLVTVLHACLDMKSIILGKYHYMLYILALAMQPRMLLTVDEDLKPLSVPVCVGQAVDVVGQAGRPKTITGFQTHSTPVLLAAGERAELATEKYLPLTPVLEGFVILRNNPEYHED

SEQ ID NO: 49485 - protein, 254 aa, Oryza sativa
MEVMHDTTGKKEVVVCYMNAPLPYMIEENYGGCFFEDDVDLAQVLQDQEIVYQLIQGNYGTGSSKTHSNPSSSYSHGCELGERKPSGVASYEAQLVVDEALARELQQMEDQLASASIDDHNIIEHGRKPIASSTSSGGNASASRPPQVVMEDGIDPDNMTYEELQQLGEAIGTESKGLPEDVIALLPTSTYKIRIFSRKEKHDECVICCMTYKNRDRLTKLPCEHQYHQTCVTKWLKINKVCPVCNKEVYGSGK

SEQ ID NO: 49486 - protein, 213 aa, Oryza sativa
MASSKMTLLPVLLLLAAASPAALGAFDVNQMLADKSQYGSFLKLLTQTKVAEETNRLKSASLLVLQDKAMKPITSLPADKQRMAMANHVLLKYFDPIQLGEMKDRTAMLPTLLSNTDKKLGVVNYTKASDGQMYLGAPGAACVAKLVKVVAARPYAISIMEVSEAILPPALGGSGGPGRRAKGGKGKVKPKSSDADEAAAKPATEPKATDVPK

SEQ ID NO: 49487 - protein, 33 aa, Oryza sativa
MLKVNLPVEFKGEDVCPGLKKENKDQLGVSLPC

SEQ ID NO: 49488 - protein, 405 aa, Oryza sativa
MAPSRRRRRCTAAPPTTAKLVLLLVVLLLQLSEGASSDGGSDAPCDFPAIFNFGDSNSDTGGLSALIAVVPPPFGRTYFGMPAGRFSDGRLTIDFMAQSLGIRYLSAYLDSVGSNFSQGANFATAAASIRPANGSIFVSGISPISLDVQTSQFEQFINRSQFVYSNIGGIYREILPKAEYFSRALYTFDIGQNDLTMGYFDNMSTEQVEAYVPDLMERFSAAIQKVYSLGGRYFWVHNTAPLGCLTYAVVLLPKLAAPRDDAGCSVAYNAAARFFNARLRETVDRLRAALPDAALTYVDVYSAKYRLISQAKQLGFGDPLLVCCGYGGGEYNFDRDIRCGGKVEVNGTSVLAGKSCDDPSRSVSWDGVHFTEAANRFVFELIVGGKLSDPPVPLRQACRRGGGGR

SEQ ID NO: 49489 - protein, 730 aa, Oryza sativa
MGSVAGDAARLSYPPTRRDNSVVDMYHGVPVADPYRWLEDPESEDTKEFVASQVELAESVLAGCFDRENLRREVTRLFDHPRHGAPFRRGNKYFYFHNSGLQAQSVLYVQDSLDGEAEVLLDPNALSKDGTVALSTYSVSKDGKYIAYGLSESGSDWVTIRVMNIADKQTLSDKLSWVKFSSISWTHDGKGFFYGRYPAPREVELDAGTETNINLNHEIYYHVVGSDQSEDILCWKDPEHPKYSFGASVTEDGKYIILGTYEGCDPVNKLYYCEICTLPQGIEGFKETKGMLPFVKLIDNFDAQYHVVANDGDEFTFLTNRNAPKNKLVRVDIKKPELWTDILPEHERDVLESADAVNGNQLLVCYMSDVKHILQIRDLVTGNLLHKLPLEIGSVSEISCRREDMDVFIGFTSFLSPGIIYRCNLTSAIPEMKIFREISVPGFDRTNFEVKQIFVNSKDGTKIPMFIMSKRDIELDGSHPTLLYGYGGFNISLTPSFSVSRVVLCKNMGFVVCVANIRGGGEYGEEWHKAGARAMKQNCFDDFIACAELLISAGYTSYRQLCIEGGSNGGLLIAACVNQRPDLFGCALAHVGVMDMLRFHKFTIGHAWTTDYGCSDNEEEFHWLIKYSPLHNVRRPWEQSFVNCCQYPAIMLLTADHDDRVVPLHSLKLLATLQYVLCTSIEDTPQVNPIIGRIDVKSGHGAGRPTKKMIDEVADRYSFMANMLDASWTE

SEQ ID NO: 49490 - protein, 750 aa, Oryza sativa
MRRHYKYNVLRKWDETDSESFEGVDIGSGPEWNETRRHFEHYVDVFIATVHGLLGPRRFSEWGGSVTDSVVGTFLTQNVADNLSSNAFLNLVAKFPPTKRHINAEACSNLSLLIDDMRRKLNLNEQSNGTDSGSSDFTKPVDFEKENGYNEEVKGNYGRDYSTIIENFISIIEKHHKDMSTWDNARLENMVKDKSGTPVCSHRTLRKFMDTFEEKDTSHWDKLREEAYSKGYKIKGTGISDSADWEAVLHAPAVEIANSIAVRGQHYVIALRIQAFLKRVKKDHGNFDLDWLRYVPRESAKNYLISILGLGDKSVDCIRLLSLKHKGFPVDVNVARIVTRLGWVKLQPLPFSAEFHLVGLYPIMRDVQKYLWPRLCTISKEKLYELHCLMITFGKAICTKVSPNCRACPFSAKCKYYNSSLARLSLPPAEGHGHEYGEEQASTATPGRLLLSNDSHIAGFQQVCQPQIKINMPAGRESIYKCEPIIEIPPSPEHEYEESPYEQELYEDDLCDIEDTIPELQYDFEIDLCSLKHTVNNGSWTPNSGKDLALINSQHASVQNKRLKNIGRLRTEHNAYVLPDDHAILEEFEDRVPEDPCPYLLVVISCSDEHTVKGTILIPCRTATRGNFPLNGTYFQDHEVFADHSSSRSPITIPRECIWNLDRCIVYFGSSIQSIMKGQTRQDIEDCYKKGYICVRGFDRNTRYPKPICAKLHATNERNGTGENSRKKKKTSQEGKKIDDKSSFGKLEIN

SEQ ID NO: 49491 - protein, 269 aa, Oryza sativa
MASSSASSVPAPSGSVITIASASASAAANTAACGTGSPCAACKFLRRKCQPDCVFAPYFPPDNPQKFVHVHRVFGASNVTKLLNELHPYQREDAVNSLAYEADMRLRDPVYGCVAIISILQRNLRQLQQDLARAKFELSKYQQAAAAAAAASASTGTNNGPHSMAEFIGNAVPNGAQSFINVGHSAALASVGGAAACFGQEQQFSAVHMLSRSYEGEPIARLGGNGGYEFGYSTSMAGGGHMSGLGALGGAPFLKSGIAGSDERQGAGQ

SEQ ID NO: 49492 - protein, 388 aa, Oryza sativa
MSSSSTSSASNNGIPSRSSSSAIVVSGCHVLKIDGYSHTKEMLSQGDCSRSCTFRVGTHSWYLEYYPNGRSLHNASDHIAICLVRDDDDGGDLGYGGAAREQMTARFHLLDHHAGKPVPGHTRGVTSPLLSGKVWACSNLVTRKELEEHVLDGDCFAVRCDITIVKVPRRAAPAPAVVVDVPPAAAAAAPDLPSQMGALLLSMEGADVTLQVGGGEVETTTFAAHRCVLAARSSVFRSELFGATATSKAGSGGLVHVVDDGIGARAFEALLRFIYTDAPPELDEEDDDASSMARLLLGAADRYNVERLKMICENELCKRIDVNTVATTLALAEQHHCSSLKKACMDLVDANPRAVEAAGGFEYLSNKCPSILRELIARLADFDLKNDG

SEQ ID NO: 49493 - protein, 489 aa, Oryza sativa
MAEIVVAPRAPAPAGRWGAAPPQELVERLKDYGQEGAFALWDELAPEERDFLVRDIESLDLARIDRIVRCSLRSQGVPLPAVEPVPESSVSTVEDRTPEDKQRWWKRGLKAISEGKLAVVLLAGGQGTRLGSSDPKGCFSIGLPSGKSLFQLQAERILCIQKLAAQSTDGTPQIHWYIMTSPFTDEATRKFFESHRYFGLEPDQVTFFQQGTIPCVSADGRFIMETPYKVARAPDGNGGVYAALKSQRLLDDMAGRGVKYVDCYGVDNVLVRVADPTFLGYFIDKGVSAAAKVVRKAYPQEKVGVFVQRGRGGPLSVVEYSEMDAAMTTEINQGTGRLRYCWSNVCLHMFTLDFLNQVTNSLEKDSIYHLAEKKIPSIHGYTAGLKLEQFIFDVFTYSPSTALFEILREEEFAPVKNANGATYDTPDSARLMLLRLHSRWVVAAGGFLTHSVPLYMTGVEVSPLSSYAGENLEAICRGRTFHAPSEISF

SEQ ID NO: 49494 - protein, 307 aa, Oryza sativa
MADRLELQGRHGKSRVRVSRVWRRPAAAGGHVIVEWNVAVSVVSDCLPSYTSDDNSAIVATDSIKNTVYVKAKECTEIVSMEEFAVILGRHFTSLYPQVSEATVTIAERPWERVVVDGKPHSHGFKLGVEKHVTEVIVKKSGNLLINSGIQGYSLLKTTQSGFEKFVRDRYTLLPDTRERIVATEVTAWWRYPFEHVSQIPSKSFCFTQRYQDVKKVLADTFFGPPDVGVYSPSVQDTLYLMAKEVLNRFPDIASVQLRMPNLHFIPVNLGNKENPGLVKFADDVYLPTDEPHGTIEATVSRPKSKL

SEQ ID NO: 49495 - protein, 640 aa, Oryza sativa
MEKHKNARTVLLLIVLCGASMMIGDGILTPAISVLSSMSGLKVRATGLHDRSVVLLSCIVLVGLFALQHRGTQKVAFMFAPIVVIWLFCIGGIGLYNIIHWNPRIYQALSPYYIVKFFRTTGKDGWIALGGILLSMTGCEAMFADLGHFTSASVRLAFITIIYPCLILQYMGQAAFLSKNILDMPTGFYDSIPGPIFWPVFVVATLAAVVGSQAVISATFSIVKQCHSLGCFPRVKVVHTSRWIYGQIYIPEINWILMVLCVAVTVAFRDITLIGNAYGVACMTVMFVTTFLMALIMIFVWQKNIIFALSFFLLFGSVEVVYLSSSLMKVTQGGWVPLVLALIFMSVMYIWHYGTRKKYQYDLQNKVSMRYILSLGPSLDVVRVPGIGLIYTELVTGVPNIFTHFTTNLPAFHEVLVFLCVKSVPVPYVSPDERYLVGRIGPRAYRMYRCIVRYGYKDVQRDDDNFENMLVMNIGKFIMMEAEDASSSASYDTANEGRMAVITTSDDYDSPLAVRDSNDLADSMTMRSTKSESLRSLQSSYEQESPNVSRRRRVRFELPEEDDMDQQVKDELLALVEAKHTGVTYVMGHVYIKARKNSSFFKRFAIDVGYSFLRKNCRGPSVTLHIPHISLIEVGMAYQV

SEQ ID NO: 49496 - protein, 54 aa, Oryza sativa
MAPTWIWKWRYSCSSVTMGDEGLGSSSYPPWWSRKELHHPGVDLEQSTTTGEEE

SEQ ID NO: 49497 - protein, 399 aa, Oryza sativa
MDNALASAAAIADQRQKIEQYRHILSSVLSFSPPDISQAKRFLDHMVSDEVPLVVSRQLLQTFAQELGRLEPEAQKEVAHYALTQIQPRVVSFEEQVVVIREKLAELYESEQQWSKAAQMLSGIDLDSGIRMLDDTNKLSKCVQIARLYLEDDDSVNAEAFINKASFLVTNSHQELLNLQYKVCYARILDLKRRFLEAALRYYDISQIEQRQIGDEEIDENALEQALSAAVTCTILAGAGPQRSRVLATLYKDERCSKLKIYPILQKVFLERILRKPEIEAFAEELRPHQKALLPDKSTVLDRAMIEHNLLSASKLYTNISFDELGALLGIDPRKAEKIASRMIYEDRMRGSIDQVEAVIHFEDDTEELQQWDQQIAGLCQALNDILDSMSSKGMAIPV

SEQ ID NO: 49498 - protein, 425 aa, Oryza sativa; identical to SEQ ID NO: 42790

SEQ ID NO: 49499 - protein, 680 aa, Oryza sativa
MTTWELPHGYGRVKPDVVAYSRDIMGSKISTGCKTLSGTSVASPVVAGVVCLLVSVIPEEHRKSILNPATMKQALVEGASRLSGPNMYEQGAGKIDLWQSYEILKSYQPRASIFPNTLDFTDCPYFWPFCRQPLYAGAMPVVFNATILNGMGVIGYVKDPPVWQPSEDVGNILSVHFTYSDVIWPWTGYLALHLQVKDEGSQFSGIISGKVTLSIYSPAAHGESSPRSSSCVLYLKVKVVPTPVRSRRILWDQFHNIKYPSGFVPRDSLNVHNDILDWHGDHLHTNFHILFNMLRDAGYYIETLGSPLTCFDASNYGTLLMVDLEDEYFSEEIQKLKDDVVHKGLGVVVFAEWYHVDTMVKMTFFDENTRSWWTPITGGANVPALNELLAPFGIAFGDKVLSGDFSINGEQTHYASGTDIVQFPAGGFLHSFQLQDNSKISQDNSRSADTQNTPDKSKLSSILGMMEAGKGRVAVYGDSNCLDSSHMVTNCYWLLRKLVEFTGNRIKDPVLFSESAQLKFPVFESIHQLSRRPDVNFSTYSTVVGNELICHQDSRFEVWGTKGYGTQQTGTTRKLPEYQKSEAYNISTPIASDSTPDEAGLQRNISTPIASKFDKRMDYFGFLGHEEIDIGMLVASQWMVPCFAATACLMLYLSCRVQQKRRRRKKGSTAARLSSMDRMV

SEQ ID NO: 49500 - protein, 171 aa, Oryza sativa
MADQLISTADHDTLPGNYVRPEAQRPRLADVLSDASIPVVDLANPDRAKLVSQVGAACRSHGFFQVLNHGVPVELTLSVLAVAHDFFRLPAEEKAKLYSDDPAKKIRLSTSFNVRKETVHNWRDYLRLHCYPLHRYLPDWPSNPPSFSPRKQCWYHRKTEYHSNKGLFIIE

SEQ ID NO: 49501 - protein, 256 aa, Oryza sativa; identical to SEQ ID NO: 30665

SEQ ID NO: 49502 - protein, 333 aa, Oryza sativa
MELFERARTVRLRGHHDKYLYAEEDESRVSQDRSASSPNARWSVEPVPHAPGVLRLRSHYGRYLSASNEPFLLGVTGRKVLQALPHRLDSSVEWVPVRDGAHARLRTRYGNYLRANGGLPPWRNSVTHDVPHRHAGWILWTVEVVEVLPESLVPAPIASDDDPAAPHYKTPSRGPSPVPTPALAPASPPRHRPASPPSYLARPPPPPPGYIEPPQGYIEPPPPEPTLARIESTESFSLPLHKVDGRAIHYHIGDDNGDIGDDQEGHSFTFNGTSLEELLERLQEETGLNDVIICSRSPINGKLMPLRLQLPPNNAAMHIVLVRESSKVAKSFP

SEQ ID NO: 49503 - protein, 591 aa, Oryza sativa
MMSFRSKDRNVQPRFNWPWRSESPLSAQLLIDIPPEIELSDYRRLPGSGSESPSGLLHGEGFKDEPIADLDIFFERLYEYFCAKGLRCIVTKWIIEMLNVLFMVCCIGFFFLIVDWNALGHLKCGVEALESGEKPCDLMQVVKHNPLVPFTFPKMITIGSMVILTTYGLINFLKFFVQLRSTLNIRDFYCNSLKITDLEIQTISWPKIIEKVVLLQKSQKLCVVRDLSEHDIIMRIMRKENYLIGMVNKGIISFPIRPWVPGAGPTVKSHLQNRRNHLILPKALEWTLNWCIFQSMFDSKFCVRKDFLTSPAVLKKRLVFVGISMLILSHCLVIFPLVYLILRHAEEIYNHPSTASSRRWSNLSRWIFREYNEVDHFFRHRMNNSAVHSLNYLKQFPTPQISIMAKFISFVSGGLAGALIIIGFLGESVLEGHIFGRNLFWYTIVFGTIAAISRKVVADELQVIDPEGAMCNVVQQTHYMPKRWRGKEDSEVVRREFETLFQFTIVMLLEEMASIFISPYLLIFEVPKRVDDILRFISDFTIYVDGVGDVCSLSLFDFRRHGNRNYASPFDALKTLRSSQGKMEKSFLRYI

SEQ ID NO: 49504 - protein, 167 aa, Oryza sativa
MPLGKYYCDYCEKQFQDTPAARKRHLDGAQHHRARALWYDAVRRQELHGGGGGAPPLLHQPGAAAIGVCQHFVRTGTCKFGDSCRYFHPKPPPANPGPAPSGPVSGPMAQQSNIQGSQPNFVGYQAADGSSFSGNILGGHTSWGNLPPSLRPPPEGGYPPFPFVDWG

SEQ ID NO: 49505 - protein, 268 aa, Oryza sativa
MSSWNSVGMEVLYQVLGWVAFFAWSFSFYPQVFLNFKRKSVVGLNFDFLVLNLTKHSSNLIYNAALFFSPFIQRQYHETYGDKEMIPVAANDVAFSVHAVALTAFTLFQVFIYERGNQKISKVCISITAIVWTAAIVCLIVAWPKSNWLWLIDVFNSIQVGMTAIKYIPQAIMNFRRKSTIGWSIGNILLDLTGGVLNFGQMGVQSIDQHTLVNFYGNIGKTLLSLEVVFFDILFIIQHYVLYPVKRDENAANGYPILPIEAKHVAAA

SEQ ID NO: 49506 - protein, 82 aa, Oryza sativa
MAPKTTTDPSTSTPPPPGAFRRCSGRVRGAGISCAGCFGDAESKRRRRVAVYKAYAVEGKVKASLRRGIRWFKRKCSAIFRA

SEQ ID NO: 49507 - protein, 154 aa, Oryza sativa
MWKRATSVLLHHRSALTRRSPAIGGGVLPRALFFSTLDAAQARTRVEDVMPIATGLEREEIAAELQGKKRFDMDAPVGPFGTKEAPAVIQSYYNKRIVGCPGGEGEDEHDVVWFWLEKGKPHECPVCTQYFSLEVIGEGGDPDGHDDDDDHHHH

SEQ ID NO: 49508 - protein, 220 aa, Oryza sativa
MALHRGGLGSQGHEVTAKLLQRLPQRRPPLPPSAMFMKETGCNPIRWDQRRWHQESRDRSGASGMASSSLLITDQRCIGETWRLEAGRPCAMRGFQADLALMADIACAGPHLLLVNFFPIYKLGPHQHLRHFSCWSLALLSFISSLSIEGVGTSNLLLASKTNRFFLFDCAVLICNSIFLFYFFLHLLIDFVVDCRHPKTAEDFLKLSPGRKVNFSLDAS

SEQ ID NO: 49509 - protein, 352 aa, Oryza sativa
MSLHQRPHQKPPATDSLPASAAAAAAAPSRPLPLLTLPYLFSLLALLLLLALLFPWGPPSHSSAPASPWRGYTLQEAAAFAARAGNGTIVLAAVSGPYLPFLSNWLITVRRAGRADQVLVVAEDYDTLERINAAWPGHAVLVPPAPDAQVAHKFGSQGFFNFTSRRPRHLLQILELGYSVMYNDVDMVWLADPFPYIVGDHDVYFMDDMTPVKPLDHSHELPPPGKKGRTYICSCMIFLRPTEGAKLLLRKWIEELKEQPWSKKQKANDQPAFNWALNKTAGQVDVYLLPQSAFPTGGLYFKNKTWVKETKGKHVIIHNNYITGFEKKIKRFRDHGLWLVDEHSDESPLGRI

SEQ ID NO: 49510 - protein, 443 aa, Oryza sativa
MMLSRLFDHDCSSNCSIVNVQSRCWSRCSVFSPLNLGPPSHTCCYCGALFWYEERIDRRRHTTRPLYNKCCKGGSVILPSYKPPPEPLHSLLTAVDRAKSAHFCENIRYYNSMFAFTSMGVNVIDSINDGRGPYTFKRSGQLCHRIGSLLPKRDKRPEYAQLYIFDTQNELMNRLRVGTYKNRAFQPNEEIVAALMQMFDAHNPIVKLFRVARDRLSRAGAPDDHYFIRLFGSPDKHGDIFNAPVASEVVGLVVGDLGTSDIGRDLMVEDKAGNLRKVKEDHCKFMAMQYPILFPYGEDGYHQNIAYRQCRRSAGIKRKRVTEVEYYAYRLHDRGDDFNTLTRCKRGTQAYVIDAYCCMEESQLSHFRTKSFQQKYRTAPLKEIHDTIHRGIIEGSEAGQRIIKPSSYVGGPRYLYQNYLDCVALCRKYGCPDLFITFTSNPL

SEQ ID NO: 49511 - protein, 223 aa, Oryza sativa
MEEGSNYYLVRKGEMVAVYKSLNDCQAQICSSVSGPAASAYKGNSWSREKEEYLSSRGLSNATYVINAAELREDLFGTLIPCTFQEITVSSSNQSALNHTGVLNNTRYQPGAQSVDLNYDAVGSGQASAEHYSQRINQGYSVRGQAFNRLESRPSSSSHFSPNNLDQSGTVDAQPLSKQYMVCLLHFDGASKGNPGKAGAGAVLMTEDGSDISTSRGSWYCYQ

SEQ ID NO: 49512 - protein, 194 aa, Oryza sativa
MMAKMGYREGMGLGVSGQGMLDPIPVKVLPPKQSLDRAVAASEVNDSVGPGKKRSRGGKRKREKKFAEQARAAKAEEEERSVFSFINSQLVGQDVAEGSAVKSKKDSSGEANGHAKKEDRRSLLAYDDEVKELRSRVEKLEEMMKRNRKDNAFYEAASKKLKQTRKALADAEATHASATNAVARKEKEKKWLKF

SEQ ID NO: 49513 - protein, 120 aa, Oryza sativa
MRCEVRRGCSSLPRSMPPPIPHSPLAQVGAKGGVRQSASQPPRPLHGRGDTCARLQRSMPPDTIRARSLLSFCRRRDACADLQHSTRPVDNWFVLFTLQSIHLSRIIIVSAEGYYRLQDH

SEQ ID NO: 49514 - protein, 541 aa, Oryza sativa
MTSATPPTPPAAPAFRPAPPIPSLNDWSQPPARGSTFYPSIWQSEADPKANSDSRWRVPLCRAGHPFQPHAPLSRPPPPMPAPMSYGPSPHFPYPGRLLSSGHLHGDLGNNIENSPARTFHRWIQCDGCGVQPIVGPRYKSKTKEDYDLCDACFHRMGNEVEYTRIDKPLLPQRLLRDPTLCRKIHSRAAMKSKREKLESRFILDVTVLDGTLMAPSTPFTKIWRMHNNGSIMWPLGTQLIWVGGDQFALQTYVPLEIPVDGFPVDQEIDVAVDFVAPARPGRYISYWRLASPSGQKFGQRVWVHIQVEDPSFVSNKRTAAINLNLPPESNITNTSNLIDVNIEPVDQVFNQHVNSTNKELLEHLIHHQIDEPKNPEPAPLPVPIVSSTTSLHPIIDVDVPSSSTAAAFVPVFDEPAPEPAVTPVPPTVNVPAGNAPASVGASSSDHHGIDNLTEEKLLKELEEMGFRQVDLNKEILRQNKYNLEQSVDDLCGVSEWDPLLEELQGMGFEDTEINKEMLEKNGGSIKRAVMDLIAREKKDQ

SEQ ID NO: 49515 - protein, 443 aa, Oryza sativa
MATMGSAPSYVVLDRVVHLDKEAVKEESEWAIMECRDRKTYLRNDHVGDEVVYGLSLLVQIAEPPDLSKLSIRLSEPPVQVAARPEEILDDGSSVLQLLDLPKRALNLHTSVQSVADDLIVFTSCLRNRTHRYLVYDAIGKSLSMIPCLPNRCDPSATFQPLPLRAGAGGDYTIALLGRDMRSDRETTRRFFQDVLCLCPPPPSSRPPPPSSFSAVTTPWQFKNPLFPPETPNRFKAHMVFSSGGQAFWANLAQGVLYCSCHDVLTGGYDVPFRYIPLPPECHLDPMKNQLRLCRTMNCVKDSIKFASIDMVPPDEAMMTTWTLTLATTQWHKDGELRVASLWELEGFKKAGLPKVKPTSPVLSMEENGVICFMLNAAEEGVYMVSLNMHTKNIMSSTRLSSCPTQPLGVEFPKHIQNPVPPKRDRDDLEECSTAIKRRLSRT

SEQ ID NO: 49516 - protein, 214 aa, Oryza sativa; identical to SEQ ID NO: 30369

SEQ ID NO: 49517 - protein, 711 aa, Oryza sativa
MAGAWRKAWLSMLDRGGGSGAGGGGGGSSGSLHVHLHGLLSPSSSSSSLNGYKRGGGKHGGGGGCGGGHVMTSSKAVLACFSVALVVAFFYVSVASGPTADAASFPSPTRASSSSLLSWLSSNSTSAAALPRRSLPPHPPIPPAGGGADLRNTARRTQSGAEGSGLPAPAAEQTAKPRVSDLRSGAGNATVGDVDGDQRVGNGTRSRQQREETATPMPRWQRRDEEKNSTHHAIVAAPGNSTDAPAPPLNSTATPRAAAAAAATPSTPPERKADTHHSHRRGIRHKQQQHHQHPRRRKDTVLLAAAAARQEAPDRRDDGAAMPLPAATIINTSTVGDNRVVWTSGVQSGLVSFAKCDVFSGRWVRDDDEGGGAYPFYPPGSCPHIDDDFNCHKNGRADTGFLRWRWQPHGCDIPRLNPIDFLERLRGQRIIFVGDSLNRNMWESLVCILRHGVRDKRRMYEASGRNQFKTRGYYSFRFRDYNCSVDFIRSIFLVKEMINETKGGAVVDAKLRLDELDETTPAYRTADIVVFNTGHWWTHWKTSRGLNYYQEGNYVHPSLEVMDAYKRALTTWARWVDKNIDSTRTQVVFRGYSLTHFRGGQWNSGGRCHRETEPIFNRTHLAEYPEKMRILEQVLGRMRTPVIYLNISAMTDYRKDAHPSVYRVRYETEEERMAAVAKQDCSHWCLPGVPDSWNELLYASLLQAGRGSWRL

SEQ ID NO: 49518 - protein, 399 aa, Oryza sativa
MDQMAERQHKKRKPEKMAGARTSGHDKEEEKKVKAPSVYLVVGHEVSWATYSVFKVDPYAAAKRGGGGGDEEDPAPVPIPRRLARISAKFCMSFAPVPVRSWIVGVGGDSADEDYAPETIVFDTETRAVIRGPNLLSTKLHPVVLTIGHKIYALARYPSVTGQLDFVPWFEVLDLSQARVVDGHLESCEWKPLPRPPFFPWDLTPLQYLSPPMVTVESYVALASCILVSLSQQEGTHMFDVDKEQWSKLDDNSLPFVRGAVPHGPIFLGLSRAKKIITAYNITVVCQPRSGGTAPSLSIVEFPVVSDMEEEILSTPIFLSLGSPGFCSLKSWSDHPTTDDPCTRARIKLMAYHTEEPISQEYIESSHGLLIPNQWKQVYEICDSSRELIWQCLITAMSL

SEQ ID NO: 49519 - protein, 111 aa, Oryza sativa; identical to SEQ ID NO: 29731

SEQ ID NO: 49520 - protein, 384 aa, Oryza sativa
MAAPVRSVLPVVLLGCGGVGRHLLRHIVSCRPLHANQGVAIRVLGVADSSSLLVADDLHSNGFDDALLADLCAAKSAGSPLSSLLARGQCQLFNNTEARRKVIDTASVLGKTTGLVLVDCSATYDTVGMLKDAVDCGCCVVLANKKPLTCAYEDFEKLVSNFRRIRFESTVGASLPVIASVTRIIASGDPVSRIVGSLSGTLGYVMSELEDGKKFSEVVKTAKSLGYTEPDPRDDLSGMDVARKALILARLLGQQISMENINVESLYPSELGPDAMSTKDFLESGLVQLDKSIEERVKAASLKGNVLRYVCKIESTGCQVGLEELPKNSALGRLRGSDNVVEIYSRCYESAPLVIQGAGAGNDTTAAGVLADILDLQDLFHKTA

SEQ ID NO: 49521 - protein, 202 aa, Oryza sativa; identical to SEQ ID NO: 28987

SEQ ID NO: 49522 - protein, 196 aa, Oryza sativa
MDAKQSVAAAKPSLAKKTASASFRLRNGSLNAVRLRRVFDLFDRNGDGEITVDELAQALDALGLVADRDGLAATVSAYVPEGAAGLRFEDFDALHRALGDALFGSLDGAAAAGEPGGGGGDEEEEMREAFKVFDVDGDGFISASELQEVLKKLGLPEAGSLATVREMICNVDRNSDGRVDFGEFKSMMQGITVWGP

SEQ ID NO: 49523 - protein, 329 aa, Oryza sativa
MAEACTVSQDNGRRCLPAWMLKPCSNDEVSKTRYRSEPVLESNKQPADLDQIKPAKRKRGEQVKIVDEEDADELGALQPCQGWKKVRRKRLDAVKDDNNGENAKITNKNARKVSRRSAPKNSGKRKLDNVEPEVSSSESIDDDIELTVEDLLSIAEEYVKADRLKQHEVKTTKTARYNENRCSPSISTEADIGGSIINARSVMGLPDTTRNARSMKGLPDTTMNAQSMKGLPDTAETNTAPSEPSRYEINKQQVQQCTPSFTATCDVAQDMLNIFFGPLLSKCSGYEKKPEVVQDANHATEKKDLSCDVQRQGEHATEKKHLSCDVQRQ

SEQ ID NO: 49524 - protein, 419 aa, Oryza sativa
MASYCYYGNTSNPNPNPNPSPAPSAPPLYPTLSMADLAPVQIGPSPPSSPMSPASPATPVDAYANAPPPSEDVLLRIPGAQLHLIDRHRSYPLAAGDLSLLRIRSGDTSLAAIALLHPIQWPLARDVASVKLDPCHYSFSLTVPPSADDPNPGPLHYGLTLSHPDPRLDGILATYTSFSVQSVVGGEALASKVRDEVEAAAYWTAVAPNVEEYGGKVANAIATGAGHLAKGILWCSELTVDRLRWGNEVLKRRMQPGDADAEVSPEMLRRIKRVKMVTKMSEKVATGILSGVVKVTGYFTNSIANSKAGKKFFNLLPGEIVLASLDGFGKICDAVEVAGTNVLSTSSTVTTGLVSHKYGEKAAAATNEGMDAAGHAIGTAWAVFKIRQALNPKSVLKPTSLAKSTIKAAAADYRAKQKK

SEQ ID NO: 49525 - protein, 80 aa, Oryza sativa
MVRSSRTRNSPRSLHRLSNTVRAVMSLTSAESAARISTVPAATATARSRAATSSSRMERKEWTRRAVRSSVTAIFRTWRQ

SEQ ID NO: 49526 - protein, 697 aa, Oryza sativa
MASDTEDGGEVQPTETTTDDSSSPMTVEKEEQAASTGMEIVKAGNSNAQETGGLSLNYEEARALLGRLEFQKGNVEAALCVFDGIDLQAAIQRFQPSLTDKTTSKKGQTKSESGIENPATLVLEAIYLKSLSLQKLGKSTEAANQCKSVLDSVESMFQNGPPDIEQKLQETVNKSVELLPEAWKQAGSHQEALASYRRSLLSQWNLDDECCTRIQKRFAAFLLYSCVEGSPPSSGSQVEGSFIPKNNVEEAILLLMVVLKKWYQGKTHWDPSVMEHLTYALSLCDQPSLLAKNLEEVLPGIYPRTERWHTLSLCYYAIGQKEVALNFLRKSLNKHENPNDIMALLLASKICSEERHLASEGVEYARRAIKLSESSDVHLKSVGLHFLGNCLGKKSKTVSSDHQRSLLQNETLKSFSESIALDRHNPDLIFDMGVEYAEQRNMNAALRCAKEYIDAIGGSVSKGWRLLALVLSAQQRYPEAEVATNAALDETAKLDQGSLLSLKAKLKVAQSSPMEAVEAYRALLALVQAQKNSSGSSKTDAEGQNDSVSEFEIWQGLANLYSSLSIWRDAEICLRKARALKSYSAATMHAEGYMLEARDQNKVALAAYVNAFSIELEHVPSKVAIGALLCKQGSRYLPAARCFLSDALRIEPTNRMAWLHLGKVHRNDGRINDAADCFQAAVMLEESDPVESFRSLA

SEQ ID NO: 49527 - protein, 222 aa, Oryza sativa
MSIEAGVTATAPTVSAIVLTATVGCHLLKISGYSQTRLVDNGERVESAKFKAAGHTWRIVFYPNGKYSMDHGAFSFYLKLIDRSKGVDAEIQFSLLPRHGADSGTLPYSKPEIMHTFGSARRNSKCGFNWFISRDEMETLQNKYVGEDDDSIILCCDIKVVNKPAIHRIGLNDLGVFCPCDDDTCKRLHKRSLQAASDIAMESQPCLGIKGGFKRLFSYFLA

SEQ ID NO: 49528 - protein, 192 aa, Oryza sativa
MEATTSSLLVRPVDTRLSAASLPIVVRARRRVAVVTAAAPERKPAAAASSSNYVVVPLVAAPSGITRPLVEILRDLNKRVPDTVVRSSRRRASPSDPVIPWYHANRMLSFYAPGWCGEVRDVIYTDNGKVTVIYRVTVRGTDGEVHREAAGTTSLNDARFDDPVAAAEEAAFCKACARFGFGLYLYHEDETP

SEQ ID NO: 49529 - protein, 422 aa, Oryza sativa
MDYSNSSCSRTCSGLVRLNNTIESNEVLFSKTRSGLVRINSTVESNEVSLSKTRSGLIRGNTNVRSNEGSYSTTRSELAGANGVVDSNVGDLCSKTRSGLVRRNATLDSNEGSCSKTRSGLARGDGIVGLNQGSSSKTRSGLVRGGDIMNFSEGSSSKTRSGLVRGNTTVAASNGSYSATPSRFVRGNIIVGSKEGSCSRTRSGLVRESIQMDYSDSSCSRTRSGLVRRKPFMVQVKDEAAMNGLSDDCLKEDSPGKNEPNHKSNLVENSDKPVMKGPDGWWKEGMLTKNGSKYMSDPVQTKGEACINGLPGGQWKENSAEKNVSNHKNELVQRKDDLIVDGLPDGWWKEDRPRKNGSNLKTDPYYIDPVSGYEFRSLKDVHRFLKSGDIYKCIVRPRKRTIQDPCTIENQSHVSSLQFFLV

SEQ ID NO: 49530 - protein, 240 aa, Oryza sativa
MAAAAPSRVSVRAAAPGQTGGFAKIRPQVVVAAAARSAGVSGRRARSVRASLFSPKPATPKDARPAKVQEMFVYEINERDRESPAYLRISAKQTENALGDLVPFTNKLYSGSLDKRLGISAGICILIQHVPERNGDRYEAIYSFYFGDYGHISVQGPYLTYEESYLAVTGGSGVFEGAYGQVKLNQIVFPFKIFYTFYLKGIPDLPRELLCTPVPPSPTVEPTPAAKATEPHACLNNFTN

SEQ ID NO: 49531 - protein, 243 aa, Oryza sativa
MWRRQVGALLLRHRSTPSSTLRHHLPLPVPDQSPPLASNLLLRLFTSQSGEGGDGATKPFIAFVLGGPGSGKGTQCVRIASDFGFAHLSAGDLLRSEISTGSEKGELILNIIKEGKIVPSEITVELIRKAMESSDAKRVLIDGFPRCEENRIAFERITGTEPDLVIFFDCPEDEMVKRLLGRNQGRVDDNIEAIKKRLKVFESLNIPVVDYYTSRGKVHKINATGTEEEIFGAVHKLFSSLRF

SEQ ID NO: 49532 - protein, 94 aa, Oryza sativa
MGAVKRSSFLLVVVVFALLLLTSMAAGGRKMLINKHQVQSMETSDDESMHQGQEDDEMLAMVHERILRQVKTNDYGTYDPTPTMAKPHAKEIPN

SEQ ID NO: 49533 - protein, 464 aa, Oryza sativa
MDEALVGRLEAAVSRLEALNGAAGATARGGYGGQVDHASAHDPAILAFDELVAGAVGRVSAAAGKIGAEVAEVTRVLEKAFLVGKDLLVRTKQTQKPTVDSIAVFMGPLNETILEANSLAEGTRSSHGNHLKAAAGSLAALAWIGYTGKGCGMPLPIAHVEESWQMAEFYSNKVLVEYKSKDPDHVEWAKALKELFVPSLRDYVKTFYPLGPVWQPPGSSTSKAPSAPCPPSASLFSSSAQSSQPKTGMSAVFAEISSGKSMTQGLRTVTADMKSKNRTDRTGVVAAEGKEAHKKPSSSSTKLPSKLELQMGRKWIVEHHVGNKNLVIEDCDTKQSIYVFGCKDSVLQVKGKVNNITIDKCSKMGLLFKGVVAACEIVNCNSIEVQCEGSVPTISIDNTSGCQLYLSKESLETSITTAKSSEINALVPDANSDGDWAEHSLPQQFIHAFKDGQFTTLPACHSGG

SEQ ID NO: 49534 - protein, 599 aa, Oryza sativa
MSTSIPLPFFFSHGVVHARIGHRPIQPSVGLLSAGAPAKVSFRRQSSAHRHAAHVVSSESITPVKEVSSFEPSVWGDFFINYDPKPLQRSEDWMMEKADKLKQDVRILFETHNDTAKKMHLVDAVQRLGIDHLFQDEINNAISDIKESEFTSSSLHEVALHFRLLREHGIWVSPDVFEKFKGEDGRFINTIADEPRALLSLYNAAHLLVHDEPELEEAMSFARHHLESMRDGSRLKAPLDNQINRALHLPLPRTYKRVEMLHYMLEYGQEEECIVVLLDLAKLEFNLLQHVHLKELKAFSQWWKDLYGYVELSHVRDRAVESYLWSYALFYEENLTLTRMILAKIIVFIVLMDDTYDDHATIEECRKLNEAIQRWDESAISLLPEYMKKFYRALLNYFRETEAQVEASDKYRVTCMKKEFQNLSTYYLQEFEWLHQNYKPAFKERVALSTLSSTVPLLCVTAAVGQGDAVTKESFELTTVRSSAVIACAKIMRFMNDIAAFKSGRKNKGDAANTVECYINEHKVTSEVALDKIESMIESEWRTLNQVRCDHQKQFHVVQRVMNLAVAVPFFYDKKKDAYTFSKYHQGNVGNLFVNPVTL

SEQ ID NO: 49535 - protein, 259 aa, Oryza sativa
MDDYAREMMELKTLVTRTLEKKGVLAKIRAELRASVFEAIEEEDRVVENDDGGNPALLGSCNDRAKQLHASPSGRLLTALVSEYLEWAQLSHTMKVYLPECNLPKDFWKNELKDFSNKSGAEGSRSAESGPMLLDVLEGYLKYENLSQTRMAGTGRRIINSESDPALNAEHRNTRRPPSSSSVTGLPPMGRPMPSSQMSDRRGGSSASNARKDEYNWRYDADDISEEVLRASSALENVQLDRKARNLTTSWRHPGGGAE

SEQ ID NO: 49536 - protein, 64 aa, Oryza sativa
MNFLARYLKLISKLISYVLISVLCLLLSGLENICISVLETKQGRVAQWHYLSFQIATMSVQINE

SEQ ID NO: 49537 - protein, 377 aa, Oryza sativa
MADGEDIQPLVCDNGTGMVKAGFAGDDAPRAVFPSIVGRPRHTGVMVGMGQKDAYVGDEAQSKRGILTLKYPIEHGIVSNWDDMEKIWHHTFYNELRVAPEEHPVLLTEAPLNPKANREKMTQIMFETFNVPAMYVAIQAVLSLYASGRTTGIVLDSGDGVSHTVPIYEGYALPHAILRLDLAGRDLTDSLMKILTERGYSFTTTTEREIVRDIKEKLAYVALDYEQELEAAKSSSSVEKSYELPDGQVITIGAERFRCPEVLFQPSFIGMEAPGIHETTYNSIMKCDVDIRKDLYGNIVLSGGSTMFPGIADRMSKEITALAPSSMKIKVVAPPERKYSVWIGGSILASLSTFQQMWISKGEYDESGPAIVHRKCF

SEQ ID NO: 49538 - protein, 266 aa, Oryza sativa
MDRNAGSFVAMRRLSGGSSCHDPSPNTYAEVVAGSTAWIGRGFSCVCAQRRDSDQRISFDLSPAQECCLQRLQNRIEVPYDGSNGEHQEALKTLWHVSFPGTELLGLVSDQWKEMGWQGKDPSTDFRGGGFISLENLLYFAKNYTKSFQELLCKQNGDRALWEYPFAVAGVNITFMLIQMLDLQAAKPRSLIGSVFLNLLLENDRAFDILYCITFKLMDHKWLEMHANYMDFNAVIKSTRRQLERELLLEDIQRIEDMPSYRFLDR

SEQ ID NO: 49539 - protein, 130 aa, Oryza sativa
MEEWWKRVLHTPHIPKGPLKSLIILVGWELWCERNTRIFRHVATTLTTIIAKIKEEGLAWIKVGSKWEPQKLVELTSLEEPYSFSFCGLFFFMAGPVNNSFFGCLFFLLLYQYMQGKAFVFFFKKKVHYI

SEQ ID NO: 49540 - protein, 307 aa, Oryza sativa
MGSAKLIAVVLLPALLAFQAPMATAVNSNLFRDYIGAIFNGVKFTDVPINPKVRFDFILAFIIDYTTETNPPTPTNGKFNIFWQNTVLTPSAVASIKQSNPNVRVAVSMGGATVNDRPVFFNITSVDSWVNNAVESLTGIIQDNNLDGIDIDYEQFQVDPDTFTECVGRLITVLKAKGVIKFASIAPFGNAEVQRHYMALWAKYGAVIDYINFQFYAYGASTTEAQYVDFFNQQIVNYPGGNILASFTTAATTTSVPVETALSACRTLQKEGKLYGIFIWAADHSRSQGFKYETESQALLANATISY

SEQ ID NO: 49541 - protein, 285 aa, Oryza sativa
MQGATPGDAAGEEVGGGGDVVMVRRASVAACLTCPLCGRLLRDATTISECLHTFCRKCIHEEFVDKESCCCPTCNIDLGCAPLEKLRVDHSMQFVRSRIFPFKRRKVENPEIICPVASPVKRKERSLSSLTIPAPQVSIQKCLTKRRTKASCLRNFPLHSTSRGSKDTSKKLGGWRPLGCQLKLGKDKKSLKSSVKDTNRTKSKSGDTDDGAPASKAKAREPFTRYGRAAKRTGRKKLLMLKNKKKRFKAKQPSKKRRFRALWFYLLAAFDQREYQLYHNYQQSI

SEQ ID NO: 49542 - protein, 818 aa, Oryza sativa
MSSSSAASIGPPQPPPPPAPPEEEKKCLNSELWHACAGPLVCLPTVGTRVVYFPQGHSEQVAASTNKEVEGHIPNYPNLPAQLICQLHDVTMHADVETDEVYAQMTLQPLNPQEQNDAYLPAEMGIMSKQPTNYFCKTLTASDTSTHGGFSVPRRAAERVFPPLDFTQQPPAQELIARDIHDIEWKFRHIFRGQPKRHLLTTGWSVFVSAKRLVAGDSVLFIWNEKNQLLLGIRRASRPQTVMPSSVLSSDSMHIGLLAAAAHAAATNSRFTIFYNPRASPSEFVIPLSKYIKAVFHTRISVGMRFRMLFETEESSVRRYMGTITEVSDADPVRWPSSYWRSVKVGWDESTAGERPPRVSLWEIEPLTTFPMYPSLFPLRVKHPWYSGVASLHDDSNALMWLRGVAGEGGFQSLNFQSPGIGSWGQQRLHPSLLSSDHDQYQAVVAAAAASQSGGYLKQQLLHLQQPMQSPQEHCNLNPLLQQQILQQASQQQIINPDAQNIQTMLSPSAIQQQLQQLQQMQQVQNDQKQKIQPDQSYQVPTSAVLPSPTSLPSHLREKFGFSDPNANSSSFITSSSSDNMLDSSFLQGSSKAVDLSRFNQPVASEQQQQQQQAWKQKFMGSQSVSFGGSVLHNSPTSKDGSVENKIGRDVQNQSLFSPQVDSSSLLYNMVPNLTSNVSDGNLSTIPSGSTYLQNAMYGCLDDSSGLLQNTGENDPATRTFVKVYKSGSVGRSLDITRFSNYAELREELGQMFGIKGQLDDPDRSGWQLVFVDRENDVLLLGDDPWESFVNSVWYIKILSPEDVHKMGKQGNDPRYLS

SEQ ID NO: 49543 - protein, 136 aa, Oryza sativa
MCWPANLLLATTLQLCHGTRLLLRKKWRRRGEKKQRGKMGEKHFGWNAKMRYFDSLVLTPNFGPLVPNPRTSLNGTGAPRRSPSCSAPASFPVSVAITSDQQVNNHISTTESVTSRGIWVCLVHAKIRNLVEIETI

SEQ ID NO: 49544 - protein, 366 aa, Oryza sativa; identical to SEQ ID NO: 47056

SEQ ID NO: 49545 - protein, 31 aa, Oryza sativa
MQITSNKSRYVQSCRHPLRLNRIHPGIETEK

SEQ ID NO: 49546 - protein, 165 aa, Oryza sativa; identical to SEQ ID NO: 29387

SEQ ID NO: 49547 - protein, 770 aa, Oryza sativa
MSSVENPSNGRSNGHAPANASAATANSAQATQQGQTEQNPCDAGSEADLLWKLRKYLVLLAILAAAITFQAGLGPPGGFWQQDQHGYHAGDVVLRYSYPRRYLVFFYCNTTAFGASLIVLILLLVKELSRDAIWLRSLQFAMVLGLLGLMGAYAAGSCREVRTSVYIWALLVGIFAYITLHVVFFRHLAPQWLCEIFYTIRKHWKEILGSIHGDGGTDKTGETGDSEKTKRLEQNRSFLLVLATLAATVTYTAGLNPPGGFWPDDNKPSHLAGDPVLRDHYPRRFKAFLVCNATAFAGSLVIIIMLLSNTAVDHVVKSNALRLCVLVSLFGLMGAYAAGSCREVHTSIYVFALVGAVFLYLCIQWIEHMVPIPCIKSSMEWVGKKKTHLLQKLGSFIMRGTRNPTEESRSTPRAQNPVNNRRSGTSDTAKDDVEKLRTYLLLLGILAATVTYQAGLNPPGGFWQDNNGHTAGDPILEAINPKRYKAFFYCNATAFVASLVIIILLQSQLITVGAMKRHILQTAMALDLFGLMGAYAAGSSRKFSTSVYVFILVLVVFTYFTLHVLLSMALKTQLKTKIEHVPNLFHRFTRFCFRRTEGGSDDGRSDSVELQNEEKDLEKRRKFLMMLAILAASITYQSGLSPPGGFWSDNDRHRAGDPVLHDEFPGRYRIFFYFNATAFMASLAVILLLVNKRLCDKGLKSYALRACVLVDLISLMGAFAAGSCRRVSTSIYVILVVAAVFAYVMIQILVLQVAEQKVDLLKKRRSGFES

SEQ ID NO: 49548 - protein, 112 aa, Oryza sativa
MVPCVPSRNPSPPLPCLPQPHLILFNPPLYKPSSPLLFPVFVAAAPSLLLLLFSRLLHPSRRCCLSSPLAVVVLVIAVIFSTSSSSSCVATESSPSSSSIFPACRFRCVEGS

SEQ ID NO: 49549 - protein, 216 aa, Oryza sativa
MAYRAEDDYDYLFKVVLIGDSGVGKSNLLSRFTRNEFSLESKSTIGVEFATRSIRVDDKVVKAQIWDTAGQERYRAITSAYYRGAVGALVVYDVTRHVTFENVERWLKELRDHTDANIVIMLVGNKADLRHLRAVSVEDAKGFAERESTFFMETSALESMNVESAFTEVLTQIYRVVSKKALDIGDDPAAPPRGQTINVGGKDDVSAVKKSGCCSS

SEQ ID NO: 49550 - protein, 155 aa, Oryza sativa
MRSYLEAGCTHHNETIQNMNKLHSCQEKLNDHISKAKLLLEELHILEEDVYSTTLKACLSSLRHMDDCPDDNSLTNIFSEDEQQSGDLLDKAVSCASVMVLVHNMLKLDYTMQEKIVKALCIKTASSELEGYCQMWDLRPYIDDNVIQLAWQFVS

SEQ ID NO: 49551 - protein, 96 aa, Oryza sativa; identical to SEQ ID NO: 45333

SEQ ID NO: 49552 - protein, 333 aa, Oryza sativa
MSMMSFLSMVEAELPPGFRFHPRDDELICDYLAPKVAGKVGFSGRRPPMVDVDLNKVEPWDLPEVASVGGKEWYFFSLRDRKYATGQRTNRATVSGYWKATGKDRVVARRGALVGMRKTLVFYQGRAPKGRKTEWVMHEYRMEGVHDQQASSFSSKEDWVLCRVICKRKSGGGATSKSRSLTTTTTTIVHDTSTPTSSPPLPPLMDTTLAQLQASMNTSSSSAIAAVAALEQVPCFSSFSNSIASNNNNSNSATVNAQQCYLPIVTGSNNNGMSYLDHGLPEFGSFLDTQSCDKKMLKAVLSQLNSIGGEVLPGLPPPSEMAAAVSPSWMNHF

SEQ ID NO: 49553 - protein, 542 aa, Oryza sativa
MEATITRFLVFFFLLLVVAVRGDDPYRFYTWNITFGDIYPLGVKQQGILINGQFPGPQIDAVTNDNIIINVFNNLPSPFLLSWQGIQQRRSSWQDGVYGTNCPIPPGGNFTYIMQFKDQIGSYYYFPSLAFHKAAGGYGGIRVLSRPGIPVPFAPPAGDFTILAGDWFKLNHTDLQGILDSGNDLPPPDGLLINGQGWNGNRFTVDQGKTYRFRVSNVGIATSVNIRIQGHSLLLVEVEGSHTVQSTYTSIDVHLGQSYSFLVTADQPPQDYSIIVSTRFTNPVLTTTAVLHYSNSNGALSTVAPPPAPTIQIDWSLNQARSIRWNLTASGPRPNPQGSYHYGLVNTTRTIRLANSRASINGKLRYAVNSVSFIPADTPLKVADFYNIQGVFALGSMPDNPTGGGAYLQTAVMAANMRDYVEVIFENSENFVQSWHIDGYAFWVVGMDGGQWTPASRQSYNLRDAVARYTLQVYPQSWTAIYMPLDNVGMWNIRSESWARQYLGQQFYLRVYSPANSWRDENPIPKNALLCGRASGRRTRPL

SEQ ID NO: 49554 - protein, 105 aa, Oryza sativa
MTRFSTSRPSRISSRTSATSTMSSSRSCAISRAAGSTPLASSSVSRPSSMATTSSSLASTPSCPRDLPSSSRTWRRSLLTSWRPSISSTRSRLASSRRTTSTSPS

SEQ ID NO: 49555 - protein, 78 aa, Oryza sativa
MVGKKVDCISNCRLSSLHLPIPCTSAMNADTEMLEGGCAEKCRCSPQCHRIAPATDVSTTSPVSYSPPTVISPQVQPS

SEQ ID NO: 49556 - protein, 667 aa, Oryza sativa
MQGQKNSVEQLADVFGFDHASSSGNPVMDQQGYWNNILGSVESHNLQGYQVNRSDGTIPYGNGVHQNGTFLGFWESGEASASGSSLHFGGSNEIKAEQRNIGGGLRIGERRLVAERNLSLDNVDIGLNINGNDLSGENSNVNGASQGSELHGGCSHTGSNGQASELRLHPYRTFILGADQPEPFNSLNGSENPLGDFSLMPEGIDQRPGSSLDGRRLACKRKNIEGVNGQCSAGASTSFSHRNDSIFHNIASSSHNPSPSTNLPSPNCLLVPSTLDEQLPRYGATTAGLSSSSYDPSGGNNNSGGSQRSFRPRTSLAQHIGPYGVWPSSSTIRHSNSWNHQPPPFQSSFDEPPEVIPVVSSLNFQYQHPMNVVPGIPQMSHRFTGPGASSSRTGNLENRIIGSEEFSARNVVATSFPDAVPPAALDMRHLIPEPSSWNVDGRATTIPGNVPSSSRANTNSMVNPPAGSPFIAHQNLHRRNPRNLSEEISRLSGALRGHQHPRLRSGFLLERQGDGVWGVPLSTRSREGRRLIEIRNALEMIHRGENVRFESIFYGGVDIHDRHRDMRLDIDNMSYEELLALEERIGNVSTGLSEEEVTKLLKQRKFSSWRLEASVEEEPCCICQEEYVDGDDLGTLDCGHDFHVGCVRQWLVVKNTCPICKNTALKS

SEQ ID NO: 49557 - protein, 533 aa, Oryza sativa
MAVSSSTSTCSSFSLLLLLLLLAAAPWRSGEAAAAAARALNFTRQDFPGEFVFGAGTSAYQYEGATDEDGRSPSIWDTFTHAGKMPDKSTGDMGAGGYHKYKEDVKLMSDTSLEAYRFSISWSRLIPRGRGPVNPKGLEYYNSLIDELVERGIEIHVTLYHLDFPQILEDEYHGWLSPRVIDDFTAYADVCFREFGDRVRHWTTMDEPNVLSIAAYDSGAFPPCRCSPPFGANCTAGNSTVEPYVVAHNSILAHASVTRLYRDKYQATQEGFVGMNIYSFWNYPFSSSSADIAATQRALDFMVGWILDPLVYGDYPEIMKKKAGSRIPSFTEEQSELIRGSADFIGINHYTSVYISDASNGETVGPRDYSADMAATFRISRNDTPSGQFVPTRLPRDPKGLQCMLEYLRDTYQGIPVYIQENGFGHFGKDDDSLNDTDRVDYLSSYMGSTLAALRNGANVKGYFVWSFLDVFELLAGYHSPFGLHYVDFEDPNLPRQPKLSAHWYSKFLRGEIGINIESTISPDEHEHEHADQ

SEQ ID NO: 49558 - protein, 311 aa, Oryza sativa
MDQRIEHSYLPIRGLKLHIAHIGKGEAATLLFVHGFPEVWYSWRHQMIAAAAAGFRAIALDFPGYGLSEPPADLTQASWQGLMNDLLAILDSLSIPKVFLVAKDFGVKPAYDLALCHPDRVCGIVSLGVPPLVESLSFSGLPEGFYIHRWREPGRAEADFGRFDTRRILRTIYILFSRSEIPVAKQGQEIMDLADESTPMPQWFTEEDLSAYTDLYEKSGLMTAIQIPYRTKAAKAEGANPRFEMPMFVIMGQKDYILKFPALKEYMSSEKLKEIAPDYGITYIPEGSHFVQEQFPDLVNQLVIDFVSKHA

SEQ ID NO: 49559 - protein, 798 aa, Oryza sativa
MHTEVGITDDTSEDERQLIDKIRDHLKDKRYFVVIDDVWDVEAWEAVKLALFNNRCGSRTVMTTRNAAVASHCSRGGVCVYQMEPLSFADSKMLFCQRAFRSQELYYPHLEEVCDEILAKCGGLPLAIITVSSLLAGKHAKDEWDRMLTAIGHALAKNPDAANMTKILSLSYFDLPHHLRTCFLYLSVFPEDYKISKQHLINRWIAEGFVHEEQGWRTYEVGGNYFNDLINRSLIEPVDINDGQAKACQVHDIILDFITCKAAEENFVTSVNSVEHGNISECRVHRLCVKNHNNEKVSKPTSLNVTHVRSLTMFGHVDGISLFAFPILRVLDLSYSLLKDKHLKNIEKLHFLKYLSLRSTLITKLPRKIGQLNCLETLDISYTEILELPLSIAKLECLANLYVGRGTRFPDRLIGKMHSLVELEEFGVSCELGKSLQGFSQLSKLRTLKVHLFWWSDAEECQNYVSALLSSNLHHLYLTGGPLIMEKWYPPSPCIIRKLHIIGCYIRKVPNWMSSLGSLTELQLWIHRMGPNDIEILGAIPSLCFLKLKTMCGINGRIIICSNKGFRSLTYFSLRIKRCGTLLEFEPESMPKLDNFQVEFRLHGMDCLNGASDFGIQHLSALTKVKIGIWGNICSDGIYDPEQDMNNSITRSVVSLIKAAIEKLPNHPTSRFHLEYDHGSCLLGETSQEFEGQGPDEAYPRQHKIFSLRELEDATNCFSDSNVLQRGRFDGSMYKGRLGDGSLVAVKKDYISRALSMGYPNIDWRTWHFQTQVEMPVHRNLMRLHGFCITPTKRTAAI

SEQ ID NO: 49560 - protein, 312 aa, Oryza sativa
MNPLTQVKRTQVINQKEALLGIGEDGSWHAKFKDSAYVFVGGIPYDLTEGDLLAVFAQYGEVVDVNLVRDKGTGKSKGFAFLAYEDQRSTILAVDNLNGAKVLGRIVRVDHVSKYKKKEEEDEEELQKKREARGVCYAFQKGECNRGASCRYSHDEQRNANTGWGSKEESKARWEHDRHHEPPMSHKKFPSSAGEQRFPDRAKEENKSTGREGQSSRSEAYKDHDSRLRHSDRGSKDHDRYRHDRSPERSRGDRQRNNDRYAQGRDEKSERYRSEVKHDEGDQKRSRRDTDSSGHYERRGNEDSERYRKSRR

SEQ ID NO: 49561 - protein, 217 aa, Oryza sativa
MAPFVKHLVSEPACWDAPASSSSLSSASSRSRRARLRLHRRRLLPRQGPRPPPPCRSSPRPPPHRCGQPSLPPPPTSSRSARFHLLPPCRSSLRTSPSAPRLPIPLSRRPPGLAGVHGGEAPRLLIPSTTAVRVLRPPARTTRNGRVAAAAGGAARDGGGGGSLASCSGKDQRVRGGVLAGVHGGEVKKGRGREMTEVDRKLDGSGMVPISPNSSGT

SEQ ID NO: 49562 - protein, 623 aa, Oryza sativa
MALTLRKKQLDSIVRMLHLNQQLQGSPDGVGGGVGSAEEEEAYKILVMDSPCVALLAPVLRVGELRRHGVTLHLNIDKARQQVPDAPAVYLLRPTAANVDRVAADAAAGLYASFHLNFSTCVPRALLERLASATAASRSAHRVARVADQYLDFVCLEEGLFSLAQPRAYVALNDPAAAEADITALVDAIALGLFCVVATLGAVPVIRCAGGGPAEMVAAALDARLRDHLIAKPNLFTEAASTAVASFQRPLLCLFDRNFELSVGIQHDWSYRPLVHDVLGLKSNKLKLPEKYDLDDTDPFWVANSWLQFPKVAEEIEAQLAKYKQDVDEVNQRTGGGRDGVEFDGTDLIGNTRHLMNAVNSLPELTERKKMIDKHTNIATALLGHIKGRSLDGYFECENSMLVDGTLDRTKLMNLLRGNGTKEDKLRLAVTYLLSFETPVPSDLEQVEAALRESEVDMSAFQYVKRIKSLNSQFAGASNTASKVNIVDWAEKLYGHSISAMTGVRNLLSDGKQLAATRAVEALMEGKPNPEVDNYLLFDPRAPKSGTAGQFRGPFREAIVFMIGGGNYIEYRSLTELTQRSQTTKQVIYGATEILNGVEFIQQLSELGQKAGLGGVSSSLPPQ

SEQ ID NO: 49563 - protein, 342 aa, Oryza sativa
MAGIRWPPEDPEIFPSRMVTGGGGGGAGGGPPGPPGEMASDDDRSVAADSWSIKSDYGSTLDDEQRYADAAEVLLASSSSSSAAASGPAAATTASVAANPSGDFSFDKDVPDSADMEPPLLGLPNYHQDGSYAEYLANFQERSHTDDWFGTENMDVLVSWTKNLCSNKDLRSCSVLDIGTGSGRLSQQLAKQGFSDLTGIDHSEGAIEVARNLAIRDGFEHINFLVDDVLESKLERRFELVMDEGTLDTIGLHPDGPVKRMMYWQSVAGLVSPGGILVITSCSRTKDELVQEVESFNQRKLSAMGSEGAQASDTAVFKYIDHVQTYPIVDSSCITTVAFSHS

SEQ ID NO: 49564 - protein, 419 aa, Oryza sativa
MSTAATAPPPAAVLPAAPPPSYPATSAPSASAAAAEDDDDLYGRLKSLQRHMEFVEIQEEYVKDEQKNLKRELLRAQEEVKRIQSVPLVIGQFMEMVDGNNGIVGSTTGSNYYVRILSTINRELLKPSASVALHRHSNALVDVLPPEADSSISLLGSSEKPNVTYTDIGGCDIQKQEIREAVELPLTHHELYKQIGIDPPRGVLLYGPPGTGKTMLAKAVAHHTTAAFIRVVGSEFVQKYLGEGPRMVRDVFRLAKENAPAIIFIDEVDAIATARFDAQTGADREVQRILMELLNQMDGFDQTVNVKVIMATNRADTLDPALLRPGRLDRKIEFPLPDRRQKRLVFQVCTAKMNLSDEVDLEDYVSRPDKISAADIAAICQEAGMHAVRKNRYVILPKDFEKGYRTNVKKPETDFDFYK

SEQ ID NO: 49565 - protein, 98 aa, Oryza sativa
MTSAEELAWLAVRLAAGWAPPTCLGGVGRRAGAAVLRRRTWWWRRRSKPGRFCCAGVLGGGCVRPRTPAARRPQLLRPGHRLVVTGGHGTNGMTSCRT

SEQ ID NO: 49566 - protein, 405 aa, Oryza sativa
MWPGCGGRFYWAPAPPSPSAAGARGVVVVFGWVWSDEAQLRPFVELYASLGWRCLVCHPDLVALYLSEKAASLASGVISELVKEFKVKPLPTVFASFSGGSKGCMYKVIQLLDGNCEGDATMKDYRLVRNCICGQIYDSGPVDFFSDVGTQFLQNPMIGNSSRPSMLLSWMTKALASGMDTLFPSRIEAQRAEYWHTLYSSAGLGPVLMLCSEDDDLAPCHVVCGFARRLIELGTDVKVIKWSDSPHVGHYMLHEAEYRSAVNDTLIKALVTFCHRSQLNATSDQEYKIAHSVCSLHNVAANSNERLRRVANGPSDHFFLPSSKDHNESRDPDSLIDEQRRQLSYPPSMEPQGVLGQILFDVCVPKNVEGWDIKPTVSPNGRPTLASARQLGPFNPIKYFRRSRL

SEQ ID NO: 49567 - protein, 441 aa, Oryza sativa
MMKPQHGGMAGHGGGRTRSPFLTSYALTLAFITFVSVLYFKDFSSTLHQPFLTRPPPHRRQIARPRAPSHHHGGGSSSGGGDVVPPFAVGAAAAAGCDVGVGEWVYDEAARPWYEEEECPYIQPQLTCQAHGRPDTAYQHWRWQPRGCSLPSFNATLMLEMLRGKRMMFVGDSLNRGQYVSLVCLLHRSIPESSKSMETFDSLTVFRAKNYNATIEFYWAPFLAESNSDDAVVHRIADRIVRGTALEKHARFWKGADILVFNSYLWWMTGQKMKILQGSFEDKSKDIVEMETEEAYGMVLNAVVRWVENNMNPRNSRVFFVTMSPTHTRSKDWGDDSDGNCYNQTTPIRDLSYWGPGTSKGLMRVIGEVFSTSKVPVGIVNITQLSEYRKDAHTQIYKKQWNPLTPEQIANPKSYADCTHWCLPGLQDTWNELLYSKLFFP

SEQ ID NO: 49568 - protein, 557 aa, Oryza sativa
MALAGTSKVVLGCVAFGIFWVLAVFPTVPFMPVGRTAGSLLGAMLMVLFRVISPEDAYAAIDLPIIGLLFGTMVVSIFLERADMFKYLGNLLSWKSRGSKDLLFRVCIVSAIASALFTNDTCCVVLTEFILKVARQNNLPPQPFLLALATSSNIGSAATPIGNPQNLVIAVESGISFGQFLLGVFPAMIVGVLTNAAILLCYFWKYLSVEKDQEGGQPAGPEVVADDEVTSHRFTPARMSHVSSLNPDDMDCISEPIIRSNSVRSTSANENLRSRSVNSEADIQLAIKSLRASSMSHEMVEVSTVTDRRDEGASSRKFTRTASQQRSVIIEDSPPSPASNGDKEKEDEVAEKRWRVFVWKTAVYLITLGMLIALLMGLNMSWTAITAALVLLALDFTDAQACLEKVSYSLLIFFCGMFITVDGFNKTGIPNTLWELVEPYSRIDSAKGVALLAVVILILSNVASNVPTVLLLGTRVAASAAAISHDSERKAWLILAWVSTVAGNLTLLGSAANLIVCEQARRAQFFGYNLSFWSHLRFGVPSTIVVTAIGLLIVTSY

SEQ ID NO: 49569 - protein, 270 aa, Oryza sativa
MNVVSPAPYYSSYPAVTDFLKSGLYRWAGDAKMFDGDTYVELVCSPSNPDGGIREAVLKSGDGVAVHDLAYYWPQYTPITSAAAHDIMLFTVSKCTGHAGTRLGWALVKDRAVAQKMSKFIELNTIGVSKDSQLRAAKILKAITDGYDRAPAAGDDDDDSSRLFHFARRKMVSRWAKLRAAVAASGIFTLPDELPGHCTFANETVSAYPPFAWLRCGKEGVDDLKGYLRERKIISRGGGKFGADGRVVRISMLDTDEAFAIFVDRLAAMN

SEQ ID NO: 49570 - protein, 252 aa, Oryza sativa; identical to SEQ ID NO: 31347

SEQ ID NO: 49571 - protein, 4 aa, Oryza sativa
MPLQ

SEQ ID NO: 49572 - protein, 360 aa, Oryza sativa
MEVTPNHTQTVSGWAAMDESGKIVPFVFKRRENGVDDVTIKVKYCGMCHTDLHFIHNDWGITMYPVVPGHEITGVVTKVGTNVAGFKVGDRVGVGCIAASCLDCEHCRRSEENYCDKVALTYNGIFWDGSITYGGYSGMLVAHKRFVVRIPDTLPLDAAAPLLCAGITVYSPMKQHGMLQADAAGRRLGVVGLGGLGHVAVKFGKAFGLHVTVISTSPAKEREARENLKADNFVVSTDQKQMQAMTRSLDYIIDTVAATHSLGPILELLKVNGKLVLVGAPEKPVELPSFPLIFGKRTVSGSMTGGMKETQEMMDICGEHNITCDIEIVSTDRINDALARLARNDVRYRFVINVGGDSKL

SEQ ID NO: 49573 - protein, 425 aa, Oryza sativa
MAPLPAAATATASSAATPADDEAHSLLPSTPSNEEDDDDLEERAYEATEKVIVSISDFPDADDDEEESGLATSTAASGIPPFSWRKLWLFTGPGFLMSIAFLDPGNLEGDLQAGAVAGDTLLWLLLWATSMGLLVQLLAARVGVATGRHLAELCRDEYPSWARRALWLMAEVAMVGADIQEVIGSAIAIKILSRGFLPLWAGVVITALDCFIFLSLENYGVRKLEAVFAILIATMAVSFAWMFTDTKPNMKNLFIGILVPKLSSRTIRQAVGVVGCVIMPHNVFLHSALVQSRKIDPNKEHQVREALRYYSIESTIALAVSFMINLFVTTVFAKGFYGTKEAGNIGLENAGQYLQEKFGGGFFPILYIWGIGLLAAGQSSTITGTYAGQFIMGGFLNLKLKKMDQVTHHPKLCDCANDNCRTLLR

SEQ ID NO: 49574 - protein, 387 aa, Oryza sativa
MAAEADARKVCGLPERVQLHGAMLALQFGYAGFHVVSRFALNMGIGKLVFPVYRNIIALILLVPFAYFLEKKDRPQLTLSFVVQFFLLALCGITANQGFYLLGLDNTSPTFASAIQNSVPAITFAMAAALRIERVRLDRRDGVAKVLGTLACVAGASVITLYKGPTIFGPKLQLQAVAEVPLRAAIAGEGKNWTLGCVYLIGHCLSWSGWLVLQAPVLKKYPARLSVTSYTCFFGVIQFLIIAAFMERDADAWAFHSGSELFTILYAGFIASGVAFAVQIWCIDRGGPVFVAVYQPVQTLVVAIMASLTLGESFYLGGIIGAVFIIAGLYLVLWGKSHERARLAKDAAAIATDRDAAPCRIIAAGKQSSSVTQPLLLPTSSSSDNAV

SEQ ID NO: 49575 - protein, 198 aa, Oryza sativa
MILLNEVDKLDLASLIGWVAFRQGVECGFQGRTNKLVDGCYSFWQGAALALTQKLMTVVDEQLKSSYSSKRPPGDDACGTSSSTEAAYYAKFGFDFIEKSNQIGPLFHNIALQQYILLCAQVLDGGLRDKPGKNRDHYHSCYCLSGLSVSQYSAMVDSDACPLPQHVLGPYSNLLEPIHPLYNVVLDKYHTAYEFFSS

SEQ ID NO: 49576 - protein, 318 aa, Oryza sativa
MVEYLGMQNLINAVKNSVGLTEGKLLFGGTGNLSGKIVWGALDDVVMGGVSESTFQIQPTGSETDGPTGLFKGTVSTSNNGGFTSIRTKNFTVPEDLSAYDGIELRVKGDGRRYKLIVRTSFEWDTVGYIASFDTTKGEWQSVKLPFSSLNPVFRARTMPDAAPFDASNVTSLQLMFSKFEYDGKLNPTFTEGSFELPFSSIRAYINEPITPRFVHVSSAGVTRPERPGLDLSKQPPAVRMNKELGSILTYKLKGEGLIRESGIPYTIVRPCALTEEPAGADLIFDQGDNITGKISREENCFHLCCSSGKSKCSRENL

SEQ ID NO: 49577 - protein, 272 aa, Oryza sativa
MGAGVVGCGGGWWRWRCEIRRPVDESTEKAGSLRRRRLHRRRRPGEAGSLRRCQLLRRRCPGCRRPDESTEKAGSLWQCQWLRRRCPGGRRPVPRDGGGSFLRPASPGQAVARSLLLVVLDSLLARWRRFCQCMLECFLYHGSISQVSQDFSPPFSHVDPRRQQFVCHHSSSSVGLGIWMWAPSSSVFPTSSFHARFVVRVELTLLRFNDELRGLLLLSPVMPPQNLRLSSKPPFCAVFVEATGWGLPVCQACCTPKEAQGCIRRGIAAAPC

SEQ ID NO: 49578 - protein, 530 aa, Oryza sativa
MGMAAVLLLSFLLLAAPAAAINILRRSLAAQTKGDLASITAGNPLVANAMNDRLKNLTDAFAQQMGKEFHYCIKDTDDEWNIAFNFSTDPTFLSNCMQATDGDVPQRVCTAAEMKFYFESFLDSNGRKNYVRPNKNCNLTSWMDGCEAGWACSAGPDQNINLQDAVNFPSRTLDCRGCCAGFFCPHGLTCMIPCPLGAYCPESTLNKTTGICDPYNYQPPPGKPNHTCGGADRWADVVSTDDVFCPAGFYCPSTIKKLSCSSGFYCRKGSTSQTKCFHKGSCKPNSVNQDITIFGALLVGALSLVLLIIYNFSGQLLTNREKKQAKSREAAARHAKETAMARERWKSAKDVAKKHAVGLQSSLSRTFSRKKTLRTHEPSKGAVETDVEPSKGSGEKKSNLTDMMRSLEENPEKGEGFNVEIGEKKKTKGRHAHTQSQIFKYAYGQIEKEKAMEQQNKNLTFSGVISMATDEDIRTRPRIEIAFKDLTLTLKGSKKKTVKVCDRKAYAWSGSCCDGPIRCREDHILECNCR

SEQ ID NO: 49579 - protein, 369 aa, Oryza sativa
MSNLSEPSKEAVSADDSSAVQKTGAWSNTLNILLQQTSVYGVAAGYCLSASLLSIINKWAVMKFPCPGALTALQYFTSVVGVLLCGQLKLIEHDGLNLRTMWKFLPAAVMFYISIFTNSELLLHANVDTFIVFRSAVPIFVAIGETFYLHQPWPSLKTWLSLSTILGGSVIYVFTDNQFTVTAYTWAVAYLASMSIDFVYIKHVVMTIGLNTWGLVLYNNLEAFMLFPLEMLLTGELNQMKGDNAKVTNWLSSDVILPVALSCLFGLSISFFGFSCRRAISATGFTVLGIVNKLLTVVINLLIWDKHASFVGTIGLLICMSGSVLYQQSTTKPKAPKAEPKEENDEEQQKLLEMQQGHESSSTQKQTSS

SEQ ID NO: 49580 - protein, 239 aa, Oryza sativa
MSKKIVVKLDLHDNKDKQKAMKAVSSVIGIDAISMDMASRKMTVIGTVDPVDVVSKLRKASWAAYIESVGPAKEPEKKEEKKEEAKKDAGGGDGDGKKEGGDGKKEEGGDGKKEGEGKKEGDGGGDKKEGEGKKEGDGGGDKKDGNGDGKKEGDAKAAKKEEGGGGGGDGGGKKPAAVAPMPMPMPLHHLPPQYFNMEYMNQYHRPPPPPPAYPYVPPPQYYYVRNMSMEENPNSCAIC

SEQ ID NO: 49581 - protein, 256 aa, Oryza sativa
MATAEKKRPRSRSGGGGGGGVEKRPSRKQILGRKKAVEELIRKAVAVKDHLAQFPDFHKYQRNGLLVYLESGHGNQLPLSTRKYIQNLLKVNMEGQYGPEWPSEEKIKRREMVAPEARYIFVRQSSNAITTQNIMKQDSGLEFTHEACNEDRLIGFVHYRFVLEEDVPVVYVYELQMVPSAQGKGLGKFLMELIELIACKSQMGAVMLTVQKANNLAMAFYKKLSDCWLKHFNVTLILQICNIQYFAITSRSTDWA

SEQ ID NO: 49582 - protein, 369 aa, Oryza sativa
MEKPLQLCPGSVKIDFASASYAGKADIAATAAALLHALGPPRTPPCYQFPLAKVNSSLPLWPPVICPSTFAQKRPMSLPSPPPAKKLQVQQSSSMLPQDFPKLEVLPVEKPTKLQVRRSPQHVSPALKQDSPKMERPLLPRPATFIDVMLSSQKPSSEMWSETKDVTLPRKTNCSCKYSKCLKLYCECFEKGRYCIGCNCTNCCNNVNHENARQDAINVALERNPAAFMPKVLNSTAHNCESKAAEGDIVGKHTKGCKCKRTECLKKYCEGFKASVFCSENCRCTGCKNYKSNADRISQKNTVHAHHVQNPASSGMVGQSVIIFHAAENDSSLSLAASVSDHSINNNTSHVILLQHTFQICHGPCFLIG

SEQ ID NO: 49583 - protein, 433 aa, Oryza sativa
MAAIDLSSPARSSPAPLSPRRGSLHLLLRRPRRPTLRCSLDAAPKQAQAQGPPAAVAAEEAPTARKECYGVFCTTYDLRADEKTKSWKSLVNVAVSGAAGMISNHLLFKLASGEVFGPDQPIALKLLGSERSIQALEGVAMELEDSLYPLLREVSIGIDPYVVFEDAEWALLIGAKPRGPGMERSALLDINGQIFAEQGKALNSVASRDVKVIVVGNPCNTNALICLKNAPNIPAKNFHALTRLDENRAKCQLALKAGVFYDKVSNMTIWGNHSTTQVPDFLNAKINGRPVKEVIKDTKWLEDEFTKTVQKRGGVLIQKWGRSSAASTAVSIVDAIRSLVNPTPEGDWFSTGVYTTGNPYGIAEDIVFSMPCRSKGDGDYELVKDVAMDDFLWERIKKSEAELLAEKRCVAHLTGEGNAFCGLPGDTMLPGEM

SEQ ID NO: 49584 - protein, 378 aa, Oryza sativa
MLRCFLVAAAAVALAAAAAAPARAIPFTESDLSSEESLRALYERWRSRYTVSRPAASGGVGNDDGEARRRFNVFVENARYIHEANRRGGRPFRLALNKFADMTTDEFRRTYAGSRARHHRSLSGGRGGEGGSFRYGGDDEDNLPPAVDWRERGAVTGIKDQGQCGSCWAFSTVAAVEGVNKIKTGRLVTLSEQELVDCDTGDNQGCDGGLMDYAFQFIKRNGGITTESNYPYRAEQGRCNKAKASSHDVTIDGYEDVPANDESALQKAVANQPVAVAVEASGQDFQFYSEGVFTGECGTDLDHGVAAVGYGITRDGTKYWIVKNSWGEDWGERGYIRMQRGVSSDSNGLCGIAMEASYPVKSGARNAAASNRVVKDEM

SEQ ID NO: 49585 - protein, 64 aa, Oryza sativa
MEVSCFFNDVDCSGKSSVQSNSCCLTLQGTSSPSDGWCSPRASLKLQLAPPTSISSIQQVPYIH

SEQ ID NO: 49586 - protein, 518 aa, Oryza sativa
MQFMMPLDTNACAQPMRRAGEGAGTERLMERLNIGGMTQEKALRKRCFGDGVTGTARCVFTSDADRDTPHLRTQSSRKNYADASHVSAVILGGGTGVQLFPLTSTRATPAVPVGGCYRLIDIPMSNCFNSGINKIFVMTQFNSASLNRHIHHTYLGGGINFTDGSVQVLAATQMPDEPAGWFQGTADAIRKFMWILEDHYNQNNIEHVVILCGDQLYRMNYMELVQKHVDDNADITISCAPIDGSRASDYGLVKFDDSGRVIQFLEKPEGADLESMKVDTSFLSYAIDDKQKYPYIASMGIYVLKKDVLLDILKSKYAHLQDFGSEILPRAVLEHNVKACVFTEYWEDIGTIKSFFDANLALTEQPPKFEFYDPKTPFFTSPRYLPPARLEKCKIKDAIISDGCSFSECTIEHSVIGISSRVSIGCELKDTMMMGADQYETEEETSKLLFEGKVPIGIGENTKIRNCIIDMNARIGRNVIIANTQGVQESDHPEEGYYIRSGIVVILKNATIKDGTVI

SEQ ID NO: 49587 - protein, 292 aa, Oryza sativa
MPFHFQFPWLPNNPTSSSSSPTKPPSPAIPNPFLPIQAGLASFLSSLPLPRAAFPPPPWARISSASASAASASALPVAEIEERLAGVPVYALANSSQEFVLVSSARGGGGGGGGARAAVPPPALGLLCFRREDADALLAQMDGDMAAGSTVVPVALNKVIQLKSDGVAFRFVPDSSQVANAMKLMENEGQYVNDGFPGVPVFQSRSLVLMSYNKRYRPVFFRKEDLDNSLHRASRDQQKPNPAVKMGDIQVSSLENIIKSMKDSSSSKWDDAVFIPPGFDLATSSKQSNHDN

SEQ ID NO: 49588 - protein, 123 aa, Oryza sativa
MVAWTLRPAAAGRAIRRAAYHSDGAPPPRKLRGPRFSSFNRNNHEIDALLEEVKNTPVNMITDDLMIRTVRHSFLARQEILYQNVLRSWVVVAAVLTGYSWGYNKFAESSTVGSEPPKEHEGK

SEQ ID NO: 49589 - protein, 306 aa, Oryza sativa; identical to SEQ ID NO: 30055

SEQ ID NO: 49590 - protein, 438 aa, Oryza sativa
MDAAAGGAPPRPAAGIRVRVPLVESVSCYCRVDGGLKTVVSARKFVPGAKLCMQPDIKPNKRKSRSSHKERCRTQAPLLPGLPDDLAITCLMRVPRLEHTNLRLVCKRWNRLLSGNYYYSLRKKLGMAEEWVFVFKRDRDRKISWHAFDPVHQVWKSLPPVPAEYSEAVGFGCAVLSGCYLYLFGGKDPVRGSMRRVVFYNARINKWLRAPDMLQKRHCFGSCVINNRLYVAGGECEGIQRTLRSAEFYDPNRNRWSYISEMSTGMVPFIGVVYDGKWFLKGLDSHRQVVSEVYMPTSNVWSVTADEMVTGWRNPSICFNGRLYSAECRDGCKLRVYDRDTRSWTRFMDSRRHLGNSRAFEAAALVSLNGKICIIRNNMSITLVDVSNTPTVIEINNAHMWDVFARKGQHRSFIANLWFTIAGRNFKTHIIHCQVLQV

SEQ ID NO: 49591 - protein, 282 aa, Oryza sativa
MMEEGEKQSSGGRWRCRWLVDVGRWRPSPAEFQAAAAVLPPHDRPAIHRFVREEDRKRALVSRLLKYSLVHHALGMPFHQIRINRTLEGKPYLNKNVNLPGFNFNTSHQGEYVGIASEPLCLVGLDIVCISKPQRETALEFINNFTSYLTDHEWNCIVTADSHDGMLTEFYRYWCLKEAFVKATGAGVGFGLQRLEFHHMNWTNISLCIDGEEARKWMFWLFKIDEMHLASIAKGHPEDAIDSFRRTLSDVVIQEGELHTAIEIPEEAFTLLTVEHLIQLHD

SEQ ID NO: 49592 - protein, 156 aa, Oryza sativa
MSRRNSRTIYVGNLPGDIREREVEDLFYKYGRIVDIDLKIPPRPPGYAFVEFEDPRDAQDAIYGRHGYDFDGHRLRVELAHGGRGPSFDRSSSYSSAGRRGAAKRTDYRVMVTGLPSSASWQDLKDHMRRAGDVCFSDVYREGGAMELLIIPTMRI

SEQ ID NO: 49593 - protein, 665 aa, Oryza sativa
MEDERFAAARTDPRFRAMRRKEAKVELDSRFTSMLTDPRFSSSSAPVDKHGRRRRKKGGRENPMLQYYLNQEEEEEKEKAKLVEEEEEEGDAEEQQGEEESSSSDDDDDDEDEEEDDDDEYSVGSDIAHYLMGRHDDTPMIDKETHRLAVVNMDWDHIKAVDLYMVMTSCLPKGGRVLSVSVYPSEFGLERMKIESTKGPAALVDVNGSDGEYSGGDDDDDDEEEEDSSDTEHDSEAENNKLRTYELNRLRYYYAVVVCDSSATANHLYMNLDGTELLKTSNVFDLQFIPDSMEFKHPARDVATEAPPSYKEPNFETRALQHSKVKLTWDDDEPERKKVLRRKFTDDQLDDLDMYLASDDSASDDEGADNHGDESLQSGAKRKLTREERLALLLQGDKSEEEQTDGEDMEITFNTELEDLSKRILDRKVNNEKTVWEKHQEKMKEKRKSRKRRSKDDDDDGYSSEDGLDEHDDFFDDEMSDEEIKPNKKQKAKAKDKGKGKGKDKLPEQHLEDEATREELELLVAADKDAGNGAKGYNLKRKKGTKGKKGKEQSVEDELPDIDLSKDERFSAMFNSHWFAVDPTDPQYKRSAAFMRKQAGIKGAHEPSLGGRGSGRGTLPPDDVPTDTHDQKPDGTSTEKLETMSAVKSLKRKLTALKNTSKSDR

SEQ ID NO: 49594 - protein, 345 aa, Oryza sativa
MSGILAWAADVVGGAGAANDDEADDARAVASAAMTPEQRLRAADLDAKAASLRRSIHDLRLRVPPPHVAQRLPHLHAHSLASSAALALQLNAHSSTKEQALQREITLQEENAAYEKAISNCRQKIQEKQMEVTLLRSNLKEMEISEQDLKAQLDNAQNEQYASQNKASAAASDNTGNALMEAESLINLKSNDLKEKNEELKLLESSVRVLEMEWSVVEGESLKNPTPAQREKVLEKQLHSLIEQLTAKQAQAEGLIVDVHAKEKELERLNNLHKNLQSRNNDGSVARNPFRAVHEDSDAKAVRRPYQFGLRTEGLKRLMILRSASVLYILVLHIVVFIKLSVSKQ

SEQ ID NO: 49595 - protein, 251 aa, Oryza sativa
MMLGQCLFRCGGAAVLLSSDPAHRGRAKMELRRLVRSTTAASDDAYSCIMQREDDDGLRGVSISKALPKAALRAFAANLQRLLPRVLPAMEIARLAADLAWQNLLQRRRHRGQTKLKINLKAGVDHICLHAGGVAVIDAVKKSFGLEERDVEPSRMTLHRWGNTSASSVWHVLSYMEAKGRLRRGDKVLMVTFGSGFKCNSCVWEVTGDMADKGAWADCIDAYPPESKPSPFLEKFAWVNDEVADESSSPF

SEQ ID NO: 49596 - protein, 269 aa, Oryza sativa
MKVQCDVCAAEAASVFCCADEAALCDACDHRVHRANKLAGKHRRFSLLNPSASGRSPTSTTAPLCDICQEKRGFLFCKEDRAILCRECDVPVHTASELTMRHSRYLLTGVRLSSEPAASPAPPSEEENSSSFCCSADDAVPAPAAPATSHGGSSGSSSISEYLTTLPGWHVEDFLVDDATAEAAAAAAATSSGISANGPCQGVTRIGGLQESAGYPAWMAQQQLCCDGLVAGDASPASRERWVPQMYADQLAAGSKRSRTSTASSYSYW

SEQ ID NO: 49597 - protein, 225 aa, Oryza sativa
MDPNAVHVQMPAVDTEACCDDEKNPQPAREIISDHVAVRPTPAVGKTLSGASDLLKLLPTGTVLAFQALAPSFSNHGVCHAVANRYLVLALIGACAASCMLLSFTDSLIGHDGKLYYGVATLRGFRPFNFAGTREEHGTVFKDLSRFRITALDFVHAFFSAVVFLAVAFADAAVQTCLFPEAEADMRELLVNLPLGAGFLSSMVFMIFPTTRKSIGYTDMTPHSQ

SEQ ID NO: 49598 - protein, 247 aa, Oryza sativa
MKLRPKRPGWKSLMPLQLSRKSALRFFLFPKVQAAGQSPDDTPVYLNVYDLTPMNGYVYWAGLGIFHSGIEVHGVEYAFGAHDYPSSGVFEVEPRQCPGFRFRKSIFLGTTCLDPIQVRQFMELQSVNYNGDTYHLITKNCNHFCKDMCYKLTGNKIPKWVNRLARIGAICNCLLPESLKISPVGHDPNSRPEDCEKRRLRNPLSCFSSISSQRQLPPSSPFPTSPVKEPLAYSSSRKSSAPSLKSR

SEQ ID NO: 49599 - protein, 313 aa, Oryza sativa
MAQLGWVAGPITLLLFAAITFYTCGLLSDCYRVGDPATGKRNYTYTDAVKSYLGGWHVWFCGFCQYVNMFGTGIGYTITASISAAAINKSNCYHWRGHGTDCSQNTSAYIIGFGVLQALFCQLPNFHQLWWLSIIAAVMSFSYAAIAVGLSLAQTIMDPLGRTTLTGTVVGVDVDATQKVWLTFQALGNVAFAYSYAIILIEIQDTLRSPPPENATMRRATAAGISTTTGFYLLCGCLGYSAFGNAAPGNILTGFGFYEPYWLVDVANACIVVHLVGGFQVFCQPPAPPPSRASSTRSRPTCPSRPGPDSTSP

SEQ ID NO: 49600 - protein, 135 aa, Oryza sativa; identical to SEQ ID NO: 29290

SEQ ID NO: 49601 - protein, 363 aa, Oryza sativa
MGNGKVYATVVLIRLIYAGMHILTKASFNEGASTTVFVFYRHAVAAIFLLPFAYFLEIRKKQAPPLTFRLSAKIFVHGFYGMAGTINLYSIGLNYASATSSSAIFNIVPVVAFILAVMFRMETLNLKSTHGMAKASGILLCIGGVIVLALYQGPEFKSLNHHQLLHHASAAAAAAAHSKKNWALGIFLMTTSVVIWSFWTVKQGPLLLEYPSKLMNTTLQCVFASVQSLVIALVLERDFSRWILPGVVSLVGVLFTGIVVAAISYYLQIWVIEKKGPVFLSMSMPLSLVFTMAIASFLLGEDVSLGSIIGSLLLVAGLYNVLWGKSREEHGGGGVVVAGAGTAGGEKDGAVAPAAADVVMAKV

SEQ ID NO: 49602 - protein, 266 aa, Oryza sativa
MPRARVVHVMLLLFVALGACRATHNITAILADHRDLAEFGRQLTATGLADDIDGRNTITVLAVDDAHMAQLRARGLPREALRHVLSLHVLVDYYDDAKLHRLPGGSAVVSTLFQASGDAPGSEGMVKIAVRRGGRVAFVPQDVDDARANVFYVKSVHEAPYNISVLQVSAVITSPAAEAPSSATESKPNSTDASSKHGPPNAGAHAAPSPVGQGSSSDDGADEGKKSGDGGDGGKKNGASVGAAPRGLPFALAFLMAASAILVVNW

SEQ ID NO: 49603 - protein, 147 aa, Oryza sativa
MNRRKELAPCGGGGGCIVVCGREVATPFLALRAVTSRGLHRLDLLSPGACCSWCMMIARRRGGGSRASNAKVPSVKIHRISLPHPRKSIQEDNSLFATNRVIQLVWGFRCGLLLSMCFLPACSMQGLLFGLSSRSSDLMTNSVDISC

SEQ ID NO: 49604 - protein, 110 aa, Oryza sativa; identical to SEQ ID NO: 30054

SEQ ID NO: 49605 - protein, 563 aa, Oryza sativa
MRSRSLLLVALATLLLHASASASDDDLDYLIDNADDIPANDPDGWLQEGSPDDDDDDDLFHHGQAQDHPIDETHVFLLSAANFSDFLASHRHVMVEFYAPWCAHCQALAPDYAAAAADLSPLAHQVALAKVDATEDTDLAQKYDVQGFPTILFFIDGVPKDYNGARTKEAIVSWVNKKLAPGVQNITTVDEAEKILTGEDKAILAVLDSLSGAHSDEIAAASRLEDAINFYQTSNPDVAKLFHLDPAAKRPSLVLLKKQEEEKLTFYDGPFKASAIADFVSANKLPLVNTLTQETAPSIFDNPIKKQILLFVVANESSKFLPIFKEASKSFKGKLLFVFVERDNEEVGEPVANYFGITGQETTVLAYTGNEDARNFFLDGEISVENIKRFAEDFLEEKLTPFYKSEPVPESNEGDVKIVVGKNLDQIVLDESKDALLEIYAPWCGHCQELEPTYNKLGKHLRGIDSLVIAKMDGTANEHPRAKPDGFPTILFYPAGKKSFEPITFEGDRTVVEMYKFIKKHASIPFKLKRPDSSATKTEKDQSTASTNLRGERSSGTNFKDEL

SEQ ID NO: 49606 - protein, 152 aa, Oryza sativa; identical to SEQ ID NO: 46378

SEQ ID NO: 49607 - protein, 394 aa, Oryza sativa
MAAETFLFTSESVNEGHPDKLCDQVSDAVLDACLAQDPDSKVACETCTKTNMVMVFGEITTKATVDYEKIVRDTCRGIGFVSDDVGLDADRCKVLVNIEEQSPDIAQGVHGHFTKRPEEIGAGDQGHMFGYATDETPELMPLSHVLATKLGARLTEVRKNGTCAWLRPDGKTQVTVEYLNDAGAMVPVRVHTVLISTQHDETVTNDEIAADLKEHVIKPVIPDKYLDEKTVFHLNPSGRFVIGGPHGDAGLTGRKIIIDTYGGWGAHGGGAFSGKDPTKVDRSGAYIARQAAKSIVASGLARRCIVQVSYAIGVPESLSVFVDSYGTGKIPDKEILKIVKENFDFRPGMMTINLDLKRGGNRFIKTAAYGHFGREDPDFTWEVVKPLKYEKASS

SEQ ID NO: 49608 - protein, 554 aa, Oryza sativa; identical to SEQ ID NO: 48859

SEQ ID NO: 49609 - protein, 470 aa, Oryza sativa; identical to SEQ ID NO: 29535

SEQ ID NO: 49610 - protein, 238 aa, Oryza sativa
MCGIKQEMSGESSGSPCSSASAERQHQTVWTAPPKRPAGRTKFRETRHPVFRGVRRRGNAGRWVCEVRVPGRRGCRLWLGTFDTAEGAARAHDAAMLAINAGGGGGGGACCLNFADSAWLLAVPRSYRTLANVRHAVAEAVEDFFRRRLADDALSATSSSSTTPSTPRTDDDEESAATDGDESSSPASDLAFELDVLSDMGWDLYYASLAQGMLMEPPSAALGDDGDAILADVPLWSY

SEQ ID NO: 49611 - protein, 499 aa, Oryza sativa; identical to SEQ ID NO: 33839

SEQ ID NO: 49612 - protein, 58 aa, Oryza sativa; identical to SEQ ID NO: 36283

SEQ ID NO: 49613 - protein, 378 aa, Oryza sativa
MDDAIAALPPELVSEILLRLRPDEPEHLFRASLVCKAWLRAICDPVFLRRYRAFHGSPPLLGLLHRLRVIDGDPAPRLARTTAAPLSPDPAFLRALDCRHGRVLLHASNLGLIVWDPVTGEQHRLPESGIPWLIYTAAVFCAVGGCDHLDCHGGPFRVVFVATDDDDELVKGSVYSSETGVWSTPATLDDGYQSWEERWQAARSRGEYYRTPYVHPKRCALVGDEIYFTLRNGNTIIEYNWGKNRLFMFDPPTSDLYYIALTVMENGSLGFAGIEGSSLNVWSRKVNPQGAAEWVLCRIIELEKIIPVVDLSDEACVVGSAEGLGVIFVSTGVGLFTIELKSRRVKKLEEPGVYFSVLPYMSFYTPDRGTLLSLARTH

SEQ ID NO: 49614 - protein, 326 aa, Oryza sativa
MAVYIAREATKLWRKVCAEIAVELQLLFEKWRLLLAGLVFQYIHGLAARGVHYLHRPGPLLQDLGFMALPELGQDKGYVSESVFTFIFISFLLWSFHPFIYHSKRFYTVLLWRRVLAFLVASQFLRIITFYSTQLPGPNYHCREGSKMATLPPPHNVLEVLLINFPRGVLFGCGDLIFSSHMIFTLVFVRTYHKYGSKRLIKILAWLMAIIQSLLIIASRKHYSVDVVVAWYTVNLVVFFIDNKLPEMPDRTNGSSLLPVTAKDKDGRTKEELHKLEKDCKMKEEFHKLLNGNTVDSTDRRQRVQMNGKHGEDINHTLSDATPNGT

SEQ ID NO: 49615 - protein, 169 aa, Oryza sativa
MQAVREEEEQVVEEVVRAGAVAEEEEGPEEKEVAMVGEEMAEAEHDEEEAEAGASAKKNRIQVSTNKKPLYFYVNLAKRYMQNYDEVELSALGMAIGTVVTVAEILKNNGLATEKKILTSTIGTKDESKGRLVRKAKIEILLCKSENFNSIMSSKKSDRPKSAEEEIKV

SEQ ID NO: 49616 - protein, 423 aa, Oryza sativa
MDKLSGSARLIIVSDLDHTMVDHHDEENLSLLRFGALWESVYCQDSLLVFSTGRSPTLYKELRKEKPMLTPDITIMSVGTEITYGEAMVPDDGWEEYLNNKWDRNVVVEETAKFSELKLQPETEQRPHKVSFFVDKKSAQEVIKSLSGNMEKCGLDVKIIYSGGQDLDILPQGAGKGQALAYLLKKLSSCGKPPNNTLVCGDSGNDAELFSIPGVHGVMVSNAQEELLQWYAENAKGNPKIIHATERCAAGIIEAIGHFKLGPSVSPRDVGFPYVKEDHIKPTDAVVKFYVLYEKWRRAEVPKSDSVVQYFKNITHANGVIIQPSGLECSLHASVDALSSCYGEKQGKKYRTWVDRLFVSQSGSDSWLVRFDLWEAEGDARLCCLTSLALNVKPETPAGFLITHVHKTWLKGYSSADEQSSKL

SEQ ID NO: 49617 - protein, 450 aa, Oryza sativa
MAQWDALVDAALARLASRSLLRATRPIALAPPPAPPETFPCPGPWDRAAVEIRLDRATLHQWLAEGGEGSGQEEKVDEKLILFSGNDYMGLSSHPAIRHAAVKAAEEYGMGPRGSALICGYTTYHKMVEESLAELKKKEDCLLCPTGFSANMAVMTALGNISSLLAAGRKPAEDERIAIFSDALNHASIIDGIRLVERQQEVVSFVYKHCDMSHLELLLSSCSMEKKVVVTDSLFSMDGDFAPLPELVKLRRKYGFLLVIDDAHGTLVCGENGGGAPELFECENEIDISVGTLSKAAGCQGGFIACSTRWKRLIQSRGRSFIFSTALPVPVVASVYAALYVSREERWRRSVIWRHVQYFASLTKLNITSPIISIVVGSEKAALRAGRDMLRSGFHVTPIRPPTVPPNSCRLRITLSASHSSDDIKRLVDALTPWLPHKHDIQIYAVASKL

SEQ ID NO: 49618 - protein, 416 aa, Oryza sativa
MYVPQPSRSDAAGRDAGDQPRVYQVWRGSNEFFLRGRFIFGPDVRSIFLTMFLIVAPVVAFCVFVARHLIDDFPGDWGISVMVVVVVFTVYDLTLLLLTSGRDPGIIPRNTHPPEPEGFDGSNDSGVQTPQQLRLPRTKDVIVNGISVRIKYCDTCMLYRPPRCSHCSICNNCVERFDHHCPWVGQCIGLRNYRFFYMFVFSTTLLCLYVFAFCWVYIIKIRNAESLSVWKAMLKTPASIVLIIYCFLCVWFVGGLSVFHCYLMSTNQTTYENFRYRYDRRANPYNRGVLNNFLEIFCSRIPPSKNNFRARVTVEQGLQQTRVASRGFMSPNMGKPVGDLEMGRKPVPWDEPRTAADIRDLEAGLGGFLDEKEGRLTHASPDLSRDDLPADLMKGRAGTHSRRSSWVNRTGTSESE

SEQ ID NO: 49619 - protein, 136 aa, Oryza sativa; identical to SEQ ID NO: 30281

SEQ ID NO: 49620 - protein, 304 aa, Oryza sativa
MFWKDSGGRSSGGGGGLEQNGVGPFGQVRVLVVGDSGVGKSSLVHLILKGSAIARPAQTVGCAVGVKHITYGSAGGSSNNIISDVQRNFFVELWDVSGHERYRTCRSIFYTQINGVIFVYDLSQRKTKTNLNKWAVEVAETGTFSAPLGSGGPGGLPVPYLVIANKVDLVPRDGSRVSSGSLVDFARQWVEKQGLLPSSEELPLTDSFPGNSGLLSAAKEARYDKEAVIKFFRMLIRRRFFSNEPAAPSPWSLTPREDSILPVETLKDEVDSFQRKSGEDFMYKGVNPLPAQRNLASPPDLSPQ

SEQ ID NO: 49621 - protein, 187 aa, Oryza sativa
MAAVQAAISTCCSSSCLSRPPPPFARRRRFKVTAMAPQKKVNRYDEKWSKQWFGAGIFAEGSEEVEVDVFKKLERRKVLSTVEKAGLLSRAEELGVTLSSLEELGLLSKAEDLGLLSLVEAAAAASPDALASVSLPLLVAAIAAVVLVPDDSAALVALQAVLAAVLLAAAAGLFVGSVVLAGLQESD

SEQ ID NO: 49622 - protein, 39 aa, Oryza sativa
MSSSSLSPAGSSDGDSAGVVVAADHRREKRRLSNRESEL

SEQ ID NO: 49623 - protein, 140 aa, Oryza sativa
MRAQRPSLAAAGNPVLALLFLWVLSWGHVTAEIDIANMTALQKHVSFFDRNKDGIITPSETIEGVVAIGCDFAFARDLAASVHAGLGPKTSPKDAPLPHLSIYINNIYRGMHRSDTGALDAKGRFVPAKFEEIFSKHAKK

SEQ ID NO: 49624 - protein, 229 aa, Oryza sativa
MAGSSSLASPHSLLLPLLLLFLLVAAAIGSYDPKAFCSKTTDIASCLRVFPTLPDIVTKAQDNKELYKRLVRYCSFKTYEATSLAESMIATTTAADPKISAPFFPQWKRDEAMTTKTPPGKCLLSCNKTIGEVDAILTCGHTYMEDRPPIIHQNLTVLFHGGHPPSLCKSGCLDGSSSEGEALLATKFNYIWSLLDLMKAVLPEYLSETGTATTTVPSPYVAAAAAPAP

SEQ ID NO: 49625 - protein, 300 aa, Oryza sativa
MRRQGQGQYGGGADINSMVAAQLHHYQTQQRVQQHPDNNYPGRDPGKAAEEQQYSAPKVRQSQWDRGGPNAPNQIPAYAYNEGQSAQGAQTFYDGQRSDLKVGLEKQPNKESRDRPRNDRFEARREDYNLPRTFEGLEQNFHEDIVILSKELHDAEDAENARHRERLNEINAQYQEKLLALRARQATYREEFLRKGSQARQQQYQQASMSSYANNVRPGETHGYTPIAAKPPPPPPAAAATAGGTYGEAHRGYTSAQYDNFRERPDYPEFRGRGRGEGHVLEHRGQFPGGRAYNSGGRRF

SEQ ID NO: 49626 - protein, 416 aa, Oryza sativa
MDPPRRQRRVSRRARMAPPPLHVELPFMDRQILVSRNSRGYFALGYSLPGEPFPSLHELLGAIYDHYHPQRESRDPAPPPLLPQCEEHVEGNTQLSLEQTLEEPEVATMEESPEPTTLGDPFTATTSSLPSAPHGTSEVSPSSRLRHHTSPESTIWTRDPADWPWIYHIRMDRGGSFHTYPALDGPFLNLYEAEDAINRHLESLKCPMFKEQDGVSPVERMIQKSLYWPDGTRKKYSRSQASQNVDKRRRQMVQVLLDKYNDDHDLVEDLAYELQDVVHYQLIVEGIKWFNHFNFTAKTSGADIDNLFFAEVMSSQGEEDWVVTCCCLIKSADNGICYGCKNDRNLDMKHPNDSDTYVGGHKDIVMPFETENWTESESDDDEDEEEEVKASRIRRMIEGLDDSDEPEDIFDPVFEP

SEQ ID NO: 49627 - protein, 223 aa, Oryza sativa
MARRVQLMDDLSVSEDSEDLDCKIKEAWEGAPLFSFDGNFVGMNLFLAMGRAFFLPWGTIQKHWASLQNKTGLPESNSLKVYRFGTSSTAEKSNSHPEVNNDILDPEQIHIDSMGYPKFPTHMFADGMILVNTFEETFGDLRGEGVWSKLSKKSCSNIDRSVVALASFSGERRFFACTGFFVEWNGSTVILTSASLVRSSGDENKIVDNLRVMLLVIIVSFAD

SEQ ID NO: 49628 - protein, 87 aa, Oryza sativa
MPCSGGIGAWAAATPASSGRWRRRGLEVVCEAAKTGTATGRRPDSVKKRERQNDRHRIRNHARKAEMRTRMKKVVHKMWCCPFSHCL

SEQ ID NO: 49629 - protein, 246 aa, Oryza sativa
MASCGASCLTIAALLLAACASSAAATSYTVGDASGWTIGVDYTSWAGSKSFKVGDSLVFKYASGAHTVVEVSAAGYLACAAANALGSDSSGSTTVALKTPGKHYFICTIAGHCAGGMKMEVDVSGSSSSSSGGGGGGGGGGSTPSSPSSPTPTTPNPSTPTPTTPYPSTPMPTTPYPSTPMTTPTTPYTTPTSPACSGGAGATPVTPVTPGTVPFMSYNGAGGLGPVALATIGMVCFVVFVQLGLL

SEQ ID NO: 49630 - protein, 371 aa, Oryza sativa
MLPSSAASSPPAPPPSPWDDVSWAESTSSTVLQHYNSLPKKGKPQGRESTVLAAFLLSTPQQDPRNLTVLSLATGTKCLGAARLNHHGDLVHDAHAEVVARRALLRLIYTEIGRSGASDWLVASGGVMPVPPSPSELLREQLDSVNGCDDVGFVQRKPGRGDTTLSMSCFDKITRWSVVGIQGALLSHILEPLYLSTITIGQSPTGASDGFSVENNIKKVLDARLSSLSSKLLLPFKLNKPLFYEAPIPPKEFQQTSGDLQPLTCGYSICWNKSGFHEVVLGTTGRKQGTSSKAACSPSTESLLCKRRLLEAFVLIEHPLVKKFHREEMSYRQIKDMAHEYQQTLELLRKAPFFSRWSAKPASLDSFTVSR

SEQ ID NO: 49631 - protein, 165 aa, Oryza sativa
MVSCPIFYLCQFYLKVHFGATKDALSRHFNKFGAVLKVVIVTNAATGQPTGSAYVEFLHKESAERALSLNGTSFMARILKVVRRSSHEAAHFYGWPGGGRTSMYARHGRMAYPRGGLPGSTFRGRAPMIAGARSLQWKREPSVTDSNTGATVALPSAEQVLPPAT

SEQ ID NO: 49632 - protein, 72 aa, Oryza sativa; identical to SEQ ID NO: 34293

SEQ ID NO: 49633 - protein, 471 aa, Oryza sativa
MDSVASWGLTPLAAADPLVHDLLEREKRRQRSGIELIASENFTSFAVMEALGSALTNKYSEGMPGARYYGGNDVIDEIENLCRDRALAAFRLDAASWGVNVQPYSGSPANFAAYTALLNPHDRIMGLDLPSGGHLTHGYYTAGGKKISATSIYFESLPYKVSAATGYIDYEKLEEKALDFRPKLIICGGSAYPRDWDYAKLRAVADKVGALLLCDMAHISGLVAAQEAANPFEYCDVVTTTTHKSLRGPRAGMIFYRKGPKPPKKGQPEGAVYDYEDKINFAVFPSLQGGPHNHQIAALAVALQQTMTPGFKAYAKQVKANAVAIGKYLMSKGYKMVTDGTENHLVLWDLRPLGLTGNKVEKMCDLCSITLNKNAVFGDSSALAPGGVRIGTPAMTSRGLVEKDFEQIGEFLHQAVTICLNIQKEHGKLLKDFSKGLVNNKDIENLKLEVEKFATSFDMPGFTLDSMKYKE

SEQ ID NO: 49634 - protein, 277 aa, Oryza sativa
MEDGVSTYTVDEALISMGFGKFQAFVLAYSGMAKISEAMEMMLLSFVGQSVQAEWELSAQAESLITSVVFVGMLVGAYSWGIVSDNYGRRVGFNFTALVTGGAGLLSAFAPNYLSLIVLRFMVGVGLGGGPVLSSWFLEFIPAPNRGTWMVIFSAFWTIGTIMEASLAWAVVPSLGWRWLLAFSSLPSFALLLFYPLTLESPRYLCMKGRTADAVQVLETMARLNRVALPSGHLMSGHRMELHELTDSSETSQLLSAKKTNPAAHSSKPRLGAAMRF

SEQ ID NO: 49635 - protein, 223 aa, Oryza sativa
MAASAPPPAATNPPASTAPTEDGEVEEGATPPRTSALGTANWGTATLVGVFAGLLYGGSKEASASVSKDAEVMLKMGSTTDKREQYRLMRDAMEKRFIRVAKGSLVGGVRLGMFTATFFGIQNLLIEKRGVHDVFNIAGAGSATAAAFGLILPGSPMWRARNVLVGSALGAGVCFPLGWIQLKLAEKANLEMASSKPTDLVEEQGNQSGVGAAIERLGRSLKK

SEQ ID NO: 49636 - protein, 351 aa, Oryza sativa; identical to SEQ ID NO: 33182

SEQ ID NO: 49637 - protein, 415 aa, Oryza sativa
MGSTALGGGAPARLGLAPKDGVFGSNLKQCGGFMLKTTPKVGSSSVRVRASVASSPQKQHSPKTSGVKSGEEVRIAVLGASGYTGAEIVRLLANHPQFRIKVMTADRKAGEQFGSVFPHLITQDLPNLVAVKDADFSNVDAVFCCLPHGTTQEIIKGLPQELKIVDLSADFRLRDINEYAEWYGHSHRAPELQQEAVYGLTEVLRNEIRNARLVANPGCYPTSIQLPLVPLIKAKLIKVSNIIIDAKSGVSGAGRGAKEANLYTEIAEGIHAYGIKGHRHVPEIEQGLSEAAESKVTISFTPNLICMKRGMQSTMFVEMAPGVTANDLYQHLKSTYEGEEFVKLLNGSSVPHTRHVVGSNYCFMNVFEDRIPGRAIIISVIDNLVKGASGQAVQNLNLMMGLPENTGLQYQPLFP

SEQ ID NO: 49638 - protein, 156 aa, Oryza sativa
MKALAVTLSYMVYDAACCYLNDDVRVDNTVHHLVSIVGIAAGLAYRRCGTEMVASLFVTEISSPLLHLREILKEFGIKDTDLNLLVDILFAVIFSVARMGFGPYLTYVTVTADNPILIKAMATGLQLVSAYWFLRILRMVRHKLGKKRPAPKVAGD

SEQ ID NO: 49639 - protein, 507 aa, Oryza sativa
MEINSAATLTLVSLLTLPILLALLTRKSSSKKRRPPGPWNLPLVGGLLHLLRSHPQVALRELASKYGPVMFLRMGQIDTVVVSSPAAAQEVLRDKDVMFASRPSLLVSEIFCYDNLDVGFAPYGAYWRMLRKLCTVELLSTKVVRQLAPVRNDETLTLVRNIKAASSGHGGGGGKKPVTLARLLTTCTNTITAKAAFGQACGVELQEQFLTALDVGLKFSGGFCFGDLFPSLRFIDAMTGLRSRLWRARGQLDSVFDKIIAQCEEHQGDSLVNVLLRIRDQGDLEFPFGTTNIKAIILDMFTGGTETTSSAAEWVMSELMRNPEVMAKVQAEVRRVFDNKSPQDHEGLIDNLRYMKMVIKETMRLNPVLPLLMPHLCRETCDIGGYEVVEGTRVVINSWAMARSPEYWDDAEEFKPERFEDGMADYKGSRFEYLPFGTGRRRCPGDTFGMVLLELIVARLLYYFDWSLPAGMQPDDVDMDFVVTATTRRKNHLQLVASPYKLAPIQI

SEQ ID NO: 49640 - protein, 358 aa, Oryza sativa
MSAYCGKYKDELIKNAAYIGTPGKGILAADESTGTIGKRFASINVENVEDNRRAFRELLFCTPGALQYISGVILFDETLYQKTKDGKPFVDVLKEAGALPGIKVDKGTIEVAGTDKETTTQGHDDLGKQCAKYYEAGARFAKWRAVLKIGPNQPSQLAIDLNAQGLACYAIICQENGLVPIVEPEILVDGPHDIDRCAYVSEVVLAACYKALNEHHVLLEGTLLKPNMVTPGSDAKKVAPEVIAEYTVRTLQRTVPPAVPAIVFLSGGQSEEEATLNLNAMNKLSAKKPWSLSFSFGRALQQSTLKAWAGKTENVEKARAAFLVRCKANSEATLGTYKGDAVLGEGAAESLHVKDYKY

SEQ ID NO: 49641 - protein, 258 aa, Oryza sativa
MDASYRRDGRGGGGGGGGGGSAPRSVEDIFKDFRARRTAILRALTHDVEDFYAQCDPEKENLCLYGYANEAWQVALPAEEVPTELPEPALGINFARDGMNRRDWLALVAVHSDSWLVSVAFYYAARLNRNDRKRLFGMMNDLPTVYEVVSGSRQSKERDRSGMDNSSRNKISSKHTSDVARVENNIKEEDEGYDEDDGDHSETLCGTCGGIYSADEFWIGCDVCERWYHGKCVKITPAKAESIKQYKCPSCSSKRPRQ

SEQ ID NO: 49642 - protein, 171 aa, Oryza sativa
MEMFPSKVAKAVFLCAAMLKNGHSTLDMFQQQMDTNGTLQRAQEFVYSNGKEQPPTAINIEKSLLKHLLFNQSPSKDVSLASVSMRPIPFAPVLEKLVLTEEKYGSVRRFYVETTEDNAIPLHLQQGMCDMNPPEKVLRLKGSDHAPFFSKPQALHKTLVEIATMPPVKAS

SEQ ID NO: 49643 - protein, 74 aa, Oryza sativa
MVRLRMSNDYIGRRLRARGCGGGGGGGGGSTTTTTGSPSSMSSPAKTAEPEPLCKPTPELDMVVDQPDFGFWSY

SEQ ID NO: 49644 - protein, 341 aa, Oryza sativa
MWMTERLHLHLSPGDVANRLELITKVYGLDRAVEYFDSMPDQLKQQQCYGSLLKCYAEANCVEKAEELFEKMRGMGMASSYAYNVMMRLYLQNGQVERVHSMHQAMEESGIVPDVSTTHTLVAVLRKKKTLVAAYVVAEDIKAIENVLEKANSCNSMYMCRIGVLLKMNDMVGAEKAYEEWESKHVYHDSRLINLLVDAYCKEGLMDKAEALVDQFIKKGRMPFANTCYKLAGGYFKVGQVSKAADLTKKALASASNEWIPDLTNVLMSLNYFAEQKNVEAAEEMMSLLQRLVTPTRDIYHGLLKTYVNAGKPVSDLLHRMKKDGMEADEETEKILAGEVH

SEQ ID NO: 49645 - protein, 461 aa, Oryza sativa
MEKKASILMNRYELGRMLGQGTFAKVYHARNLASNQSVAIKVIDKEKVLRVGMIDQIKREISIMRLVRHPNIVQLHEVMASKSKIYFAMEYVRGGELFSRVARGRLKEDAARKYFQQLIGAVDFCHSRGVYHRDLKPENLLVDENGNLKVSDFGLSAFKECQKQDGLLHTTCGTPAYVAPEIINKRGYDGAKADIWSCGVILFVLLAGYLPFHDSNLMEMYRKISKGDVKFPQWFTTDVRRLLSRLLDPNPNIRITVEKLVEHPWFKKGYKPAVMLSQPNESNNLKDVHTAFSADHKDNEGKAKEPASSLKPVSLNAFDIISLSKGFDLPGLFENDKEQKADSRFMTQKPASAIVSKLEQIAETESFKVKKQDGLVKLQGSKEGRKGQLAIDAEIFEVTPSFFVVEVKKSAGDTLEYEKFCNKGLRPSLRDICWDGQSEHPSLAQSSTLTQSSKSISRHAI

SEQ ID NO: 49646 - protein, 309 aa, Oryza sativa
MGVAAAAGRLLAAVDWEREAYPAYRDFFALPLFAVFFLVVRYLLDCFVFEWIGRKLIFGKEKVDYEKEETRKKIRKFKESAWKCVYFLSGEILSLSVTYNEPWFTNTKYFWVGPGDQVWPDQKIKWKLKAVYMYAAGFYTYSIFALMFWETRRSDFGVSMSHHVATVALIVLSYVFRFARVGSVVLAIHDASDVFLEVGKMAKYSHCDLLANVAFLLFVVSWVLLRLTYFPFWILRSTSYEVLLTLDKKKHNFDGPIYYYVFNSLLFSLLVLHIYWWVLIYRMLVRQIKTRNVGDDVRSDSEGEDEHED

SEQ ID NO: 49647 - protein, 220 aa, Oryza sativa; identical to SEQ ID NO: 31635

SEQ ID NO: 49648 - protein, 197 aa, Oryza sativa
MGGGKDKHDESDKGLFSNMMHGVAGGHGYPPHQGYPPQGYPPPPGAYPPPPGAYPPPPGAYPPPPGAYPPQHGYPQPGGYPPPGGYPQHGGYPPAGYPGSSGHQGGHGSSGGGHMGAMLAGGAAAAAAAYGAHKISSHGHGGHMGYGGHGGFGGYGHGYGGHHGGKFKHGKHGHHGKFKHGKHGHGMFGGGKFKKWK

SEQ ID NO: 49649 - protein, 259 aa, Oryza sativa
MGWGISRLIGLKAAVFLSVAYFFHRLDMTLLSFPLIYASVIAMLVSIASHPSIDLPLLLGKGSNGSFPVWSWIMFSPFLLFIHLFVLLRRFVKNEPLYTEIADGVYVGGWPSSVERLPPGEPAVIDCTCELPRSSTISENSYLCVATWDTRAPQPSQIESAVRWALRKRSQNKAVYVHCAYGHGRSVCVMCALLVALGLAEDWKAAEQMIREKRPSISMNSLHRKSLEEWAKHLLTPSKRSGESDVSYAILSDHTRKRH

SEQ ID NO: 49650 - protein, 492 aa, Oryza sativa
MVLSKAVSESDMSVHSTFASRYVRASLPRYRMPENSIPKEAAYQIINDELMLDGNPRLNLASFVTTWMEPECDKLIMAAINKNYVDMDEYPVTTELQNRCVNMIAHLFHAPLGEDETAVGVGTVGSSEAIMLAGLAFKRRWQNKRKAEGKPFDKPNIITGANVQVCWEKFARYFEVELKEVKLRDGYYVMDPEKAVDMVNENTICVAAILGSTLNGEFEDVKLLNDLLDKENKETGWETPIHVDAASGGFIAPFLYPELEWDFRLPWVKSINVSGHKYGLVYAGIGWCIWRNKEDLPEELIFHINYLGTDQPTFTLNFSKGSSQVIAQYYQLIRHGFEGYRNIMENCHENAMVLKEGLVKTGRFDIVSKDEGVPLVAFSLKDRSRHDEFEISDMLRRFGWIVPAYTMPPDAQHVTVLRVVIREEFSRTLAERLVLDIEKVMYQLDALPSRLMPPVPPAPLLVVAKKSELETQRSVTEAWKKFVLAKRTNGVC

SEQ ID NO: 49651 - protein, 321 aa, Oryza sativa; identical to SEQ ID NO: 28790

SEQ ID NO: 49652 - protein, 435 aa, Oryza sativa
MASEKHFKYVILGGGVAAGYAAREFAKQGVKPGELAIISKEAVAPYERPALSKGYLFPQNAARLPGFHVCVGSGGERLLPEWYSEKGIELILSTEIVKADLASKTLTSAVGATFTYEILIIATGSSVIKLSDFGTQGADSNNILYLREVDDADKLVAAIQAKKGGKAVIVGGGYIGLELSAALKINDFDVTMVFPEPWCMPRLFTADIAAFYESYYTNKGVKIVKGTVAVGFDADANGDVTAVNLKNGSVLEADIVVVGVGGRPLTTLFKGQVAEEKGGIKTDAFFETSVPGVYAVGDVATFPMKMYNELRRVEHVDHARKSAEQAVKAIKGKESGESVVEYDYLPYFYSRSFDLGWQFYGDNVGDTILFGDSDPTSAKPKFGSYWIKDGKVLGTFLEGGSPDENKAIAKVAKTQPPVANIEELKKEGLQFASKI

SEQ ID NO: 49653 - protein, 166 aa, Oryza sativa
MQGWHSQRLLGNGEIADPIIKDKGTVSVLKKDKTPKSSGSAKRKRTPTLEDDRIVPYKPDKLQNDSMVLDLGPPADWVKINVRRTKDCYEVYALVPGLLREEVHVQSDPAGRLIVTGEPEQLDNPWGVTPFKKVISLPSRIDPHQTSAVVTLHGQLFVRAPFEQSK

SEQ ID NO: 49654 - protein, 75 aa, Oryza sativa
MLGIFFLTWKTARALRSSVFSLKQKIFTEVYIQQDLKATKFVTNQKQIALKDPSFYTDVEEFVWRTRPSKIEMME

SEQ ID NO: 49655 - protein, 430 aa, Oryza sativa
MGSLAGGGGGGKVGLPALDVALAFPQATTASQFPPAVSDYYQFDDLLTDEEKTLRKKVRGIMEREIAPIMTEYWEKAEFPFHAIPKLATLGLAGGTTKGYGCPGLSLTASAISVAEVARVDASCSTFILVHSSLAMSTIALCGSEAQKQKYLPSLTQFRTIGCWALTEPDYGSDASSLRTAATKVPGGWHLDGQKRWIGNGTFADVLIILARNSDTNQLNGFIVKKGAPGLKCTKIENKIGLRMVQNADIVLNKVFVPDEDRLTGINSFQDINKVLAMSRIMVAWQPIGISMGVFDMCHRYLKERKQFGVPLAAFQLNQEKLVRMLGNIQAMLLVGWRLCKLYESGKMTPGHASLGKAWTSKKAREVVSLGRELLGGNGILADFLVAKAFCDLEPIFSYEGTYDINSLVTGREITGIASFKPAALTKSRL

SEQ ID NO: 49656 - protein, 397 aa, Oryza sativa
MFRQRDGRWRRRWRLVHPELRRRRAPHPPGLRPLARLHGPLGCRPAMDRGRPRDVAHCQRHRRGLLLLAPPWRRPEDHPLLRRRAAGGAPVLLRHAARVARPGGRAALPDAARPLGAVSRAEIAMPPLPRAGFAPQIFLSGDPLAAAASPGWMAIASQPFSVAGKWQTLFFWRPGDAAWTPQREPPMDRIDSAAFHGGFFYLTVRYWYLYAYDLRHGAGAPWPPPRVRSTFVYLDADRACELSRQGRSLRAAHVVAAADGVDLLLAVLYWECHRRSVQMVAKVFRMEWAAAAADLELSPVTDLGEHALLLGRGDALALSAAEFPAIRRNCVYFVEHDNAPHRHWAIAMDLGANASELIPHPQFQEDEPSEEDGKCAADRSLLPYSWFCLKQPFFKHK

SEQ ID NO: 49657 - protein, 145 aa, Oryza sativa
MAFGTYVVIAGYALGVLGRFTPEALTLQFTKGLLGWFLQVILIRVLLYTLGSGEAPLLDIVAYAGYGFAGTSLAMLVRVFWSPSYYFVLPWFSICTGVFLVKTMKRVLLGAPRSYERHPSRNHYFLLFLAVVQFPMLFWLGNISG

SEQ ID NO: 49658 - protein, 177 aa, Oryza sativa
MAPRSDSATGGAAAAQAHGSDFDSIDPLFHVLRVLPFSFLRPPRTRLRLPSNLALPSPMTVFALILLTYFAVVSGLVYDVIVEPPGIGSVQDPATGAVRPVVFLPGRVNGQYIIEGLSSGIMFVIGGIGIILLDLAVDRNRPRSLRVSFGGSGVAAIVIAYAMAMLFLRIKIPGYLW

SEQ ID NO: 49659 - protein, 149 aa, Oryza sativa
MGCCIGNLSKSQPLPDYKPKTSVRKKPRHLSIGKRRQCSSGLEAMENNVSVSVSLEGNISSLPNSIINDSNGKDTSFINHAAIAWAEMRRRWTGDQEKVPKEASQEPIISWCTTYDDLLSTSERFPQPIPLSEMVDFLVDIWHEEGLYD

SEQ ID NO: 49660 - protein, 182 aa, Oryza sativa
MEDAAARRERLRALRAAKDLLSTPDPAAAGQGQHHQNGNRETAPEQAEHPTLPAPLDAPEEASKENINPTDESEEVQNDGDMPAMKFRNYLPHDEQLRGGKVAPVSLPKFEDPISAETTEPKQVENPFGNIAPKNPNWDLKRDVQKRMDKLEKRTQKALAEIALEQQKEKEALGEGSDAAQD

SEQ ID NO: 49661 - protein, 149 aa, Oryza sativa; identical to SEQ ID NO: 30319

SEQ ID NO: 49662 - protein, 460 aa, Oryza sativa
MKHHHVARGRAEPRRMGNAAMVITMLLSLCVLTYIKARYCSTPFPKAAEEMEVVEIDEDYDSTRYKMTGPIGEEDFDPTRPTCYVTSKRSERCAAVGDIRVDGNHSKIYINPLDKEWRTKPYARLHDAVAMDDVREFTLVPFGGANHTAVPPLCTRNHSVPAFLFSSGGFAGNLYHDYTDVLVPLFTSTNHFGGEVQFLLSGIKDWWLDKFTPLFRQLSRYDVIDVDNDQEVHCFPRIFIGATFHRAMGIDPARSPGGVTVADFKRLLRRTFRLERAVASRTGAPRRDKPRLLIISRKSSRRFLNERAMAHAAALARFDVRIAEPDNHTDMPNFARLVNSADVMMGVHGAGLTNMVFLPSRAVLIQVVPFGGLEWLTRVTFKDRAKDMDVNYMEYNVSFDESSLRELYPRDHFYIQHPYDVHKKGWDAIKTVYLDKQNVELNLTKLTNTLERARDFLPEP

SEQ ID NO: 49663 - protein, 387 aa, Oryza sativa
MATPSPNPHLSMSINGGATVSAGWAATQPRRRRTVDHSSRSCLLRPSYGSTRGFGTRRIAVRSASQKNSSPPLMTTEQEAEDEVVLESPAHFRIYKSGKIDRLNRPPVLPAGLDEATGVTSKDVVLDADTGVSVRLFLPKLQEPSKKLPVVVFFHGGAFFIESAGSETYHNYVNSLAAAAGVLVVSVDYRLAPEHPLPAGYDDSWAALQWAASAQDGWIAEHGDTARLFVAGDSAGANIAHEMLVRAAASGGRPRMEGAILLHPWFGGSKEIEGEPEGGAAITAAMWNYACPGAAAGADDPRLNPLAAGGPVLEELACERMLVCAGGKDVLAARNRAYYDAVAASAWRGSAAWLESEGEGHVFFLGNSECENAKQLMDRIVAFIAGG

SEQ ID NO: 49664 - protein, 129 aa, Oryza sativa
MHGGLGRLAEGVGDDCILPARQRLEEGSETGLAQRDAADGSGGWLGARGAGGGDGGRLGARGTADGGRPDWRERRIRWRRPAWRERCGRRWRRRSRYEEELLVDVARSSALEGWPARGAGAGVPHVSRG

SEQ ID NO: 49665 - protein, 77 aa, Oryza sativa
MMVRTRLSSPIFHFIFINGGDDNTASIDLRSLCITASWWRRRHRRSNRRSREAAAPQCAATTPRYRCGRRMMKLLIN

SEQ ID NO: 49666 - protein, 239 aa, Oryza sativa
MGISKVIGIAGTTLLVTSVGLWKIGLRIVAVPFLATSTIAYIIAVASHNSINIPWILGKNSKGRFPIWSSVLFGPFLILARVYATVKRHMRKKEAVYNMITEGVYLGGWPFMLKHLPPGDPSVIDCTCELPRSDFVPTNEYLCVPTWDTRAPTISQIEFAACWACEKRAKGKPVYVHCAFGHGRSACVVCAVLVALGIAENWKDAENIIREKRKIKMNAVHRKTLDDWSKYRASQKKDK

SEQ ID NO: 49667 - protein, 65 aa, Oryza sativa
MRPPDLSGRKRWAGEPANHSSSGAPTQEKEQVDGRARWILQFNELASPSSGCVCARTRYVHYVCR

SEQ ID NO: 49668 - protein, 295 aa, Oryza sativa
MATTTAAAMVVAMSVLLLGGGEAAAPRKPVDVAFEKNYVPTWAEDHIHYVDGGREVQLYLDKSTGTGFQTRGSYLFGHFSMHIKLVAGDSAGTVTAFYLSSQNSEHDEIDFEFLGNRTGEPYILQTNVFSGGKGDREQRIYLWFDPTKDYHSYSVLWNLYMIAFFVDDTPIRVFKNSKDLGVRYPFNQPMKLYSSLWNADDWATRGGREKTDWSRAPFVASYRGFHVDGCEASAEARYCATQGARWWDQPEFRDLDADQYRRLAWVRKTHTIYNYCDDRERYPAMSPECHRDRDA

SEQ ID NO: 49669 - protein, 392 aa, Oryza sativa
MAFSSTAAAASTAFVSGHRRRGGACHLLSSSFLIAFPRAVAARRCGEAAAAPRRVGAVTVRAQAAAGAGKKSVLIVNTNGGGHAVIGFYLAKDLLAAGHAVTVLTVGDEGSDKMKKPPFSRFSELTSAGATTVWGDPADVGAAVGGGASFDVVLDNNGKDLDAVKPVVDWAKAAGVAQFLFVSSAGIYTPSDEPPHVEGNAVKESAGHVGVEKYIAEQFGSWASFRPQYMIGSGNNKDCEEWFFDRIVRGRPVPIPGSGMQVTNISHVRDLAGMVALAVESPGAAAGRIFNCVSDRAVTFNGLVKMCAAAAGAQPEILHYDPAAVGVDAKKAFPFRNMHFYAEPRAAKEVLGWRSSTNLPEDLKERFAEYASSGRGQKEMSFDLDDKIIAAA

SEQ ID NO: 49670 - protein, 167 aa, Oryza sativa
MTDYHSNSKTVEFFEGDVDHSYAVAIAPESKYSVHNMPGFIIHRSLEAASDSSESVYKGSEDYFTFACRYGDTSPNLVSRLITGPVFNLNGQVLGIVVDDIEYKFWPKKPRKEDGSQEIIHEDLFYRAGYFLKVAMRVNNLQQDLRSMVKDNDWQNGLKKIATERRV

SEQ ID NO: 49671 - protein, 108 aa, Oryza sativa; identical to SEQ ID NO: 42364

SEQ ID NO: 49672 - protein, 89 aa, Oryza sativa
MAAGEGRARWVVATGSWQRRGAAATGAPSPSRQRAGDGPPPPGGGGEERLRRVAGWQAIPRVDPVAVALPCLDLAAAATGGRRQRWWRQ

SEQ ID NO: 49673 - protein, 489 aa, Oryza sativa; identical to SEQ ID NO: 31638

SEQ ID NO: 49674 - protein, 212 aa, Oryza sativa; identical to SEQ ID NO: 30192

SEQ ID NO: 49675 - protein, 121 aa, Oryza sativa
MDGASEKPPHKDYYKVLEVDYDASDDTIKLSYRRLALMWHPDKHKGDNDVTAKFQEINEAYTVLSDPAKRLEYDLSGCYELNRYTLREYLTRFKGMILTCNGLGIDHSSKWARHLRELEPH

SEQ ID NO: 49676 - protein, 245 aa, Oryza sativa
MQRDPTAFTGNPSFAYGHEADGYIANGPLGGQCNYRVPVSPAFGAPSGMTSPQLRTSLGGFEFQPSKVCPRNFIIFDQTDDKGRIMCHPALVSKLNPSATNAFPSYPEPICRSSGQDNGNLEEVSSSFKEDTREIDALLSSDEESDEDDVKSTGRTPDCFESDSLDSSSPPRSRKMHHSSSQSSVFHGSMDTVTHERMRNMVTVLRGIIPGGDQLDTASVIEEAVRYLKFLKMEAKKLGVEVSDN

SEQ ID NO: 49677 - protein, 46 aa, Oryza sativa
MNGIPNLCSFLLFPADSFAVLVVCLYFIKKKILEFCGCSTESHAPC

SEQ ID NO: 49678 - protein, 421 aa, Oryza sativa
MLPTSRNRPQQRPARSWYFISDMDFSDPKRKPRYLSKILMVALLTAMCVVMLTQPPCHRRTPSVFSIHEPGVTHVLVTGGAGYIGSHAALRLLKDSFRVTIVDNLSRGNMGAIKVLQNLFSEPGRLQFIYADLGDPKAVNRIFAENAFDAVMHFAAVAYVGESTLEPLRYYHNITSNTLVVLEAMAAHNVRTLIYSSTCATYGEPEKMPITEGTPQFPINPYGKAKKMAEDIILDFSKSKKADMAVMILRYFNVIGSDPEGRLGEAPKPELREHGRISGACFDAALGIIPGLKVKGTDYETPDGTCVRDYIDVTDLVDAHVKALNKAERGKVGIYNVGTGKGRSVKEFVEACKKATGVDIKVDYFPRRPGDYAEVYSDPAKTNSELNWTAQHTDLLESLRVAWTWQKKHRSGYGPPQAMVL

SEQ ID NO: 49679 - protein, 283 aa, Oryza sativa
MLADKAFPGHDTSEDWVLSLTSLSGALNGTTRTYYDGMLAEDGRSMKSICLLQLCRIGVIVYDWLDIPWLKNYYNFGFDHFEMSWRKVGLSGLIDLLLGHTGPFASGDWILPDLTIQGSLTLNSTLRTFPNTFYFSYATKRTRKLFGITVPSSVLGIHPMLFLRVFQMCMWRHPQNAPLPYKGYRDEDWEDNDGALNTISMTHPRIPTEHPNRLVVDDSDCHPLQPGIWYYKIIEADHILFIVNRERAGVQFDLLYDGIFQRCRKHAFRRSPPTVPNESSQSQ

SEQ ID NO: 49680 - protein, 228 aa, Oryza sativa
MSGPSAAPSSRWPPAARRGATWTTSLPQSTGSGTRTPCRRFPGGCQRRPRTSWMAASRGTRPTGQRRRSSWNTHSLPPPRPSTAGRSRRSKNVHPPRARCMTRSGTQTPTTRTTRCQPARRRGSVHWRAPPRPCRTGTPTKDGSRCTTRSPSPPSRRRPATRTTSSGQNCLTQRWSSSPSPRMASTMSRAMKQKRSNPPLGRAVTCTYILAVVKMKFFTRSILTGLNQ

SEQ ID NO: 49681 - protein, 376 aa, Oryza sativa
MADEDIQPIVCDNGTGMVKAGFAGDDAPRAVFPSIVGRPRHTGVMVGMGQKDAYVGDEAQAKRGILTLKYPIEHGIVNNWDDMEKIWHHTFYNELRVAPEDHPVLLTEAPLNPKANREKMTQIMFETFNCPAMYVAIQAVLSLYASGRTTGIVLDSGDGVSHTVPIYEGYTLPHAILRLDLAGRDLTDHLMKILTERGYSLTTSAEREIVRDIKEKLAYVALDYEQELETSRSSSSVEKSYEMPDGQVITIGSERFRCPEVLFQPSLVGMESPGIHEATYNSIMKCDVDIRKDLYGNVVLSGGSTMFPGIADRMSKEITSLAPSSMKVKVIAPPERKYSVWIGGSILASLSTFQQMWISKGEYDESGPGIVHMKCF

SEQ ID NO: 49682 - protein, 132 aa, Oryza sativa
MVVLQPDPFLSELTSMYERSTEKGSVWVTMKRSSMKCQARLKKMAAKGEAVEYRCLVRATDGKKNICTALSAKEYLKFQASYASVLKAHMHALKKRERKDKKKAAEVEKIPEKAPKKQKKAPSSKKSAGSKS

SEQ ID NO: 49683 - protein, 323 aa, Oryza sativa
MEEVQGMMDEVIFDHLHAAAFQGHPLGDTILGPVENIKSISKKDLEQYITTHYTCPRMVVSAAGAVNHDEVVDQVREFFTGFSTDPTTVDQLVEANPAIFTGSEVRVEQPEMPLTHFAIAFKGSSWANPSSIPLMVIQSILGTWNRSIGVGNCSGSALARGISNGNLAESMIAFNTNYRDTGLFGICTIAQPDSLYDLSQLIMQEFRRLAFEVSETEVARARNQLKSALLLHIDGSTAVSENNGRQMLTYGRVMPFLELFARIDAVDRDTVMETAKDFIIDKDIALAAVGPLTNLPELSWFRSHTYSDDEFSSRTFLQDAQNN

SEQ ID NO: 49684 - protein, 102 aa, Oryza sativa
MMKFELGLEKPEPRRALMSAGTIALAYVVGGLVPLLPYMFVPTADRAMATSVVVTLAALLFFGYVKGRFTGNRPFISAFQTAVIGALASAAAFGMAKAVQSI

SEQ ID NO: 49685 - protein, 301 aa, Oryza sativa
MGASWLLLHGAALMILMAAAAAGETTATASVVVGAAKCAGCGRKNMDAETAFKGLKVAIKCKNGSSEEYESKAVGELDGAGAFAVPLAADLRGADCVAQLHSAATDAPCPGQEPSKIEPLSSEGETGTFVAVAGKTHLPSSTSSSPECSSVAICFPCHRRHRMFHRKPMPEYQPPPSPVYGTPAPGCSCSPPSTPPGYGQPAPECPPADPGYGQPAPECPPPPTPAPECGQPAPEYPPSTPAYGTPAPECPPSTPEYGTPATACPPPTAPGYGSPSPFWPPVSPAYGTPSPTPIYRPPGSH

SEQ ID NO: 49686 - protein, 263 aa, Oryza sativa
MLELRLVQGSLLKKVLEAIRELVTDANFDCSGTGFSLQAMDSSHVALVALLLRSEGFEHYRCDRNLSMGMNLNNMAKMLRCAGNDDIITIKADDGSDTVTFMFESPNQDKIADFEMKLMDIDSEHLGIPDSEYQAIVRMPSSEFSRICKDLSSIGDTVIISVTKEGVKFSTAGDIGTANIVCRQNKTVDKPEDATIIEMQEPVSLTFALRYMNSFTKASPLSEQVTISLSSELPVVVEYKIAEMGYIRFYLAPKIEEDEEMKS

SEQ ID NO: 49687 - protein, 508 aa, Oryza sativa
MASPAPAPPAASSSAAGSAPPPRIGLAGLATMGQNLALNIAEKGFPISVYNRTAAKVDATVSRAEAEGALPVLGHRDPRGFVLSLSRPRTVVLLVQAGRAVDATIDALVPYLDAGDAIVDGGNEWYQNTERRIEEAAARGILYLGMGVSGGEEGARNGPSLMPGGHIDAYNNIRDILEKAAAQTEDGACVTFVGPGGAGNFVKMVHNGIEYGDMQLIAEAYDVLRRVGGLSNSEIADVFAEWNRGELESFLVEITADIFTVADPLDGSGGGGLVDKILDKTGMKGTGKWTVQQAAELAIAAPTIAASLDGRYLSGLKDERVAAAGVLEAEGMPSGLLETINVDKKMLVDRVRQALYASKICSYAQGMNLLRAKSVEKGWNLNLAELARIWKGGCIIRAKFLDRIKKAYDRNPELANLIVDREFAREMVQRQNAWRWVVARAVEAGISTPGMSASLSYFDTYRCSRLPANLIQAQRDLFGAHTYERIDRPGSFHTEWTKLARKTNGAAI

SEQ ID NO: 49688 - protein, 198 aa, Oryza sativa
MQPGHGGALYHFGTSGAAVAAATAVTHPLDVIKVRLQMQLAGQRGNLVGMGTIFTQMVQVEGPRSLYLGLAPALTRSVIYGGLRLGLYEPCKYVCNYAFGSTNFAFKFASGVIAGALATALTNPTEVLKVRSQMSPSRTSTIGVLKKIVAEEGVKALWKGVGPAMARAGCLTASQMATYDEAKQALLKWTPLEEGRVA

SEQ ID NO: 49689 - protein, 455 aa, Oryza sativa
MAMELSFTVHRREAVLVGPSVSTPCETKRLSDIDDQESLRYHVPGLLVYRGGQPPAPCVRDNDPSGIIRAALSRALVHYYPLAGRLREVEGRKLVIDCSGEGVVFVEADADVRLEEMEAAAAGGHGLRPSFPCVDQLVPDVRSSGRGGSVLSCPLVGIQVTRLLCGGFIVGTAVNHSVCDAMGIVQFLNAVADIAGGLPAPAVHATWSRELLDARSPPAPAFPHREYDMIDILPGGGREADNIVRSFLFSSTDIAALKEEALLPHPEHRLRGGSSTATSFEVLAAFLWRARTAALEVPADEEVRLVAVVGFSRIAALGLPSGYYGNTCAYPTVVMTAGELLRGCTLGDVVRLVQEAKAAVTAEYVRSTAECLVLRRRPRLARTNLFVVTDVRRVGFDRVDFGWGDPVYGGPARALPTVSLLVNVKGSSNVVGAVVSLPSLVMGRFSAELESFLNT

SEQ ID NO: 49690 - protein, 317 aa, Oryza sativa
MIMLLQEMENHPVQCMAKTNYDFLARNNYPMKQLVQRNSDGDSSPTKSGESHQEASAVSDSSLNGQHTSPQSVFVPSDINNNDSCGERDHGTKSVLSLGNTEAAFPPSKFDYNQPFACVSYPYGTDPYYGGVSTGYTSHAFVHPQITGAANSRMPLAVDPSVEEPIFVNAKQYNAILRRRQTRAKLEAQNKAVKGRKPYLHESRHHHAMKRARGSGGRFLTKKELLEQQQQQQQQKPPPASAQSPTGRARTSGGAVVLGKNLCPENSTSCSPSTPTGSEISSISFGGGMLAHQEHISFASADRHPTMNQNHRVPVMR

SEQ ID NO: 49691 - protein, 358 aa, Oryza sativa; identical to SEQ ID NO: 49640

SEQ ID NO: 49692 - protein, 62 aa, Oryza sativa
MAALPTGLQVSKRRIRALPTRWTSALHARLGHAIQLLRGHESMLAIASVCANVLYYVICINL

SEQ ID NO: 49693 - protein, 1427 aa, Oryza sativa
MALVPAGAAADPARGSSGSAFSYPQLTATNYTSWCIRVQAMMEDQGVWDAIEPAAGVAVDPRRDKKSKSHLLQSLPEDLLMQVAKKRSAKEVWDCLKTRFVGADRVREARLQTLKGEFGAMVMEPGETLDQYAGRITAMSVRHSVLGSTLSDSAIVKKLFDTVPEKFISLVAGIEQFYEIDNMPFEEAVGRLKAYEERVRKKKAAAGGVTADGQVLLTQAEWEARFRKDGSESSSPQKNKPPSDRGNRAQGGRGRGRGHGGGGGRGSAPRNSGAGGSGGGGRDKSHIKCYNCEEFGHYSTQCPHPKKKKVEAHLAQTDDANPALLLAVTEDEPASGLVVHEERVWPQLLLADSGAATGDIWFLDNGASNHMTGDRAKFRDLDVSITGSVKFGDASTVKIQGKGSILFSCKNGDQWLLQDVFYIPSLCCNMVSLGQLTETGHRVVMDEDVLEVFDKSPLRLVMRVRRTPNRLYRIELKLATPVCLLTRMDEPAWLWHARLGHVNFQAMKLLADKGMAGGIPAITHPNQLCQACLVAKQIRQPFPATANFRAEEPLELLHIDLCGPITPTTMAGNRYFMLIVDDFSRWMWMFVIKTKDQALEAFTKFKPLAENTAGRRIKTLRSDRGGEFLSGEFAQLCEQAGIQRHLTAPYSPQQNGVVERRNRSVMAMARSLMKGMSVPGRFWGEAVRHAVYLLNRLPTKAMGDRTPFEAWTGRKPQLGHLRVFGCIAHAKITTPNQKKLDDRSAPYVYLGVEEGSKAHRLFDPRCGRIHVSRDVIFEENVPWQWSVVAGEQNSTEFTVEEDGVDAPPAGAPAYPVPRYRAPSPAVPQSPPASPVGASSSLPTSPQSSPSSTPPSTPATGSAGPVASPGSGGDLRSDEGPVRFRSLEDIMREAPRVDLVEDEHDGDALLAEMEEPSSYREAAGQPAWENAMAQELQAIEKNSTWALTALPAGHKPIGLKWVYKLKKNTAGEVIKHKARLVAKGYVQRQGVDFEEVFAPVARLDTVRVILAIAADRRWEVHHLDVKSAFLNGDLEEEVYVAQPEGFVKRGEEHLVLRLSKALYGLRQAPRAWNTRLDKCLKELGFARCTQEQAVYTRGKGQAGVIVGVYVDDLIVTGENPHEIAMFKQQMMGEFEMSDLGLLSYYLGIEVIQGENGIAIKQAAYAKKILSQFGMQGCNPTSIPMEPRSLLHKDADGNPIDATEYRRVIGCLRYLLHTRPDLSYAVGVASRFMERPTTMHLKAVKMILRYLKGTLDSGLVFASGSGSLDITGFTDSDLAGDMDDRRSTGGMAFYVNSSLVSWCSQKQKTVALSSCEAEFMAATAAACHALWLRALLSEMMGTEAKRVKLFVDNKSAIALMKNPVFHGRSKHIDTRYHFIRECVESGQILIEFVRSEEQRADAMTKGLPAAKLATARHLLGVRDLRPRQD

SEQ ID NO: 49694 - protein, 120 aa, Oryza sativa; identical to SEQ ID NO: 29921

SEQ ID NO: 49695 - protein, 523 aa, Oryza sativa
MELTMASTMSLALLVLSAAYVLVALRRSRSSSSKPRRLPPSPPGWPVIGHLHLMSGMPHHALAELARTMRAPLFRMRLGSVPAVVISKPDLARAALTTNDAALASRPHLLSGQFLSFGCSDVTFAPAGPYHRMARRVVVSELLSARRVATYGAVRVKELRRLLAHLTKNTSPAKPVDLSECFLNLANDVLCRVAFGRRFPHGEGDKLGAVLAEAQDLFAGFTIGDFFPELEPVASTVTGLRRRLKKCLADLREACDVIVDEHISGNRQRIPGDRDEDFVDVLLRVQKSPDLEVPLTDDNLKALVLDMFVAGTDTTFATLEWVMTELVRHPRILKKAQEEVRRVVGDSGRVEESHLGELHYMRAIIKETFRLHPAVPLLVPRESVAPCTLGGYDIPARTRVFINTFAMGRDPEIWDNPLEYSPERFESAGGGGEIDLKDPDYKLLPFGGGRRGCPGYTFALATVQVSLASLLYHFEWALPAGVRAEDVNLDETFGLATRKKEPLFVAVRKSDAYEFKGEELSEV

SEQ ID NO: 49696 - protein, 89 aa, Oryza sativa
MLICLQFPCLPSGLASEGNHHPYSVFLFLLPFIRKLLSPLRIGALMRMLYYFYVWTSEINVYDCIMHHSELSTTCFFCSIFLSSYHTGA

SEQ ID NO: 49697 - protein, 87 aa, Oryza sativa
MSSRRSSRSSVSEEEINELISKLQSLLPSSRRRGANQASTTKLLKETCSYIKSLHREVDDLSDRLSDLMAGMDHNSPGAEIIRSLLR

SEQ ID NO: 49698 - protein, 427 aa, Oryza sativa
MNRMMFMACCYNDPDMLIDPDTVYPIRPECREDAAKTRFKPRPGLTLSPRRWKLLHNEEGVLDIAGMIKRVQRGGTHPNIKGEVWEFLLGCYDPKSNTEQKSQLRQQRRLEYEKLKTKCREMDTAVGSGRVITMPVITEDGQPIQDPNSVDAEQQASDTPLPKEVIQWKLTLHQIGLDVNRTDRQLVYYESQENLARLWDILAVYSWVDKDIGYCQGMSDLCSPMSILLEHEADAFWCFERLMRRVRGNFVSSSTSIGVRSQLTILSSVMKAVDPKLHEHLENLDGGEYLFAFRMLMVLFRREFSFVDTMYLWELMWSMEYNPGLFSMLESDNSTSQANTKDENALKQCGKFEQKNLQAAKKEEQIPLSVFIVASVIEARNKQILTDAKGLDDVVKILNDITGSLDAKKACRGALKIHERYLTTVKA

SEQ ID NO: 49699 - protein, 113 aa, Oryza sativa
MFSTSILLQILACALYNNWWPMLAALMYVLVPMPCLFFGGGSTQFFTSRDGGGWFNAAKFLTGASAMGSIAIPAILRHAGLIETGAMFIEFTSFFILVCTVMCFHRATLDEDW

SEQ ID NO: 49700 - protein, 265 aa, Oryza sativa
MGRRHGGGGGGGGGRGRGGRGRGGGEEDDLHLHKAARWGDLAAAESLCEANPLALNSRDRLSRTPLHLAAWAGHVELVKCLCKHKADVGAAAMDDTAAIHFASQKGHVEVVRELLASGASVKAKNRKGFTALHFASQNSHLELVKYLVKKGADIAAKTKGGQTALHVAEKDDVRDFLKECEQSLKKGGELPSEKKDDSVSTIAEKPDDDKSSGEATKDEDEAGFGEKRKSDGIAAALRSPELKKAKVSLGHLISANDMEEEEEAD

SEQ ID NO: 49701 - protein, 347 aa, Oryza sativa
MITENIVKLKELRTLIIDGGETGIEAKVFDDIFDSLKSLRVLIVETQSRRILQIPESIGYLKYLRYLSIEYRCRIFFPRTVTKLYHLRVLDFGEYGMLERSCSPENMSNLVNLQRVVGRSLGDFPNIGRLTLLRTLPTFRVKRDLLGYDIKQLKHLNKLQGKLVISGLQHVRSEEEAVEAKLAEKEHLKQLTLAWDDDNTSSNHDPAVLECLCPPMGLQVLEIIGYRGSYPGWMVGKHSGQLYLQKLELRQCSPLGPAPRLFECFVHLESLCLSHLSWHTLPDNMEQVRTLKVLMISHCKNMKVLPTLPQSLSRFKLSNCGHEFTRSCKQNGENWEKIQHILEKIIL

SEQ ID NO: 49702 - protein, 408 aa, Oryza sativa
MAPKVAVTEATGRQAASFVLGCVATLTVMLLFQYQAPPDYGRAARSPVQFSTSRDQLLLHCGGNGTAPPPPVIARGGEEANITGKPPTTATAVAEEQPPTKPPATFTASSPTHHIPATSTDLEEEGGEFRGLAAAVARAATDDRTVIITCVNHAFAAPDSLLDIFLQGFRVGDGTPELLRHVLVVAMDPTALTRCRAVHPHCYLYTMPGLDVDFTSEKFFASKDYLELVWSKLKLQRRILQLGYNFLFTDVDIVWLRNPFKHVAVYADMAISSDVFFGDPDNIDNFPNTGFFYVKPSARTIAMTKEWHEARSSHPGLNEQPVFNHIKKKLVKKLKLKVQYLDTAYIGGFCSYGKDLSKICTMHANCCIGLQSKISDLKGVLADWKNYTRLPPWAKPNARWTVPGKCIH

SEQ ID NO: 49703 - protein, 346 aa, Oryza sativa
MMRLGRAPCCYCFTEPHPAGGVAAAVRLRLLPPARAANTSSEPAARLRAVLEQVDEELRKGNDEAAPSLVRGSQGADGGLRFFGAARQVPQRLYTLDELKLNGIDTSAFLSPVDLTLGSIERNLQIAAVLGGLSVSAAFELSKLQVLFLFLGLLSLWSVDLVYFGGGVRNLILDTIGHNLSQKYRNRVIQHEAGHFLIAYLLGVLPKGYTITSLDTFIKKGSLNVQAGTAFVDFEFLQEVNSGKLSATMLNKFSCIALAGVATEYLLYGYAEGGLADIGQLDGLLKGLGFTQKKADSQVRWAVLNTVPALRRHKKARSQLAEAMSSGKSVGSCIGVIEENINSEDI

SEQ ID NO: 49704 - protein, 268 aa, Oryza sativa
MNSIIRLRAAAVRALSKDALPNSAKVGKLVAGIVRTKGYNRNVADHRQSTGALQIVNEAKLRNDQIHGNNLMHTIRGGVFLLGKAISCLVNTPKYRVSSTAAINYELGSRSRMNILGDRGNCMAASCSVLDVPHFGEPSNACGNGKSSEDDLNECSREYRLPHSNDGTKLSIDPNDLRTISLPEGQSPEVYLPGLVIHLVPVKNHTSPFQKTPVTRHKSRKNKSYKAFIANRQDFMDLVVTPRMFLDHLPWRCHYAMQRVIETRKRAC

SEQ ID NO: 49705 - protein, 281 aa, Oryza sativa; identical to SEQ ID NO: 38066

SEQ ID NO: 49706 - protein, 573 aa, Oryza sativa
MRLTVGQVHRHVLALASSRSCFVLGDNLPLRMLSLPRAVRFHQTAWLGTETVQDKSASLTLASLEGQNKVEYGKKEKATRIGGPKPSSRASALKVKPKVSSFNSKPAKSTLPKSAVVKKTLKIDESLFSAKSFEELGLPPLLIDRLNKEGLSTPTEVQSAAIPIISQKHDAVIQSYTGSGKTLAYLLPILSEIGPLKRPTEQDGSDKRSGVEAVIVAPSRELGMQIVREVEKILGPNDKRLVQQLVGGANRSRQEEALKKNKPLIVVGTPGRISEISAGGKLHTHGCRFLVLDEVDQLLSFNYREDMHRILEHVGRKSGTSSRDILGPLARRSERQTILVSATIPFSVIRAARSWGHDPVLVRAMSVVPLDSITVPRPVLSQTDANPNSPSNSVNQAAVNSLPPSLEHYYCISKAQHKVDTLRRCIHALEAQTVIAFMNNTKPLKDVVFKLEARGMKATELHGDLGKLARSTVLKKFKDGEFRVLVTNELSARGLDVPECDLVINLDLPTDSTHYAHRAGRTGRLGRKGTVVTICEETETFVVRKMRKQLAVPIKPCEFTEGKLLVHNEEDVE

SEQ ID NO: 49707 - protein, 366 aa, Oryza sativa
MTRRCSHCSNNGHNARTCPARGGGGGGGGVRLFGVRLTSPPEVAMKKSASMSCIASSLGSGGGSGGSSPAGTGRGGGGGGEGAAGYASDDPTHASCSTNGRGERKKGTPWTEEEHRMFLMGLQKLGKGDWRGISRNFVVSRTPTQVASHAQKYFIRQTNSSRRKRRSSLFDMVPEMPMDESPVVVEQLMLHSTQDEATSSNQLPISHLVKQKEPEFARHLSDLQLRKHEESEFTEPSLAALDLEMNHAAPFKTKFVLTMPTFYPALIPVPLTLWPPNVANVGESGTNHEILKPTPVNGKEVINKADEVVGMSKLTIGDGSSNSIEPSALSLQLTGPTNTRQSAFHVNPPMAGPDLNKRNNSPIHAV

SEQ ID NO: 49708 - protein, 91 aa, Oryza sativa
MATPRRRLPTTRLDFFFHEIGLDLLERSLGFVSCVLRLDLGGFYDFSVCVWGIRLGLNATQRSGRVFFRVIKSDYPFSFLFIYVFSPFYFV

SEQ ID NO: 49709 - protein, 158 aa, Oryza sativa
MAPACVSDEHAVAVSAERLWKAFMDASTLPKACAGLVDDIAVEGNGGPGTIYTMKLNPAAGVGSTYKTRVAVCDAASHVLKSDVLEAESKVGKLKSHSTETKLEATGDGSCVAKLKVEYELEDGSSLSPEKEKDIVDGYYGMLKMIEDYLVAHPAEYA

SEQ ID NO: 49710 - protein, 407 aa, Oryza sativa
MTEPRSNTAKTMTIMQRRDRLSDLPDATLARVLYHLGSVNATVTSALSRRWRNVHAAVPVVDLVDPKKGERWGNVSGQKTCFDHQVTAAILGKDLPTRKFRLDAFYPPYDLRDQWFAIVSVSGLEEFDVKLRYWDHSRRNLCPFGTHPKASADFDEEMRHSFTATPPHIFRCDTLRRLLLTNWTLDVPAGGVSMPSLETLFLKRIMAEDGAVQRLISGCPNIADLTLEQCPSVKRLVVASPRLDSFAMICCHHASHVVLQAERLRTLRYKGGLPGENFFSIANCGDVLAMTIDICESLLGKSASAVVPITKVITRCTNVTFLHLHLRPTMAFHSGTFTRALRHLPHLRQLALKGLLDNDETALSVSTLLRNTPNLDVLSLIPLRPRPPKPDYLYMFDGSDDDSSQNG

SEQ ID NO: 49711 - protein, 252 aa, Oryza sativa; identical to SEQ ID NO: 30561

SEQ ID NO: 49712 - protein, 289 aa, Oryza sativa
MNIKGGGRVPVPPAGAGTLVKLVVLGGTAVYAAVNSLYNVEGGHRAIVFNRIQGIKDKVYPEGTHFMIPWFERPIIYDVRARPNLVESTSGSRDLQMVKIGLRVLTRPMPEKLPTIYRTLGENFNERVLPSIIHETLKAVVAQYNASQLITQRETVSREIRKILTERARNFNIALDDVSITSLSFGKEFTHAIEAKQVAAQEAERAKFIVEKAEQDKRSAIIRAQGEAKSAELIGQAIANNPAFLALRQIEAAREISHTMSSSANKVFLDSNDLLLNLQQLTVANKSKE

SEQ ID NO: 49713 - protein, 56 aa, Oryza sativa
MVLCRRFNSSSQPSPSAFPAEWCAAAASVQFVFWTGESSGRSNPLRHTENCNILFC

SEQ ID NO: 49714 - protein, 136 aa, Oryza sativa
MRRRHRCPTWPVRWGHRRGSESRWCGSGRTRCSRSARPPRTPPSPSSSSTSSLRAGGRMRPSGRVRGTWWLLGKEPRPVAEGVCFDDLVFVPDSDDEGAGNEFNSQGFDDEFVPETQQDVPIEEIGIGFLSYLFNY

SEQ ID NO: 49715 - protein, 113 aa, Oryza sativa; identical to SEQ ID NO: 28511

SEQ ID NO: 49716 - protein, 200 aa, Oryza sativa
MEMEAVPALAVVDARFVAGDAAALSVAKTLSLSGSDFTVTDAATGAVVLRVDGVLFSLRRRCLLADADRRPVLTVQESAMVMNRRWKVFRGESTSRRDLLFTVVKPSAIQLWGSTKVSVFLASNDAEQASDFRVTGSYHDGACAVSLGDSDTVIAKIDRRFSVASALLGKNAYSVTVNAGIDYAFIVALVVVLDEMHFQP

SEQ ID NO: 49717 - protein, 447 aa, Oryza sativa; identical to SEQ ID NO: 32409

SEQ ID NO: 49718 - protein, 37 aa, Oryza sativa
MVCLDAVGGVQGAKHACHDLSFCLNSVSDMCSWICFL

SEQ ID NO: 49719 - protein, 160 aa, Oryza sativa; identical to SEQ ID NO: 28948

SEQ ID NO: 49720 - protein, 288 aa, Oryza sativa
MVGGGGGGEAAMSPPSGGGKRGRDPEEDVYVDNLHSHKRYLSEIMASSLNGLSVGDSLVDNIMESPARSENTSYFRDEIISQYSPMSEDSDDYRCYDTQLPNGSQTDAMVSPSTSPMSSPHRFQKPQSGLLSANPYPLPSCSLSSVVCSNPRRGSENEGRFPSSPNDMCHGGDLRKTALLRSVQMRVQGPHAYELSFCGRQEQEHAHDHEDEHQHEHLEGLEGAERSSSHRETISDGVSYQMPENSYGRPEHDIDYIEDCTPHGCLSDLKFKQEDKDCSKLTSMDKNR

SEQ ID NO: 49721 - protein, 353 aa, Oryza sativa
MAEEGQRGGYSRLAGDEEVATASGGGGGDYDERKLRLLGYEPQLKRNLSLLSNFAVSFSIVSVLTGITTLFGTGLQFGGPATMVYGWPIAGAMTLVVGLAMAEICSAYPTSGGLYFWSARLCSHRRWGPFASWLTGWFNIVGQWAVTTSVDFSLAQLIQVIILLSTGGNNGGGYMASKYVVIAFHAAILLSHAAINSLPITWLSFFGQFAAAWNMLGVFVLMIAVPTVATERASAKFVFTHFNTENNAGIHSNFYIFVLGLLMSQYTLTGYDASAHMTEETKNADRNGPIGIISAIGISIIVGWGYILGITFAVKDIPYLLNPENDAGGYAIAEVFYLAFKSRYGSGIGGSSA

SEQ ID NO: 49722 - protein, 204 aa, Oryza sativa
MSCNGCRVLRKGCSDGCVLRPCLQWIDAADAQGHATVFVAKFFGRAGLLSFISAVPEAQRPALFQSLLYEAAGRTINPVHGAVGLLWTGNWPLCQAAVETVLRGGAIGPLPELGGACGGAGGDLYGAAKRNGGWSTFSTAKRVRKAEVPEAPSCDLGLCLSPGSPPAVGERKPALRPGTPSMSSDESGTTTGGERDPVLLNLFV

SEQ ID NO: 49723 - protein, 282 aa, Oryza sativa
MLAHSLAINPSRAARCPVTSRASSAPLGLVSSLAFSRGRKESVKLFINVDRYTKYSTPFCYAPRNTRITPLATASFGDTADSSTPIFPRIHVKDPYQRLGISREASEEEIRAARNFLINKYAGHKPSVDAIESAHDRIIMQSFSDRKKPKVDLKKKYRELTQSRPVKAIQGRFQTPSSKVIWQTAITFVLLGVLTLVFPTEEGPTLQVAISCAANIYFIYQRLKSGWRTFFYGFGSFFASWFLATFLMVSVIPPILPGPRNLEVSTACVTYALLFVSSAFLK

SEQ ID NO: 49724 - protein, 362 aa, Oryza sativa
MECWEKKPRNLGGSLPVPNVQDLAARPDHLTPTLLRRYLRPHHLSLPADDHHAMAMIPVVDFARLIDHHEEAAKLRHACEEWGFFQVINHGIADETVEEMKRDVMAFFNLPLADKAAFAQQPEWIEGYGQAFVTSEDQTLDWSDLYFLTTQPPSYRDLRFWPPETSSTFRRSMDRYSLETQRVATELLRAMARNLGLRDADKMTRLAAAQSMRMNYYPPCPAKERDRVLGVSPHSDAVGLTLLLQVSPVKGLQIRRGDDWIPVDPIPGALVANVGDVVEMVTNGRYKSIEHRVVVDAAQERVSVAAFHNATFGSTYGPLEEMVGGGEARYRSISVEDYVRLVVSSKLQGKNILDAVKIITTT

SEQ ID NO: 49725 - protein, 165 aa, Oryza sativa
MSSTGRPYGRRGGAAPSYVPRPRAPNPSPSAPAPARPPQQLRKPVFTTVERLRPQSHGHTLTARVLSARIILDNPPPRARLAECLVGDNTGTVLFTARNQQVDLVKPGTTVIFRNAKIDMFKGTMRLAVDKWGRIEVTDPASFQVKEDNNVSLVEYELVDVVDED

SEQ ID NO: 49726 - protein, 107 aa, Oryza sativa
MAASLRSPPPFPAAAFRRRRAVVRASSSSSSSSSAVSSAPKARFVARRSESTFVQQLARPLGRYLLVLLPSRVLTPGSGFAFASRFVCRRDPRPEAEPEMFCFARVV

SEQ ID NO: 49727 - protein, 161 aa, Oryza sativa
MSDLPGFLSVRVLRGVNLVSRDAGGSDPYVVLHLDNQKLKTGVVKKTTNPVWNEELTLAVRNPETPIQLEVFDKDTFSKDDQMGDAEFDIEALMQIVRMDLQDIRSGTVVRTVRPGRQCCLADESHIVWENGQIVQDMLLKLRNVETGVVHLQLKWVNIPG

SEQ ID NO: 49728 - protein, 353 aa, Oryza sativa
MASCSKWLAGLMLLAAALACSLPAASRAQLQVGFYNTSCPTAEALVRQAVVAAVANNSGLAAGLIRLHFHDCFVRGCDASVLIFSPNGTAERDAAPNNPSLRGFEVIDAAKAAVEAACPRTVSCADILAFAARDSVNLTGNSFYQVPAGRRDGNVSIDTDAFTLPGPNLTATQLVDGFKLRNLTAEEMVILSGSHTIGRSHCASFLFKNRERLANGTISPAYQALLEALCPPTTGRFTPITTEIDVSTPATLDNNYYKLLPLNLGLHFSDDQLIRNATLLPFVDAFAANETLWKEKFVAAMIKMGNINVLTGARGEIRLNCSAVNPSSSSSSSSAGRMIETVFPGAGGEVAAS

SEQ ID NO: 49729 - protein, 407 aa, Oryza sativa
MDALCDFCREQRSMVYCRSDAASLCLSCDRNVHSANALSRRHTRTLLCDRCVGQPAAVRCLEENTSLCQNCDWNGHGAASSAAGHKRQTINCYSGCPSSAELSRIWSFSMDIPTVAAEPNCEEGINMMSINDNDVNNHCGAPEDGRLLDIASTALMSDLPTGDKFKPLIGSSSGDGMNLLPLNSDQPAEPVSTTPKAPCVTDKDMFNDGSVYGDFCVDDADLTFENYEELFGTSHVQTEQLFDDAGIDSYFEMKDVPADESNEQPKPVQPECSNVASVDSGMSNPAARADSSHCIPGRQAISNISLSFSGLTGESSAGYFQDCGVSSMILMGEPPWHPPGPESSSAGGSRDNALTRYKEKKKRRKFDKKIRYASRKARADVRKRVKGRFVKAGEAYDYDPLSQTRSY

SEQ ID NO: 49730 - protein, 346 aa, Oryza sativa; identical to SEQ ID NO: 31682

SEQ ID NO: 49731 - protein, 184 aa, Oryza sativa; identical to SEQ ID NO: 28496

SEQ ID NO: 49732 - protein, 265 aa, Oryza sativa
MAAGPRGRLLLVALVSAAAVVAGALLPGCAAAAAAGEKVPLALYYETLCPYCSRFIVNHLAGIFEDGIVDAVDLRLVPYGNAHVVGANNTISCQHGSEECFLNTVEACAIDAWPDLRVHFRFIYCVEDLVVNHKQREWESCFGKLNLDPKPVTDCYKGERGHQLSLKYGRQTDALQPPHKYVPWVVVDGQPLYEDYENFEAYICKAYKGHPPKVCEGLARPPTPTVLEVAEAVNRVSYYDSGDIRLKPDEDGHAKIKKVVPDDDD

SEQ ID NO: 49733 - protein, 225 aa, Oryza sativa
MASTALSTASNPTQLCRSRASLGKPVKGLGFGRERVPRTATTITCQAASSIPADRVPDMGKRQLMNLLLLGAISLPTVGMLVPYGAFFIPAGSGNAGGGQVAKDKLGNDVLAEEWLKTHGPNDRTLTQGLKGDPTYLVVEADKTLATYGINAVCTHLGCVVPWNAAENKFICPCHGSQYNNQGRVVRGPAPLSLALVHADVDDGKVLFVPWVETDFRTGDNPWWA

SEQ ID NO: 49734 - protein, 324 aa, Oryza sativa
MPRYDDRDRYDDRYGGNTRLYVGRLSSRTRTRDLEDLFGRYGRVRYVDMKHEFAFVEFSDARDADEARYNLDGRDFDGSRMIVEFAKGVPRGPGGSREYMGRGPPPGSGRCFNCGIDGHWARDCKAGDWKNRCYRCGDRGHIERDCRNSPKNLKRGRSCSRSPSPRRGRSRGRSYSRSRSRSYSRSQSPRRDSRNERRSRSPRDSRSPRGSPRDSRSPRGSPRDSRSPKGSPRDTQSPRGSPRDSRSPRRSASPPNGRNRSPTPNASRSPAPRDSRSPMRADSRSPADHERRDMSTAANGRSPSPRDYEDNGNHRASPRGSASP

SEQ ID NO: 49735 - protein, 498 aa, Oryza sativa
MDPRARYPPGIGNGRGGNPNYYGRGPPPSQHQQHQHQHQQPPHPHHHQYVQRQPQPQQTPHNSQHQQWLRRNQIAAEAAGASEQKAPPVADGIDSSSQDWKAQLKLPPQDTRYRTEDVTATKGNEFEDYFLKRELLMGIYEKGFERPSPIQEESIPIALTGSDILARAKNGTGKTAAFCIPALEKIDQDKNAIQVVILVPTRELALQTSQVCKELGKHLKIQVMVTTGGTSLKDDIVRLYQPVHLLVGTPGRILDLTKKGVCVLKNCSMLVMDEADKLLSPEFQPSIQELIRYLPSNRQILMFSATFPVTVKEFKDKYLPKPYVINLMDELTLKGITQFYAFVEERQKVHCLNTLFSKLQINQSIIFCNSVNRVELLAKKITELGYSCFYIHAKMLQDHRNRVFHDFRNGACRNLVCTDLFTRGIDIQAVNVVINFDFPKSAETYLHRVGRSGRFGHLGLAVNLITYEDRFNLYRIEQELGTEIKPIPPQIDRAIYCQ

SEQ ID NO: 49736 - protein, 287 aa, Oryza sativa
MGLAGEAAGSPGSGGGFSANGKFSYGYASSPGKRSSMEDFYDTRIDGVDGETVGLFGVFDGHGGARAAEFVKQNLFTNLIKHPKLFSDTKSAIAETYTSTDSELLKAETSHNRDAGSTASTAILVGDRLLVANVGDSRAVICRGGDAIAVSRDHKPDQSDERQRIEDAGGFVMWAGTWRVGGVLAVSRAFGDKLLKQYVVADPEIKEEVVDSSLEFLILASDGLWDVVTNEEAVAMVKPILDSEQAAKKLLQEASQRGSADNITCLVVRFLEQENHLPERPTNDQAS

SEQ ID NO: 49737 - protein, 254 aa, Oryza sativa
MALQQSMAMPMMVVSDLGTAPRSSPMVQLQRMKKHLVVVAAFKSRTKASPKVDKSNKNKSIVEDGIFGTSGGIGFTKENELFVGRVAMLGFAASLLSEAVTGKGILAQLNLETGIPIYEAEPLLLFFILFTLLGAIGALGDRGRFVDDATGLERAVIPPGKGFRAALGLSEGGPLFGFTKANELFVGRLAQLGIAFSLIGEIITGKGALAQLNIETGVPINEIEPLLLFNILFFFFAAINPGTGKFVTDDNDDQ

SEQ ID NO: 49738 - protein, 272 aa, Oryza sativa; identical to SEQ ID NO: 28786

SEQ ID NO: 49739 - protein, 88 aa, Oryza sativa; identical to SEQ ID NO: 44273

SEQ ID NO: 49740 - protein, 165 aa, Oryza sativa; identical to SEQ ID NO: 29247

SEQ ID NO: 49741 - protein, 145 aa, Oryza sativa
MASATPAGRIRWSYTPSPSPSAPNLLPWQNWWQRWCRWLPRADPMEAMAVVFLTSGSSGPLPPLRPPPTPKLLPRWRQWHRGSHGRIRHRRQWWHFQQADLAALHPLPFLRPQDSPVMAAVASMLLRADPMDVAAGGGISDERFR

SEQ ID NO: 49742 - protein, 465 aa, Oryza sativa
MVDRIGAAWWCACAVGMLVVGACLAGETSEYRRQLGSAVDMPLDADVFRAPPGRNAPQQVHITQGNHDGTAMIISWVTTIEPGSSTVLYGTSEDNLNFSADGKHTQYTFYNYTSGYIHHCTIKKLEFDTKYYYAVGIGQTVRKFWFRTPPKSGPDVPYTFGLIGDLGQSYDSNITLAHYESNSKAQAVLFVGDLCYADNYPYHDNVRWDTWARFVERNVAYQPWIWTAGNHEIDFAPELGETKPFKPYSYRYPTPYKASGSTAPFWYSVKRASAYIIVLASYSSYGKYTPQYKWLEAEFPKVNRSETPWLIVLLHAPWYNSYNYHYMEGESMRVMYEPWFVKYKVDLVFAGHVHAYERTHRISNVAYNIVNGQCTPVHDQSAPVYITIGDGGNQEGLATNMTAPQPGYSAFRESSFGHAILDIKNRTHAYYTWHRNQDGNAVAADSMWFTNRYWQPTDESLDDSQ

SEQ ID NO: 49743 - protein, 437 aa, Oryza sativa
MASVMGGTAGGAAAAGIVAAICVVVYSNKRSKKLGGGGADSHTSAWLPLYHSHTSGKSSGHITANIAGMCRHFSFAEIKAATKNFSNDLAIGVGGFGVVYRGVVDGDVKVAVKRSNPSSEQGITEFQTEVEMLSKLRHRHLVSLIGFCEEDGEMVLVYDYMEHGTLREHLYHNGGKPTLSWRHRLDICIGAARGLHYLHTGAKYTIIHRDVKTTNILVDDNWVAKVSDFGLSKSGPTTLNQSHVSTVVKGSFGYLDPEYYRRQQLTDKSDVYSFGVVLFEVLMARPALDPALPRDQVSLADYALACKRGGALPDVVDPAIRDQIAPECLAKFADTAEKCLSENGTERPTMGDVLWNLESAMHFQDAFDAAAGRPVPALDAAAGSSSHLDDGSTASINTLATSSTSHPHEPCVDVVLEPDDVVAERATFSQLVQPTGR

SEQ ID NO: 49744 - protein, 274 aa, Oryza sativa
MEKAVAAACGWRKGLEEGEPEWEAMELEAAAPAIFPADGGGGGVRRSPAASTIFLPDLLDGSFLSDDDLSQMEDIFQPAHEDDIHHLLQGPQDEADLDKWLAGQSCSPAAEGSITVQTPTYPILNLIDFIPKDGCKRGPRGARKRQTFPSRGARTRRAFPLQQLCFGTTRDKRCRLRKNNDHWTIKEVKNLVQGVSKHGVGRWTELKRDFFSTSIRTSVHLKDKWRNLLKACGIDFTSTAKGKAQKTMLWPLDKRLTEQIIQLAYKHPYPRQKY

SEQ ID NO: 49745 - protein, 383 aa, Oryza sativa
MVMLLYNADRSLISQAELKMKAVVESGTMDVDFSLDNGGSIILRLQFLLSDEDRRRVQEMRNSAVKRKQQELLSDGYVLSQDSLLSKQVENISNISREGDESSVRKSMSLDDLQEKAVFSAIIVDPQMKDTKESPEQSGSNSAVQKMISAFQSSSPQDLTRIKSESSLKGLSASSENFTQSSSDKSSSSLATQDVSGHTEAGLVAGTSGKMQLPPGDKSFSNKRSNATEQQAVLSTTSEGRIRRLFREKDLDNSEMVITVQNRSKKRSMPKRRRAAIGPYSLEHMHPHVCITTASRQLRELVELEPPLDSFVFVGQVDIKRPNVRGGASMQDQGTSDSKTKNEMVSARGDDHGFPILDGRLINQGVRVVIVIIACGAIFLNNR

SEQ ID NO: 49746 - protein, 107 aa, Oryza sativa
MSWWQSQKIIRKGGAGGGGSTAAPATAAAAGGIGGGGAGEVAVQKVYHNLAPKPTFRKIDSIKEDINKKADRFIKMTRARLFNQTKSFRQPAGSPPATAAGRDGKLF

SEQ ID NO: 49747 - protein, 90 aa, Oryza sativa
MEAPQVIFLNPAPMHPHIYSNGHICLDILYDSWSPAMTVSSVCISILSMLSSSPASNALKTMTAMLGIAAMGGRRRRPDGGSMMTKCKRN

SEQ ID NO: 49748 - protein, 109 aa, Oryza sativa
MHQAPVVDMAETSVPNLGMKPKISERTSNTKATMGTRMNPYGCCRHARCPPVRCHAADKRAGAAIRMNISCCSYNTCEDSTIKCTMTQFEDQFSTIKPDGIQVRCRKDS

SEQ ID NO: 49749 - protein, 353 aa, Oryza sativa
MASPSIPAALRHPHAHAAGLRLLRSSGDPCPPCTLPFRLCGVPLKKGHVYAGAVSATRSPGLGNAENLRESPSLSRSWGMNGQIGDDHDILIECRDVHKSFGNKKVLNGISFKIRHGEAVGIIGPSGTGKSTVLKVMAGLLAPDKGDVIICGRKRHGLVSDEDISGVRIGLVFQSAALFDSLTVRENVGFLLYENSSLPEERIATLVTETLAAVGLKGVEDRMPSELSGGMKKRVALARSIIYDDTKETIEPEVILYDEPTAGLDPIASTVVEDLIRSVHVTGKDALGKPGKIASYVVVTHQHSTIKRAVDRLLFLHEGKVVWEGMTQEFTTSTNPIVKQFASGSLDGPIRYF

SEQ ID NO: 49750 - protein, 225 aa, Oryza sativa
MAWGGLFLSFSRPSQDQQKSCLSAAGGFNYDAPLHGASRPKSVAKLTAGDTEASDKALVERGFFVNRSRVLVGSGTTTFNHAKSALLSWKHLALGWANVEPDTPVKAGTRFCICYKELIPWVMLPLQIAYVTDGNGGNSSGHGKGCVFAYGSGTLQGHLLAGEERFSVQLDEDDQVWYEVMSFSKPAHILSSLCYPYVQLRQKHFAHQSGQALLRHVASRSRDTR

SEQ ID NO: 49751 - protein, 243 aa, Oryza sativa
MELPTCPADFDGFQKETKEMLKHKKGTTTLAFIFDKGVIVAADSRASMGGYISSQTVRKIIEINPYMLGTMAGGAADCQFWHRNLGIKCRLHELANKRRISIAGASKLLANILYSYRGMGLSIGTMIAGWDEKGPGLYYVDSEGARLMGSRFSVGSGSLYAYGILDEGYRYVMPVEEAAELARRAIYQATFRDGASGGCVSVYHVGPNGWTKLSGDDVGELHYKYYPVEATPVEQEMADAPAA

SEQ ID NO: 49752 - protein, 273 aa, Oryza sativa
MAHAFAGGTSAICRCPHDPGRAALVSRPRHRLRVLASSLPTPAIEGQGVELSVTTRRGRVLPVLKDCSLRVPPGQLWMLLGPNGCGKSTLLKVLAGFLNPSSGTVYINRPCSYVFQNPDHQVVMPTVESDVAFGLGKLNLSLDEVRSRVSQSLDAVGMLSYSQRPIQTLSGGQKQRVAIAGALAEASKVLLLDELTTFLDEYDQMGVIKAVRKSVGAGGEVSALWVTHRLEELRYADGAIYMEDGQTIIQGDVSTISKYIKKKQARYFGHFEL

SEQ ID NO: 49753 - protein, 437 aa, Oryza sativa
MRVLEDDMFPSTPGKVKIERATAMNRQLHRCFASTSTMFLWALFLVAMTASYLSFQSFVDTSSKYFAASWGGLHWERQIRASAAPRRPPGSAAGAGMSVLVTGAAGFVGTHCSLALRKRGDGVVGIDNFNSYYDPSLKKARRSLLASHGVFVIEGDINDGRLLAKLFDVVPFTHVLHLAAQAGVRYAMENPASYVHSNIAGLVTLLEACKDADPQPATVWASSSSVYGLNDKVPFTESDRTDQPASLYAATKKAGEEITHTYNHIYGLSITGLRFFTVYGPWGRPDMAYFSFTRNILQGKPITVYRGKNRVDLARDFTYIDDIVKGCLGSLDTAGKSTGTGGKKRGPAPYRIFNLGNTSPVTVPNLVSILEKHLRVKAKKNVVEMPGNGDVPFTHANISLARQQLGYKPTTNLDVGLKKFVKWYLSYYGYTRGSKNL

SEQ ID NO: 49754 - protein, 145 aa, Oryza sativa; identical to SEQ ID NO: 29092

SEQ ID NO: 49755 - protein, 166 aa, Oryza sativa
MARIFGEHQLQALTHRIVGTYGYISPEYAMEGKFSEKSDIFSFGVLILEIVSGRRNSSFVDEEWSMNLLGYAWTLWKEGSVSELIDPLMGTICSYDEVCRCIQVGLLCVQELPGDRPSMPLVLRMLSGDVTLPAPKQAAFFVGRVPLDDNNTGSGNQLTYTQLQGR

SEQ ID NO: 49756 - protein, 386 aa, Oryza sativa
MPSSSSAAAAACGPPEFTPGWKTVSTCAPDVVGEGVHVFDIFGYSDHKGMGAHEPIRSGAFSVAGLDWVACLYADGYGVAGIDDVSAYLRLLGDAPTPRVWVSCEVKLVDQRTGVASTPQPFLRYALAFGDKCKALHCMMIPRGQIEVEPYLVDDRLTMEFHVVVRRDPRVSRTARFPRILVPPPDIKRQFANLLQSKEGADVTFDVAGEPFSVHKLVLAMRSPVFKAELCGLLREPGTQPITIVDMQPAVFRALLQFIYTDQFPVTRGFERRDNCEMIRHLLVAADRYAVDRLKLLCQGILCKNLNVHNVATTLALADQHQCDKLKDACIEFMSCSKKMKGVVASKGYEDLQRMAPSVLADAVAQMSKLNKMSRGSVPQDESKSC

SEQ ID NO: 49757 - protein, 156 aa, Oryza sativa
MGGGGGDEREKAKGGGGGGGGGGGGGEYGTFQGPPSYPPPRPPVVGYPQPAPPPGLYGQGDPYYRPRGGYQGIPARDYEAGARGHGHDRLPCCGIGIGWFLFIVGFFLGAIPWYVGAFLLWCSRVDYREKPGYVACAIAAVLATIAIIIGATAGAA

SEQ ID NO: 49758 - protein, 83 aa, Oryza sativa
MSVLGQRRPSAAPLAPWSSSPHGSLRLSAPLARIRRRRLDSTVSPPFSRADPPSAAIGGADPATSSPLARIPSRRRRREGWIR

SEQ ID NO: 49759 - protein, 183 aa, Oryza sativa
MRVSDGTPASRNARCTYRNMDPMPDACWNALATSALTMLRRTGSVGLASSSSQSARSSLHRVRHAGVATVSSQPTSCGSPSSVFVSSRRSSASSSDNVLERTRRAWSLVKSHCGNSGMRRTAKPSNAGMAVPVATVSRQATRTGRFKNLGEKQRPPRMQPRHTKPSGCEVRPRCSDDGLSSPA

SEQ ID NO: 49760 - protein, 189 aa, Oryza sativa
MASGRGGGGGVASPTPAKVEGGGGGGGGGPGMPMAELEQVFRRYDANGDGKISAEELASVLRALGAPLGPGEVRRMMDEMDSDRDGFVDLSEFAAFHCGPTPAHGGKGGDAKDQEAASEAELREAFRMYDADSNGKISARELHRVLRQLGDKCSVADCSRMIRSVDADGDGCVNFDEFKKMMGGGGGRR

SEQ ID NO: 49761 - protein, 69 aa, Oryza sativa
MILVAIVAELLEEYTAAVARAMELLLSRAPPRIFPRRVRFLVLRSLPFASPPPSPLSPPPPFTVAAGTR

SEQ ID NO: 49762 - protein, 82 aa, Oryza sativa
MKTVLMGLDLTILLCFIQEKFSLNKTWKPRCMNWVLKPGRLSLLFHIIKPFEQQSANHHHHPMKGITIWMQTAQVVRDISVI

SEQ ID NO: 49763 - protein, 601 aa, Oryza sativa
MGSAGGGGWDDDDDGDEQCATPPPPRSFSPMMMTEAGMKLVTPPWRRWRRWRGGCAESGRAVRAACVAAAVVLAVVVLSYYARWGGDQDEMPTSLFTTRGSEGATSANLTDDQLLGGLLTAAFSPQSCRSRYEFAGYHKRKPPHKPSPYLVAKLRSHEALQKRCGPGTAPYDKALRQLKSGDGAAAADGDDDCRYLVSISYNRGLGNRIIAIVSAFLYAVLTERALLVAPYNGDVAALFCEPFPGTTWLLPDGGRRFPLLHLRDLDGKSKESLGALLKSNGIVSVAAGVNGSTSSSWSGRPPPPYVYLHLDGGADYHDKLFYCDEQQRLLRGVPWLLMKTDSYLVPGLFLVPSLRGELERMFPEKDAVFHHLSRYLLHPANAVWHAITAYHRDHLAGAGHLVGIQIRVYHEETPPVSQVVLDQVLSCARRENLLPAAGNTSSSDQAVLVTSLSSWYYEKIRDELGGGGGGVHQPSHEGLQRMGDTAHDMRALSEMYLLSTCDALLTTGFSTFGYVAQGLAGLRPWIMPRRPWWEKEAATAVPDPPCARVATPEPCFHSPSYYECAARRNYDDIGKVVPYVRRCEDVSWGIQLVNGSSQSQW

SEQ ID NO: 49764 - protein, 170 aa, Oryza sativa
MKYGCLSYEGTNTGWSKSEVPVLSLKSDSVTNDARQTIISVDTKSSTRWSLAINKQEIDDFTVHVDSENLVPLGNKSEIDGWHTIQFAGGKDSPTKFQLTLFWASNSKDAFPKQVESEDHSFLLKLRTDVNRVTPKVGRVLEKLPGWCAPFGKSTSPYTLAFLTALPVNI

SEQ ID NO: 49765 - protein, 393 aa, Oryza sativa
MSEMAQDPLEPPKFKHKRVPRASGSPPVPVMHSPPRPVTVKDQQDWKIPPCISNWKNPKGYTIPLDKRLAADGRGLQEVQINGNFAKLSEALYVAEQKAREAVQMRSKVQRELQLKEKERKEQELRALAQKARMERTGAPPAPTGVPAGGGRGAVDDREEDMDLEQPREQRRESREEREARIERDRIREERRRERERERRLEARDAAMGKKSKLTRDRDRDVSEKIALGMASTGGAKGGEVMYDQRLFNQDKGMDSGFATDDQYNIYSKGLFTAQPTLSTLYRPKKDGDSDVYGDADEQLEKVMKTDRFKPDKGFSGASERSGKRDRPVEFDKQEENDPFGLDQFLTEVKKGKKAVEKIGSGGAMRASGGSSMRDDYEGGGSGRSRINFERGR

SEQ ID NO: 49766 - protein, 403 aa, Oryza sativa
MRLLGAHRAALLVLACVVVVVIHGLGEAEALGGGGGFVRAQGTRFVLDGNPYYANGFNAYWLMLLAADPSQRGKVSAALGEAAGHGLTVARTWAFSDGGGGNALQLSPGNYNENTFKGLDFVLSEARKYGIKVILSLVDNYDSFGGRKQYVNWARAQGQGIGSDDEFFTNPVVKGFYKNHVKTVLTRKNTITGVAYRDDPTILAWELMNEPRCQSDLSGRTVQSWITEMAAHVKSIDRNHMLEVGLEGFYGASSPSRIAAVNPSGYQLGTDFIANNQVPGIDFATVHSYPDQWLSGKDDQAQLGFMGRWLDAHIADALYGTVYAKIYESARRGGATVGGLFWQLLVPGMDSYRDGYEVVFGETPSTTGVITTNSRRLRFLSKAFARARQAQPARGKGRHNGGK

SEQ ID NO: 49767 - protein, 52 aa, Oryza sativa
MAAAGPKPPTAARLRRKEVAQRAAKASRRVAADPPPPDLALPWLDPARHHRN

SEQ ID NO: 49768 - protein, 396 aa, Oryza sativa
MDLDTTRKRPRESGVAVDRLSALPDCLLHVIMSFMKARQVVQTCMLSKRWEHLWRTVPCLDVDHREFQSTGEAAQGDNEVWQNFEDFADNLMLHHQIAHLDTFQLHVNNVYRWGQHASRWIRRSIKYNTKVPGIPRPGLSCSSWSLKRLHLSNICVDDLFAKHISSMCCSLEDLNLKGCRFAFNEITSHSLKSLVIDSCDSKLCPSKLVVTAPAIASLCLIVKLWFFPGGLIVNEMPFLSKASILVSATYDGKNFQHNQSKFLGSLCNVTTLELSGFQTMIIPEEPVELPEFKNLKILSLDKCDLSDNFQLLKHFLQNSPNLEKLTLRLCELPKDSKKRKGKAKAKKTRLVDIRCENLKLTEIIYDADDVLQLVGLLLNDSANLPKNNIKLSKVDR

SEQ ID NO: 49769 - protein, 372 aa, Oryza sativa
MDEKVKMESKLSSAAAFVEGGVQDACDDACSICLEAFCDNDPSTVTSCKHEYHLQCILEWCQRSSQCPMCWQPISMKDPMSQELLEAVEQERNIRANRLNTAAVFHHPVLGDFEVPVGADDAELEERIIQHLAAAAAMRRSHRHGRRDGHRSRSGSHSRPQIVVFSRNEAIPGGSLHASSGQDEDHEQSSDLGSAHPFAALAAVDQGHMSGGSQLYVGHSDQGASNPSLHDERAMSRTSENQSAPVNQDTAGPSDLQSFSDTLRSRLQSASMKYKDSITKSTRGWKERWFSRSNTISGLGTEVRREVNAGIAAVSRMMERLETKDDTGPSAVPAASACSPSDANNQRTVSPNHAAVVNETSSTTCASGSGSQ

SEQ ID NO: 49770 - protein, 534 aa, Oryza sativa
MPKTATPMLLQPISGAGAGARRSSAEGLSPPPTARLRRRVLCAIRADAPPPIHLSAAAPSRPAKPPVCTADELHHAPVSGAGWRLALWRYRPPPHAPARNHPLMLLSGVGTNAIGFDLSPGASFARHMSNQGFDTWIVEVRGSGLSIRDHDNSASSPSGAFDDISNGTLALDKSSTLEVASVQSSGFSGIDYDDLGIVALDDPPLLMEMTSFFDRISKLLEEASLNKNFHEITDKISVLSEMVESSAVIGPMREESLRLLKNFQEQIDSWEHFVATQMNLNSEYNWDFDHYLEEDIPTAVEYIRQHSRVKDGKLLAIGHSMGGILLYAMLSKYGFEGVPSNLAAIVTLASSVDYTTSNSSLKMLLPLVHPAQALNVPAVPLGTLLAAAYPWASGPPYLFSWLNHQISAQDMMHPELLSKLVFNNFCTVPAKVVLQLTTAFREGGLCNRTETFSYKDHLRYCQTPVLALAGDKDLICPPEAVYETVKLIPQHMVKYGVFGKPEGPHYAHYDLVGGRLATDEVYPCIIEFLSHHDQ

SEQ ID NO: 49771 - protein, 35 aa, Oryza sativa
MPPPHSARSSPTRGRRRRIGLRWRPRKCGSRTCLP

SEQ ID NO: 49772 - protein, 156 aa, Oryza sativa
MGGCCCSSTRSASVGAPVYIYHQQNPASTIVAIDKNLDTSTPDTYRAPPTPLPYDVGLVLKDNPDLEKTGIKRKIHEHKESLMMDDNESLQKCVSEDKPDEEDVCPICLEEYDEENPRSMTKCEHHFHLCCILEWMERSETCPVCDQITMINAMYE

SEQ ID NO: 49773 - protein, 503 aa, Oryza sativa
MAPPPPLAALRPAPFPLPRLLPCPASAAARRGAVAFSLQTNVRLLKPNRRSRRSRYPYYDHDEDEDDDEAEFEFEEGEEEEEDGYETDDDLSGLEYPGVLYSNNPRAPIKKPGREKPALKQNWEGRQPKTRDRCDTSKKVDALHAKSKASRSTGLVDIDNEVELKNESISRSLFQKLQEEYDFDDKWLPLIDYLCTFGLKESHFTNMYERHMACFQISQASAEERLEFLLSVGVKSKDMKRMLVRQPQILEYTLSNLKSHVAFLVGIGVPSARIGQIISAAPSFFSYSVEQSLKPTIRYLIEEVGIEESDVGKVVQLSPQILVQRIDSAWKSRFLFLSKELGAPKDNIVKMVTKHPQLLHYSIEDGILPRINFLRSIGMRDTDVLKVLTSLTQVLSLSLEENLKPKYLYLVNDLKNDVQSLTKYPMYLSLSLDQRIRPRHRFLVSLKKAPKGPFPLSSFVPTDERFCKRWAGTSLEKYHTFRQSMLLKGFSEKTGRKTLTSRR

SEQ ID NO: 49774 - protein, 173 aa, Oryza sativa
MKRAAPWEEPLEVSSDDSLSSDSDDEAGKGKGDNAFGLPNSTKAAAPDGALIRKAEMYQEYMKHIPVPAHRGSVIPCTTWLGLGRSVKQLYKQPLHYLTNVLLKQWDQQRVGSDDEHRPLDAIIHPVKAEALIWITEEVHRLTTSSQHLASLWASAPMYHAYIDPVFPPIKLQ

SEQ ID NO: 49775 - protein, 259 aa, Oryza sativa; identical to SEQ ID NO: 31765

SEQ ID NO: 49776 - protein, 336 aa, Oryza sativa
MAAACAWDALPEHLQERILSLLPLTALLPVAAASRALRRLLRSRAFHALLTPHRLDAFFLLSPRLAFHPLSRRLLPAPPAASPPVVSSPSHLVTAASLLRLPPLPATSYLLAVVLPIPASSSSSSSCSREFTLVAVTAGARVRSYTLDSADPSPRWDPRGDLPLPFALLGNAAGDRRQLFVLGRGPDAILVFDLATGQWTVLPAAMPLGLTTAHLFVFGGRLFLVGGVERFGVVERVLVWRLEGSEAAAEWTEVGAMPEEVFDELVAGRHGSFWHFQAADRMGIVCLYNAVDGRLVMFDAVDGGWTRLSRVSGLDVEESRRWFGHVVEPRVELLLG

SEQ ID NO: 49777 - protein, 271 aa, Oryza sativa
MGTLPVAHRFSLASAFLPRHRRPSPSAPNRRRRHGTVVAYMEPNPNSPSSIAGRLIGALPVVGLVARILSDEGGVGGDMIDFAEFRRRVSKKCTVMDSQAFYDFNERRGKAGDPFYVLLCCWLAAVGGGLLKTEEILEGVARLRLSNDIEFEEETFLDMMKTAKEKRAKLKAPAPQIPMEARAEKALEAIYVCCFGQDMVEDVDVKLLCKMLNAVFPSVGRQAVERIVTSMAKQVAAGERKGPGVKTVSKEAAQRQLKDLEFLKQNKLDSA

SEQ ID NO: 49778 - protein, 465 aa, Oryza sativa
MVVGRPSSSSVARAVVLLAAAMLLSTLSPCCCASAGGGGGARRREKQQQLHPVILIPGAGGNQLEARLTEEYAPSSLACRVWPVVRGRGGWFRLWFDPSVVVAPLTRCFADRMTLFYDSVADDYRNAPGVETRVSDFGSTSTLRYLDPNLKLLTGYMNVLASTLEKAGYEEGFDLFGAPYDFRYGLAGPGHPSRVGSAYLERLRKLVESACAANGGRPAILVAHSLGGLYALQMVARSPPAWRAANVKRLVTLSAPWGGSVQEMLTFASGNTLGVPFVDASLIRDEQRTAESNLWLLPAPRVFGNTTLVVSRHHNRSYSAKNMTQFLRDIGFAEGVEPYRERIRPLVEVLPEPGVPVTCLVGTGVDTVESLVYGEGGFEAGPEKVVYGDGDGTVNLDSLVGPIKAWSDSPEQVVEVVELPEVSHSGILKDKSALDQILRIIDAINLNATTSSSSINRSSQDVLYN

SEQ ID NO: 49779 - protein, 408 aa, Oryza sativa
MTSTRPILLFILFLNLTMSDATEIQLQITGVRGQEDVVAESDKSTSRADGTAAAAAAAAPLPPVSSQRLRWWAVVLANIVFVLGGQSVATLLGRIYYDQGGGSLWLATVVQSCGAPLAVPLLLYFRRPEASPVARPPLLKIAAIYAGLGVLLAGDNLMYSYALLYLPLSTYSLVCATQLCFNAVFSYFLNKERFTALVLNSVVLLTFSAALVGVSHSSEETNSSVPEGKFALGFVLALSASAAFALILSLMQLTFDTVLRSNAAHAVLELQLWSNAAASCVSVAGLFISGEWSSLTAEMDGYKKGEVAYGMTLAWTAISWQLATMGMVGLVATVSSLFTNVISTVGMPLSPIMAVIFLGDRMDGAKVIAMLIGIWGFLSYVYQHYLDDAKSKNTAGSADVTQTSEAKL

SEQ ID NO: 49780 - protein, 354 aa, Oryza sativa
MGDGEGSTGGGGGGGDPQRLKRIGAAAYDYENDSRWAGYWSNVLVPPHLASRPDVVDHFKRKFYQRYIDPDLIVEPMSSTSSSQSTKPAARSSATPSNENVRARDSGSSARSTAASQPSQTERTANSLWLDGRTIHFSINAWVLVVASLGILPILPKHIASKAYRLSLLGTICSSAYSLYVTYGKPRAWNMAAIQPWLQSIIVAKDFVHLMFSLMMFTSNVHYKIALLPVLCWALDHVARFLRRNFARSSLYRKYLEEPCLWVETNNTTLSLLCSNAEITLGFLMIVSLFSWRRNIIQTFMYFHLLKLMYHAPVTSGYHQSAWARIGRAVNPYIHRYAPFLNTPISAVQRWWLR

SEQ ID NO: 49781 - protein, 517 aa, Oryza sativa
MQHGDYASSAPPAAGHYYPHQFAPNPPPHPASSAADAAPPTIPASYASAPPYSVGGYSDQPPSAPSYAPPPQYAGYAPPYNNPNPAPYPPESSPAPAPYYSYPPTAAGVATQHAPAAEPSPAPLPYDAPYYGGYQPPPTAGYGDDDYLNEGAYAYSGDGGSEPYGARGTAPTRSGAAMFDDYGRSIGPSSGGADQWPTGGGGGVGGSFGKIARAVPKAESHEDANGGAQKFRVKLLPEGAGSPTDVLCQIGLDGIRMLDPSTSRTLRIYPLDTLTRWDVLDSTVFAFWAKTPVDFEAKRIRLKSNSYTSNTLLDTVTAATVQFKEIGGDARGRGTVDSSKPMSQSNEKKKGFDWMFAKPVDVVKDHWVPDEAAKKCYSCAVDFSPFNRRHHCRNCGEIFCDKCSQGRTALTAEDNAPLVRVCDRCMAEVSQRLSIAQEAANRSATVQSHEDLARKLKEEMERNRKSSGSASGGSSGTRMREVACPTCTVHLQVQVPTSGSETVECGVCQHAFRVSAN

SEQ ID NO: 49782 - protein, 387 aa, Oryza sativa
MAAEADARKVCGLPERVQLHGAMLALQFGYAGFHVVSRFALNMGISKLVFPVYRNIIALILLVPFAYFLEKKDRPQLTLSFVVQFFLLALCGITANQGFYLLGLDNTSPTFASAIQNSVPAITFAMAAALRIERVRLDRRDGVAKVLGTLACVAGASVITLYKGPTIFGPKLQLQAVAEVPLRAAIAGEGKNWTLGCVYLIGHCLSWSGWLVLQAPVLKEYPARLSVTSYTCFFGVIQFLIIAAFMERDADAWAFHSGSELFTILYAGFIASGVAFAVQIWCIDRGGPVFVAVYQPVQTLVVAIMASLTLGESFYLGGIIGAVFIIAGLYLVLWGKSHERARLAKDAAAIATDRDAAPCRIIAAGKQSSSVTQPLLLPTSSSSDNAV

SEQ ID NO: 49783 - protein, 315 aa, Oryza sativa
MAARSGPPAAAVDPEAVLSHSFPEVSFAYDERDVALYALGVGACGADAIDEKELHLVYHRDGQPHIKALPTFASLFPFKNSNGLGIVDVPGLNFDASLLLHGQHYIEIYKPIHSRANVVNKTKIAGLHDKGKATILEIETTTHVKDSGEVLCMNRSTIYLRGAGGFSDPSRPYSYASYPTNQVSRISIPNSAPSAVYEDQTQQSQALLYRLSGDYNPLHSDPMVAQVAGFTRPILHGLSSLGFAIRAVIKSFCNGDPTAVKSIFGRFLLHVYPGETLVTEMWLQGQRVLYQTKVKERNRAVLSGYVLLKHIPSSL

SEQ ID NO: 49784 - protein, 402 aa, Oryza sativa; identical to SEQ ID NO: 28549

SEQ ID NO: 49785 - protein, 284 aa, Oryza sativa
MAGRPGYVTVPILSVLAAIGYVYYTAVFLAIPAWLGLATAAGVANAVAFTALAAACVATYAVAVSRDPGRVPPAFLPDVEDAESPIHEIKRKGGDLRYCQKCSHYKPPRAHHCRVCKRCVLRMDHHCIWINNCVGHENYKIFLVFVLYAVVASLYSLVLVIGGAVHSLPKNEQLGSDSSRTSIIICGVFLCPLALALSILLGWHVYLIFHNKTTIEYHEGVRAMWLAEKAGNLYHHPYDLGVYENLVSVLGPNALCWLCPISRNTGNGIRFRTSYDIPLSTPPI

SEQ ID NO: 49786 - protein, 441 aa, Oryza sativa
MAAMGSKDGGGGGGGMAAQAGRLGVVASVAFNLAALAFYLRRRYFGGDDAAAVRKKAEAEVAPSSGKPPVTKDSIINLDHGDPTMYEAFWRGGAGERATIVIPGWQTMSYFSDVGSLCWFLEPGLEREVRRLHRLVGNAVADGYHVLVGTGSTQLFQAALYALSPPGPSAPMNVVSPAPYYSSYPAVTDFLKSGLYRWAGDAKMFDGDTYVELVCSPSNPDGGIREAVLKSGDGVAVHDLAYYWPQYTPITSAAAHDIMLFTVSKCTGHAGTRLGWALVKDRAVAQKMSKFIELNTIGVSKDSQLRAAKILKAITDGYDRAPAAGDDDDDSSRLFHFARRKMVSRWAKLRAAVAASGIFTLPDELPGHCTFANETVSAYPPFAWLRCGKEGVDDLEGYLRERKIISRGGGKFGADGRVVRISMLDTDEAFAIFVDRLAAMN

SEQ ID NO: 49787 - protein, 372 aa, Oryza sativa
MGLGLGGGGGMAMINRNHVVSFLAGAALPTLLLFFLASDRVSEKLAIVSSWGSGGSSSAAAADHDLRGAGGDAAPPPAQQEKFPGLPELLPKVAMEDRTVIITSVNEAWAAPGSLLDLYRDSFKNGEGIAHLLDHVLVVAVDPAGFRRCKAVHPHCYLLHVKSINLTSATRFMSREYLELVWTKLSLQQRVLELGYNFLFTDCDMVLFRDPFRHIAVYADMSTSSDDYSAARAPLDNPLNTGLYYVKATSQSVEMLRYWQAARPRFPGAHDQAVFGHIKHELVAKLRARIEPLDTLYFGGFCEYHDDLARAVTMHADCCVGLDTKVHDLTDIAADWKNYTGMSPEERKKGGFKWTYPTRCRNSIGWRKPVHP

SEQ ID NO: 49788 - protein, 467 aa, Oryza sativa
MAKEKAPCCSTNNSSKAPATARPTTKGSTTASGNGRPPPTTLHDVPDKLLELILQNLDSSLSLVRAAATCQRWRRVITQQSFVLDYDIPPHQIVGHYHHRLHPPSFTTPKPRGCCSSVAFVPTSPEFLTTGRRRRRFSLDFLPGGGSRWEIVDSRGSLLLLAKKKKSNWMRRCFPDLVVCEPVTRRHKVIPRMEVMKCHHCVGVFLLDFDRNGSFSMSNFKVTCVVYQPYFGVSGDVGTITVCEYMEDMWDWTRHMKPDEDDEVPKLFEWYVVVTHLRTRPGIHLHDRDSLRFLGHAGGSIFWAIKEDEGSLLILDENGIDPHILRTPAGVRGSELRAIVDGNGDRHNVRVVVLEGETLRVVTWLCDTDELVLEKSLHLVEATRRLQGYKESCFCGGVDIVTVSTSCAVVTPVEEKTTWMVSIDLETMEVTECKYASVAYPCELPWPPTLSACTVNCRRFGYIWSLP

SEQ ID NO: 49789 - protein, 348 aa, Oryza sativa
MAAVAFRSLLHPAAAALTERVPLPPAHLRLQGLHRHRVGVLNLFVASGHRRRILLPLAAAGGEFSSEEEEYANEEEEEGEEYVEEEEEDGEEEEAATVAAPRGYYPPRSRPALGQEPGRLFVGNLPYTMTSGEISQTFSEAGRVDNVQIIYDKVTDRSRGFAFVTMATAEEAATAIQMFNGALLGGRTARVNYPEVPRGGERAVGSAAATRENRRDDGTFKIYAGNLGWGVRADALRAAFEGQPGLLDARVIFERDSGRSRGFGFVSFRTAEDAQAALEALDGVELEGRPLRLSMAEQNPTAGSPSTVQSQEEETASESSDAETEQSITSEPSEAETEESNLQTAASY

SEQ ID NO: 49790 - protein, 226 aa, Oryza sativa; identical to SEQ ID NO: 32062

SEQ ID NO: 49791 - protein, 347 aa, Oryza sativa
MDDKFWHEILDLFFVHGRVSKGREEDDLVFFVNNMKLNGYRSSDNMENPPPFFVRRWAPKLEKITNINLADVNWERSFYLNLIAHTSYSVTVAICSIMDLCNRAEKSKPLSPVYKVTKTVYASPSRVNFHLDRRKAVETVPAYPNICFSIDDFDDTFDAVQVLSDPEHCYCVILNAHDGAAFPENTESKNPSSNVLSGVNTGSKQEKPPKRTLFSGYVSYQNVREAYDAGRSKFESLFSLGHDRTKLDKLYMRGPEGRGEVEVAVSGIADQSHERSKKDPGNSFRALVHSAASTASKLAKHAYEAASTNKRFDDELLPLKCCLMSVSLPWDYIAHDLLHKETPPLDL

SEQ ID NO: 49792 - protein, 61 aa, Oryza sativa
MPFPWTSCGTRHSGLRLSSSEVTLIPFTSLSNPCEGRRLRLHRLQAVDCGRYTGGDEETRG

SEQ ID NO: 49793 - protein, 88 aa, Oryza sativa
MILEQFDESAAEKADAAMVVAPPSNFGMVDTGVYRSGFPDPASFGFLRGLGLRSVVYLCPEPYMETNAEFLKAEGIRLFQFGIEGNKM

SEQ ID NO: 49794 - protein, 417 aa, Oryza sativa
MAAEFTKNQIAVDIFSFSDKYCDIASLGSLAKYTGGQVYHYPSFQAVTHGDKLKHELSRDLTRETAWESVMRIRCGKGVRFTTYHGHFMLRSTDLLALPAVDSDKAFAMQLSLEETLMTTQTVYFQVALLYTSSSGERRIRVHTAAAPVVTDLGEMYRQADTGAIVSLLSRIAVENSLSDKLDSVRQQLQLKLVRSLKEYRNLYVVQHRIGGRLIYPESLRFLPLYILSICKSLALRGGYADVSLDERCAAGFSMMILPAKKLLNFIYPSLYRVDEVLSMEPDRIGGSLKRLPLTMQCLDTGGLYLLDDGFTFLVWLGRMLPPELVNNILGVSLANFPDLSKVQLRECDNEYSRNFMKILGTLRERDPSYHQLCRVVRQGEQPREGFLLLSNLVEDQMSGTSSYMDWILQIHRQTQS

SEQ ID NO: 49795 - protein, 247 aa, Oryza sativa; identical to SEQ ID NO: 38702

SEQ ID NO: 49796 - protein, 242 aa, Oryza sativa
MAMEAAAERSAGAGAAATAAPESGGGGAGERRSRFRRICVYCGSAKGRKASYQDAAVELGKELVERGIDLVYGGGSIGLMGLVSHAVHDGGRHVIGVIPKSLMPREVTGEPVGEVRAVSGMHERKAEMARFADAFIALPGGYGTLEELLEVITWAQLGIHKKPVGLLNVDGFYDPFLSFIDMAVSEGFIAEDARRIIISAPTARELVLKLEEYVPEYEVGLVWDDQMPHSFAPDLETRITSS

SEQ ID NO: 49797 - protein, 126 aa, Oryza sativa
MRRLCSSTHADFATSLLLLPMCTEATSSPELCRRSAASSPETPPPDPASSPPPRQPQPHPPPPPSSPPPRPASSPSATAGADVLPIRRYRSPCRHRRRCLCCLAPLPISCHAAVLGQCAYTLGAEQ

SEQ ID NO: 49798 - protein, 402 aa, Oryza sativa; identical to SEQ ID NO: 48328

SEQ ID NO: 49799 - protein, 697 aa, Oryza sativa
MSSSHTVTVSMDVEAGQKNKDKKGISQDLILAYKTLGVVFGGLVTSPLYVYPSMNLTNPTEEDYLGIYSIMFWTLTLIGVVKYICIALNADDHGEGGTFAMYSLLCQHANIGILPSKKIYTEEENLISNQPVVAGRPGRLRRFIESSIIARRLLLLTAILGMCMLIGDGILTPAISVLSAIDGLRGPFPSVSKPAVEGLSAAILVGLFLLQKYGTSKVSFMFSPIMAAWTFATPVIGVYSIWRYYPGIFKAMSPHYIVRFFMTNQTRGWQLLGGTVLCITGAEAMFADLGHFSKRSIQIAFMSSIYPSLVLTYAGQTAYLINNVDDFSDGFYKFVPRPVYWPMFIIATLAAIVASQSLISATFSVIKQSVVLDYFPRVKVVHTSKDKEGEVYSPETNYMLMLLCVGVILGFGDGKDIGNAFGVVVILVMLITTILLTLVMLIIWGTHVVLVALYLVPFLLLEATYVSAVCTKILRGGWVPFAVSVALAAVMFGWYYGRQRKTEYEAANKVTLERLGELLSGPGLRRVPGLCFFYSNRQDGGWLTPVLAHYIRNMRSLHEVTVFLTLRYLLVAKVDGKDRVQAVRRLGPAGVYGCTIQYGYADAIDFEEDDIAGQVVGALRERVVDGEEEGERVEAARAAGVVHVRGKMRFHVGKDTRLFDRVLLGFYELLHGACRSALPALGIPLQQRVEIGMLYKA

SEQ ID NO: 49800 - protein, 340 aa, Oryza sativa
MRPSLMRSASQVLRRRRGYSSASGQPERKVAILGAAGGIGQPLSLLMKLNPLVSSLSLYDIAGTPGVAADVSHINAPAQVEGFMGDDQLGEALEGSDIVIIPAGVPRKPGMTRDDLFNINAGIVKNLCTAIAKYCPNALVNMISNPVNSTVPIAAEVFKKAGTYDEKKLFGVTTLDVVRAKTFYAGKANVPVTDVNVPVVGGHAGITILPLFSQATPATNALSDEDIKALTKRTQDGGTEVVEAKAGKGSATLSMAYAGAVFANACLKGLNGVPDVVECSFVQSTVTELPFFASKVKLGKNGVEEVLGLGQLSDFEKEGLENLKGELKASIEKGIKFANA

SEQ ID NO: 49801 - protein, 376 aa, Oryza sativa
MKVVPVPRARTAPRRHIWIPVILILVAVTVLWIYLYPPQDYTYPVRDWYPVRDWFPAEPARELTDEETAARVVFRQILSTPPFPSRNPKIAFMFLTPGKLPFEKLWELFFKGHEGRYTIYVHASREKPEHVSPVFVGRDIHSDKVGWGMISMVDAERRLLAKALEDTDNQLFVLLSDSCVPLHNFDYVYDFLMGSRHSFLDCFDDPGPHGVFRYSKHMLPEVREIDFRKGSQWFAIKRQHAMVVVADSLYYTKFRRFCKPGMEEGRNCYADEHYLPTLFLMMDPAGIANWSVTYVDWSEGKWHPRSFRAKDVTYELLKNMTSVDISYHITSDEKKELLQRPCLWNGLKRPCYLFARKFYPETLNNLMYLFSNYTIF

SEQ ID NO: 49802 - protein, 44 aa, Oryza sativa
MTAMMYSSSRVTHSARYGGTSSSSSSQRQTVPSSSAPSSTPKEQ

SEQ ID NO: 49803 - protein, 218 aa, Oryza sativa; identical to SEQ ID NO: 31305

SEQ ID NO: 49804 - protein, 358 aa, Oryza sativa
MPYCEVDRYQNGDEWDGVRLFYRRFGRGATKVLLVIGLAGTHDSWGPQIKGLTGSLEPAADDEESGDAAAAEGDDGDGIEVCCFDNRGVGRSSVLPHKSYYSTVIMARDALALMDHLGWKKAHVFGHSMGAMISCKLAAMAPHRICSLALLNVTGGGFQCFPKLDGQMLSLAFRFLRARTPEERALVDLETHYTKEYLDEKVGSCTRRTILYQEYVKGISSTGMQSNCGFEGQVNACWTHNMTTKELDTIRSAGFLVSVIHGRSDIIAQLCHARRLAERLIPVARMVELHGAHLVSHERPEEVNNALMELIKATKSMMKPEEWSSQPENSSGVILMGFEHMRNIVKVMKPVRVAAIES

SEQ ID NO: 49805 - protein, 390 aa, Oryza sativa
MEQMNTAAAKSIRCRAAVSRVAGQPLEMEEVEVAPPRAHEVRIKILCTSICHTDITFWRMEGNHPSIFGHEAVGVVESVGEHVQEVAVGDMVVPVFAAQCSECPDCLSDRSNLCSKLPNVAGLMPRDRTTRFSSVSTGEPIRHFLSVSSFAEYTVVDITHIVKLDVGFPPAMACLLSCGISTGVGAAWKVAAVEPGSSVAVFGLGAVGLAVAQGARMRGAKRIIGVDLNPDKFDVGKRLGMTDFINPNDTGGKTVSEVIKEMTGGGGADYCFECIGSTSVMAEAFQSTRNGWGKTILLGVSGNKAPISIPSHEILRGRSVIGSLFGGIKPKNDIPMLAQKYLDKELELEEFITHEMGFEEINRAFELLTQGKSIRCIIWMDGAKVIDNGE

SEQ ID NO: 49806 - protein, 246 aa, Oryza sativa; identical to SEQ ID NO: 29285

SEQ ID NO: 49807 - protein, 120 aa, Oryza sativa; identical to SEQ ID NO: 29281

SEQ ID NO: 49808 - protein, 425 aa, Oryza sativa
MAAAAADWTSLPDDILFLVMRKLGIPDLLNAGAVCSSWRSTYTSLRLPITDKSPCLLYSCDADADDDDVATVYSPSSGATFKLRLPSPAFRRRYMVGSDHGWVATADELSNLQVINPLSGVQIDLPPVTELYHVESFTDDRGRLMYSNQDNWMRRHDPQWLPVPYHPQRLRLFLYYRVTLSCSPSAGSECIVLLLHRPDGELSFARVGDRSWTRLTGIENLPETGYRYAFYNKNDRLFYLLNCLGSIHTLNLNGPSSPVASLIFKEIALWDNPNKSIAVTPRGDMVQVWRCRDPRWVDTPVRFPPEDCDDVYDPCQELYTDEILLFKVDIDGRKLVKMDSLEDYVLFMGFNSSVCLSAKDFPNLKAGCAYLADDAYEEICVNKHTWRELGIWNFKSETLESFGDPPYVLPWLNWPPPIWITPSIY

SEQ ID NO: 49809 - protein, 415 aa, Oryza sativa
MEAVAVAGGGAGLTRWQAAALSAVAGWVWAASSFDLTRRSRALVQPWVTRRVLAETPSIVRFQKVHHKLLDSFFSVLSCVVSVPFYTGFLPLLFWSGHSKLARQMTLLMAFCDYLGNSVKDAVSAPRPSSPPVRRVTATEDEKENAMEYGLPSSHALNTVCLMGYLLHYVLTYGSHDNVMVVTGLSLAFLLVMLVGIGRIYLGMHSLIDVIAGICFGVVILAFWLAVHNHVDAFVVSGQNVTTFWASLSLLLCFAYPKPEFPTPSFEYHTAFNGVAFGIVYGIQQTYFHFHNPDVPLIFSPQLPLIVFVGRVLVGIPTILVVKFCSKALSKWLLPVMCNTLGIPIVSTCYVPALKASEKCKVKSDAKQGGYLQKVFSLFPQKAYDVDTGIRFVQYASLAWSVVDLVPAIFTHLSL

SEQ ID NO: 49810 - protein, 204 aa, Oryza sativa
METDRSQPAPIDPRRARFPCCIVWTPLPLISWLIPFIGHIGICREDGVILDFAGPNFVSVDNFAFGAVARYIQVNSDECYKLLEPEGASTWDDALRKGVQEFQHRGYSLFTCNCHSFVVNNLNRLFYSGHDKWNVVSLAAVMFLRGRWVSTASVVKTFFPFALVITIGTLLGGATFLIGLLAFAAVMTGWFLVGTYCIKSLVEL

SEQ ID NO: 49811 - protein, 327 aa, Oryza sativa
MISCLGDKEGNAAGNGFLLLDSEFNVKGRWEKPGHSPLFGYDYWYQPRHKTMISSSWGAPAAFRTGFDLQHVQDGLYGRHLHVYDWPGGELKQTLDLGSTGLLPLEVRFLHDPSKDTGYVGCALTSNMVRFFKTADGSWSHEVAISIKPLKVRNWILPEMPGLITDFVISLDDRYLYLVNWLHGDIRQYNIEDPAKPVLAGQVWAGGLLQKGSEVVYVTEDDKEEQYSVPQVKGHRLRGGPQMIQLSLDGKRIYVTNSLFSRWDEQFYGQDLVKKGSHMLQIDVDTEKGGLSINPNFFVDFGAEPEGPSLAHEMRYPGGDCTSDIWI

SEQ ID NO: 49812 - protein, 129 aa, Oryza sativa
MGMSTERGKMRMRTVRLERKMRRDWRMIGFMRSNDDDEEDVDDEDEDTEYLVQPIAQPQAMAVGNDFDAAEADDADEDRDEVDDDDDGGTDLPSSSQGAKRKRDDDPSGSGDDDEDDDGVEDLRPFKHH

SEQ ID NO: 49813 - protein, 311 aa, Oryza sativa
MSFLFKSSNGATTEKNLTLEEQQEKINDLRKELGEHSSEEIQDFLSDASCLRFLRARNWNVQKASKMMKSAVKWRVSYMPQKINWDDVAHEAETGKIYRADYKDKHGRTVLVLRPGLENTTSGKGQIKYLVYCLEKAIMSLTEDQEKMVWLTDFQSWTLGSTPLKVTRETVNVLQDCYPERLGLAILYNPPRIFESFWKIVKPFLDHETYKKVKFVYSSDKESQKIMADVFDLDKLDSAFGGRNPATFEYNSYAERMRADDIKMGSSFKSNGITLPQDHSHVSADKEANGGGSDASSEASFYSGTDSPLRA

SEQ ID NO: 49814 - protein, 256 aa, Oryza sativa; identical to SEQ ID NO: 47620

SEQ ID NO: 49815 - protein, 263 aa, Oryza sativa; identical to SEQ ID NO: 30602

SEQ ID NO: 49816 - protein, 308 aa, Oryza sativa; identical to SEQ ID NO: 40436

SEQ ID NO: 49817 - protein, 296 aa, Oryza sativa
MDRYQRVERPRPESAIEENEIRITAQGLIRNYVSYATSLLQDRRIKEIVLKAMGQAISKSVAVAEIIKKRVPGLYQDTNISSVSITDVWEPIEEGLVPLEMTRHVSMISITLSPRDLDKNSPGYQTPVYVEQPRQQPRLQQAPPPPQRQVRQPPPDYEDSYVRGRGRGRGRGRGRGWGRGGYGGYGGYGNNQGGYNQGGGYYDNQGGYGGYDNQGGYGGYDNQGGYGGGGYGYNQGRYGNYQENGGYNRGRGGMRGRGNWNYRGGYERGRGGGFPGGRGYGGRGRGRMGGRGGRGN

SEQ ID NO: 49818 - protein, 377 aa, Oryza sativa
MAPPTAVSASTAGLIWSLSPSLSLVVTTSVALLLVLGGVSGIRVNVIRLPSASPFPAFREAPAFRNGDGCPPARGSAAAEGGRVDVAMTLDANYLRGTMAAVFSILQHTACPESVAFHFLAARSDPDAGDLAAAIRATFPYLGAAVSVYRFDPSRVRGRISRSVRRALDQPLNYARVYLADTLPAGVRRVLYLDSDVVVVDDVRKLWSVDLAGHVVAAPEYCHANFTKYFTDAFWSDGELSGAAFRRGRRRPPCYFNTGVMVMDMGRWRDGGYTRRVEEWMAVQKRRRIYHLGSLPPFLLVLAGDIKAVDHRWNQHGLGGDNAEGKCRSLHPGPVSLLHWSGKGKPWLRLDSRKPCAVDYLWAPYDLYKAAVPALEE

SEQ ID NO: 49819 - protein, 856 aa, Oryza sativa
MSLHSLKETLQSSSFSQPQSESQPRSPPPLLARRPPKTSLSQQLLRLDASSSSSSFSVSPPPPPRTSPTSDAAADDAPPLPEEEDEVPCIRPRASLPPAASLDSRGPYEPLALSPPGERPVVQVPSSINCRLLVHQRDGVRFLYNLYRNNHGGVLGDDMGLGKTIQTIAFLSAVIGKDNDHGDQLVEGRKIAPILILCPTSVIRNWENEFAEWARCSVAVYHGPNRDLVLQKVETQRLEIVITSFDTFRIHGKILCGISWDLVVVDEAHRLKNEKSKLYTACLEITTRKRFGLTGTIMQNKIMELFNLFDWIVPGCLGDREHFRVYYDEPLKHGQRFSAPERFVQVADKRKKHLVSVLSKFLLRRTKEETIGHLMLGKEDNIVFCRMSDVQKRVYRRMLQQPDVQILINKDLPCSCGSPLTQVECCKRTEPHGIIWSYLHRDNPEGCSLCPFCLVLPCLGKLQQISNHLELIKPNLKDEIEKQKKDAELAAAVFDTDIELVGGGAKSENFMGLSDAEHCGKMRALERLLSLWTLQGDKILLFSYSVRMLDILEKFLIRKGYCFSRFDGTTPMNARQLLIDEFNRCPSKQVFLISTRAGNLGVNLVSANRVVIFDPSWNPAQDLQAQDRSFRFGQRRHVTVFRLLGAGSLEELIYSRQIYKQQLSNIAVSGKIEKRYFEGVQDDKKFQGELFGICNLFRDLSDKLFTSEIIEMHGEHGKGNTAETIGIREIVDTNIFGTQDQMKSSMTAIHNENKNLYHCGIVYAHRNEDVVNTRTNEASNCAEDKTVPRHLEELQSKKNETMHTIKAKSYSLVQKKKEFSRIASFMGMNDLEFSKWLLSVSPLQRHEVLDRYRNAK

SEQ ID NO: 49820 - protein, 337 aa, Oryza sativa
MTSDASPQPIQSAKSAVESLAAVLGAALPGTLASADDPANALLHDAGVARAVVGRLRREGSGAGNDGLCRWLYDAFQSNLPEIQLAVLRFVPALAGVYMSRAVSRKPLAGFEAVLLALYAHAAAQRGSGEAETVSLPNLANPSVYHDAKVPPKTKAAELDVAVLSPALEPHGTMRATRRARIVGAVLELYHGKLAIMPLSSKMEFCEFCVAWTGNRSKLDDKPRVAAASEPAAAEEKLRRVPLPWELFQPVLRIVAHCLLGPTNSDELKTQATRAAECMYWRAAETMDARSVLATRSLVRLSQMTEEPIPEPSFSGAVETNMAELEAMRANILSNKN

SEQ ID NO: 49821 - protein, 498 aa, Oryza sativa; identical to SEQ ID NO: 49206

SEQ ID NO: 49822 - protein, 239 aa, Oryza sativa
MGEPLRTLQNDQSEAKDKGNKIDIKYELTSAILSLKHQQASGRLKMPSRLPARYPHNVGHCAELIMNLGIGEDVHCLNVMRSCNHENILHPGIIKEVIIGDSSFNVAWMERYTRVLSEYVQLLLSTARFHAPVGATLLLPSPHLQMVLRGIFDGMEQLFLNGYYHGNFSLENTYCFLECSTPVVKLTNFRKKVPEQAMTWGVEEVRSDRYLSISCIECEICSFVACSLDQVVGSSLFCV

SEQ ID NO: 49823 - protein, 581 aa, Oryza sativa
MTICSCEETINEFEMLTRDAARVQKDTLKKILEINASAEYLQNFGLGGRTDAESYKSCIPLCVHNDIEPYIQRIVDGDTSPVVTGEPITNLSLSSGTTHGKPKFIPFNDELLETTLQIYRTSYAFRNREYPIGQGKALQFVYGSKQVITKGGILATTATTNLYRRQRYKEGMKDIQSQCCSPDEVIFGPDFHQSLYCHLLCGLIYSEEVHSVFSTFAHSLVHAFQTFEEVWEDLCTDIRDGVLSKKVTAPSIREAVSKILKPNPELADSIYKKCIGLSNWYGVIPALWPNAKYVYGIMTGSMEPYLKKLRHYAGNLPLISADYGASEGWVGSNIDPTVPPEQVTYAVLPQVGYFEFIPLEKPIGEETENSASIHYIESDPVGLTEVEVGKIYEVVITNFAGLYRYRLGDVVKIARFHNSTPELQFICRRSLVLSINIDKNTEKDLQLAVEEASKFLEGEKLEVMDFTSFVERSSDPGRYVIFWELSGDASDEVLSSCANALDLAFIDAGYTGSRKIKTIGPLELRILRKGTFKEILDHFLSLGGAVSQFKTPRFVNPSNSKVLQILSRNVTQSYFSTAYGF

SEQ ID NO: 49824 - protein, 639 aa, Oryza sativa
MGNSLACFCCGGGAGGRGGRHVVPAALPSDPAYDEGLGHSFCYVRPDKFVVPFSADDLVADAKAAAAAEGEATTFRAISGAALSANVSTPLSTSVLLLMPEESSASATASSGFESSESFAAVPLQPVPRFSSGPISAPFSGGFMSGPLERGFQSGPLDAALLSGPLPGTATSGRMGGAVPALRRSLSHGGRRLRNFTRALLARTEKFQDSADLGSPDAAAAAVAACGGDPCGLQWAQGKAGEDRVHVVVSEERGWVFVGIYDGFNGPDATDFLVSNLYAAVHRELRGLLWDQREQNVQHDQRPDQPGSAPSTTASDNQDQWGRRRRTRRSRPPRGADDDQRRWKCEWEQERDCSNLKPPTQQRLRCNSENDHVAVLKALTRALHRTEEAYLDIADKMVGEFTELALMGSCVLAMLMKGEDMYIMNVGDSRAVLATMDSVDLEQISQGSFDGSVGDCPPCLSAVQLTSDHSTSVEEEVIRIRNEHPDDPSAISKDRVKGSLKVTRAFGAGFLKQPKWNDALLEMFRIDYVGSSPYISCNPSLFHHKLSTRDRFLILSSDGLYQYFTNEEAVAQVEMFIATTPEGDPAQHLVEEVLFRAANKAGMDFHELIEIPHGDRRRYHDDVSVIVISLEGRIWRSCV

SEQ ID NO: 49825 - protein, 144 aa, Oryza sativa
MCGVDQRAGREDRGRTMILQNNGYDASGSFMVYSQIDSELMNTMVLSPSDLPPGRGGPSLYPTGFSLLPDVEAAQDSSGIALGEVGGTLMTMGFQIPVKLASGDRMYSRSAASAIRLMTDTIALVKKTLMNEHSGIYGVSPFHP

SEQ ID NO: 49826 - protein, 328 aa, Oryza sativa
MSSPPPPPPTEMAEGEVESRDWAEMPSDALAAVFGKLDVTDLLVGAGVVCRAWRRLAAIDPTLWRRVDMSHQGDIMEVDEAVAMARAAVDRAAGTMEAFWADSFVTDGLLLYISERASSLKSLQLSMCLNVSNEGMAEAMKGFPRLEELDITFCSLYGDVCASVGKACPELKCFRLNERYTLQMDYAAPDIMDDDTEALGIASNMPKLRELQLIGNKLTNDGLMSILDHCQHLESLDIRQCYSIQMDDALKSKCSRISDLKLPHDSISDFKYRAYIFSSSAFSGSDLELDMYDDLLDVVTDDDDADFDDMDDYDDGGSDGGMYDEFDI

SEQ ID NO: 49827 - protein, 388 aa, Oryza sativa
MLEKQWELPFDDDNHAMAIGLAEDDDDTSKATVVVARSSVSARQRRMSGRRRGRTKNGAAHFAVSPELIQSRNRIYLRGTVSKELLTHKQVVHLSHKIKDGIWLQQQRSKLKEKLGNEPSYKQLAHSLKISPPELRSRMHESFLAREMLTMSNLRLVISIAQKYDNLGVELADLIQGGLIGLLRGIEKFDASRGFRISTYVYWWIRQGVSRALAENSKTFRLPTYLHERLIAIRGAKYELEDQGIAPTIENIAGSLNISEKKVLNATEAVNKVLSLDQQAFPSLNGLPGETLHSYIEDQNVANDPWHGFEEWYLKEEVNKLLNSTLNERERDIIRLYHGIGKQCHTWEDISRQFGLSRERVRQVGLIAMEKLKHAARRKNLEALLEDY

SEQ ID NO: 49828 - protein, 319 aa, Oryza sativa; identical to SEQ ID NO: 31583

SEQ ID NO: 49829 - protein, 313 aa, Oryza sativa
MSALYLARGASKVVRRITSETSVELKILTEKWQLLLAGLVFQYIHGLAARGVHYLHRPGPTLQDLGFMILPELGKERGYISETLFTFIFLSFVLWTFHPFILQTKRFYTVLIWRRVLAFLCASQFLRIVTFYSTQLPGPNYHCREGSALARLPHPQNVAEVLLINFPRGVIYGCGDLIFSSHMIFTIVFVVTYQKYGNIRFIKMLAWCIAIAQSLLIIASRKHYSVDVVVAWYTVNLVVFFVDKKLTELPDRSAGSTSVLPVSIKEKDSKLKEDKTRMLNGNSVDSADWRPWTQMNGKHIENGNHLDTETTKT

SEQ ID NO: 49830 - protein, 566 aa, Oryza sativa
MSKGAIIGASTVLVVAVVAAVCVVSFKNGGGGKEDGELSTSVKSVKAFCQPTDYQQTCEEELGKAAGNGASSPTDLAKAMFAVTSEKISKAISESSTLEELKNDKRTSGALQNCKELLEYAVDDLKTSFEKLGGFEMTNFHKAVDDLRTWLSAALTYQGTCLDGFLNTTTDAADKMKSALNSSQELTEDILAVVDQFSATLGSLNIGRRRLLADDGMPVWMSEGGRRQLLEAAGPEAGPVEFKPDVTVAADGSGDVKTIGEAVAKVPPKNKERYTIYVKAGTYNEYVSVGRPATNVNMIGDGIGKTIITGNKNFKMNLTTKDTATMEAIGNGFFMRGITVENTAGPENHQAVALRAQSDMAVFYQCEFDGYQDTLYPHAQRQFFRDCTVSGTIDFIFGNSQVVLQNCLLQPRKPMDNQVNIITAQGRREKRSAGGTVIHNCTVAPHPDLEKFTDKVKTYLARPWKEYSRTIFVQNEIGAVVDPVGWLEWNGNFALDTLYYAEVDNHGPGADMSKRAKWKGVQSLTYQDVQKEFTVEAFIQGQEFIPKFGVPYIPGLLPQTQQGRMH

SEQ ID NO: 49831 - protein, 118 aa, Oryza sativa
MAMATSSASTVSFSARPSAASAVRPCAAAGRARARAAAGESGKWWAPLLGWSGKADYIEAPAPAVVAAAEESEARRRPFVGGLTEEKARELRARMVETESFHDAMYHSAIASRLARSA

SEQ ID NO: 49832 - protein, 229 aa, Oryza sativa; identical to SEQ ID NO: 30505

SEQ ID NO: 49833 - protein, 329 aa, Oryza sativa
MYEPKPFSSIVLAHNDPVSHNQQIERINNNVVSNSGGNSSNSNFAARQRLRWTDDLHDRFVDAVTQLGGPDRATPKGILRIMGVQGLTIYHVKSHLQKYRLAKYIPDPTADGAKSDKKDLGDLLADIESSSGMEIGEALKLQMEVQKRLHEQLEVQRQLQLRIEAQGRYLQKIIEEQQRLSGVLGESGKLGALGPAPGEPYQDSNKTDPSTPVPTSESPIRDKAGSGLFKTISSHDDCREPLTPDSSCRAGSPLESPPRASKRIRVSSDIDHRGNNEFPPPLKVPEPSSGSDFRQESSVLLSSSAVHFDSLESLDADENVFTNGSGSDD

SEQ ID NO: 49834 - protein, 124 aa, Oryza sativa
MRIQSLRCHALYNHGATRLSVIPIHASRSKALRYLSVRWGIELQNVVVLVGETGDSDYEELFGGLHKTVILKGEFNTSANRIHSVRRYPLQDVVALDSPNIIGIEGYGTDDMRSALKQLDIRAQ

SEQ ID NO: 49835 - protein, 283 aa, Oryza sativa
MKKALVVGVLAVLMATAMAASAPQPHVPFTDEDLESEESMWSLYQRWRGAVHTSSLDMDVAETESRFEAFKANARYVSEFNKKEGMTYKLGLNKFADMTLEEFVAKYTGTKVDAAAMARAPQAEEELELAGDVAASWDWRQHGAVTPAREQGTCESCWAFSAVGAVEGANAIATGKLVTLSEQQVLDCSGAGDCIGGGSYFPVLHGYAVKQGVSPAGSYPPYEAKDRACRRNTPAVPVVKMDGAVDVTASEAALKRSVYRAPVAVSIEATQSLQLYKEVINRI

SEQ ID NO: 49836 - protein, 299 aa, Oryza sativa
MQMESYYGAFHADEAAFFFPHHVPASPELPFGLIASPEPEPEPEQAAAEARQSAFQEYGGAVHAGAPAAAGAVTTGGTNIHRRVMDVLGRMGGGGGGGEKGEGEEMEEEEEVPQRRRRGQGADVESSRGFRHMMRERQRREKLSQSYADLYAMVSSRSEGDKNSIVQSAAIYIHELKVARDQLQRRNEELKAQIMGHDEQQPCVTVQFEVDEPSSSIDSMIAALRRLKSMSVKARGIRSSMSGNRLWTEMNVETTIAACEVEKAVEEALKEVERNQPDSDAPFPGSKGWTQTSHVQNVF

SEQ ID NO: 49837 - protein, 217 aa, Oryza sativa
MDSKDKEKEHEQTASGRNPDVNDVEEEEEDEEGNKRAVVLGPQVPLKEQLELDKDDESLRRWKEQLLGQVDTEQLGETAEPEVKVLNLTILSPDRPDLVLPIPFVPDEKGYAFALKDGSTYSFRFSFIVSNNIVSGLKYTNTVWKTGVRVENQKVMLGTFSPQLEPYTYEGEEETTPAGMFARGSYSAKLKFVDDDGKCYLEMSYYFEIRKEWPTIQ

SEQ ID NO: 49838 - protein, 229 aa, Oryza sativa; identical to SEQ ID NO: 31849

SEQ ID NO: 49839 - protein, 266 aa, Oryza sativa
MCIAAWVWQAHPQHQLLLLLNRDEFHSRPTKAVGWWGEGSKKILGGRDVLGGGTWMGCTKDGRLAFLTNVLEPDAMPGARTRGDLPLRFLQSNKSPLEVATEVAKEADEYNGFNLVLADLTTNVMVYVSNRPKGQPATIQLVSPGLHVLSNARLDSPWQKAIRLGKNFREHLRKHGDDEVEAKDIVERLMTDTTKADKDRLPNTGCDPNWEHGLSSIFIEVQTDQGLYGTRSTAVLSVNYDGEASLYEKYLESGIWKDHTVHYQIE

SEQ ID NO: 49840 - protein, 366 aa, Oryza sativa
MEDNLPVNVREYQELAKKALPKMAYDYINGGAEDEHTLRENIAAYTRIILRPRVLVDVSKIDMSTTLLGYTMRSPIIVAPTGGHKLAHPEGEKATARAAASCNAIMVLSFSSSCKIEDVASSCNAIRFYQLYVYKNRNVSATLVRRAESCGFKALLLTVDTPMLGRREADIRNKMVFPRSGNLEGLMTTDDHDTTNGSQLERFARATLDPSLSWKDIEWLKSITSMPIFLKGIVTAEDARRAVEAGVAGVIVSNHGARQLDYAPATIAALEEVVRAVAGAVPVLVDGGIRRGTDVFKALALGARAVMVGRPVFFGLAARGEAGARHVIEMLNGELEVAMALCGCRSVGEITRSHVMTEGDRIRSLL

SEQ ID NO: 49841 - protein, 209 aa, Oryza sativa
MQEFRERQLQRLESATATISAAAAEAGAVVGTSRDAEGVALADYFLGPGLDALMQRVGDGDAERQGTLPAKKEAVESMPTVEVAAGGDCDSACAVCLEDYAAGERATEMPCRHRFHAKCIVPWLKMHSSCPVCRFQLPTDDDDDSSKSARGGAAHSGGGRRLSQPAPRVDGGGLGRLPAVMQELRSILSQPSPASTSGSSSHAQQHSDE

SEQ ID NO: 49842 - protein, 364 aa, Oryza sativa
MVEFLQSSVGIIHKNHAESITSFIKESVDEELKDADSSKASQKKRLTFCVEGNISVGKSTFLQRIANETIELRDLVEIVPEPVAKWQDIGPDHFNILDAFYAEPHRYAYTFQNYVFVTRVMQERESSGGIKPLRLMERSVFSDRMVFVRAVHEANWMNEMEISIYDSWFDPVVSSLPGLIPDGFIYLRASPDTCHKRMMLRKRAEEGGVTLDYLQGLHEKHESWLLPSKGGGTGVLSVSQLPTHLEGSLPPAIRDRVFYLEGDHMHSSIQKVPALVLDCEPDIDFNKDIEAKRQYAQQVAEFFQFVKKKKEAPSEQTSTDKNRINPQIMLPHKGGLWVPDGRNPFSGSAMNLNFRRAMSSYLST

SEQ ID NO: 49843 - protein, 337 aa, Oryza sativa
MELDSLREAFDRVIEKRASSSAKAQEVIDQIVSEVEQAITKMQMMNTDSMGTADHSSILAELKAKLNELAPLNQLEGCQKELNVALSKYLKLLEKSFSPDISKAYRNVDFEASTINSIIANHFYRQGLFDLGDSFVRECGESDGAHLKLQFQEMYSILEAMQVRNLQPALSWAAKNHDQLLQNGSMLELKLHQLQFVEILTKGSRDEALKYARTHLVPFASLHKAEIQKLMACLLWADRLDQSPYAEFMSSTHWEKLAEELTHQFCSLLGQSSESPLGVAVSAGFQGLPTLLKLTTVMAAKKTGVAGDETTASTHRYRTRIPVPLCLCMSGAQRAVE

SEQ ID NO: 49844 - protein, 192 aa, Oryza sativa; identical to SEQ ID NO: 30466

SEQ ID NO: 49845 - protein, 503 aa, Oryza sativa
MESLLAAGAGGIGVAAAAAVVAATLAVVPPKDRGNNPPPAVPGLPVIGNMHQLKEKKPHHTFTKWSKTYGPIYTIKTGASSVVVLNSTEVAKEAMIEKFSSISTKKLPKALSVISRKNMVSISDYGDFYKMAKRNIMLAILGFNAQKHFCDTRERMVSNVLSSLHKLVAVDPHSPLYFREVYTTELFGLSLIQNLGEDVCSVYVEEFGREISKEEIFHVLVHEILSCVVEPDWRDYFPYLSWLPNKSFETIVSSTEFRRDAVMNALIKRQKERIARGEARISYIDFLLEAKNSTQLTDHQLMLLLAESIAAAVDTVLVTTEWAMYELAKNPDKQEWLYREIREVCGGKAVTEEDLPRLPYLDAVLHETLRLHSPVPVLPTRFVHDDTTLAGYDVPAGTQVMINVFGCHMDEEAWESPGEWSPERFLGEGFKLADRYKTLAFGAGRRTCAGSQQAVSIACVAIARFVQELQWTLREGDGDKEDTMQYTALKLHPLHVHLKPRGS

SEQ ID NO: 49846 - protein, 711 aa, Oryza sativa
MGGPLGAIIGRHPAAAGGGGGDELGGVGGGGGGDGIIRHNRRCRDLAFLVLFAAFWVAMIVNSSFGFNQGNPLRLTYELDYKGNICGSRHGDPDLHELDVRYWMNPNQVYQSGVKDNKINLADAKAICLMECPMPAADGLNFVCDYPEGDIRLSVDDWIDRDYDYFEFLTPDMRNSSLQLQGPCYPVIFPSVNVYWSCQFIARASNVSLKHWQQMGGINIDENILIDKTIHKAINSKSSVLKRYVADIGKSWPVLIVCGGLLPLFLSVIWLLLIRYFVVATPWITVVVFNALVISVTMFFYIKAGWLGNDPLTVVIGESDPYVHITGREISHLHAATVVMTVVMIIAFLTSIAIIRRILIATPVLKVAAKVIGEVQALIIFPVVPYFILAIFYMFWFSATLHLFSSGQVLRNDCNTDCCSYDLKLGKVNCDNCCGYSIHYTPHIGIAILFHLFGCYWATQFFIACSSTVIAGSVASYYWARGEISHDIPFVTVVSSMKRLLRYSLGSVAIGSLVVSAVEWVRFILECLRRKLKLVDSARESCFGKMTSSSSQCCLGCIDWTLKSVNRNAYIMIAITGKGFFKASVLATGLIMNNILRIGKVNVIGDVILFLGKLCVSLFCALFAFLMLDTHKYKSAHNKISSPLVPVVVSWALGFIVAKLFFQVVEMSIDTIILSFCQDAEEHQGNAQYAPPLLMETLDEQSELQRLTQGP

SEQ ID NO: 49847 - protein, 224 aa, Oryza sativa; identical to SEQ ID NO: 32660

SEQ ID NO: 49848 - protein, 253 aa, Oryza sativa
MASNKQIDLESQKPATSSPAASVSSAAAATAPPASSSAVPVSVGITNRHNVQPETEPLLLLAGGDGDGGSDDETTRLERTITRAFRSTAELAKHLPTGAVLVFEVLSPVFTNGGKCQDVNRVMTAWLVGLCAAACFFLCFTDSFHDGKGTVRYVVATRAGLWVIDGTAPPPPDVAATYRLRFIDFFHAVLSLIVFLSVAMFDHNVGACFYPVMSYDTRQVLTDVPLAGGLVGTMLFATFPSTRHGIGFPVHVA

SEQ ID NO: 49849 - protein, 279 aa, Oryza sativa
MATARTLAAAAAAARAFSLTATSGGGVSMVQGASRGIGLEFVRQLLKRSDEGRVVATCRAPDSAVELQKLRQEHEQRLAVLPLDVTDESTIEAAAASIGETHGSLNLLINATGILSIPNVIHPETTFSKVQKSSLLLAYEVNAVGPILVIKHMWPFLKAGGCSETGRGFSLVANMSARVGSIGDNGLGGWHSYRASKTALNQLTKTVSVELGKKDNIACILLHPGTVDTDLSRPFQKNVPKDKLFTREFSVQKLLSIIDNVKKSDNGKFFAWDGQEIPW

SEQ ID NO: 49850 - protein, 107 aa, Oryza sativa
MAYVERGVVKDKRTIWRLSIISDFFRAIVNFIRMFFLTMFSIEKTDSYRKGYGSGKKWDGGPGGGGPGGGPYGGGRGGGGGLRGPRTLSDIRSNDQNSLPACGSCCG

SEQ ID NO: 49851 - protein, 268 aa, Oryza sativa
MMAAAGLESAWEYLITHFSEFQLASIGTFLLHESVFFLSGLPSLLFERLGLFSKYKIQKKSNTPDYQNRCVVRLVLYHVCVNLPLTILSYRTFKFMGLRSTLPLPHWTVVVSQVLFFFVLEDFIFYWGHRALHTKWLYQHVHSVHHEYATPFGLTSEYAHPAEILFLGFATVAGPALTGPHLFTLWVWMVLRVLETVEAHSGYHFPWSPSNFLPLYGGAEFHDYHHRVLYTKPGNYSSTFIYMDWLFGTDKDYRKTKALEEKERTKHL

SEQ ID NO: 49852 - protein, 309 aa, Oryza sativa
MAPATTAAMALAPPPSHHHHHHHVKQLQLPPSVSVSVPLRSGFLGRALPAAANPQPLLAAESRRSSAVSVRMSWDGPLSSVRLIMQGRNVKLNEKVKEHIEEKAGRAVAKHSQLVKEVDVRLSARGGELSRGPKICRCEITLFTKRHGVIRAEEDAESTYASIDLASSIIKRKLRKIKEKETDVRHLKGTKPPVSDWPPSLLDNNDDDAQAQLKDLEEAVGAEDEDTVLTKVVRTKVFEMPPLSVEEAMEQLVNVDHNFYAFRDEKTGEMNVLYKRKEGGFGLIVPKGDGHLHKETIPNSDHHHPSLAA

SEQ ID NO: 49853 - protein, 187 aa, Oryza sativa; identical to SEQ ID NO: 28677

SEQ ID NO: 49854 - protein, 202 aa, Oryza sativa; identical to SEQ ID NO: 30856

SEQ ID NO: 49855 - protein, 301 aa, Oryza sativa; identical to SEQ ID NO: 48373

SEQ ID NO: 49856 - protein, 263 aa, Oryza sativa
MAKYCMEDVPDLLKDESVDNVPALLSRLVKSLPANAGNLIKWVIEVRRQEEGGSGLSKEEEERLILKEMILQQVRDTELFRLVRELQFTKQPCCSCSYSSDDDSFTRIAASVCCQGAALLTGNLSSKDGFCCRETCFKCVQVDGDGPKTVVTGTAVSGVNEQSVDMLLPISTLETSVCNSNSSNEVVKYPSRTDILTVLLLALHPSTWVGIKDERLKAEFQSLISTDILHDDLKREILHLRRQLHYVRSCKEEEYGDPVPQSH

SEQ ID NO: 49857 - protein, 238 aa, Oryza sativa; identical to SEQ ID NO: 30553

SEQ ID NO: 49858 - protein, 240 aa, Oryza sativa
MLLAKPHLSSSSFLPSTRVSSPAPGPNHAKPIAASPAPRRCLRLAVTSAAAPAASSAEAAAALSRVDVLSEALPFIQRFKGKTVVVKYGGAAMKSPELQASVIRDLVLLSCVGLHPVLVHGGGPEINSWLLRVGVEPQFRNGLRVTDALTMEVVEMVLVGKVNKHLVSLINLAGGTAVGLCGKDARLLTARPSPNAAALGFVGEVSRVDATVLHPIIASGHIGHRHCGRRRDRAGLQHQR

SEQ ID NO: 49859 - protein, 87 aa, Oryza sativa
MLQRQLDVDILVTGHTHQFKAYKHEGGVVINPGSATGAYSSITYDVNPSFVLMDIDGLRVVVYVYELIDGEVKVDKIDFKKTATMHA

SEQ ID NO: 49860 - protein, 226 aa, Oryza sativa
MPPPPPPLLLAAAVLASAAAALADPPPPPSPTPWPERFHAVLFTNLTQTSGGGKLQMTDLYYDWPGGRNLNLVAGQLSGDPVYDVEWTNGTSYYFDSASCRTLLFPVGILPPDWLAAGAAYLGREAVDGFDCHVWTKVDFIWYYEDVVTHRPVRWNFYTGMQQHVMSFEVGGALEDSKWQAPAYCFNDQEAATNSDTANDNEDGEVDAMSSLLKFFRAQQTAVAAV

SEQ ID NO: 49861 - protein, 403 aa, Oryza sativa
MADPSRSSPTAAAAGDALLAAAAAPGDAPDATALAVAADADAEFGFQRAELGTEKLAGTVQFHERHVFLCYKGPEVWPSHVEAAESDRIPRLLAAAIKTHKSDLKKKTKLTICEGEDGTESSNGDVLIFPDMIRYRGLTHFDVDNFVQEVLVKDTEWLPGSPEAIKGSYVFVCCHASRDKRCGVCGPALIKRFKEEIGVQGLADQVSVSACSHVGGHKYAGNVIVFSADAKGEVTGHWYGYVSPDDVPVLLHKHIGQGEIVDHLWRGQMGLSEEEQRKALESKHVTNGVTEDGAHESPEETTNGSACNPVAAGGCCQGNGGFTCCQSDLPKEDKSITAEQNQKSSEKGADKECAAGSKKRHMKMCSMPTWFETWETADTYAALGIVAAAASVFVAFRIYKNLN

SEQ ID NO: 49862 - protein, 78 aa, Oryza sativa
MASAASSSSSSTQFDDAAARRQQQLQQQRKPPLLMLLPLIYAPVLPLIRIGLRHNPVWRDRLFYGVLAGAFAHGTYLM

SEQ ID NO: 49863 - protein, 639 aa, Oryza sativa
MGSMPEGRKCITCIGQPIDESKRSKLGKGSRILSRLLSPLEVRQILKAEKECQANQLRPEQLIINGFPLNPDEMASLLSCQRPPQKLKPGRYWYDKESGLWGKEGEKPDRVVSTNLTFNGKLQPNASNGNTQVYMNGREITKIELRVLKIAQVQCPRDTHFWVYDDGGYEEEGQNNIKGKIWESPVTRFACALFSLPVPPANSDEPKDEAPYSARTVPDYLDQKRIQKLLILGSPGAGTSTIFKQAKLLYDTRFTQEELDSIKLMIQSNMFKYLGILLEGRERFEEEALAGSNNPSSEDENTQHDGNKSNGSDSCIYSINAKLKKFSDWLLDIIAMGDLDAFFPAATREYAPIVEEMWKDPAIQATYKRKDELHFLPDVAEYFLSRAIEVSSNEYEPSEKDIIYAEGVTQGNGLAFIEFTLDDRSPMSEMYTDNHEPHSQTLNKYQLIRVSAKGMNEGCKWVEMFEDVSMVIFSVALSDYDQLGAPSSGGNSPLVNKMIQSRDLFEATIRQPCFRDMPFVLVLNKFDLFEEKIGRVPLSTCEWFSDFCPLRTHHNNQSLAHQAFYYVAMKFKELYAACTDRKLFVWQARARDRLTVDEAFKFIREVLKWEDEKDGGGYYPDESFYSTTELSSSRLIRQE

SEQ ID NO: 49864 - protein, 237 aa, Oryza sativa; identical to SEQ ID NO: 32031

SEQ ID NO: 49865 - protein, 531 aa, Oryza sativa
MAAVAGSASAGANGSAAAHRVGAPTNPMATALLTDQYQFSMAYAYWKAGKHADRAVFDLYFRKNPFGGEFTVFAGLEECIKFIANFKFTEDDILFLQSVMPMCEDAFFDYLRKTDCSDVEVYSIPEGSVVFPKVPLMRVEGPVAVVQLLETPFVNLINYASLVTTNAARHRHVAGKSKVLLEFGLRRAQGPDGAISASKYCFMGGFDATSNVLAGNLFGIPLRGTHSHAYVSSYMSLDEIPDKSLKSKDGSRVCKDFVSLVKEWLQKIQLADSLCGVFGETNQSELAAFASYALAFPTNFLALVDTYDVMRSGIPNFCAVALALHDLGYKASGIRLDSGDLAYLSIEARKVFRTLEKEFNVPAFGKMIITASNDLNEETIDALNKQGHEVDSFGIGTYLVTCYSQAALGCVFKLVEINSRPRIKLSEDVAKVSIPCKKRCFRLYGKEGYPLVDIMMRESEPSPKAGERILCRHPFLESKRAYVVPQHVEELLQCYWPGTSNKPRVELPSLEEIRGAACNSLKNFDQITSGG

SEQ ID NO: 49866 - protein, 362 aa, Oryza sativa; identical to SEQ ID NO: 32852

SEQ ID NO: 49867 - protein, 125 aa, Oryza sativa
MDTLLGSGRFLARRPPLALAPRCSRGSPEKGGGSDKGDTSSTDWDKAWSTFKKKGKKTLFSEFSPNKYVSWNPRRSEYPLSEEVDPIRRTERSNLMLWTSPKFTLVMAIVIVSTLLIYTIVVPPK

SEQ ID NO: 49868 - protein, 185 aa, Oryza sativa; identical to SEQ ID NO: 35199

SEQ ID NO: 49869 - protein, 311 aa, Oryza sativa
MGVATNGSSSSTSESAETAQSQAYKFLIYGRTGWIGGLLGQLCAARGIPFAYGAGRLENRAQLETDIDEVAPTHVFNAAGVTGRPNVDWCETHRTETIRANVCGTLTLADVCRARGLVLINYATGCIFEYDAGHQLGTGIGFKEEDTPNFVGSFYSKTKAMVEELLKNYENVCTLRVRMPISSDLSNPRNFITKIARYDKVVDIPNSMTILDELLPISIEMAKRNLTGIWNFTNPGVVSHNEILEMYRDYIDPNFSWKNFTLEEQAKVIVAPRSNNELDCTKLKAEFPELLSIKDSLVRYVFKPNQKTSKA

SEQ ID NO: 49870 - protein, 267 aa, Oryza sativa
MSFADLEAGAVRAPRRARGPDATRALVFQITTAVASYRRLLNSLGTPKDTPALRDQLQKTSHNILQLAKDAKEKLRRAAEADKNADTSADKRVADMKLAKDFATTMEEYGKLQNLAIQREMAYKPVVPQTSQPNYTTGGIEARDSGKIPEQHALLAESKRQEVLQLDNEIVFNEAIIEEREQAIQDIQQQIGEVHEAFKDLATLVHIQGVTIEEIDTNIENSAAATKEAKTELAKASKTQKSNSSLLCILLVIFGVVLLIVIIVLAT

SEQ ID NO: 49871 - protein, 240 aa, Oryza sativa; identical to SEQ ID NO: 43943

SEQ ID NO: 49872 - protein, 63 aa, Oryza sativa
MVMSSADSHVPTSRLLPAEVEVGMGRPIRRSFGRQPYKSPSINEEKGSKKERERWCMWYPLEI

SEQ ID NO: 49873 - protein, 244 aa, Oryza sativa
MEAKLDRIAEQLKALPLLSQVVEGHQHRLEELSKQIAVAAALVEDVKKEQAAAAASRAARIDGYSGGFFRLAKLKFPTFSGTFPRLWITKCTRYFEFYGMPMKMWVSWASMHMEGMAELWMMTYEKRHERDWGRFCEAVEERFGPYDHKQKLTALLDLRQEGIMTVSEYRDQFEERLYHAKLFDPVSSNCFDVALFIRGLREEIRDRMWQQTPATVDAAAQSALVQEALYNLEMQRAQRDPYKE

SEQ ID NO: 49874 - protein, 426 aa, Oryza sativa
MEEASVTGELLEQEAPSSSISGVDWSQLPADLLVCIFGVLEVPDVFSSGVVCRAWHASFLEARRLGICSSNPGPCLVFSSGDRDPSVVTLHSLTTGKNYYVTMPDPPFRTRYIVGSSHGWLITADERSNLLLVNPATQAQIPMPPPETIANVRIRCNGEGVPHGYDLFKLDMSSQDFDTETEPDDLSWEEGRFYFYTRVVLSADPSSGNCTVMILHLLRNLLFFARVGDTHWTWINVNELCWNYHDVLYNDDDRLFYAIRGNGDVHAINTNGPSPILRVVLDAKSSLVDCAKYIVLSELGGLLQVWRYHHYVNNNKERRTSELVVYKVDLVEHKLVELKDFEDHALFIGFNSSFFLREEDFPMLTPNSVYCTDDTVTYICHSRFGFREVSAFHLEDSSFTDLLPIGSRLNWPPPVWFRPSFSKGPL

SEQ ID NO: 49875 - protein, 274 aa, Oryza sativa
MATSTAAPRHSCAKLSVAVEDPKAGGGGAVFVKATWHPTRFSLAVTDGGAAWVAQASDAEVRLRAEQWDQPVADYLALAERYLAFQQPSSTYSFHDAANGNRRLSWTFEKQGTKLEWRWKLQPAPNTQQTIAEILDFLMDANIRLSEEVVRKTQSFDKLKQESEKCLQQSERFNIEKAEFEQSTFSKFVAVLNSKKAKLRQLKDKLTEFESADKAPKEEDENSTDKTELFEEASDKDASVNDEPSETGGGDLHSSPEKTAATSRGGRGRKRTRK

SEQ ID NO: 49876 - protein, 138 aa, Oryza sativa
MDYYYPMEEEEEVHERPRFRRPVHPWQWHHWQNLLGLLSSSSPSPATAAAAQRCSHVSWEETAAAHLYSASLPGVRKEEIRVEVEDAMYLVIRTELDDGGDGDGGGGGGRRSFARKFRLPAMVDADGISAEYTTACSG

SEQ ID NO: 49877 - protein, 299 aa, Oryza sativa
MVHKQEGNNSEQMSTTPAPPGETSRQIPSRDDAKHEKEAANSSSSSSSEEIDEDDFFQIEGPILSTQYSLSPPPAEGGNRDAKQADEPHDPKRIPSAVFARSKSSTPTDWSITSNESLFSINVGNASFSKDHMFLYGKSGELGANDPLPPLPKQSPSSSPLKGEVATPEKPSTSKEKGDGRGLTDRNGDDNTDYTHSSSHRSDGSTTSFAFPILTGSAKTSGSLKDSHPELARQTTAQLTHPSEMRDENENKETPFPAVVMEAPKVEATPAAAATAPAPPAPPATTKWFPCCSCCPFCC

SEQ ID NO: 49878 - protein, 41 aa, Oryza sativa
MEWVVLPCMNLSELVMITSLGKLFVLRVIQPPFKFMRKQLG

SEQ ID NO: 49879 - protein, 337 aa, Oryza sativa; identical to SEQ ID NO: 31194

SEQ ID NO: 49880 - protein, 381 aa, Oryza sativa; identical to SEQ ID NO: 37162

SEQ ID NO: 49881 - protein, 425 aa, Oryza sativa; identical to SEQ ID NO: 29720

SEQ ID NO: 49882 - protein, 375 aa, Oryza sativa
MAAGGTQAMRQFVYLVVKGCYDRRLRCCRDSYMADTFHMRRINVSRFFFYPEPPPPPPLAMVVDARLPRPCITFCAPWVMHFMLLGRNSDKVLAVDHKGRTNMYDPAANTIRAAPTLAHPKRLPAISLPIGDDLYILDPTSSDHRCFEALVYKPGGPAHDWVTTRGPIDRYNDWHCQSLPPPPYHPYSCSFVGANGAIGGYAVVGGGGDSAEIWVSTNDGSGSGTFSFDTARRAWTKHGDWTLPFRGLAEYVPEYNLWFALSSGSNNNHLCAFDLAGAAEPPATRDFCQELKPPKDWKLVSSHLVHLGSGRFCIARFFEKPVKIPVCCVCDMDTQTYGVFTGVEVKKPGRGLRLRMVKHRSECYRFDDHIKEWVL

SEQ ID NO: 49883 - protein, 203 aa, Oryza sativa
MFSLAYGLWKYIFNKTEFHVLILGVDKAGKTTLLEKIKSIYLKGEGLTPDRIVPTVGLNIGRIEDANAKLVFWDLGGQVGLRTIWEKYYQEAHAIIYVIDAAAASSFEDAKSALEKVLRHEDLKGAPLLIFANKQDLPGVITDEELARYLQLKELDERPYKFQAVSAYDGRGIKSGIDWVVEQMERSKRTEVLRARAGFTGQI

SEQ ID NO: 49884 - protein, 443 aa, Oryza sativa
MGCTNSTEARREMVLADAGRRATRSFSLPTVDRQRLRWKAVSMLSSLGISQGRRSGAFKYATTSVEGMMKSENDHTGQALLHVQEAAAKRAVIKPCTPTLTPPNEPEVINAWELMAGLEDDPPTPPCASHEPPAVTPQWMQADTDIPIVALDFDPEILSGFREALADTSPSEPTSCSVTEEEEQPAQPEKHADACDAPTSLATGDMPEKRADACDAPVSLATGDMPEKRADACDKTISLATGDMPELSGIVRARINAFQEKIERRSSKGARDAKVAHLRPPGGDKKAVVYFTSLRGVRKTFVDCCSVRSILRSYGVRLDERDVSMHAVFRAELAELLGPGGFACAALPRVFVDGRYLGGAEDVHALHEAAELARMLEGCEAAPVRKLGYMEACAACGDVRFVPCETCYGSCKIFVDDDVDAGEFRRCPDCNENGLIRCPVCCC

SEQ ID NO: 49885 - protein, 129 aa, Oryza sativa
MAQNKTISVALLLSTLVVVVAAVAATGPPDLLQGWCADACREEQQKDPIYNKHCPDFCVISTKQIFRAYKGATDPPVERFNALCDEGCSKEFKEDPAISKKCVDTCIVMSKEAKEYFAKGGTIGAPAGA

SEQ ID NO: 49886 - protein, 374 aa, Oryza sativa; identical to SEQ ID NO: 32692

SEQ ID NO: 49887 - protein, 325 aa, Oryza sativa
MTSSTLSSALSSMEVMLDALMQRGVGKPEEKPKEEAPPALPTRPTVRGRPPSLQRPGSPPPWVHRSPSLPPMLEVDEKLAVNSVLERRATVAEEAVKQKDDVVRQKDEEIAALRQQVEHYESRLSECEARMKSVEEELRKQITTMQIAQNNAGRTGESTTRTHHRQELSGTSGAPAQSSGWREEEASVTRQQARGRESNVAAVVDERKTDAVSRLATELRQESEAFEHRARAVTEAGPPTAKSVDELKKLKRQFGTWKKEYGARLRKTKAELKKLVRSERGGHGNRRRCCSWKIKLPKCRFPKCCAFKLPSPSSCCSCSCFRRCC

SEQ ID NO: 49888 - protein, 516 aa, Oryza sativa
MAAGMVATMVLLTCLAAGGLVVGAEEDGGGGGLGRLGSPDYGDALAKAILFFEGQRSGRLPANQRATWRGDSALTDGREENVNLTGGYYDAGDNVKFGYPMAFTVTLLGWSAVEYGAAVAAAGELGNLRAAIRWGADFLLRAHASPTTLYTQVGDGNADHQCWERPEDMDTPRTLYKITADSPGSEAAAEASAALAAAYVALKDDGDTAFSSRLLAASRSLFDFANNYRGSFQSSCPFYCSYSGFQDELLWASAWLFKATRDAKYLDFLTNNQGSSNPVNEFSWDNKYAGAQMLAAQEYLGGRTQLARYKDNLDSFVCALMPNSGNVQIRTTPGGLLFTRDSVNLQYTTTATLVLSIYSKVLKSSGSRGVRCSAATFSPNQISSFATSQVDYILGKNPLGMSYMVGFSTKFPRRIHHRGSSIPSIKVLSRKVTCKEGFSSWLPTSDPNPNIHVGAIVGGPDGNDQFSDNRGDSSHSEPATYINAAFVGACAAAMGQKQVVKLEEPADNLESMVSTY

SEQ ID NO: 49889 - protein, 356 aa, Oryza sativa
MSSMASNEEVGNEDGRQEDLLVKEGPGEHQENTIRDSDEAKNEDCSNSGSVTEAVVSSEEPSDRSSTEEPSDRSSTEEPSDSSSGGDSSSQSADSDGGSKEAPKMDSKAGNDDSSECTDQSSPRAVLDISVSGSVDSDESSSVEQPAESNHNTQWRNLISGLILRRRKSMARAGTFPQRTKTTGLKRYLERMRSGKNQIDCGAIAPEILPEISKWRPSWRSFDYSELCAATDKFSSENLIGKGGHAEVYKGHLADGQFVAVKRLTKGGNKEDRISDFLSELGIIAHVNHPNAAQLLGFSVEGGLHLVLQFSPHGSLASVLHAEQAQREPSSGRLGSILLLELLKDCFIYMKAAIDA

SEQ ID NO: 49890 - protein, 692 aa, Oryza sativa
MTHRQATPRRRGSRALHDLRLPNPPRLLARRPPTPADLHPASRGGPAFSCSLTGGERRRIIDQSIQNERLRYWGGRHEADLCMLSPAATAVAAVRATAGSPAAVRGMHARILKEGLAHHPPNPAALVSAYAKSRLLPDALHLFDETPRRDIYIYSSLLTAVSHSASPELALPILRCMLSADALHPDHFVISSVASVFARLRSRRLGRQLHAHFVVSPYNGDDVVKSSLVDMYCKCGSPDDGRKVFDSMSAKNSVVWTALVSGYASNGRSEEALQLFRSMPGRNLFAWTALISGLVNTGESVGAVELFVEMRRDGVRIDDAFVLSIVIGGSADLAAFVLGRQLHGSTMRLGFLSNMIVGNALIDMYSKCSDILSAREVFEGITFRDVISWTTMVVGEAQHGRAEEALALYDRMVLAGAKPNEVTFVGLIYACSHAGLVQKGRQLFESMKNEYGITPRLQHYTCYLDLLSRSGHLLEAEELMTTMPYEPDEATWGALLSACTKYKDAEMCIRISDKLLELRPKDSSTYILLSNVYAVNGKWDSVAKVRKCMIGLEIRKEPGYSWIEAGREFRLFHAGEVPLDVREEIMVFLEEMVLEMRKRGYVPDTSSVMHDLEESEKEHHLFLHSERLAVAFGLIKSPPGSVIRVVKNLRVCVDCHTVMKLISEITHRKIVVRDSSRFHHFEGGKCSCSEFW

SEQ ID NO: 49891 - protein, 356 aa, Oryza sativa
MDPIGDPSPSSRRSVKRRPPARSPELSPKAWGGEAPELIRRLEELEEAAARLRGEKEAAEEAARELQAELDAERASAETATSEAMLMIERLQREKAAAQMEARQFRRYAEGREDREREVQEELASLSDLAASYHSRLQSHGIDPDSFSDDGEEEQHDEEDGEEVEQIDTAALQTDGSSGGDSIGGMQVKAMVDDDEEEQFTPVEKEFEYTVDVRCASSTTKVSGAVVVGEFMGEGNAAAGGLYARVEALEADRAAMRREIAALRAERAQLVMARAMARRLCREVVAEQKAKKVAASPRSFSVLGVCKWVLSIIFWRNRSSTARYTFGLSTTFLGFLLLLDRSTMLSPWRRLPSPRQ

SEQ ID NO: 49892 - protein, 328 aa, Oryza sativa
MEKEVEEEEEEEEAEASRKKGERGLGEGECGAPSSKKRDPELELRMKQKTAEWHRKAREETLKEIAKEMAKYPNEDWSDTPGVKAREYREDWEYRWSAIFGPYDTISPIPPMRYTHRKDDSMPRHISVRHTLQIISVKIKGIRGGLQWPINVFGLIAARDTIDRNRIMIFNRTRDNCQTITKEDRYLLLTGPTRAVVVSDPVYFEAPLKVKGSVESEDKDLSFLAVPLTGASDRGETRLVNREYTSRLSTLELTFGFVVESLEASISVRIIDGSWKDGFRGAFTAHTPSLKDNKVLLLDSGYCEMVPVTADRMIKLSRHVVSVEVRET

SEQ ID NO: 49893 - protein, 42 aa, Oryza sativa
MAAWWRRRKLFPGTISTLLARAAGALMDRRGPAAPRRYSLGG

SEQ ID NO: 49894 - protein, 127 aa, Oryza sativa
MGACATKPKTLEGKAPEEATPIEAAPKVALETTMISNKEVVADQAPEKVVEEATAMAELPPNDDAIVMQDKEEEVEEKIVEEEKPSAPAAEVNNTEVVEETIEVKNTEVDKGTTEVKNSEEEKPIQS

SEQ ID NO: 49895 - protein, 368 aa, Oryza sativa
MAFFSSGSRALVEILTGLQSVERPMPVDHTLFEFGSIRYHLQASITDSENIYLSISTPSLSYEASPSSGLPEITLQETRKMYHKFAEIIEPAKEGYTLTLRLNFSGLTRPKDRTKAINQISLLQSVILSSQLKDMLASLGSSGTMKLVYNQRDPFFVSKTPVKISAIFPMRFRDDTDLAIASSFFQELQDLGSTSSFSRAPRCSWSPIPPPELRGEYVHHLTTNGGFVSFDILARHVKGRRAARTAWILLNFQSYVKYHIKCTRSYIQSRMRKRLEIMTEVIDDAKFRGNDESSKKLQVRKRSKRRSIKFARAKKLQKGFKAVIDKIKRLRLRIRVKGLDRFRRHCQCFPVLKLTMAQRKEQKYQKLE

SEQ ID NO: 49896 - protein, 199 aa, Oryza sativa
MATTSRRSLHALLGGGAVADLVLWRRRNVSAAAVAGATAVWFLFERAGYSFPSVMANALLLLVAILFFWAKSASLLNRPLPPLPKLEVSDVVVEKAADRALVWINKVLAVGHDIAIKRDRSVFIKVILILWVVSYIGMLFNFLTLIYIGVMFSLLVPPLYEKYQDQVDEKIGMAHSVLSRHLDTIISKTGESTKQKKTE

SEQ ID NO: 49897 - protein, 176 aa, Oryza sativa
MEISAAAPSSRPPPPPLSLLLLRPLASSSPVPPATATSSSTTIIRRRPSASATATVRRRARTRPRTRRSKPPSDAGGPFSGDDGDSFFGPGGGGGGGGGGGWWWNRGSGSGAGWEDSSGEPDVPAPRRSAAEAALGVVYELMCLIALSNCTQFAVRRLAGLLAARVAALRFVPTVC

SEQ ID NO: 49898 - protein, 343 aa, Oryza sativa
MGSLAAEKTVTGWAARDASGHLTPYNYTLRKTGPEDVVVKVLYCGICHTDIHQAKNHLGASKYPMVPGHEVVGEVVEVGPEVTKYSAGDVVGVGVIVGCCRECHPCKANVEQYCNKRIWSYNDVYTDGRPTQGGFASAMVVDQKFVVKIPAGLAPEQAAPLLCAGLTVYSPLKHFGLMSPGLRGGVLGLGGVGHMGVKVAKSMGHHVTVISSSARKRGEAMDDLGADAYLVSSDAAAMAAAGDSLDYIIDTVPVHHPLEPYLALLKLDGKLILMGVINQPLSFISPMVMLGRKAITGSFIGSMAETEEVLNFCVDKGLTSQIEVVKMDYVNQALERLERNDVR

SEQ ID NO: 49899 - protein, 471 aa, Oryza sativa
MESNGGGGGSPKEAAVVVPSSGDATLGGHLARRLVQVGVSDVFAVPGDFNLTLLDHLLPRPGALLPLPEALQPGQPPRRARRHPRLPRQGRQARPRRGAQAPRRQGRRGLRGPRRRQRPRGGRHAVRQGAGAGDAAALHRDLLGRGQHGLLRGDRGVRGRLPVRGAHLQRLQLRGVLVPAEEGEGGGGAARPRDRRQWPRVRVRDDEGLPVGAGQARPEEHDGVRQLQEDLRAGGTAAGVRGRGGAAGERAVQAHTEDDRWHGDRGGDGGDGGLVVQLPEAAAARGLRVRVPDAVRLHRVVGGGAAGLRAGCPKTGGGLHRRRQLPGDGAGRVDDAALRAAEHHLPHQQRRVHHRGGDPRRAVQRDQELGLRGPRQRHPQRRGAVLGHPGAVRGGAGGGHRDGHGGQGGQPLLHRGGGAQGRHQQGAPRMGLQSLRRQLQAAQPAVVPPLPFILDPGPICTYLLPFIYKFR

SEQ ID NO: 49900 - protein, 55 aa, Oryza sativa
MLQRKALVSGSTATRQGHARGKWRGSRQQARCSRRKASSSSSMILCISILPDSYM

SEQ ID NO: 49901 - protein, 317 aa, Oryza sativa
MVVCTAISHCVCDGIATANFLHAWAAFAAADLDLAADRDDDLSVVLHDRRALRPRCPPRVAFTHPEYHTSSSSSSLLLIQPQLMPLAPVSLTFTAAHLRRLKARSLRSCTSFEALAAHVWRAWVLSLAPPPPPDMRVKLLFSVNVRRRLKPELPWTYCGNAFVLACAEATPTELAAGAGVRLVQEAKDCIDDDYVRSTVDLLDQRRGAKPDLAATLVISAWTRLGLEDVDFGKGRAAHMGPLTSEIYCVFLPVLADPNAVTVLLSLPQPAADTFEHHCCSCFLLDLDDDQPAVPVLVDKQDHDNQLVRAHHQHDILA

SEQ ID NO: 49902 - protein, 238 aa, Oryza sativa
MGRNSGFIAMYATLASRDVDLCLIPESPFYLEGKGGLLEFAEKRLRENGHMVIVVAEGAGQDVIARSMRLADAHDASGNKVLLDVGLWLCAKIKDHFKKKANFPITLKYIDPTYMIRAVPSNASDNVYCSLLAHSAIHGAMAGYTGFTVAPVNGRHAYIPFYRITEKQNKVVITDRMWARVLCSTNQPCFLSTEDVEKAGQDDEEPIVPLVEGENSLVKAPPLLANAGDRAALCNGAA

SEQ ID NO: 49903 - protein, 129 aa, Oryza sativa
MALQWMILACVVAAEAAVAVMLTLPAPRAVRKQIVGLTSMLLQPFAGILPFAAFQLLDIYWKNEHRLMCTSEICTADERIRFEKSIFKAQRNVILCVSACLLYWCIFRICKYNKDIKALEETEKRLKEE

SEQ ID NO: 49904 - protein, 293 aa, Oryza sativa; identical to SEQ ID NO: 30503

SEQ ID NO: 49905 - protein, 345 aa, Oryza sativa
MEKKRVVIVGAGVSGLAACKQLLERGCRPVVFEADTGLGGVWARTPECTALQTPRPMYQYSDFPWPETVTEVFPDHRQVMDYLGAYARRFGVLDCIRFGHRVAGMEYVGVGEEAVAAWDEWAGNGDAFGSGSGEWRLEVVDGEGHIETHKADFVILCIGRFSGVPNIPTFPPGKGPEAFDGQVIHSMDYSKMGTKNSKEMIKGKRVTIVGYLKSALDIAAECAEVNGTEIPCTMVVRTKHWIIPDYFAWGVHISKLYLNRFSELLIHKPGEGLLLSILATLLTPLRWIFSKFAESYYSIPMKKYDMVPDHSLFEALITCLVAITPKDHYKRLEEGSIVLKKSKTF

SEQ ID NO: 49906 - protein, 247 aa, Oryza sativa
MAMAMNRSGLLQQGGEVDVVMLGSGWRRGRGCGLVGDGPLEGLVAEAAQHGLVDGGEVRAAAPEVVDPEQAAGAQHPVRVVPQELQRRLRDPAVHGVPRPHQVHGGVPHREALLQRRVQRHHPARRRRLRVGRPEVHSGGEHGGVGRPLEARRQRPRPAAHVQPQPDGPRAAERCQAQQLRHREVEGPLRPQEARGLRAREVEAERGREAGEGGAFGPRRPADGGVRERGEGIGGQIIQVVRRRDRR

SEQ ID NO: 49907 - protein, 590 aa, Oryza sativa
MEDGAAAREAERWEGYVDWRNRPAVRGRHGGMLAASFVLVVEVLENLAFLANASNLVTYLMNFMHYSPSQSATTVTNFMGTAFLLALLGGFLSDAFFTTYAIYLISAFVEFLGLVVLTIQARTPSLMPPGCAKVAGAACEPVSGPKKAMLFAGLYVTALVIGGIKGSLPSHGAEQFDEHAPRGRKGRSTFFNYFVFCLSVGALIAVTFAVWVEDNKGWQWGFGISTIAILLSIPVFVAGSRLYRNKVPTGSPLTTIAKVVLAAALARRGGAQSASNGAVIDRAPSPTGSTDMKEYCKPGDICGVADGAAEVATEPSQELVFLNRAVQRQPRCGALSCTVQEVEDVKIVLMVLPIFFSTIMLNSCLAQLSTFSVEQAATMDTRVGGLKVPPASLPVFPVTFIILLAPVYDHIIIPFARRATGTEMGITHLQRIGTGLVLSIVAMAVAAVVEVKRKNVASNAGMLDAAAPLPITFFWIAFQYLFLGSADLFTLAGLLEFFFSEAPARMRSLATSLSWASLALGYYLSSVLVTVVNSATGRGGRRAWLQGENLNHYHLERFYWVMCVLSTLNYLFFLFWAIRYKYRNAGVIKG

SEQ ID NO: 49908 - protein, 407 aa, Oryza sativa
MAVPPVESETRSEETDNFPLLADHMENTGHHAHAVDIPWDSSPSTSRRDNHNGFDQLPRILEGSPGTSTPSNSQNGPLARRDDNRGRRQPSPLNSGCWISVELVVNVSQIIAAICVLSVSRNEHPHSPLFEWVIGYTVGCTATLPHLYWRYLHRNLPTTGQEPTVQNIPPNNTPEANSYGVTGTNGVSRNNEATVNPRFQAFADHFKMALDCFFAVWFVVGNVWVFGGHSSAHDAPNLYRLCIAFLTFSCIGYAMPFILCALICCCLPCIISILGFREDLNQNRGASAETINALGTCKFKSKKTRDGDGNEVGVGVVAAGTNKERVISAEDAVCCICLARYVDNDDLRELPCAHFFHKDCVDKWLKINALCPLCKAEIDGVSTSAPAIGFGRRHSDNRVGNDIESQL

SEQ ID NO: 49909 - protein, 257 aa, Oryza sativa
MAQVTATANARVLGFPAASRHGGPVGSRAGPAFLNLRAPALRHDSKKHPLRVGAASSLFTKYDPIKGIKPLLSIDKLRPRTQVGCRASLSSFSFPELETKPRWWWRTLACVPYLLPLHNMWSFADAVYQLHPYLQQFGLFYAFIDTMALVPGWLFLMIFMTVYFFVVRRKWLPHFLRYHVILAILLDTGSQALATMCNWNPSIVYQGKPMVFFWMTIAFIQISTVLECMRCALAGMYPSVPFVSQTAFIHSDMSMFR

SEQ ID NO: 49910 - protein, 585 aa, Oryza sativa; identical to SEQ ID NO: 29357

SEQ ID NO: 49911 - protein, 546 aa, Oryza sativa
MKRSSPWRKLTEAEDAVNRAVAATRVGRYFKLEARKSSFTKELRAGAATFLTMAYIISVNAAILTDSGGPCTVSDCTPVVVGNSTAVPGPECTVGSNPGYEQCLGRTKSDLIVATAVAAMAGSFAMGALANLPLGLAPGMGANAYFAYNMVGFHGSGSIPYSTALAGVMVEGIVFFILSAVGLRSRLARMIPRNIRLATAVGIGLFLAFTGLQAHQGVGLVGASPSTLVTLTACSETDPATGACLGGSMRSPTFWLGAVGFLITATCLARDVKGGMIYGIVFVTVVSWIRGTAVTVFPDTAAGNAGFDYFKKVVDFHTITTTAGRLSFGGLRHGNALLAVFTLLYVDVLATTGTMYSMAEYGGFTDGAVEGFDGEYRAFLVDAGSTVLSAALGSTTVTTYVESTAGIREGGRTGVTAITVAACFLASLFFGPVLTSVPPWAVGPSLVLVGAMMMRVAKDIEWADMKEAIPAFVTMVLMPLTFSIANGIIAGLGVYIALHCYDWARIAYLKASKVLDERRNQVAASSAGEASGITATTATAAAADEV

SEQ ID NO: 49912 - protein, 201 aa, Oryza sativa; identical to SEQ ID NO: 30604

SEQ ID NO: 49913 - protein, 464 aa, Oryza sativa
MTTEVALLRGPTNLASPTSSTLRYLANGDSDVSLPRRSSREEESPAGLQEEEEEEEEERWSFLALLLELLRKSLLRCSTVQEGGGECGMEIGWPTDVQHVAHVTFDRFHGFLGLPVELEPEVPRRAPSASASVFGVSTESMQCSYDSRGNSVPTILLMMQRRLYEQGGLRAEGIFRINAENSQEEFVRDQLNSGIVPDGIDIHCLSGLIKAWFRELPSGVLDSIPPEQVMQCQSEEDCARVAKCLPPAEAALLEWAVNLMADVVQEEQINKMNARNIAMVFAPNMTQMSDPLTALMYAVQVMNFLKMLIQKTLKGRQESNLEDTSLPHKDPSDESGHHKPCLTLESLLEEESRRPSFVEEEPILNSPAHGTGYNPIEVNPVQGKTAASIAQTSEVQTIIEGSSSCSRPSLTDPPATADPVCAEAANSLQRKGSRSLNSRRTRKGKGSLERVPLPQLRNQKARAL

SEQ ID NO: 49914 - protein, 29 aa, Oryza sativa
MDLDSTPMSDNLSFTASNQNIIGVQDLKF

SEQ ID NO: 49915 - protein, 320 aa, Oryza sativa
MTVQSRIGEDNKSGQYSSKELDTWIEQLKECKPLQENHIKYLCEQAKDILSKESNVQEVKCPVTVCGDVHGQFHDLMELFKIGGNAPDTNYLFMGDYVDRGYHSVETVTLLVALKVRYKDRITILRGNHESRQITQVYGFYDECLRKYGNANVWKYFTDLFDYLPLTAIVDNQIFCLHGGLSPSIDTLDHIRALDRIQEVPHEGPMCDLLWSDPDDRGGWGISPRGAGYTFGQDISETFNHTNGLQLVSRAHQLVMEGYNWSHDKNVVTIFSAPNYCYRCGNQAAIMELDDSLKYSFLQFDPAPRRGEIQVTRKIPDYFL

SEQ ID NO: 49916 - protein, 218 aa, Oryza sativa
MVHLVGVLPFHQRQGYFSSEELMLRQLSLSRDWQQKQLGCLQLATFQLCCASSSALFLNVTLTGGSNRAIFFLAPILLLLNQDSDIIAGFGDRQRYFPVTISISVYLVLTALYRLWEETWPGSGGWALDIGGPGWFFAVKNVALLMMTLPNHILFNRFMWDYVRQTDAKLLLTLPLNLPSIIMTDILTVRVLGLLGAIYSLSQYVISRRIRLAGMKYI

SEQ ID NO: 49917 - protein, 227 aa, Oryza sativa; identical to SEQ ID NO: 30236

SEQ ID NO: 49918 - protein, 385 aa, Oryza sativa
MAGVSAASAAGKIGSFLSKRPYAPPSWASHLSPAPSQTFSLGHFPTPIHKWNLPNLPNGTEVWIKRDDISGMQLSGNKVRKLEFLMADAVAQGADCVITVGGIQSNHCRATAVAAKYINLDCYLILRTSKLLVDKDPGLVGNLLVERLVGAHIDLVSKEEYGKIGSVALADLLKKKLLEEGRKPYVIPVGGSNSLGTWGYIEAIREIEHQIQISGDVQFDDIVVACGSGGTIAGLALGSKLSSLKAKVHAFSVCDDPGYFHSYVQDLIDGLHSDLRSHDLVNIENAKGLGYAMNTAEELKFVKDIATATGIVLDPVYSGKAAYGMLKDMGANPAKWEGRKILFVHTGGLLGLYDKVDELSSLSGSWRRMDLEESVPRKDGTGKMF

SEQ ID NO: 49919 - protein, 341 aa, Oryza sativa
MAPPQLAGKMTAKAAAAVKPATRAYVTFLAGDGDYWKGVVGLAKGLRKVGSAYPLVVAVLPDVPESHRRILISQGCIVREIEPVYPPENQTQFAMAYYVINYSKLRIWEFVEYERMVYLDADIQVFDNIDELFELPKGHFYAVMDCFCEKTWSHTPQYQIGYCQQCPDKVAWPTAELGPPPALYFNAGMFVHEPSMATAKSLLDTLRVTTPTPFAEQDFLNMFFREQYKPIPLIYNLVLAMLWRHPENVQLEKVKVVHYCAAGSKPWRYTGKEANMDREDIKMLVKKWWDVYNDGSLDFKGLPPIAAADDADEVEAAAKKPLRAALAEARTVKYVTAPSAA

SEQ ID NO: 49920 - protein, 115 aa, Oryza sativa; identical to SEQ ID NO: 38094

SEQ ID NO: 49921 - protein, 524 aa, Oryza sativa
MSYSWVGAPAEFNGTNQETGGDSTTENLNQWYQSGDQAFILVASCMVLIMVPGIAFLYSGLSRRKSALSLIWVVMMSFSVVVFQWYFWGYSLALSSTATNGFIGDLHHFGLRNTLAKPSPGSALIPELLYSFYQMQFCAVTAALVVGATAERGRVLPAMIFVFFWATLVYCPIACWVWNVNGWAFKYGVLDYAGGGPVEIGSGMSALAYSWILGRRHEKMMLNFRPHNVSLITLGTILLWFGWLGFNGGSTFGANLRATMACWNSCLTAMFAAMTWCLLDFRLAKKWSMVGWCSGVISGLVAATPASGFIPPWASIILGVVTGVCCNFGTKIKFLVGIDDSLDVFAEHGIGGIVGLLFNAFFGASYIVGLDGVNTGAAMGGWLDHTWKQLYIQIAFIVACSAYTFVMSAIIAKLIDMVPGLHLRASEEAELLGMDDTELGEFAYDYVEVRRDFLAWTPAIEEPMTHGARIVPQHGIEEHANMANTNGTSLESQEEKIGASARAPAKQEAAEKAAGAAPDSEATQ

SEQ ID NO: 49922 - protein, 248 aa, Oryza sativa
MKGLLSSRKPVGMDVTSIKLKGDSNNKRLVTIKEGFEYSQAAVSQLESTSGLKQQNLEKNEYEESPVPNLLDESMEKEVACSSVELNQSASATDQENVSQKIVVTITSEKGMHETEPVSANKIAICQPDFPSKAEFPVGSSFVTPRKNKLVDVTDHKDSAELVKTRSIQNKKGEMPSSVTGKAPTMPTKSAPKDRVKNKSVASGSAQMSGSSRKRARKGWTTLKQIAEKEELERKEKMGNFVIPFFMQ

SEQ ID NO: 49923 - protein, 518 aa, Oryza sativa
MACAASSVKGSLNVGGAKAFSNNLFRDYLKSSVSYPVSEISSPIRAQHVAYGSNLIVRGSKSRDFSSKLASTNGSSKISEERVTVLVIGGGGREHALCYALERSPSCDAVFCAPGNSGIAQSGDATCIPDLDISNSDAVISFCRNWGVGLVVVGPEAPLVAGLANELVKAGIPTFGPSSEAAALEGSKDFMKKLCDKYHIPTAKYQSFTDPSDAKKYVEEQGAPIVVKADGLAAGKGVVVAMTLEKAFEAIDSMLVEGSFGSAGSRVIVEEYLEGEEVSFFALVDGETALPLESAQDHKRVGDGDVGPNTGGMGAYSPAPIVTEKLKCKVMESIIVPTVKGMATEGCKFVGVLYAGIMIEKKSGLPKLIEYNVRFGDPECQVLMMRLQSDLAQVLLAACRGELGSVSLTWSPELATVVVMASEGYPGVYKKGTVIKNIDEAEQVSPAVKIFHAGTALDRDGNFVAAGGRVLGVTAKGKDIEEARAKAYDALDVVDWPEGFFRHDIGWRAQKYRRMVAH

SEQ ID NO: 49924 - protein, 191 aa, Oryza sativa
MERSATVFVALTLLVAGSVVVVVVVDACDGVPRMSAVEACKQASVGPAMSRTCAETLGTSADEQGATDFMVAAANAATESYKAGKEAVGKVLSNPLAPDGERLPCLVCANKYDDASMLVASTADDAKRCKLSADSLPDLVTAVSAVDECATKMFEESGNTTSVYATAITNRDWTVLVLRLATLVVPRQQLS

SEQ ID NO: 49925 - protein, 351 aa, Oryza sativa
MARIHADPVLEADQFDRLPDSLVLVILNNVEDVRSLGRCSAVSKRFYGLVPLVHDVYVKIDRVVTVDGEAEDALNLSSPKPRNILSHFLKMMLFTIIKPFHSMRGPNGAGRPLFPQLAQHSPAQVLRNFTHIRNLRVELPSGDVGTEEGVLLKWRAEYGSTLQNCVILGGTQVDRKPVGAEHELYSEDNGSMPESFYTNGGLKLRVVWTISSLIAASTRHYLLRSIIKDHPTLTSLVLTDADGQGTLSMGAEQLKEFRENQLSASACSNRTQVPACNMKLKYAPYLELPGGIALQGATLVAIKPSPEGSNGGHTSRKETDAFVSGAFDGPFKFAVKALMKRRTYLLEMNGF

SEQ ID NO: 49926 - protein, 484 aa, Oryza sativa
MDAGDAATTRARKPVVLYPSPGMGHLVSMIELGKVFAARGLAVTVVVVDPPYGNTGATGPFLAGVTAANPAMTFHRLPKVEVPPVASKHHESLTFEVTRLSNPGLRDFLAGASPVVLIIDFFCNAALDVADELGVPAYMFYTSGAEILAFFLYLPVLHAQTTANFGEMGEELVHAPGIPSFPATHSVLPLMERDDPAYAEFLKASADLCRTQGFLVNTFRSLEPRAVETIAAGSCAPPGVSTPPVYCIGPLIKSAEVGENRSEECLAWLDTQPNGSVVFLCFGSIGLFSAEQIKEVAAGLEASGQRFLWVVRSPPSDDPAKKFDKPPEPDLDALLPKGFLERTKGRGLVVKSWAPQRDVLAHAAVGGFVTHCGWNSVLESIVAGVPMLAWPLYAEQRMNRVFLEKEMRLAVAVEGYDDDVGEGTVKAEEVAAKVRWLMESDGGRALLERTLAAMRRAKAALRDGGESEVTLARLVESWREAASA

SEQ ID NO: 49927 - protein, 247 aa, Oryza sativa
MMPSASDAAAAAAALELQESGWEELRREARKLEGDLDVKLSSYARLAARSSSAADAASASSPSERSSWKSMEFEIQSLLDKLQDVNDAMSRCAASTAPTTSVSQKLARHRDILHEFAQEFRRTRGNLSSIREHADLLSSVRDDITESKATGGMSPRVHLLRERASIHGSINQIDEVIGQAQSTRVALSNQRALFGDVQGKVKQLGEKFPVIRGLLGAIKRKKSKDTIILSAVIAACTIFLIIYWLSK

SEQ ID NO: 49928 - protein, 466 aa, Oryza sativa
MAASPESSPSSANSTTPSAPSPSSSLSKSPSPPSPSSPPPPASTNAPPKSAGGVSSSTQAQPSSESSSESTTTPSAPAERKSGGSSRGESGRYRGDVTAGVFVGLFVVAMVAVLAGVVAIVVCCCIKITKKKKRPPPPNMPFFTDEKGNVYYATGGLPPMWQQHGSSNYSIPPPPPPGWHMSSSAGGFSGEMGMGYSSGPYGPALPPPSPDVALGFSKSSFSYEELAAATSGFSAANLLGQGGFGYVYKGVLAGNGKEVAVKQLKSGSGQGEREFQAEVDIISRVHHRHLVSLVGYCIAANQRMLVYEFVPNGTLEHHLYRGGNGDRVLDWSARHRIALGSAKGLAYLHEDCHPRIIHRDIKAANILLDANYEAMVADFGLAKLTTDTNTHVSTRVMGTFGYLAPEYASPASSPRSPTSSPSASCCWSSSPGGGPSTPPTTWRTASWTGRDRCWRACWSPAARKED

SEQ ID NO: 49929 - protein, 440 aa, Oryza sativa; identical to SEQ ID NO: 32239

SEQ ID NO: 49930 - protein, 262 aa, Oryza sativa; identical to SEQ ID NO: 33290

SEQ ID NO: 49931 - protein, 197 aa, Oryza sativa
MEAAAARPVIRVAAICGSLRKASYNGGLLRAAAGVCEESIPGLRVDHVDISGLPLLNTDLETADGGFPPAVEAFRDKVRQADCFLFGSPEYNYSIATPLKNALDWASRGQNCWADKPAAIVSAGGGFGGGRSQYHLRQVGVFLDLHFINKPELAVKAFEQPPKFDSDGNLIDAQIRERIRQVLLSLQAFTLRLQKKD

SEQ ID NO: 49932 - protein, 143 aa, Oryza sativa
MVVLPCSSSPMHWPFLFLGCVARPVFEVDLKSVELAGVLFREELSLKHNINGGFIVERIADDSALEHLGVRRGDVIFFEDECGTTLPEIEDYLLSLGWRYLQGMKSMVLKLLVHDIEGPCKVTITLPLEFSVDSGKVARWRMA

SEQ ID NO: 49933 - protein, 237 aa, Oryza sativa
MLCGTAASNSEEASNHRSASLTRALLVTSVVSPTHRRCGSQPPGFLGSTPFSARRPSSAPPHASAKQLAAANGDGTTEAPILVAAAAAKSSSKLTPIVVASRRMRLLLLVAVADGEVCPLAAELAGTSRQHRRRLSLVQAAATSSSPPISAICPLGRPPTAQGSQRGSATAGSARRIPRRVPPPDLPFGALAAAPTAVSTTADLAWRPPPWLRRPPSVAASSACTRAHVGKGRSNRD

SEQ ID NO: 49934 - protein, 514 aa, Oryza sativa
MAMAAAMGVASPYHAAHAAASTSCDSLRLLVAEGRPRRPRGVASSSSSSSSAGRRRRPLVFSPRAVSDSKSSQTCLDPDASTSVLGIILGGGAGTRLYPLTKKRAKPAVPLGANYRLIDIPVSNCLNSNISKIYVLTQFNSASLNRHLSRAYGNNIGGYKNEGFVEVLAAQQSPDNPNWFQGTADAVRQYLWLFEEHNVMEFLILAGDHLYRMDYEKFIQAHRETDSDITVAALPMDEKRATAFGLMKIDEEGRIVEFAEKPKGEQLKAMMVDTTILGLDDVRAKEMPYIASMGIYVISKNVMLQLLREQFPGANDFGSEVIPGATNIGMRVQAYLYDGYWEDIGTIEAFYNANLGITKKPVPDFSFYDRSAPIYTQPRHLPPSKVLDADVTDSVIGEGCVIKNCKIHHSVVGLRSCISEGAIIEDSLLMGADYYETEADKKLLGEKGGIPIGIGKNCHIRRAIIDKNARIGDNVKIINVDNVQEAARETDGYFIKSGIVTVIKDALLPSGTVI

SEQ ID NO: 49935 - protein, 268 aa, Oryza sativa; identical to SEQ ID NO: 28566

SEQ ID NO: 49936 - protein, 361 aa, Oryza sativa
MGSSSGSDRLRDLQAFDDTKAGVKGLVDAGVTTIPAIFHHHPLLLDDAEEDADVIPVIDLQADVDRGHLVGQVRAAAQCVGFFQVVNHGIPGELLEEMLAAVRRFNEQPAEGKKAWYSRDSGRRVKFNSNFDLFQSPAANWRDTLLLELTPRPGPAAEEIPPACRGVVGEYVEAVQRLGGALLELLSEALGLPPEYLGGLGGGLATMAAHYYPPCPEPHLTLGTTRHSDPSFLTVLLQESKGLQVLMRQRQRWVDVPPVAGALVVNIGDLLQLVSNDLFRSVEHRVLATTAAAEPRLSVACFFRPDYACTRVYAPVTTTPPPPLYRSTTMPEFLSHYRAKGLDGRSALHHFRIPPPSSPPH

SEQ ID NO: 49937 - protein, 79 aa, Oryza sativa
MVAFGRRRLHWIRSTEEKPVHPSVAAARRRKAIAIVNPRSPPCGARHRPSPSPSVVVEVVLVVSVVAKVREYVGSVQED

SEQ ID NO: 49938 - protein, 227 aa, Oryza sativa
MEHHRHRGAVVLVVAAAAMAMAMSAVRGDFAADRAECADKLMALSTCLTFVQDGASGGAAAPTPDCCSGLKAVLAASRKCLCVLIKDRDDPNLGLKINVTKALSLPQLCNAPANISDCPRLLNLPPNSKDAQIFEQFAKQQAAMQGSPSASPGGSSAPAAGAQKSGAAVLRWLGVDGVGGGGARAVALLLFLLSSAVAVAAPLLLVFWISDGHSLKLACNTQTTKSL

SEQ ID NO: 49939 - protein, 48 aa, Oryza sativa
MGKLCCSQTDDDPEFNLLGLLVAVVLALLLLMLCTPPRRRRCVVYPCY

SEQ ID NO: 49940 - protein, 340 aa, Oryza sativa
MSSSRPVCVTGGSGYIATCLIKKLLQRGCGVHATLRNLGDEKKTALLRRMPGAAERLVLFEADMYDAATFEPAIAGCEFVFLLATPLIHDPLSTKYKNTTEAAVDAMHIILQQCERSKTVRRVIHTASVTAASPLREDGEGYKDFINESCWTPLDLSNRYSNVMMDAYVSSKTLTEKLLLRYNESESRAFEVVTLTCALIGGDTDTTQLYHSLSIPLIVSPLTGQELYHGGLKSLQALLGSVPLAHIDDICEAHIFCMEQQPSIAGRFLCAVGYPNMQDYVDRFAVKYPEIAIKLQGVIGKDVRVKADTNKLGDLGFKYKFTVEETLDSSVECAKRLGLL

SEQ ID NO: 49941 - protein, 280 aa, Oryza sativa
MAAAAPPAGPGLYSDIGKKARDLLYRDYHTDQKFTLTTYAANGAAITVAGTKKNESIFSEIQSQVKNNNVSVDVKATSDSKLITTFTVHDLGTPGLKGILSIPFPYQKSAKAEVQYLHPHAGLNAIVGLNANPLVSFSGVFGTGAFAVGTDVAFDTATGDFTKYNAGLSHTTPDLTAALLLNNKGDSLAASYYHKVSKTSAVGAELAHSFSSNENTLTFGTQHALDELTTVKARFNNFGMASALIQHEFRPKSLVTISTEVDTKAIDKSSKVGLSLVLKP

SEQ ID NO: 49942 - protein, 349 aa, Oryza sativa
MAKPSLLLLLPLLIFSIGAALARADLMLDRFEQWMIRHGRAYTDAGEKQRRFEVYRRNVELVETFNSMSNGYKLADNKFADLTNEEFRAKMLGFRPHVTIPQISNTCSADIAMPGESSDDILPKSVDWRKKGAVVEVKNQGDCGSCWAFSAVAAIEGINQIKNGELVSLSEQELVDCDDEAVGCGGGYMSWAFEFVVGNHGLTTEASYPYHAANGACQAAKLNQSAVAIAGYRNVTPSSEPDLARAAAAQPVSVAVDGGSFMFQLYGSGVYTGPCTADVNHGVTVVGYGESEPKTDGGGAAKGGEKYWIVKNSWGAERGDAGYILMQRDVAGLASGLCGIALLPSYPVM

SEQ ID NO: 49943 - protein, 241 aa, Oryza sativa; identical to SEQ ID NO: 31917

SEQ ID NO: 49944 - protein, 234 aa, Oryza sativa
MAAKVHPNLAVPSLIQPPMAPPAAMAAGDSVMKTKAAAAGGDVVLTVWRKSLLFNCRGFTVFDASGDLVYRVDSYAADSRAEVVLMDAAGVPVLTVRRKKAIGSQLGLGGDQWLVHPGEETRLPPLYAVKRTPQYVRGGGSVKTMAHVAPCGVALGAGGGGGYEIEGSYLRRSCAVYDARRRAVVAEVQAKEAVGTDVFRLVVRPGMEVSVAMAVVLALEQMFGKPSLLRSWSS

SEQ ID NO: 49945 - protein, 420 aa, Oryza sativa
MADEGSGGEGGAGAFEDEAEPTVTIGEYIEGIEAEELEADLVLGGDDGKECTYGGGYLKRQAVFSCLTCVPAGVAGVCTACSLACHDGHEVVELWTKRKFRCDCGNSKFGSHVCKLCPEKDPENPVNSYNHNFKGSYCTCGRPYPDPEAEKQVEMIQCCICEDWFHEDHIGLNSIEEIPRDEEGEPLYEDFICPKCSPKCYFLKLYPDTIWASNKQSSAPQAETTNSTVMNGNSSLGDIEKSENGALINHLNCEKTSDNENCPKDSVAPEKASLDDSSDGKCKLGMNICSNTPSADSEKKMPFFMSKSWREVICRCETCTDFYAQQGVAYLIDKEDSIEEYEKVAKQKREKKLEQQEGVEANFLNSLDHVQKIEILSGINDMKNELQSFLETFDSSKPVTSEDIRAVFENLAKKKKQRLS

SEQ ID NO: 49946 - protein, 391 aa, Oryza sativa
MAAFWLISIIVLVLLSGESNANPAASQQSQLDVNHRKPLQTFRPYNIAHRGSNGEIPEETTAAYLRAIEEGADFIESDILATKDGHLICFHDVILDATTDIANRTEFANRKRTYEVERQNVTGWFVVDFTLEELKSLRVKQRYNFRDQQYNGKYQIITFDEYILIALYADRVVGIYPELKNPIFINEHVKWSDGKKFEDKFVQTLLKYGYKGEYMSEDWLKQPLFIQSFAPSSLIYMSNMTNSPKIFLIDDTTVRTQDTNQSYYEITSDAYLAFIRKYIVGIGPWKDTIVPPINNYLGPPTDLVARAHALNLQVHPYTFRNENMFLHFDFHQDPYLEYEYWLGEIGVDGLFTDFTGTLHRFQECTTPYPKNEKNAEALLQKINYMLKDSGY

SEQ ID NO: 49947 - protein, 449 aa, Oryza sativa
MREIISIHIGQAGIQVGNSCWELYCLEHGIQPDGLMPSDTTPGIARDAFNTFFSETSSGKHVPRALFVDLEPTVIDEVKTGPYRQLFHPEQLISYKEDAANNFARGHYTVGREVVDLCLDRLRKLADNCTGLQGFLVFNAVGGGTGSGLGSLLLERLSVDYGRKSKLGFTIYPSPQISTAVVEPYNSVLSTHSLIEHTDVVVLLDNEAIYDICKRSLDIERPTYTNLNRLISQVISSLTTSLRFDGAINVDITEFQTNLVPYPRIHFMLSSYAPIISVEKAFHEQHSVPEITNSVFEPASVMAKCDPRHGKYMACCLMYRGDVVPKDVNAAVHSIKTRRTVQFVDWCPTGFKCGINYQPPTAVPGGDLAKVRRAVCMISNNTAVAEVFSRIDRKFDLMYAKRAFVHWYVGEGMEEGEFSEAREDLAALEKDYEEVGAEVEDDDEEQGEY

SEQ ID NO: 49948 - protein, 240 aa, Oryza sativa
MPSHADLDRQISQLRECKFLGEAEVRALCEQAKAILMEEWNVQPVRCPVTVCGDIHGQFYDLIELFRIGGDSPDTNYLFMGDYVDRGYYSVETVTLLVALKVRYRDRITILRGNHESRQITQVYGFYDECLRKYGNANVWKYFTDLFDYLPLTALVENQVFCLHGGLSPSLDTLDNIRALDRIQEVPHEGPMCDLLWSDPDDRCGWGISPRGAGYTFGQDIAQQFNHTNGLTLISGPINL

SEQ ID NO: 49949 - protein, 269 aa, Oryza sativa
MGTNSQTMAWILDEYSKFHGYSPAVVTGKPVDLGGSLGRDAATGRGVLFATEALLAEHGKGIAGQRFVIQGFGNVGSWAAQLISEAGGKVIAISDVTGAVKNSNGLDIAKLMKHSSENRGIKGFDGGDAIDPRSLLTEECDVLVPAALGGVINKDNANEIKAKYIIEAANHPTDPEADEILSKKGVLILPDILANSGGVTVSYFEWVQNIQGFMWDEEKVNNELKTYMTRGFRDVKEMCRSHHCDLRMGAFTLGVNRVARATVLRGWEA

SEQ ID NO: 49950 - protein, 314 aa, Oryza sativa
MAAPSKPQHGAIGPVPFKDVIGDAMAQRSSPEEEYAGVVSSLPSYPKLRLRHYQGMWLMEYTLPGIMAIQRSFVPRRHGDVVLASPSDRHPLLRLNPHDCVPFMEGAISEGWGGKIDELPSPRLMSTHMQHAALPKSIADEPGCKVVYICREPKDILVSAWHFFRIIEPDLSFQEVFEAACDGKFLTGAIWDHIIGYWNACKANPEKVLFLVYEDLLRDPANIVRKLADFLGQPFSSTEEEAGLVTDIVRLCSFENLKSLEVNKMGEASFAFPNASYFRKGKAGDWKIHMTPEMVECFDTIVKEKMHGSGLVFA

SEQ ID NO: 49951 - protein, 188 aa, Oryza sativa
MASLCRPAPAIHAFTAVCALPPPALHACRPSPLHHNTVRRHCEPLIPLAAIALPRRAPPTVPGCCTQVVPAQPQRRRFPRCFTPPAPSFSAGVAPEPAYSRGKLYRLPHDPLHPRLLPRPSLAHECVGKGGAAPAQDGFQPCRPRPGRDPPSLVGLACSTTTRDGSTLAVGLPLTGKGAIRVAGGEFL

SEQ ID NO: 49952 - protein, 250 aa, Oryza sativa
MAPNAMRKVKKVLLVVGMIASTILGEYPHQAAAARFSARRPPPGPGRLPPPVPGGPRVGGKPRPEFDLPPVCSVGFPCSASEPESNHTTFSCELENRMGDTIWFQCDGDLFYFSVGSGQSIGRLYNDVQDLGPRNKVSCAWAFQENYKSSVPAWDGNWPEASSCRVDDASGADGQCRLLFENREVALLTATGGRRVLGGLLLKNCTTPTPWYAWLFPWTDPCTTYLDNTTRPYVGNIQPSWAAAVFNMDN

SEQ ID NO: 49953 - protein, 114 aa, Oryza sativa; identical to SEQ ID NO: 30520

SEQ ID NO: 49954 - protein, 284 aa, Oryza sativa
MGEGGDGRSFNFLQVLFEGVIAGGAAGVVVETALYPIDTIKTRLQAAKGGSKIQWKGLYAGLGGNIAGVLPASAIFIGVYEPTKRKLLEMFPENLSAVAHLTAGAIGGAASSLIRVPTEVVKQRMQMSQFKTAPDAVRLIIRKEGFKGLYAGYGSFLLRDLPFDAIQFCIYEQLRIGYKLAAKRDLKDGENALIGAFAGAITGAITTPLDVLKTRLMVQGQANQYRGIISCAQTILREEGAGAFLKGIEPRVLWIGIGGSIFFGVLEKTKSILAERNSRKVRIL

SEQ ID NO: 49955 - protein, 404 aa, Oryza sativa
MLHLQKHLLLLSLPPRATASTLLSLRHHGLFSLTRFSAAAAAAKSAGHFAVEEYLVATCHLTPDQATKASKSISHLKSPSRPDAVVAFLAGLGLSAADIAAAVAYDPRLLCAEVDRTLAPRLAELAGLGLSPSQIARLVLVDPARFRRPTVISKLQYYVPLFGSFETLLQALKNNSYLLSSDLEKVVKPNVALLRECGLGACDIAKLCIPLPRLLTTSPERVRDMVAQAENVGVRRGSKMFRHAILAVAYISEEKIAAKMQFLMKTLKWSDAEARIAVSKLPVVLRSSEDKLSRVSEFLISEVGLEPAYIAYRPAMLTYSLERRLMPRHCVLKYLKDNGLIESDKSYYSAVQVTEEVFVEKYISPYEDTAPHLAEDYAAASSVKIPTRFRLKGPKTGHASAQTA

SEQ ID NO: 49956 - protein, 216 aa, Oryza sativa; identical to SEQ ID NO: 32002

SEQ ID NO: 49957 - protein, 354 aa, Oryza sativa
MAGGGGAGGMSESVLRKVLLSYCYVGVWIFLSFAVIVYNKYILDPKMYNWPFPISLTMVHMAFCSSLAVALVRLLRVAEPPSSPAMTPQLYTSSVVPIGALYAMSLWFSNSAYIYLSVSFIQMLKALMPVAVYSIGVLFKKETFRSSSMLNMLSISFGVAIAAYGEARFDVRGVALQLAAVAFEATRLVLIQILLTSKGISLNPITSLYYVAPCCLGFLLVPWVFVELPRLRAVGTFRPDFFVFGTNSLCAFALNLAVFLLVGKTSALTMNVAGVVKDWLLIAFSWSVIRDTVTPINLFGYGIAFLGVAYYNHVKLQALKAKEAQKKISQADEEAGSLLQERDGHSDRKSDNQA

SEQ ID NO: 49958 - protein, 165 aa, Oryza sativa
MGAGVSGLFGLGGDEGETSAAVGGAAAAGLGDLPELCAAEVLLRLDAPEICRLARLNHAFRGAAGADFVWEAKLPENYRYLMSFVEGGGGGDDGRQLRRRRWRPAGKKEIYARLARPVPFDGGSKEFWLEKSKGRVCMALSSKSLVITGIDDRRYWQHIPTAESR

SEQ ID NO: 49959 - protein, 38 aa, Oryza sativa
MHITPFLSASQKLSLTVLKISVRFFVVIALRTLHMCFK

SEQ ID NO: 49960 - protein, 148 aa, Oryza sativa
MEGFNELIPEELISIFNDKELELLISGLPDIDLDDLKANTEYSGYSIASPVIQWFWEIVQGFSKEDKARFLQFVTGTSKVPLEGFSALQGISGPQRFQIHKAYGSTNHLPSAHTCFNQLDLPEYTSKEQLQERLLLAIHEANEGFGFG

SEQ ID NO: 49961 - protein, 298 aa, Oryza sativa
MKGKGGPENTRCDFRGVRQRTWGKWVAEIREPNQQSRLWLGTFPTAEAAACAYDEAARAMYGPMARTNFGQHHAPAASVQVALAAVKCALPGGGLTASKSRTSTQGASADVQDVLTGGLSACESTTTTINNQSDVVSTLHKPEEVSEISSPLRAPPAVLEDGSNEDKAESVTYDENIVSQQRAPPEAEASNGRGEEVFEPLEPIASLPEDQGDYCFDIDEMLRMMEADPTNEGLWKGDKDGSDAILELGQDEPFYYEGVDPGMLDNLLRSDEPAWLLADPAMFISGGFEDDSQFFEGL

SEQ ID NO: 49962 - protein, 72 aa, Oryza sativa
MLLLVLTTRKLGFKRCESTTSEKRVLILYLPMVFKLLSHKRRRSEVKSCHWTQAHSSSGRQVPSSPGYSFLL

SEQ ID NO: 49963 - protein, 149 aa, Oryza sativa; identical to SEQ ID NO: 48137

SEQ ID NO: 49964 - protein, 212 aa, Oryza sativa; identical to SEQ ID NO: 30232

SEQ ID NO: 49965 - protein, 176 aa, Oryza sativa
MQKFYIHVSKYPLSLFGWDVDQAGLPGGVPDGGERALRGGGAGRRAGGDKVAGVQDQPEGVRAVRRRRGGGHAVRVPGGRRRHRRVLGEERPAARRRRPARRAAAAGDHVREGAQARAHGVPLGPATLRASAAAAGASATSQQLCTLTEWQNFLELPLVRNSQCKIISLTGSHSLP

SEQ ID NO: 49966 - protein, 93 aa, Oryza sativa
MEKCRSVPHEHSAAYYGCGGGYDYEDVSGGGGGAAAKSYSFNGPSARDDPEAKRRRRVAAYNVFATQGRLKSTVRSSFKWIKSKFSDIRYGGL

SEQ ID NO: 49967 - protein, 364 aa, Oryza sativa
MIMGFILELGLLKAIFSFITMQLQFCSVFFTFSLGTRTHYFGRTILHGGAKYHATGRGFVVRHIKFAENYRLYSRTHFVKALEVALLLIIYIAYGYTRGGSSSFILLTISSWFLVVSWLFAPYIFNPSGFEWQKTVEDFDDWTNWLLYKGGVGVKGENSWESWWDEEQAHIQTLRGRILETILSLRFLIFQYGIVYKLKIASHNTSLAVYGFSWIVLLVLVLLFKLFTATPKKSTALPTFVRFLQGLLAIGMIAGIALLIALTKFTIADLFASALAFVATGWCVLCLAVTWKRLVKFVGLWDSVREIARMYDAGMGALIFVPIVFFSWFPFVSTFQSRFLFNQAFSRGLEISLILAGNKANQEA

SEQ ID NO: 49968 - protein, 89 aa, Oryza sativa; identical to SEQ ID NO: 31053

SEQ ID NO: 49969 - protein, 276 aa, Oryza sativa
MKDHLMLNVSNLPESVEATEAAMNLPSGGVSLPPLSTTHTLLSVRESMGAEEEPLIQTVECRICQEEDNISNLESPCACTGSLKYAHRACVQRWCDEKGDLTCEICHEPYKHGYTALPRAHPDETTIDISGGWTITGTAFDLHDPRIIAMAQNHIMEADYDDYSVTNASSAAFCRSAALILMALLVLRHVLVLTDEDEDDASSMFLLFLLRVTGFLLPFYIMAWAINILQGRRRRQVAAALAATEVAFILQSGQRRGMNFTIAPDSPATPQHEPIP

SEQ ID NO: 49970 - protein, 237 aa, Oryza sativa
MGISKTEVNLLRLLDSAPRQQNQAKLIHYVTTSRELLEKLAAENTSEGISSIAKGRLNEYSERIEELAARLASLVPGYENAVEAIRKEESYLEGEQIRSPIALSPGLRRRLTALQEIEQPTNAKERNVAEPLRLDEAAQANIEKYRNLQEDLTDEIVELARQLKDSSLMMNQSVQATEKILDSTERAVAYSLAGTDRANAQAVEVSSLTSKTTCFQWFLLFVMTCMFIMVVLLIRVT

SEQ ID NO: 49971 - protein, 279 aa, Oryza sativa; identical to SEQ ID NO: 28759

SEQ ID NO: 49972 - protein, 383 aa, Oryza sativa
MMVVDTVSASTSLVAHHLFDQRSKANHHLRRTLHVVSCRPLPTHFAGRRLVARAPRQHQPRLADWTVKALAMGVTKEASPHREYRGIPGEGADMGDIGITNPKTTWPPRNRADDPKLHNPLLRLERMGCGWLGVIFEWEGVIVEDDAELERQAWFTLAQEEGKSPPLAFVLKRIEGMKSEQAISEVLCWSRDPSELRRLSSRKEEIRCNLRGTAFYQMRNGSREFMSTLANYKIPLAVATTRPRKVIEEAIDAVGVRSFFDAVVAAEDVYRGKPDPEMFLYAAQLLSFIPERCIVFGNSNSAVEAAHDARMKCVAVASKHPIYELNAADLVVKQLDELSVVDLKNLADIESPEFGMEPEPEMEEEEDEDSSPSTSVGVDDLFW

SEQ ID NO: 49973 - protein, 527 aa, Oryza sativa
MVGGGGGAGEKPPASNGVHGSGKARFTLLYGLLLYVVMPVLFLYMLVAAATPFYNPRCSPESNAAMARFVVAMPNASSVNGSSPSSSSPPPTPVRPMRSADEAPTGLRHIAFGIGASSALWKSRKEYIKLWWRPGRMRGFVWMDRPVEEFYSKSSRTGLPPIMVSSDTSKFPYTHGAGSRSALRISRIVSETFRLGLPGVRWFVMGDDDTVFLPENLVHVLSQYDHRQPYYIGSPSESHIQNLIFSYGMAFGGGGFAISRALAEELAKMQDGCLHRYPALYGSDDRIHACMSELGVPLTRHPGFHQCDLWGDVLGLLGAHPVAPLVTLHHLDFLEPVFPTTPSRAGALRKLFDGPVRLDSAAVAQQSVCYDREHHWTVSVSWGFAVMVVRGVLSPREMETPMRSFLNWYKRADYTAYSFNTRPVARQPCQKPRVYYMRDSRMDRRRNVTVTEYDRHRGKQPDCRWRIPDPAALVDHIVVLKKPDPDLWKRSPRRNCCQVVSSPTKAGKNRTMTIEVGVCREGEFAKL

SEQ ID NO: 49974 - protein, 309 aa, Oryza sativa; identical to SEQ ID NO: 31890

SEQ ID NO: 49975 - protein, 263 aa, Oryza sativa
MARGLKKHLKRLNAPSHWMFDKLGGAFAPKPSSGPHKARECLPLILILRNRLKYALTYREVISILMQRHVMVDGKVRTDKTYPAGFMDVVSIAKTGENFRLLYDTKGRFRLHSIKDEDAKFKLCKVRSVQFGQKGIPFLNTNDGRTIRYPDPLIKANDTIKIDLETNKIVDFIKFDVGNIVMVTGGRNTGRVGVIKSREKHKGSFETIHVEDALGHQFATRMGNVFTIGKERKPWVSLPKGKGIKLSIIEEARKRNAEAAAEA

SEQ ID NO: 49976 - protein, 178 aa, Oryza sativa
MRLLKADQLFRKVIDGGWRKQSRLLGLDVGSKYVGLAVSDDKNRIALPLSVLSRTKTNISLMADDFVTLVSKYSLAGFVVGYPFNLQGQSSPNALQVRLLVGELCKTGKLDDMSYTYWDENFTSKCVEALLHPLKLHDPVETKTMTDKFAAVCILQRYLDNMNRELRSADNSGKQGDT

SEQ ID NO: 49977 - protein, 502 aa, Oryza sativa
MMEINSEATVTLVSVVTLPILLALLTRKSSSKKRRPPGPWNLPLVGGLLHLLRSQPQVALRDLAGKYGPVMFLRTGQVDTVVISSPAAAQEVLRDKDVTFASRPSLLVSEIFCYGNLDIGFAPYGAYWRMLRKLCTVELLSTKMVRQLAPIRDGETLALVRNIEAAAGGKKPFTLATLLISCTNTFTAKAAFGQACGGELQEQFLTALDEALKFSNGFCFGDLFPSLRFIDAMTGLRSRLERLRLQLDTVFDKIVAQCESNPGDSLVNVLLRIKDQGELDFPFSSTHVKAIILDMFTGGTETTSSTTEWLMSELMRNPEVMAKVQAEVRGVFDNKSPQDHEGLLENLSYMKLVIKETLRLNPVLPLLLPHLCRETCEIGGYEIVEGTRVLINSWAMARSPEYWDDAEKFIPERFEDGTADFKGSRFEYLPFGTGRRRCPGDIFAMATLELIVARLLYYFDWSLPDGMQPGDIDMELVVGATARRKNHLQLVASPYKPISMQS

SEQ ID NO: 49978 - protein, 233 aa, Oryza sativa
MLFMVLNSHQMSPNFLVWLVLGVFLMATSLRMYATCQQLQAQAQAHAAAANGFLGHTELRVHVPPTIALATRGRLQSLRLQLALLDREFDDLDYDALRALDADNSPHAPSMSEEEINALPVFKYKVQAHQGSASFQKSDGPSQPSVSSTESGNEKKQDRFKADATDNTLEDELTCSVCLEQVVVGDLLRSLPCLHQFHANCIDPWLRQQGTCPVCKHRVSDGWHGEADASNMV

SEQ ID NO: 49979 - protein, 83 aa, Oryza sativa
MGSYGWIQTQQGSEVLSAFSCTMFSAIQQCIAEFRHRYFGIWTGFSNGMNKNTLAKSLQFTWTAMALHSQWTEDFMIFNSKPS

SEQ ID NO: 49980 - protein, 211 aa, Oryza sativa
MVDLIHETDDAMAEAELLLERSRAITLNGRDKRGRALVRIVGKYFPARALGGRAEAALRGYVRRRVLPEIGEREFVVVYVHSLVDRGDNFPGVAAIRAAYEALPAAAKERLRAVYFVHPGFQARLFFATLGRFLFSSGLYEKLRYMSRLEYLWEHVSKGEMEVPECARRHDEELERRPLMDYGIEATDRRCMFDAASMDTSASLHSLRCIS

SEQ ID NO: 49981 - protein, 88 aa, Oryza sativa
MRLRPPAVVLLGPPVIPPSPLARSGEQSSYVSSSSTGVAAGMTRKGKIWPPLQSSSWLGGTRSGLSEVGGNQIRVLLLLLHRVATSKS

SEQ ID NO: 49982 - protein, 298 aa, Oryza sativa; identical to SEQ ID NO: 31970

SEQ ID NO: 49983 - protein, 350 aa, Oryza sativa
MFLESPVGVGFSYTNTSSDLQQLGDKITADDAYIFLLNWFKRFPQYKSHDFYIAGESYAGHYVPQLSEKIFDGNKQGPKENYINFKGFMIGNALMDDETDQTGMIDYAWDHAVISDRVYADVKKYCNFSMENVTDACDSALTEYFAVYRLIDMYSLYTPVCTEVSSSAAFGQRQVAVHGAAPKIFSKYHGWYMRPAGYDPCTSDHAEVYFNRADVQEALHANVTNIGYNWTHCSDVIGKWRDAPFSTLPIIRKLVAGGIRVWVFSGDTDGRIPVTSTRLTLNKLGLKTVQEWTPWYDHQQVGGWTILYEGLTFVTIRGAGHEVPLHAPRQALSLFSHFLADKKMPPTAFP

SEQ ID NO: 49984 - protein, 183 aa, Oryza sativa
MNKLRSLPSSICEMRSLYLLDAHFNELCGLPSAIGKLSSLEILNLSSNFSDLKDLPASFGDLLNLRELDLSNNQIHALPDNFGRLDKLEKLNLEQNPLSMPPMEIVNKGVDAVKEYMLQRWLDILLEEERKSIAAAESPQAPTTPSAWLARSVSWVSDVSGSLVGYLSGENKTEKDAYLDQQY

SEQ ID NO: 49985 - protein, 161 aa, Oryza sativa
MIHFVLLISRQGKVRLTKWYNPYPQKERSKVIKEVSTLVLTRGPKMCNFVDWHGYRVVYKRYASLYFCMCIDAADNELETLQIIHHFVEILDRYFGNVCELDLIFNFHKAYFILDEVLIAGELQESNKKAVLRLITTQDNLVEAAKEEASSLRNIIAQATK

SEQ ID NO: 49986 - protein, 292 aa, Oryza sativa
MAGGEDEGWRRSGIEVSALQFDYDGQPPLFARFNLRIAPGSRCLLIGANGSGKTTLLKILAGKHMVGGRDVVRVLNGSAFHDTQLVCNGDLSYLGGSWSRAIGSAGDVPLQGDFSAEHMIFGVDGVDPVRREKLVDLLDIDLQWRMHKVSDGQRRRVQICMGLLHPYKVLLLDEITVDLDVVTRMDLLDFFKEECEQREATIVYATHIFDGLESWATDIAYIQEGELRKSAKYSDVEELKSAKNLLSVVESWLRSATKLPKKEHPRPETQPRRSSPFDASPFRSSRHMAYYR

SEQ ID NO: 49987 - protein, 192 aa, Oryza sativa
MDHYIALHLRDEKDMLSFTGCNHNLTVHEADELTDMRLKVRHWKEKEINSEEKRLQGGCPMTPREAAVFLKAMGYPSTTKIYIVAGEIYGAHSMDALKLEYPNIYTHYSLATADELEPLELYQNRLAAVDYIVALQSDVFVYTYDGNMARAVQGHRRFEGFRKTINPDRLKFVELIDKLDEGSMDWNEFQLK

SEQ ID NO: 49988 - protein, 366 aa, Oryza sativa
MAWSQSARKPMIGLLFRAQQHSARGYSYSAFQAHLSSSNVDQSATLLRRFSSEVPASEQMNLIKQLRERTSAPIKDVKASLVSCNWDIDVAQKDLRKRGVVLAAKKSSRTAAEGLLAIAQDEKRAAVVELNCETDFVARNDVFQYLASSLAKLALSARDPGELVFPFGPDYLENLNVNLDHPKLSGETTVQSAVTEVAAMVGENVKFRRGFIMSTTAHGVVCSYMHTCPQPGLGRLAGLITLEAEDSNAPLDALQRVGKSIAMHIVATKPLFLSKELVSASAVENERDILRTQAESSGKSQMAMEKMVEGRLRKYFEEVVLLEQKYVVNDSTNIKSVLNDLSKEVGSKVTVGNFARMEVGEGVSKA

SEQ ID NO: 49989 - protein, 217 aa, Oryza sativa
MAPSSPPAMNMACARQGRLRQRYEGCYRLVSGCIPYMIKEDGENSSSSLQDDDHVLERLQVLMISTPKRSDLIFPKGGWEDDESIGEAACREAFEEAGVKGVLSGTPLGEWIFKSKSKQNSCGLQGACKGYMFALQVTELLESWPEQTTHGRRWVPVEEAYGLCRYDWMREALDKLKEQLLFAAGDDLRASPSPELDSSAGLYMVMPPVAEGAVALC

SEQ ID NO: 49990 - protein, 226 aa, Oryza sativa
MKTTTVPMAAAAAVAPSTTTSSSASFKVAAYAWSSCRSSSSPATRLVAAPNHQRPPLVVGAIAGLDPVTAVQLPLTAGNVESVLDQVRPYLTADGGDVALHEIAGNVVRLKLQGACGSCPSSLITIKRGIERRLMEKIPDVAAVEPVTDKETGLELNEENVEKVLNEIRPYLAGTGGGGLQFLMIKGPIVKVRLTGPAAVVRTVRIAVSKKLREKIPSIQIVQLLS

SEQ ID NO: 49991 - protein, 751 aa, Oryza sativa
MTEMEDSLRSCTEQLLRVREEKERLIIEAADKISLEQKKVWSLQQKLEDANKRFAKVTTENYNLRNIVNSKDKVITELSESAALLNQKLIDATARLEFTHKQCGSLQYEVRILQKELEIRNKEREFDLKSIDAAQKHQQESTKKITALETECQRLRTMVQKRLPGPAALAKMKDEVERRGSNCVENRRRKPRSSAQSSPQVVTPRHPVSEGYLVKMQELDDENRHLRQLLAKKESDLQFVQLQYADEASKLSVVQGQLKELVGSHELDDDNRPEPWANSSLVSKGEHFRVGKQHASHSRGRRIAGSDMQLLVDISEIEKLEMISRPSSAPHQCVPDASDTESKTALTETVCQDRILEDGLSDKYPEWIQDVLELIIKKHQVLKISVDIIIDEIRSALRTEISDKGNDAANVTYDQAVIDSMVATLVERVSCMIERSSGNNVLSSQSFLHEKSELTCHLEHLICVCSDVLDGKANLRKFIEEVCLTLEWTVNQYIYCVDALETVDCITNDFDGNVSLRSLNMQEKQQMQSTNPKVAVGVQQEVQKEPFLIPGDPVENHSQVQFVTCKLDKELLAVRQDHGDNCQEKQSVHYKEESATADGSMQLLPEEEGKQLTNSAISAAADKLAECQETITSLSKKLQALKCPANADAVDKRKSDNLHLLVANQNFSSPPSIEAACKKENDERVTTEKNLLQEQDVGTGHKVDNNGSTQIAPRPVIPKSPLTTVSVDMKKRKKKKQGGSLLSRLIFGKKA

SEQ ID NO: 49992 - protein, 791 aa, Oryza sativa
MHEHIRARAWEATVRKVVQQQQPQPQPGGSRRRVSPMLAADDPETASSSSASTAGGGDDGGYVERGLPNGDFYTGQWRGGAPHGAGKYLWTDGCMYEGEWRHGKATGRGRFSWPSGATYEGEFRDGFMDGAGTYTGAAGDTYRGSWSMNLKHGHGKKSYANGDHYDGEWRSGLQDGAGRYIWRNGTEYTGQWRGGLIHGRGALVWSNGNRYDGGWEDGCPRGQGTFRWADGSVYVGYWTRDAATGIVQQKGVYYPSPAASSPTARDPRDVFARDLPGFMGGAAEPAASLPHRSLNHSGNRGGAAAAAGNARSSSASGLSNSSGGDRKYDKICIWESDGDITCDIVDGAALADEAVGPRRSIKAAAAGDGLVLAPPSPAPRIAKWVPPREAKRQGETIAKGHKNYELMLNLQLGIRHAVGKQGPVTLDLKSSAFDPKEKVWTKFPPEGSKYTPPHNSCDFKWKDYCPQVFRTLRKLFKVDAADYMLSLCGSEALRELSSPGKSGSFFYLTNDDRYMIKTMKKSEVKMLLKMLPAYYNHVRSFENTLVTKFFGLHCVKLAGANQKKVRFVIMGNLFCSDHSIHRRFDLKGSSLGRTTDKPQTEIDQYTTLKDLDLNFIFRLKKQWFHEFQRQVDRDCDFLEQEKIMDYSLLVGVHFRGNREKLLSEGSTDYDINKISTPRLSRGNVDQCLTDPNRWPKIKLGANMPARAELTARKNDLEPQLIGEPTGEYYDAILYFGIIDILQDYDISKKLEHAYKSFQYDPTSISAVDPRQYSRRFKDFIYKAFQEDRLDS

SEQ ID NO: 49993 - protein, 72 aa, Oryza sativa; identical to SEQ ID NO: 31001

SEQ ID NO: 49994 - protein, 268 aa, Oryza sativa
MLKLAQRMTDNFCAGVCASAAQKWRRLDEWRGEGGGGGGGGGGDGEDKVRMMARHSVGAPGEPPGVVLSATTSVRLPGTLPQRVFDYLRDEQRRGDWDILANGEAMQEMDHIAKGQHHGNAVSLLRPNATSGNQNNMLILQETCTDSSGSLVVYAPVDVQSMHVVMNGGDSAYVSLLPSGFAILPDGHNNGASPSPAEVGSGASPNSAAGGGGGSNNTGSLVTVAFQILVNNLPTAKLTVESVDTVSNLLSCTIQKIKSALQASIISP

SEQ ID NO: 49995 - protein, 770 aa, Oryza sativa
MFWRMTGLSAASPVDTILDKENFTLEELLDEDEIIQECKALNTRLINFLRDKAQVEQLLRYIVEEVPEDSEKKRSFKFPFIACEIFTCEIDIILRTLVEDEELMDLLFSFVRPGHPHSTLLAGYFSKVVICLMLRKTSPLMNYVQEHPDIVVHLVDLIGTTSIMEVLIRLIGADETIYSNYADTLQWLENTDVLEMIVDKFSSSDSPEVHANAAEILSAVTRCAPPALAAKICSPSFVGRLFRHALQESRPKSVLVHSLSVCISLLDPKRLASASYQAFRSNLSHGTLVTASPETVDGMLESLGDLLKLLDISSAENVLPTTYGCLQPPLGKHRLKIVEFISVLLTIGSETAEQELINQSAVKRSIDLFFQYPYNNFLHHHVESIIISCLEVNRSQLIDHALNECNLVGKILAAERSSSLSTESNTPTLLSEGKVPPKIGNIGHITRIANKLIQLGNSNSIIQSHLQENSEWVEWQTTALVKRNEVENVYHWACGRPTSLHDRGRDSDDDDFRDRDYDVAALANNLSQAFRYGMYSNDDIEEAQVIERDDEDVYFDDESAEVVISSLRLGDDQDSSSLFTNSNWFTFDGDRGINDRLAASVPSSSPNSEETSLNTEETDEVQIGEDTSIEPQLESVSLENGPVEEAGDLADVSKQTDSNTEDEKLLCTEEEDLSKEAEESERHVDVRDGQVDIQAEDAAEGSCGDMGTGIAVDEPVSPSSEPNNASAGASPDTGDIHTAGSTGSNDSGAELHAKEDSQDGQKTDEPTTTE

SEQ ID NO: 49996 - protein, 1174 aa, Oryza sativa
MEMKEMNARMGNGEKTPCISDVQDNRCMTIQIEPTDTNQAKKSPKVKIVTRDASLLAGDGDITRKSLGPIKVFSEKDLSREIERVASTLHPDNEWAIRITAMQRVEGLVLGGAADYSAFPMLLKQLVTPLITQILDRRSSVVKQACHLLNFLSKELLRDFEPCAELLIPVLLKNVVITIHVIAESSDNCIKEMLRNCKVARILPKIIEFAKNDKSAVLRARCCEYAILMLELWVDTPEIQRSVDLYEEFIKCCIEDATSEVRSSARACYRMFSRIWPERSHQLFSSFESSRQKMINDEDAETQQRHLSPVERVKLMQPQSSSCNSTEIDKVVKVDSGTSFSSVDLQSVQVKASVQHDDMTSKIQPEGKTDGTTTTGSSFKDTSTLEKETSPDKGPDPDKCDSGVNLSSCDPSSATQFILEPTSELLPSDATVVTIVQDKAECRPNTEQLTQQVQVLGHPSDLLNRSPPVSLKESGNSLKHNPIQVNFDGSSGGKLGAQKVKHHTSAPNKSVVRKEPRNNYIPNFRRPLLSKQMTNWFYASNRSDLDDKQLILGEMVSNMDVPSSLTEALSLGLKPKSDWMMRVYAFNFLRQSLLEQGPRGIQEVAQNFDKVMRFVSRYLADPHHKIAQAALSSLSEIMPVFKKPFEHYLDKTLPHVFSQLNDPKESIKQQCSAILKLAGEIYSIDSLLPALLRTLEEQKSPKSKLAIIEFANSSFVKCTVSSDNYSSSSFLKPWLEKLALLFKDKNSKLKEVSVAGFSSIYSHYDPASLLSFLVSLSMEEQKRLRRAIKQLIPTIESDLEEFLQQRKHKPKVPLFDSFVGAYQPYAKGLVIKQNKHHLHATYQSDCLQADDVFDSALHCLPRISLEVRERRAGKIESESYDESNGHDAEMMDKKSSDTRSSDPPRTFDYNVISDNTVESPRKEGTDIKRFEESNESELNITVRNRNVILNSCQDHGPSISRTYHQDEMSQMEEVPEINGPSVSIKNLQQMSSSLLEMLDDPEESTRELALTLLVEILEKQRKAMENCIDTLIVKLLHATKDAALKVVNQAHICLTTVVTQFDPLTCLRAIASQLANQDEKVLIVSINSLSKLVIRLSQDNLMAHLSIFLPALLDAFENHSPYVRKAVVLCLVDTYLKLGPAFLPYLERLDSAQLQLVTTYASRLSQTSFIAVDA

SEQ ID NO: 49997 - protein, 573 aa, Oryza sativa
MESTCWSCGEGAVVADPDTGVLVCTSCGRIHDSGSSEFVHQSICTDNGVYDLRASSFVYHQSQSQYRDQKLSNGVVTIASIAARLGLSPTAADEALAMAKSATGGNLATQGSAFLPALASACAFLVARSHRLPLSLAEAAETAFCSVASFADLVSRIASHLSLPPLPSFDYAAALERAVRSSPSLSSAASERTEVILSQSRFLLRCASKWSLTTGRFPLPLIAALVAFAAEANGVTSITVEDIARDISARLHTSLRRYKELVDALVRVARELLPWGADVNAKNLLLNAPVLLRLMEMRSQSDPSEQFLESFAPDIAGIVQACSAVDDDESKYLQVAPQLASDDLDSNNSGQEGKELENFKISEECLSSAYQNVLKRLAQLQRLGQVGKGANRKRQRIGGLELEPCIDSLDDGWTKDMVLEDVVNIDVGFDVPPPSFAAGMKLQKKRRARIEAAKCRIDAIRKGPVESENKLQAALRNEDACSPQKPARKKRGKKRIAGSDRAMNGELPIEMPDGPGGEKKRRKGAPSDGIDWEDCIIELLLLHGANEEEIEQGQYRRLLDLHVFCAVSASGHK

SEQ ID NO: 49998 - protein, 839 aa, Oryza sativa
MRASPMAGASHHLVVFLAALLALLPGSSQLQYSQTWTLFKIQQMLNHPPVLSHWRRTTDFCGGGGTAAPSAAVVCYGDTVTQLHIAGVRGAPPLPMNFSIGALVMALSRLPDLKVLTLSGLGLWGPLPDKIGRLAALEIVNMSGNYLYGGVPGGLSQLTGLQTLILDDNLLAGELPAWIGELPQLAVLSLRNNSLGGAVPASVGRMESLRSLVLASNNLTGNLPDMSGLTNLQVIDVGDNWLGPAFPALGRKVVTVVLSRNRFTGGLPGEITSFYLLERLDVSWNRFVGPFMPALLSLPAIRYLNVAGNRFTGVLSDKVACGDNLQFVDLSSNLLTGSEPACLRPDKKPATVVLVNANCLEATGGDASQHPSPFCQNQALAVGITHGGKVRKKLTHHAGFLAGIAMAALAAASAIAVVAVVAVRRKNKKGVMVRPPAMLGEDNSSSTSGYPSKMFADARYISQTVKLGALGIPPYRTFSLVELEAATDNFENSLLLGQDSFGEMYRGRLGNGTLVAIRSLKVKRNQSSLSFSRHIETISRLRHRNLVSALGHCFEYDLDDSTVTQLYLVFEYVQNGNLRSRISQGTEGRKLTWAQRISAAIGIANGIQFLHAGMMPGLFGNNLKINNILLDQNHVAKISSYNIPILGEAMKSEKGGPGGKHHTESPLLNDKTEIFDFGVILLEIVSGKPITSLYEVEIMKELMLWAVADEDLVRRRSFADQEVSKGCSDESLRTIMQICLRCLAKEAVQRPSIEDVLWNLQFAAQVQDDWEGDNRSSDGSMVSSSSRITKSSRFQNEQTRSGREKECEDSSARGSVWLQAATEDGNFETGRRQAEDERY

SEQ ID NO: 49999 - protein, 215 aa, Oryza sativa
MDEWGVDVALTGSQKALSLPTGLGIVCASPKALEASKTAKSVRVFFDWKDYLKFYKMGTYWPYTPSIQLLYGLRTALDLIFEEGLENVIKRHNRLGTATRLAVEAWGLKNCTQKEEWFSDTVTAVVVPPYIDSAEIVKHAWKRYNLSLGLGLNKVAGKVFRIGHLGHLNELQLMGALSGVEMVLKDIGYPVKLGSGVAAAAAYLSNSTPLIPSRI

SEQ ID NO: 50000 - protein, 128 aa, Oryza sativa
MAAGGMLCVSSSPTASASVARGRRQRRRSVEVRCSCRRGPPRARSRGPSAASRSRCVSPDLRRRLGFFFFSFIFQLLQNILLMRGWRAEEIFFSLAVLGVQYHPDVSKESDSGVHFQRINVAYQVISN

SEQ ID NO: 50001 - protein, 282 aa, Oryza sativa; identical to SEQ ID NO: 36568

SEQ ID NO: 50002 - protein, 489 aa, Oryza sativa
MDTVEKIVEDFASDIAMGPFSSGTRLRDMIRAIRACKTAAEERAVVRRECAEIREAIGENQQEIRHRNMAKLMFIHMLGYPTHFGQMECLKLIAAAGYPEKRIGYLGLMLLLDERQEVLMLVTNSLKQDLNHSNQFIVGLALCALGNICSAEMARDLSPEVERLMRSRDVNTKKKAALCAIRIVRKVPDLAENFMGLASSLLKEKHHGILISAVQLCTELCKASKDALEYLRKNCVEGLVRILRDVSNSSYAPEYDVAGISDPFLHIRVLKLMRILGQGDADCSEYMNDILAQVATKNESNKNAANAILYECVQTIMGIEATSGLRVLAINILGRFLSNRDNNIRYVALNMLMRAITVDTQAVQRHRTTILECVKDADASIRKRALELVFLLVNDTNVKPLTKELVDYLDSADPDFKEDLTAKICSIVEKFSQEKLWYLDQMFKVLSLAGNHVKDDVWHALVVVISNASELQGYSVRLLYMALQAFVDQ

SEQ ID NO: 50003 - protein, 622 aa, Oryza sativa
MSGARRCGGRTSERSSVVGDNRNGYVETDPTGRYGRLSEVLGKGAMKTVYRGFDELRGVEVAWNQATISDVLRTPDALHRMYAEVSLLADLRHDAIIAFHASWVHPSRRTFNFITELFSSGTLRSYRLRYPRVSRRAVAAWARAILRGLAYLHARGVIHRDLKCDNIFVNGHLGQVKIGDLGLAAVLRGCASARSVIGTPEFMAPEMYDECYGVGVDVYSFGMCMLEMLTNEYPYSECDNPAQIYKKVTAGKLPDAFYRLTDADARRFIGRCLVDAAHRPSAEELLLDPFLSPSQNHDDHNIIAHATAPPPPLPLACSNSSEEQEEAAPAPAAKTTDMAITGKLNKEHDTIFLKVQIGGGRNVRNIYFPFDVANDTAMEVATEMVKELDIADREPTEIAAMIEQEIVRLVPGYKQHEYSYADDNDDDDVSGHPNPFYYLSSSPTSSQGSLCGVGSTSSEGFPGPHGKVDWSRDYCYYPPSSVSVSDDDDSSTSSLSAAVSASSLHQQQQHCSASSSRLGPASASASEDGGGGHAGRPRQREGEEERRRRRMSRNRSMVDMRSQLLHRTLVEELNKRLFFNTVGAVHDIGFRDPTAAASSSSSSSHHRRRSSNKIDHKHHYMF

SEQ ID NO: 50004 - protein, 233 aa, Oryza sativa
MQTNVYGNGSTDRGREERYLMPFDPTADAHRFSILWHSRLIVFYVDGVPIREVPRTAAMGADYPSKPMALYVTIWDGSTWATDNGKYKVNYKRGPFTAVFSDLVLRGCTARSDIRLATTADDQDRCAAAEEDLMESDEYSSTMAMTARKRMAMRRFRQRQMLYTVCYDTNRYPEPFPECDVNMAERQMYWQWGESKVVRPRVRPRPGRRSKRRPSPEATAIPPPVLVSLQQAD

SEQ ID NO: 50005 - protein, 227 aa, Oryza sativa; identical to SEQ ID NO: 30327

SEQ ID NO: 50006 - protein, 442 aa, Oryza sativa
MQAHAHTLGLRISPPPPAPPRRETDPRKRVVITGMGLVSVFGNEVDAFYERLLAGESGVGAIDRFDAGGFPTRFAGQIRGFSSEGYIDGKNDRRLDDCLRYCIVSGKKALENAGLGKGSDGHTKLDKVRAGVLVGTGMGGLTVFSDGVQNLIEKGYKKISPFFIPYAITNMGSALLAMDAGFMGPNYSISTACATSNYCFYAAANHIRRGEADVIVAGGTEAAIIPIGLGGFVACRALSQRNDDPETASRPWDKERDGFVMGEGAGVLVMESLEHAMKRDAPIIAEYLGGAVNCDAYHMTDPRSDGLGVSSCITQSLEDAGVAPEEVNYINAHATSTLAGDLAEVRAIKQVFKNPSDIKINSTKSMIGHCLGAAGGLEAIAVVKAITTGWVHPTINQFNPEPEVDFDTVANEKQQHEVNVAISNSFGFGGHNSVVVFAPFKP

SEQ ID NO: 50007 - protein, 602 aa, Oryza sativa; identical to SEQ ID NO: 43821

SEQ ID NO: 50008 - protein, 455 aa, Oryza sativa
MCFLIGAKRMESSSSGSCPQGTVYHWFVLFAVWLCGSQHVLSQKTPLEPKDKFLLSDPPIGLFDPIEISPSVLPHNANPVEPLSPMYPNYTSYDPVLTGKCHVNFSALSYMMDKTASDCSIPLAPLVADVICCPQVNSLMNIFQATYGAGNNTLVLNQASANACFSDVMSILASKGANTNIPELCTLRPSNLTDASCPVKDISTFEKIVNVSKLLDACSDVDPLKECCRPVCQPAIVEAAVHISSGGANMFGSSSISGSDAGINVVSDCKGVVHSWLSMKLSSEESNTAFRVLSGCKVNKVCPLEFDDPSSVVKACGKASSSTPSCCGALHSYIATRQKQIFVTNLQAINCATMFGSMLQKAGVSNDIYELCDIDLKDFSLQAFGQQGCLLRSLPTDIVFDNATGISFTCDLSDNIAAPWPSSSSVQSLSLCAPEMSLPALPVAPTSGSSGPRVN

SEQ ID NO: 50009 - protein, 544 aa, Oryza sativa
MFSLLIQSVDFTDDAAAAAATAVAAGETSGTSHPLSPRSGDPLPTTTSASVTAPLELPGATSASPARNPKINYTRGILHLYRSSSSSSSTASYASAVAATPSSSSSGPAAPQLASDCLLPPWRGTRLLVLAVPTHVSPDDFVRFCGPYIEHASDIHVVRDDGVEDRYSVLVEFEDQKSADGFYLDLNGWRFSSSEVEVCHVLFIVAVQYTPSTKPAVTPPVGSTELPTCPVCIERLDQDISGIMATTCDHSFQCSCVSMWVNSSCPVCQFCQKQSKNPTCSVCQTSGNLWICIICGFVGCGRYEEGHAIRHWKETQHCYSLDLETQRVWDYVGDSYVHRLNHSKSDVKHSKFKSKCKYSGDKCANCSCNDEEDIGGAIFSSKAETIVDEYNRLLASQLETQREYYEARLSEAKKEKEQHISDAVDKAVNDKSKEIQQKIENAMLEKKKLADMNEKLTKNQDIWRRTLKEIEERERAQLKLKDDTIRDLEEQIKDFKFSIKLQKSIEKNKNADDLKGGLLVPLPMVPDSGTKGKRSSRTSKRRNQ

SEQ ID NO: 50010 - protein, 355 aa, Oryza sativa
MIVLFLSGMVAMIMMRTLYKDIANYNQLDNQDEAQEETGWKLVHGDVFRPPVHSGLLCVYVGTGVQFFGMTLVTMMFALLGFLSPANRGGLMTAMVLLWVFMGVLAGYTSSRLYKMFKGTEWKKITLKTAFMFPGIIFALFFFLNALIWGEKSSGAVPFGTMFALFLLWFGISVPLVFVGSFLGFKQPAIEDPVKTNKIPRQIPEQAWYLQPAFSILAGGILPFGAVFIELFFILTSIWLNQFYYIFGFLFIVFIILIVTCAEITIVLCYFQLCSEDYHWWWRAYLTAGSSALYLFAYAIFYFFNKLEITKLVSGILYFGYMLIISYAFFVLTGTIGFYACFWFVRKIYASVKID

SEQ ID NO: 50011 - protein, 466 aa, Oryza sativa
MDCGTPFCHQEGSGAGCPLGNKIPEFNELVHQNRWHEALDRLLETNNFPEFTGRVCPAPCEGSCVLGIIDNPVSIKSIECAIIDKGFEEGWMVPRPPLRRTGKRVAIVGSGPAGLAAADQLNKMGHFVTVFERADRIGGLMMYGVPNMKADKEGIVQRRVELMAKEGVQFIVNAHVGSDPLYSVEKLRSENDAIILACGATKPKDLPIPGRELAGIHFAMEFLHANTKSLLDSNLEDGNYISAQGRKVVVIGGGDTGTDCIGTSIRHGCTNLVNLELLPEPPRKRAPDNPWPQWPRIFRVDYGHQEATSKFGKDPRSYKVLTKRFIGDENGNVKALEVIRVEWGKVNGRFQFKEVEGSEEIIEADLVLLAMGFLGPEATVANKLGLEQDMRSNFKAQFGNFATNVEGVFAAGDCRRGQSLVVWAITEGRQAAAAVDNYLSKDDEGETNGTEDIAVSSEGLVQPVVA

SEQ ID NO: 50012 - protein, 585 aa, Oryza sativa
MGVLFSCPVDDETAAVEDAAPVAEQAVLKASLGSGGRLRIEGSLSFKTREQQSLQVETKIPAVTSPRAAPAPMPRELLRTRFADAAAAAAPESPKHEAAAVTLQKVYKSFRTRRRLADCAVLVEQSWWKLLDFALLKRSSVSFFDIEKQESAVSKWARARTRAAKVGKGLSKDDKAQKLALQHWLEAIDPRHRYGHNLHYYYDCWLQCESKEPFFYWLDVGEGKEINLEDRCPRWKLLSQCIKYLGPQEREDYEVVIEDGKFMYKNSREILDTSGGPRDDKWIFVLSTSKNLYVGQKKKGKFQHSSFLAGGATSAAGRLVVEDGTLKAIWPHSGHYRPTEENFQEFQGFLKDNNVDLTDVKMSPTEEDEEFWSRLRSIPSDRCADAADNTEEEMNSSEQTVNRQTPEATETPTEEISSQHIQETINNPSTTLPRVASSEGPATSNAGDNGSSEEGGEDHHRQEEGDEPSSPSSSSSVPREKILERINSKKEAKSYQLGKQLSFKWTTGAGPRIVCVRDYPSELQLRALEQVHLSPRSAAAAAGGRPSSRFASPQRSSSPMARGCSEPLTPREAFRSHLQQGVLIR

SEQ ID NO: 50013 - protein, 380 aa, Oryza sativa
MFAVGPYANEPQLVSPPVFSTYTTEPSTAPLTPPPELTHATTPSSPDVPYARFLFSAMDLKTAGKDHNMPYLSTAYSGGSGLQASYPLYPESPSSSLISPASATPRTGLSSPIPEQEVPTAHWKTSRSACGTPYSRASPIPEQEVPTAQWKTSRSACDTPYSRNSPSNIFGLDSAASRNYMLDNNFFRPAASAQFYLDQAQQSFPYNNGGRISVSRDKQDAEEVEAYRASFGFSADEIVTTQAYVEIPDALDEGFSISPFGNNAPATEVDKPLFNVKVTTSPKKSADQLSNDSPHNVVHLDIFKGTKGGDLSEDEGVVKDCHPFRKAMDEISLKPIEVRKKVQPGQSSSSDAEIEYRRARSLREANGVLSWRSTLARQLQ

SEQ ID NO: 50014 - protein, 56 aa, Oryza sativa
MAGCVGVTILAAHAECSKFTICYYSVLFNYFGHKRSLQYLCFTFIYSDTAGPNWNL

SEQ ID NO: 50015 - protein, 485 aa, Oryza sativa
MPVPGSQNGRPRPAKAETIHGLARAGDLAGVQRKLQENPALINDRNPVMSQTPLHVAAGYNNTGIVKFLLDFQGTDKVELEAKNMYGETPLHMAVKNSSCESARLLLERGAHIEAKANNGMAPLHLAVWHALQSGDCSTVSVLLSYNADCYAKDDEGKIPSNHIPGGAGNEKLQKLLTRHMEEQRKRKALMSCREGKAMAEFEEAISQIVGLQDLKMQLRRWARGMLFDEKRRAMGLGIASRRAPHMAFLGNPGTGKTMVARILGKLLHMVGVLPTDKVTEVQRTDLVGEFVGHTGPKTRRKIQDAEGGILFVDEAYRLIPMQKSDDKDYGVEALEEIMSVMDNGKIVVIFAGYCEPMKRVIASNDGFCRRVTKFFYFDDFTTTELAEILHLKMNNPTESSLLYGFKLDPSCSIEVVGELIARETTEQRRKQMNGGLVDTLLINARENLDLRLDFNCDDANTMITITLEDLEAGLKQISKQRQLQ

SEQ ID NO: 50016 - protein, 384 aa, Oryza sativa
MMVVLGELGGKDEYSLVEALKQGKVQKPVVAWVSGTCARLFKSEVQFGHAGAKSGGELESAQAKNQALKDAGAVVPTSYEALETAIKETFEKLVEDGKISPVTEITPPPIPEDLKTAIKSGKVRAPTHIISTISDDRGEEPCYAGVPMSTIIEQGYGVGDVISLLWFKRSLPRYCTQFIEMCIMLCADHGPCVSGAHNSIVTARAGKDLVSSLVSGLLTIGPRFGGAIDDAARYFKDAYDRNLTPYEFVEGMKKKGIRVPGIGHRIKSRDNRDKRVQLLQKYAHTHFPSVKYMEYAVQVETYTLSKANNLVLNVDGAIGSLFLDLLSGSGMFSKQEIDEIVEIGYLNGLFVLARSIGLIGHTFDQKRLKQPLYRHPWEDVLYTK

SEQ ID NO: 50017 - protein, 180 aa, Oryza sativa
MRGMLIVLSKWRIALLIMPTFIGFIFKLVLLIILVYIAFICSFSFCRIISMFTDHSATMHLAYLLGGPYCKDGVNGFSVGRIHAAEYMFYRIQLAAPRTSGISESSFFHEGFILKLCVGDSIVGFGEVAPIEIHEEDLLDVEEQLRFLFHRMKDAELDVVPLLRGSFSNWIWTTLGIPVS

SEQ ID NO: 50018 - protein, 548 aa, Oryza sativa
MIVTLNAYNVLAARCAAEYLEMFETIDKGNLIYKIDVFLSSSIFRTWKDSIIVLQTTKSLLPWSENLKVINHCVDSIATKASIDPSEVEWSYTYNRRKLPSENGLDSHWNGVRKQQMVPRDWWVEDLCDLEMCLYKKVIMAIKAKGRISSEVIGEALRAYAHRRLFSSLESAVSNGLDCTRHSAALETIISLLPSEEGSVPCSFLLKLLRASCLLGSDEACRDNLTKRIGAKLDEASVSDLLIPANSDEAAMYNVDMISAMLEEFMAQHREDDDGAKLQEDDDQEAMDGDDDNLNGVSRSSKLAIAKLVDGYLAEIAKDPNLPLSKFIALTEMVPLATRPVHDGLYRAIDMYLKEHPGLTKGEKKRLCGLMDCKKLSPEASMHAVQNERLPLRVVVQVLFFEQVRAASSASAAAAADMPPAARSLLPREQDGNSYGSSRSTATEDDQWAPPPTTTSVDVTSFRSMSLANNKNGGVSGGGGDQAACKKPPPSSASAKGSGGGGLMPKKILSKLWSGKASSGENSSSDTSESPGEETRSTPSRNTRHSVS

SEQ ID NO: 50019 - protein, 308 aa, Oryza sativa
MVPIDCFEEQWVIFRGKDGRPGCVMNTCAHRACPLHLGSVNEGRIQCPYHGWEYSTDGKCEKMPSTKMLNVRIRSLPCFEQEGMVWIWPGNDPPKSTIPSLLPPSGFTIHAEIVVELPVEHGLLLDNLLDLAHAPFTHTSTFAKGWSVPSLVKFLTPSSGLQGYWDPYPIDMEFRPPCMVLSTIGISKPGKLEGKSTKQCSTHLHQLHICLPSSRNKTRLLYRMSLDFAPWIKHVPFMHILWSHFAEKVLNEDLRLVLGQQERMINGANVWNWPVSYDKLGIRYRLWRDAIERGVDRLPFSNQSESGS

SEQ ID NO: 50020 - protein, 427 aa, Oryza sativa
MNQDSKKEQALVDIEDPTTQETNKEPSQSASVQSPFEQLALPAPPVSNGSATPAPKSDLGVDLLSWDDNPSTTENSLALVPVTDPVVDSTPSQNALAIVDIFSQNNTTNNIAKPADPFGVNSSSTLPGSQPYNAPTQHPLQAQQQPQQVGLYPNGGAVNPGTSYPTSSGWNGQIANNATPPAQQTVNYDEQSGALPPPPWEAQSAPSGDMSNGGMQSHPVSNGQFGGMPSLPTPSNQMGGMQPLHPQMNQMGGPQAHQMYNNQQPGAMQPSQPAVTQMQSGFANQFGSMPPHSMPGMQFPGMQPSPMPGAQPVMMYAQPMMMPGMQFAAMPQPRMYGPQMSQYRLVQQQAAQYYSNSQGRPTYYAGMNDLSQKMYGLSMQDSSYMGMNSSPYSTTPSSSSSMGQPSKPEDKLFGDLLSIAKTKQNKA

SEQ ID NO: 50021 - protein, 412 aa, Oryza sativa
MEGMLPSDPPGSDDDGNGTNMWTGQKDKLALDPCVSGDTNENAHACTSLTAVHQVLEESTNNTVHAMDMGVVTRQDDPLKASEEDINQHKDEQELWGPNVQTSQDDYFDYVKQLSPNSRRIDKWSLLSHDEMIEVKERHARYRIRFCKMLNKEFEDTMKDPAEYSRGELLKENYFLRYERDETLGWYFHPVHTWLAGLNDYQKLVLVNHDDSTEFLARDDYHSCFNTYEVDEDYVKYCEELPKKIKWIGDYVDLDRSSQEWSKMDNTTFFQALKIATNFCHMTVGLAQFAYMEYVWDLREISRLKEWPYFLHEIWKLVAKQKMNFNDALKVVYEMDMFHSFKFAVEAGLNGDKLFGLEYRFSMCSKDISGDVEEGKALDLITKAVYREFHHTQTMCGYAAKKMDMAKKIGLV

SEQ ID NO: 50022 - protein, 436 aa, Oryza sativa
MSAAAASSAAGDSAKQPLLHHQRGNPPHVASVSSPSLPSAPPGALAGGRRFPGGLDVPNLKKRGGGTRSWIRVEAATASVQTLEVDKATMMRRCELPARDLRLLDPLFVYPSTILGRERAIVVNLEQIRCVITADEVLLLNSLDSYVLQYAAELQRRLLQRAEGDELPFEFRALELALEAACSFLDAQAAELEIEAYPLLDELTSKISTLNLERVRRLKSRLVALTRRVQKVRDEIEQLMDDDGDMAEMYLSEKKLRTEASFYGDQSMLGYNSVGDGTSFSAPVSPVSSPTESRKLEKAFSLCRSRHDSVKSSDNTATEHIQELEMLLEAYFVVIDSTLNKLTSLKEYIDDTEDFINIQLDNVRNQLIQFELLLTTATFVVAIFGVVAGIFGMNFETSVFSIQNAFQWVLIITGVIGAFIFCGFLWFFKYKRLMPL

SEQ ID NO: 50023 - protein, 87 aa, Oryza sativa
MRLHKVLRVSWRRKTEKNRKINVLHCEELSPCEGRGVAGVFPFAQMEKAKPGKVTSSTCSSFQFERNVAIDWSLENRDSSFEYMADN

SEQ ID NO: 50024 - protein, 527 aa, Oryza sativa
MAGGQLNVLSTLDQAKTQWYHFMAIVIAGMGFFTDAYDLFCISLVTKLLGRIYYTDDSKDTPGALPPNVSAAVTGVALCGTLAGQLFFGWLGDKLGRKSVYGFTLILMVVCSVASGLSFGSSAKGVVSTLCFFRFWLGFGIGGDYPLSATIMSEYANKRARGAFIAAVFAMQGFGILFGAIVALAVSAGFRHAYPAPSYSDNHAASLVPQADYVWRIILMFGTVPAALTYYWRMKMPETARYTALIARNAKQAAADMSKVLHTQIEESADRAETVAVGGESWGLFSRQFLRRHGLHLLATTSTWFLLDIAFYSQNLFQKDIFSKVGWIPPAKTMNALEELYRIARAQALIALCGTIPGYWFTVAFIEIMGRFWIQIMGFAMMTAFMLGLAIPYHHWTTPGHHTGFIVMYGFTFFFANFGPNSTTFIVPAEIYPARLRSTCHGISAAAGKAGAIIGAFGFLYAAQDQHKPEPGYPRGIGIKNALFVLAGTNFLGTIMTLLVPESKGMSLEVISQEVADGDDEEAAYPK

SEQ ID NO: 50025 - protein, 286 aa, Oryza sativa; identical to SEQ ID NO: 37089

SEQ ID NO: 50026 - protein, 436 aa, Oryza sativa; identical to SEQ ID NO: 50022

SEQ ID NO: 50027 - protein, 79 aa, Oryza sativa
MIAAAQDPTTQGRHLRAEQAASEHQDLRFTHCCQVHPKLLHCLASDKYYPFPSSAPAASTINPFLTSTEHQNGNIGCIP

SEQ ID NO: 50028 - protein, 373 aa, Oryza sativa; identical to SEQ ID NO: 43090

SEQ ID NO: 50029 - protein, 203 aa, Oryza sativa
MAMAAPLTLVVVAAAVAVVFVGGGVEGWVLKEGFYEQSCPRAEALVKHYVEQHVPLAPSVAATLIRTHFHDCFVRGCDASVLLNGTDGAEAEKDAAPNLTLRGFAFIDRIKSVVESECPGVVSCADILALATRDAISVIGGPFWRVATGRRDGRVSIKQEALDQIPAPTMNFTDLLSSFQSKGLDLADLIWLSGKLTIHSSIY

SEQ ID NO: 50030 - protein, 439 aa, Oryza sativa
MPALRMKRNFDDDVFRDEFDSKPTKSMKISHFQVSELEQSAVLNLPYKDPHDELDLTTQLAGQDIMIMEAASLDDALGGASLLKDLISEVAVSPNMENDMLVNYEDIRSRLNVVNYFDKDEDANSASYNSCTVNCHEESWGSNEGCSLLDIYNPDDAFSFLLDTPSEFLGSFTALYDEVVPIDSLVNISGRCGVFPLTESTTEASIGNEPCRSEGDMLFSNSEVLEWLNPHLAEEDLPNLVDFTELNSHAVSKEQGARKVTLVLDLDETLVHSTTEQCDDYDFTFPVFFDMKEHMVYVRKRPHLHMFLQKMAEMFEVVIFTASQSVYADQLLDILDPEKKLFSRRYFRESCVFTNTSYTKDLTVVGVDLAKVVIIDNTPQVFQLQVNNGIPIESWFSDDSDEALPQLIPFLETLASADDVRPIIAKKFGDKKDIAEIFQ

SEQ ID NO: 50031 - protein, 271 aa, Oryza sativa
MKKTVVLYPGLAVGHLNPMMELADVFLDHGYAVAVALIDPSVMENEANLAAAVARAVSSKSSTISFHTLPGIPDPPSLAFNDQFFKNYFDLVRRHNEHLHDFLRSVRGLHAVVIDASCAHAHEAARKLGVPVLMFYPSNAGHLAVNLQAPLLVDGFKKHLGGDSTSPVEFLGVRPMSASHLAGLFGPISEVNKDFEAMIFAGARMKAEFDGILINTSVSLEERALRALADPRCCPDGVVIPPVYAVGPLVDKAASAAGDESSRHQCLVWLD

SEQ ID NO: 50032 - protein, 397 aa, Oryza sativa; identical to SEQ ID NO: 30550

SEQ ID NO: 50033 - protein, 330 aa, Oryza sativa
MGERKVLNKYYPPDFDPSKIPRRRQPKNQQIKVRMMLPMSIRCGTCGTYIYKGTKFNSRKEDVEGEKYLGIQIFRFYFKCTKCSAEITFKTDPQNSDYTVESGASRNFEPWREEDEVADREKRKRDEEEMGDAMRALENRAMDSKQDMDILAALEEMRSMKSRHAGVTVDQMLEILKRSAHDKEEKTVAELDEEDEKLIKSITFRNSQDYVKRIEDDDDDDEDLVIPGQSSSTSKMNGSSQSVSNATDVLTKTSGSDNANKEGNKIWPSKMPKFIVKPKSTPTDPIKKQKTETTAGPDTGKAPVAEENSEPAQNNVLQSLCQNYDSDESE

SEQ ID NO: 50034 - protein, 425 aa, Oryza sativa
MEMESPRSPEAEIGHRVEDLWEVAEPQLSPSEKLNSCFEDIAVASFPRPLGSQVIEIPSNASLADTVEILSKNKILSAPIRNVDAPEDASWIDKYIGIVEFAGIAMWLLYQSEAAANGTAGSAVGSPVANLVSRLGSFTFRRTSSGRVETTTDPESDETASVGGSFFETLTSSEFYKNTKVGDISGSFRWAPFLALQTSDTFLTMLLLLSKYRMKSLPVVDIGGDKIENIITQSSVVHMLAECVGLPWFESWGTKKLSELGLPLMKPCKLVKVNEDQPVLKAFQLMREKGVGGLPVMDTSGTKAIGNISIRDVQYLLTAPNIYKDYRTITAKDFLTAVRQHLQEQHEASPLLGSVITCRRDDEVKDIILKLDSEKIHRIYVIDDKGNTEGVITLRDIISKLVHEPRHYFGDFFDGVVPLPPNSTV

SEQ ID NO: 50035 - protein, 458 aa, Oryza sativa; identical to SEQ ID NO: 43112

SEQ ID NO: 50036 - protein, 408 aa, Oryza sativa
MDATKKRVAIVGAGASGLTACKHALAKGFRPVVFEAAGDGVGGVWRRTLASTRLQTPAFAYRFSDFPWPADVSGAEVFPRHDQVVEYLAAYARRHGVTECVRFGCKVLAAEYAGVPDEEAAAWERWSGNGEAFGDGSGEWLLTVQHPGSEATQIHRVDFLILCTGRFSGVAHTPTFPPNRGPEVFHGQVLHSMDYSNMGHAAADELIRGKRVAVVGSGKSAFDTVAECAAANGGRYPCAMICRSGRWMVNGGFVWGVSLGHLFCNRLAELTVHKPGEGLALALLAILLTPLRWLLSKPAETYFKMQIPMEKHGMVPEESFAGSMSGCRLGVLPDKFYDRVEEGSILIKRARSFSFCTDGLVLDDDDTGERVDADVVVLATGFRGDQKLTDMFVSATFKQQIVAAPLYR

SEQ ID NO: 50037 - protein, 926 aa, Oryza sativa
MIHPNQPLALSAAKNASTVVVGSPLLAASPASSPAAACCSSQLQQRRAAGPGRRGAGRLAAPRCSTIEQAAGVSSAVTVDRTLTVTATVIVQPPIGVVYAARGIDDLTDLIGKTLLLELVSSEPDPRTGKEKETVSAFAHRTMKQDTYEAEFAVPATFGPVGAVLVENEHHREMFVKEIWLVTGADDSSGVTFDCNSWVHSKFDNPDRRIFFTVKSYLPAQTPKGIEALRKKELETLRGDGTGERKFFDRVYDYDVYNDLGDPDFKIEHLRPVLGGDEHPYPRRCRTGRPHTEIDPRTEKRRGPVYVPRDEQFSDVKGMTFSATTLRSGLHAMLPALGPLLANQELRFPHFPAIDGLYSVGIPLPAQLAAAGAATATAGGAAASSSTSTNIVGGVIPRLVRMIEDTTDHVLRFDVPEMFERDRFSWFRDEEFARQVLAGVNPICIQLLTEFPIVSKLDPEVYGPPESALAKELLESQIVESVTVEEAMAQRRLFILDYHDVFLPYVHRVRERPETTLYGSRTVFFLTGAGTLSPLAIELARPQSPTRPQWRRAFVHGPDATASWLWKLAKAHVLSHDTGYHQLVSHWLRTHCCVEPYIIAANRQLSRMHPVHRLLHPHFRYTMEINALARESLINADGIIEESFWPGRYAMELSSVAYAATWRFDAEALPEDLVRRGLAVRQEDGELELTIKDYPYANDGLLVWNSIKQWASDYIDFYYKSDEEVACEEEVRAWWEEVRTKGHADKKDEPWWPAVDTRDGLIGVLTTIMWVTSGHHAAVNFGQYHYGGYFPNRPTVMRKKMPVEENKEEEMKKFMEMPEHVLLDTMPSKMQAITIMATLDILSSHSPDEEYMGEHAEPAWLAEPRVKAAFERFAGRMKEIEGIVDERNNDPELRNRCGAGIVPYELLKPFSTPGVTGRGIPNSISI

SEQ ID NO: 50038 - protein, 533 aa, Oryza sativa; identical to SEQ ID NO: 46460

SEQ ID NO: 50039 - protein, 291 aa, Oryza sativa
MQQSIMSTLPLLLLLLFSSLFPAPSHAWGIHGHLIVCQIAQGRLSDAAAAAVRGLLPSYAGGNLSSLCSWADGVKLRYPWSAPLHYIDTPDHLCSYTYDRDCKDEDSFRGRCVAGAINNYTSQLLTYDATSPSTQYNLTQALLLLAHFVGDIHQPLHVGFTSDKGGNTIDVHWYTRKTVLHHVWDDNIIKTAENDYYGEGVAEFVDALMQNITGEWSQRVPGWEECSKNQTTCPDTYASESIAAACDWAYKDVTEDSLLEDAYFGSRLPVVNLRLAQGGVRLAATLNRIFS

SEQ ID NO: 50040 - protein, 223 aa, Oryza sativa
MNPRRRRGADTSLRRLGLRPRRRWPDGAASPHGEPHRLRLRLGVGFPPSLWEKENISPRFDRDEPSHSDSDSNSNSNVGGFYPSTIKRAPHPPPEITKSLNSQNQFAHQTSQIPLPPVLGFAEELLSFHPWRRGGARRPPPPRPSRWPTPPSSRSTSSSASSRARVAPRRARRCCGSSPTGRPWPSASPPTPTSSTASPPPAAAPTSHRGCRPLPRRWISARV

SEQ ID NO: 50041 - protein, 331 aa, Oryza sativa
MTMGNASVWHFRSDEAENIGYVIPTTVVSHFLNDYQKNGKYTGFPCLGVLLQKLENPALRESLKVPSSEGVLVRRVEPTAPASKVLRKGDVITSFDGVAVGCEGTVPFRSTERIAFRYLTSQKYAGDVAQLGIIRAGNTMKVQTVLQPRKHLVPFHVEGGQPSYLIVAGLVFTPLTEPFIEEECEETLGLKLLAKARYSLSTFEGEQIVIVSQVLAHEVNIGYEHMGNQQVIKLNGTVVKNIHHLAHLVDNCKDKFLTFEFEDDFLVVLDREEATTASSDILKEHAIPSVRSSDLSEPYVDTEQEIQKPNDDFGDSPVTNYEMGVDCLLWA

SEQ ID NO: 50042 - protein, 238 aa, Oryza sativa
MMIVMEFMPKGDLRKHLSRKGALEPSYAVKLALDIARGMNYLHEHKPQAIIHRDLEPSNILRDDTGHLKVADFDLCKMLKWRRKVREEKAVTSPGNACRYVAPEVLRNEEYDTKVDVFSFALILQEMIEGCLPFYDKKNNEIEKAHNSKERPPFRAPPKHYAYGLRELIEQCWSENPASRPDFRTIIEQLSYIQNEISQRNRWKVKPLKCFLSFEGMWKKDRNEGSTTRSSRSSRSYF

SEQ ID NO: 50043 - protein, 293 aa, Oryza sativa
MATDVAATEPEVAAEEAAAAAPETTATAGDSKPAKEAKAKKAAAPRKARSTATHPPYAEMISEAIATLKERTGSSQYAIGKFLEDKHKDHLPSNFRKQLLVQIKKLVAAGKLTKVKNSYKLPPTRAPAAAKPKAKPAAAAKPKPKPKAAAKPKAAAKPKAKAPAKSKAAAKPKAAAKPAAKPKAAAKPKSPAKPAAKPKAAPKAKAKPAAKPKAKAAPKPKAAAVTKTKATSAPARRPAKAAKTSAKDTPSKKAAPAAKKPAAAAKKAPAKKAAPAKKAAAPARKVPARKAKK

SEQ ID NO: 50044 - protein, 182 aa, Oryza sativa
MLQASSELQQQPAAAAAAAGMWVPGMSPQAVDAGLSARAQEVARRREEMLGMLHDLPESEYELSLTDLVEKAGGVGVAPPSPSPSEGKAEPGPARTASGRQSEQQQQAAAAAGRPERRGSARRWDSAGGSSFRSSSDGVLLNFYMPRSFTRSFTAPRTTGPGRPPSVSGGRTASVCSDRNKR

SEQ ID NO: 50045 - protein, 413 aa, Oryza sativa
MLAVPENLDATMRLLFAACQGDVAGVEELLRDGVDVDSIDLDGRTAMHIAACEGQGEVVRLLLSWKANMNARDRWGSTPAADAKHYGHFEVYNLLRARGAKTPKQKKTPMTVSNPKEVPEYELNPLELEFRRGEEVTKGHYVARWYGSKVFVKILDKDSFSDANSINEFKHELTLLEKARHPNLVQFVGAVTQNVPMMIVSEYHQKGDLASYLETKGRLQPYKAIRFSLDIARGLNYLHECKPEPIIHGNLSTKSIVRDDEGKLKVAGFGSRSLIKVSEDNPQMDQTTSKFNSVYTAPEMYRNGTFDRSVDVFAFGLILYEMIEGTHAFHPKPPEEAAKMICLEGMRPPFKNKPKYYPDDLRELIQECWDPTPSVRPTFEEIIVRLNKISTSFTKQTRWRDTFKLPWKQASER

SEQ ID NO: 50046 - protein, 358 aa, Oryza sativa
MDNRSIFLYYHFPKDVNLWKLMGDFNLHGLTAPEEYGGMGLGYMYHCIAMEEISRASGSVGLSYGAHSNLCINQLVRHGSPAQKLKYLPKLISGEHVGALAMSEPNSGSDVVSMKCKAEKVDGGYVINGNKMWCTNGPSAQTLVVYAKTDIAAGSKGITAFIIEKGMPGFSTAQKLDKLGMRGSDTCELVFENCFVPHENVLGEEGKGVYVMMSGLDLERLVLAAGPIGLMQACLDVAVPYVRQREQFGRPIGEFQFIQGKLADMYTSLQSSRSFVYSVARDCDNGKVDRKDCAGVILFAAERATQVALQAIQCLGGNGYINEYPTGRLLRDAKLFEIGAGTSEIRRMIIGRELFKEE

SEQ ID NO: 50047 - protein, 577 aa, Oryza sativa
MKTVYRGFDELRGVEVAWNQATISDVLRTPDALHRMYAEVSLLADLRHDAIIAFHASWVHPSRRTFNFITELFSSGTLRSYRLRYPRVSRRAVAAWARAILRGLAYLHARGVIHRDLKCDNIFVNGHLGQVKIGDLGLAAVLRGCASARSVIGTPEFMAPEMYDECYGVGVDVYSFGMCMLEMLTNEYPYSECDNPAQIYKKVTAGKLPDAFYRLTDADARRFIGRCLVDAAHRPSAEELLLDPFLSPSQNHDDHNIIAHATAPPPPLPLACSNSSEEQEEAAPAPAAKTTDMAITGKLNKEHDTIFLKVQIGGGRNVRNIYFPFDVANDTAMEVATEMVKELDIADREPTEIAAMIEQEIVRLVPGYKQHEYSYADDNDDDDVSGHPNPFYYLSSSPTSSQGSLCGVGSTSSEGFPGPHGKVDWSRDYCYYPPSSVSVSDDDDSSTSSLSAAVSASSLHQQQQHCSASSSRLGPASASASEDGGGGHAGRPRQREGEEERRRRRMSRNRSMVDMRSQLLHRTLVEELNKRLFFNTVGAVHDIGFRDPTAAASSSSSSSHHRRRSSNKIDHKHHYMF

SEQ ID NO: 50048 - protein, 145 aa, Oryza sativa
MATATGWRRGPRRREAVVVGRDDGDCDGGRRRLVPAPLPLSLSLSLSLSLSLSPFGRRHHPLSLSQIWRAGSDGSGVVEAEAAAGLGSGGVKADPAVVVLTGHFKDDDGNLRSWLGSAAAVLAMRQWVMLGTFFFLQDRQYRWPS

SEQ ID NO: 50049 - protein, 1033 aa, Oryza sativa
MAPAVSASQGVIMRSLTSKLDSLLLQPPEPPPPAQPSSLRKGERKKILLLRGDLRHLLDDYYLLVEPPSDTAPPPDSTAACWAKEVRELSYDVDDFLDELTTQLLHHRGGGDGSSTAGAKKMISSMIARLRGELNRRRWIADEVTLFSARVKEAIRRQESYHLGRRTSSSRPREEVDDDDREDSAGNERRRFLSLTFGMDDAAVHGQLVGRDISMQKLVRWLADGEPKLKVASIVGSGGVGKTTLATEFYRLHGRRLDAPFDCRAFVRTPRKPDMTKILTDMLSQLRPQHQHQSSDVWEVDRLLETIRTHLQDKRYFIIIEDLWASSMWDIVSRGLPDNNSCSRILITTEIEPVALACCGYNSEHIIKIDPLGDDVSSQLFFSGVVGQGNEFPGHLTEVSHDMIKKCGGLPLAITITARHFKSQLLDGMQQWNHIQKSLTTSNLKKNPTLQGMRQVLNLIYNNLPHCLKACLLYLSIYKEDYIIRKANLVRQWMAEGFINSIENKVMEEVAGNYFDELVGRGLVQPVDVNCKNEVLSCVVHHMVLNFIRCKSIEENFSITLDHSQTTVRHADKVRRLSLHFSNAHDTTPLAGLRLSQVRSMAFFGQVKCMPSIADYRLLRVLILCFWADQEKTSYDLTSISELLQLRYLKITGNITVKLPEKIQGLQHLQTLEADARATAVLLDIVHTQCLLHLRLVLLDLLPHCHRYIFTSIPKWTGKLNNLRILNIAVMQISQDDLDTLKGLGSLTALSLLVRTAPAQRIVAANEGFGSLKYFMFVCTAPCMTFVEGAMPSVQRLNLRFNANEFKQYDSKETGLEHLVALAEISARIGGTDDDESNKTEVESALRTAIRKHPTPSTLMVDIQWVDWIFGAEGRDLDEDLAQQDDHGFCMLPESSSRLQSREISIEEDMPTGAEGTVIVPHTMEQFALHMSQAKQSHKLVVIQFTTSRCPASRYIAPAFTEYAKEFAGAVFIKVNVDSDELESVTDWYDIEGIVPTFFFVKDGEKIDKIPGANKELLRAKIRRHTASPYFLR

SEQ ID NO: 50050 - protein, 195 aa, Oryza sativa
MSTPGAAWSRNGSRTLDAAATAPGRTLGVGAAAAAPSFGRGSFGHAVGLPPPPHSRGRSHGSVAAATTVPAFSIDGSVGGDFTSSIGPHASSQPWFDAAGGDPSSPGSWDQDVRPHREDWCRLLHGGRFVTDQHYTPFLIKVYLICTFSILKYNNYYCFKKQYYIYYRFYSNIGSINRLSTHPIPFPYIPNLLLI

SEQ ID NO: 50051 - protein, 57 aa, Oryza sativa
MLILGEATHYAQLMDLQEWSCQHLIDKQIQGKILHAHQRLMLFYELVLISQGCTVLG

SEQ ID NO: 50052 - protein, 567 aa, Oryza sativa
MASSSSSRLLFLLSCSVLALLAGAEVHHHEFIVQETPVKRLCKTHNVITVNGQLPGPTLEVREGDTVVINVVNHAQYNVTIHWHGIRQFRTGWADGPEFVTQCPIKPGGSYKYRFTIEGQEGTLWWHAHSSWLRATVYGALIIRPRENKTYPFEKPAREVPLILGEWWDADPIQVIREAQRTGAAPNISDAYTINGQPGDLYNCSKEETTAVPVKPGETALLRFINAALNQELFVSIAQHKMTVVGVDASYTKPFTTSVLMIAPGQTTDVLVTMDQAPTRYYLAARAYDSAQGVAFDNTTTTAVIEYDCGCATDFGPSIPPAFPVLPAFNDTNTATAFAAGIRSPHEVKIPGPVDENLFFTVGVGLFNCEPGQQCGGPNNTRFTASMNNISFVFPQTTSLLHAHYYGIPGVFTTDFPAYPPVQFDYTAQNVPRYLWQPVPATKLYKLKFGSVVQIVLQDTSIVSPENHPIHIHGYDFYILAEGFGNFDPKKDAKKFNYVDPPQRNTVAVPTNGWAVIRFVADNPGVWLMHCHLDVHITWGLAMAFLVEDGYGKLETLEAPPVDLPMC

SEQ ID NO: 50053 - protein, 520 aa, Oryza sativa
MEATSSSSSLLNGLNSGVVLSLIAVLWTVVWQNLQRLQLQTLVGRHMNRHARRLAALVDPYLSVTIHEYEGGRMKRSAAYEEVKAYLSASSARDVRHLRAEGAKDADKLVLSMVDGEEVSDVVAADDSTDVTVWWCAYSTPPPRTDGGGYYGWGGGGRAQENRRYYRLFFLDRHRELVINTYLPSIRGQGRAVMVQNRQRKLFTNISTHNWSDVDGLVRSAWSHVVFEHPKTFDTLAMDPAKKKEIMDDLDMFKNGKDYYARVGKAWKRGYLLHGPPGTGKSAMIAAMANYLDYDIYDIELTSVHSNTDLRKLFIETTSKSIIVIEDIDCSLDLTGARKKKKEAADDDDGGSKDGGAPPKPDMKKDASSKVTLSGLLNFIDGLWSACGGERLIVFTTNHVKKLDPALIRRGRMDKHIEMSYCCFEAFKFLAKTYLDVDSHRLFAAVDELLSEVDMTPADVAENLTPKSLDDNADTCLAALVKELEKAKENKSKGKNAHGEDKDEDEDEEDDDVEVVGKDK

SEQ ID NO: 50054 - protein, 505 aa, Oryza sativa
MYRAASGLGAIKRHGLDGQMLNVAIRCASTSVAQRSSGGFWTWLTGARSNALPPPDFTLPGVTIPPPLPDLVEPGKTKITTLANGVKIASETTPGPSCSVGVYVNCGSVHEAPETLGATQLLKKMAYTTTTNRSHLRVVREIEAVGGNVKASANREMMSYSYAALKTYMPEMVEVLIDCVRNPAFLDWEVKEQIMKLKAELAEASSNPETFLLEALHSTGYSGALATPLIASESSVSRLNTNVLEYFLAENYTAPRIVLAATGVDHDELVSIAEPLLSDMPGVTGPAKPKSTYVGGEYRRTADSSNTDVALAFEVPGGWLKEKEFVTVSVLQTLLGGGGTYSWGRHGKGLHSSLNHLANEFDQIRSIAAFKDVHSNTGIFGIHTSTDAAFVPKAIDLATRELTSLATPGKVDQTQLDRAKATAKSAILMNLESKASATEDMGRQILAFGERKPVEHLLKAVDGVTLKDITALAEKIISSPLTMASHGNVLNVPTYDSVSGKFRSK

SEQ ID NO: 50055 - protein, 339 aa, Oryza sativa
MHSVINDLNSRISFVVAENATLRQQLSGGSVNCPPPGVYPPAPIPGMHFPWMPGYAMRPPGSHVPLVPIPRLKPQQPVPSSKVVKKPESKKTVENKSKSKTKTKKVASVSLLGLLLIMLVFGAFIPGFSHNFGMCGQSDNAMFRNFGQSHARVLSVSSQDKSSLNNSDMIGVDVGKMTGNTDGPGKKHQPAHNSSEILPALLYVPRNGKHVKINGNLIIHSVLASEKAVAHKASKDDSDQSARDHKETSVAIARYLSLPGKDVNRQETSSADGPLPQWFREGMEGPILNSGMCSEVFQFDISTASSNPGGIIPASPVVNSSSVNATEKIPAHSAAYLAS

SEQ ID NO: 50056 - protein, 148 aa, Oryza sativa
MSLCCFSSSTAAAAAARRFLLPHLFLGRRRHRHRHDQVRYTILHHPPLAVAAAPGFPLRGRPPRLEPEDEPHRRHRRGRGHDAPRGRLPRRAAPARARVPRRFGWDEACRCRLRCWAPRPHPRRCAPKLEIYAVGVDAETVLVLGACC

SEQ ID NO: 50057 - protein, 265 aa, Oryza sativa
MNYEKLWIYIVVLGFTRTVSSIWAMTLLSLYVRVQVTILGRHLYLDFARVTDGAQLQEGSDTFSKSGHKDFLATADYLATYGINALITKMQHAATEILKEKQLKDPMGIDEVLETILQILKQFMGLCEDNSWINYLVPENANVYAQLMAVSSSGFDDSSLLKDVRKLDQLMSETRIVLSSDDFRNIMDRSLKKIASVVVEDLAVQIGAPIPPPGLPLAKLLAKVAQLSLPLLEEPDKNKHIQIIRSMPEVELFYTFLYANMPPET

SEQ ID NO: 50058 - protein, 379 aa, Oryza sativa; identical to SEQ ID NO: 38665

SEQ ID NO: 50059 - protein, 442 aa, Oryza sativa
MASPAKAQRRPEGASVLETLPALPLAIIIAKAGPRCAAALACASSTLRAAASGEALWRHFCSDDFALDAPLAPGDLPLPSFKDAYKAWFQSFGMYPLPLVKRVKIFWSSFRAWLCEYFPEGLRTLGEGVSEAEIAVAECNLGLVLPMPTKLLYGFCNGQLHIGRGEEVSYGVMGGYDYVHQRYTVRLLPLAHHAVQKNSNYIVVATSCFGEKIFLLDCASGRLYVGTKYWNEEREIMACVPKATIRLAVDDDHGMPQDGFLLWLEEHLSRLQDGLIKVQSCKFPMLARHISLYPVQLPYCSSASMHGIKVRASAVFAPENSAFADYRCRYSYYFSIRLSLPEAFVVDGKWYSSFQLQSCHYTIQIGDEVLPYTCNYGGHGKCPLLRCGEELFVYGCSISAALEPGSVMGNLTLVPWRCGQPRGSPFIADIAPFPLHPPDYIF

SEQ ID NO: 50060 - protein, 95 aa, Oryza sativa
MTPPPRIPAASSLLLPPPCLGRPRWAPGQSPPPAMPDNATPYYAKGRPRGASRLPSRPPCPPPHWTAATHSAPGDTMASLCRTKGSFPFTASIVS

SEQ ID NO: 50061 - protein, 257 aa, Oryza sativa
MLRSVSGSNSSRGIAAVVGVGPRLGSAVARKFASEGYTVAILSRDLVKLSQLAEEIAQEAKAQVFALRVDCADARSVREAFEGVLSLGPVEVLVYNACEPPADGDGDASPRPTPFLAISPDAFHRALAVSAAGAFYCAHQVIPGMVERGRGTVIFTGSSASVTGYAGYSDLSCGKFALRGLSQSLAKEFQPAGVHIAHMIIDGVIGEPRSGRGRCGGETASSAGADPDAVAQSYWHVHAQDRSAWTQEMDIRSPSLM

SEQ ID NO: 50062 - protein, 396 aa, Oryza sativa
MEEGFSTQEQIPLQGYTCIGIVGIKDPVRPGVRQSVATCRSAGISVRMITGDNIDTAKAIARECGILTKDGIAIEGAEFREKSAEELHDLIPKMQVLARSSPLDKHTLVKHLRTAFNEVVAVTGDGTNDAPALREADIGLAMGIAGTEVAKESADVVILDDNFSTIVTVAKWGRSVYVNIQKFVQFQLTVNVVALLVNFTSACFTGDAPLTAVQLLWVNMIMDTLGALALATEPPNNNLMKKAPVGRKGKFITNVMWRNIVGQSLYQFAVMWYLQTQGKHLFGLEGYHADIVLNTIIFNTFVFCQVFNEISSREMEDINVLRGMAGNSIFLGVLTGTIFFQFILVQFLGDFANTTPLTQQQWLISILFGFLGMPIAAAIKLIAVEPHEKADTRRTP

SEQ ID NO: 50063 - protein, 543 aa, Oryza sativa
MSSSAAMPFHHFSNAAATLIPKEEGLMGGLHVAKDEGMDLEMDMELSGGSGSAHLDGLLSFADVDDDHKPQHSGHDQPPDAAQPSGAAGGNAKKKRYHRHTAHQIQQMEALFKECPHPDDKQRLKLSQELGLKPRQVKFWFQNRRTQMKAQQDRADNVILRAENENLKSDNFRLQAAIRNVVCPNCGHAAVLADMSYEEQQLRIENARLKDELDRLACIATRYGGGGGRQPVLSTSALSCISAPPPVLMPPLDLDMNVYSRHFAEQAPVMGCGDLIPPPVVPQHDGAAAYMGAMMAPVQEQDKQLVVDLAATAADQLARMCRAGEPLWVRQRGAEVMAVEEHARMFSWPVDGAKQGDGGAVARAEGTRDNAVVIMNSINLVDAFLDANKWMELFPSIVCKARTIQIINHGAASGHLGSGTLLLMQAEVQFLSPLVAAREVVFFRYCVHNADEGSWAIVDFPAEGFEEGLLQASVVRCRRRPSGCIIQDMPNGYSRVVWVEHMEMVGEEKPLQPVFRDYVASRRRLRGHALALHPPAPVRAPRQ

SEQ ID NO: 50064 - protein, 384 aa, Oryza sativa
MTPADAFLILDFLAGNRLIPHSVFTTLLASLPSVSPHTSPRLRAGLALRALDSALSISESSEMDAPTLLRKARAVLADPDLAPFFPQHLAAPASADDAPAAAVAHLNRLLDVEWASLPPSSLEIAAERIVGSQALHSWANADHAQRSKLRLLVGESTALEILDTLQRPDASTNHPGTLPQVDNAPETNGASHCAQQNDGAKSGLVKQNAEADRPQQDSTRHQQDSVQGASNSQLKESSVTMESIRGTGPDITGFMEEATPRVAGQFAPDNIKNHQVTGSKRSLMERNPAASTYEWDGSDSEGKRPAAKRRLPIFERTAKPSPTAAHKTRKKWSEEQEKTMLEGVEKYGKGNWKDIKMAYPDVFEDRSTVDLKDKFRNLERHLCA

SEQ ID NO: 50065 - protein, 103 aa, Oryza sativa
MEGRRCGDEKGRCSAMAVARGSAAMGIRRRSGCGSGGTTTAVMVVASWLGKVKVRDAMVNRNEDDKDEWMMVLMLLASRGRKLGSTATATVAATTTHGEDRTR

SEQ ID NO: 50066 - protein, 132 aa, Oryza sativa
MAEAGSTPAGMATVATSAEAPDPGALEAGPAPQRRIWPPGCRIGRARGGGSRARDDVVAVARRARGRSARRGGGGGVSRRQELLEVVLSAAVAADGGRSIGNVHGSSRPDLGVAEWWSAGDVCWRQQRQRRP

SEQ ID NO: 50067 - protein, 302 aa, Oryza sativa
MPKFSVRGIWQRWRESYPNNGSKNDEAITVFTGVPTMYTRLLQGYDGMDPEQQSASSFAAKQLRLMMCGSSALPSPLMKRWEEVTGHRLLERYGMTEFVMALSNPLHGARKEGTVGKPLPCVEAKIIMEDGAETTSEVGELCIRSPSLFKEYWRKPEVTAESFIDGGFFKTGDTVTVDDKGYFIILGRTNADIMKVGGYKLSALEIESVLLQHEIVLECAVLGLPDEAYGEIICAIIVPKEDSKKRAELDSKPALTLEALTSWSKDKLAPYKIPTRLYLWDSLPRNAMGKVNKKELKKLLGA

SEQ ID NO: 50068 - protein, 419 aa, Oryza sativa; identical to SEQ ID NO: 36379

SEQ ID NO: 50069 - protein, 455 aa, Oryza sativa
MVYCGLHDNPKVSMKKDGTFCGKPWRNVLEHLKIQDTDLWSSTNEDNCLWNAKLFPVMSLPETLKVGMWLMGSTCDLDGKVASLWKESRRISLEELHRSIDYHQLCVNSSKHQADLATNIAKACMTYGLLGRNLFQLCEEMLQKENSCVEVCNELLSLCPSHGDQYSGVLPQSRRYQVKMDLLTASGDLSTAAIVEDKVWASIASETASAIKYGSKEPSSDSKCSSNGNLHPKKAIVELPVRVDFVGGWSDTPPWSLERPGCVLNMAIRLEGNLPVGAMIETTMDHLGVLIEDDAGRNVCIDDLSSITSPFKENDSFRLVKSALIVTGVLNHERLSKLGLNIRTWANVPRGSGLGTSSILAAAVVKGLFQLIEGDESDATVARAVLVVEQVMGTGGGWQDQIGGLYPGIKCTQSFPGQPLRLHVVSLLASPQLIQELQQRLLVVFTGQVSMNFLL

SEQ ID NO: 50070 - protein, 553 aa, Oryza sativa
MSLAGSALEAALQAVGRGLDAAGDHRLLYCKGTGRLLMLDESRARDLTINGGVLRGVPPDVVVEEGHGILERIRQVPGPPTDEPVVCSFPKMAECFNRKAGLLETTVPLGSFNSLFSFTGSWKNDEAATKSLAIDGYSVPLFKVKITSGELFLHESVKRAIPHSWDPSALASFIENYGTHIITSVTVGGKDEVYIKQHSSSQLSELEFRNYVKEIGSERFSDGDSKLNATPINYSEKDMTVIFRRRGGCDLVQNFNDWIKTVQSAPDVIGMTFLPIVSLVGDMPGKKHLARAIELYLKYKPQIEELQYFLDFQVQLVWAPVPPGIAGQHRKEPVCPSLQFSLMGPKLFVSTEQISVGRRPVTGLKLCLEGAKQNRLAIHLQHLGSLPKIFVPHWDSHITIGPPKWQGPEEQDSRWFEPIKWRNFAHVSTAPIEYTETSITDLSGVYIVTGAQLGVWDFGAKSVLHLKLLFSRVPGCTIRRSVWDHSPSSSLVHRTDEASSSSSDNAKLVKIVDMTETLKGPQDAPGHWLVTGAKLGVEKGKIVVRAKYSLLNY

SEQ ID NO: 50071 - protein, 616 aa, Oryza sativa
MRRPPTSPPKQHLLRIRRCLPSVWRNAAPAQESPPPSPPHPASSLSAILYSCTARRARRPGELAHARAATLGLAAHPSVLPRLASFYLALADLPAARAAVEQAAGKARAFPWNLLIWGYAGRGLWEDVILSYEKMVGWGVAADRFTYPSVLRACGELREVTIGRNIEQRIRRCRYGLDMYVWNALVGMYAKCGELEDARRVFDGMAVRDVVSWNTMVSAYASTGKSNKAFELLQQVPGANVVTWNAVAAGNLKAGNYDEVIRLVSQVRGYHGTGVDSVTIVIGLKACGRTGYLSVGRELHGVAVRLCFDSLECVVNSLITMYSRCGMMSSACLLFRACSVRSITTWNSLLAGFAFMEQIEEASLIFREMIGFGVCPNGVTVLTMLSLGARVGHLCHGRELHCYILKHELDSSKLMENSLVDMYSKCRQMVVAQRVFELMQFRDKHAYTSLVLGYGLQREGHVSLKLFDEMIVNSIEPDHVTFVAVLSACSHSGLVTQGQLLFAKMVSIFGIAPRVEHFSCMVDLYCREGLLKMAEVIIDKMPFQPTAAMLATLIEACRIHGNTEIGDRAAKKLLAMRTNNPGHYRLIANMYIAAKCWPELAKVRSLMSSPGAKYDS

SEQ ID NO: 50072 - protein, 205 aa, Oryza sativa
MARHRHRLAAAAALLLLLLSSAAALSSSAAEGEEDPLIEQVVGGGEEEDAQLDAEAHFASFERRFGRTYRDAGERAYRMSVFAANLRRARRHQRLDPTATHGVTKFSDLTPGEFRDRFLGLRPPSSPPTASPTTSTGASTAPSAPSRTRVRADRAGRSARRGRWRGRTSSPRGSWRCSASSRWSTATTSVMHQNRAHATQDATVA

SEQ ID NO: 50073 - protein, 497 aa, Oryza sativa
MPPTPPPLLLPAPRCPRSTAVLAASRFAASASSSSGGGGGGSSSGARTARPPPAPRRRRGKPGFSRQSAIKKSFHQEQVVFSTPVPPDPSVAVVGGGASGLACAASLAARGVRAVVFDTGMHGLGGRMATRAIAAAGDQQQQQQLVFDHAAQFFTASDERFKRVVDEWMDKGLVREWGGLIGELDAGGHFRPMPSSSPPRYIGVDGMRPLADAILPESDLIEVVRPCWISKLEPFNGLWRLFENEKPHGQYDAIVIAHNGKCANRLLSTSGLPLLTRQMKRLQLSSVWALLAAFQDPLPIPQTDSYGTFEGAFVKDVDSLSWMANNTQKLFPLQTGRPECWTFFSTAAYGKRNKVPQENIPKITAEKVKEDMLRGVELALGLSRGSLQQPFYTRVQLWGAALPMNTPGVPCIFDPQGRAGICGDWLTGSSIEAAVLSGMSLANHIADYFASSGEQPEEFAIGLHENLSQVEGHDIGQFPGLESQKPHVAEAQLTPST

SEQ ID NO: 50074 - protein, 385 aa, Oryza sativa
MQGATPGDAAGEEVGGGGDVVMVRRASVAACLTCPLCGRLLRDATTISECLHTFCRKCIHEEFVDKESCCCPTCNIDLGCAPLEKLRVDHSMQFVRSRIFPFKRRKVENPEIICPVASPVKRKERSLSSLTIPAPQVSIQKCLTKRRTKASCLRNFPLHSTSRGSKDTSKKLGGWRPLGCQLKLGKDKKSLKSSVKDTNRTKSKSGDTDDGAPASKAKAREPFTRYGRAAKRTGRKKLFMLKNKKKRFKAKQPSKKRRFRALWFYLLAAFDQRGVPTLPQLPAKYLRIKDVDLPASIIQKYLAQKLNLSSETEVEVLCGGKVVNQGMTLHDLVDCWLEKGPKSRMRSSVGSPATGFMVTLFYRRPDVDVSSSPAPPQPDTESCHS

SEQ ID NO: 50075 - protein, 328 aa, Oryza sativa; identical to SEQ ID NO: 37719

SEQ ID NO: 50076 - protein, 325 aa, Oryza sativa
MGFAFAAGTTDGPGAFDFRQGDVKGNPFWKLVRNLLKTPGKDQVECHSPKPILLDTGEMKEPYDWAPAILPVQMIRIGQLVILCVPGEFTTMAGRRLRDAVKTVLTSGNSEFDKNIHVVLAGLTNSYSQYITTFEEYQIQRYEGASTLYGPHTLSAYIQEFQKLAMAMIANKEVPTNFQPPDMLDKQIGLLPGVVFDSTPLGVKFGDVNSDVPGNSTFNKGSTVNATFYSACPRNDLLTDGTFALVEKLDGNNNWVPVYDDDDWSLRFKWSRPARLSSRSFATLEWTVPEDAAAGVYRLRHFGASKPMFGSVRHFTGTSRAFAVR

SEQ ID NO: 50077 - protein, 494 aa, Oryza sativa
MPTASPAHAVFFPYPVQGHVASALHLAKLLHARGGVRVTFVHSERNRRRVIRSHGEGALAAGAPGFCFAAVPDGLPSDDDDDGPSDPRDLLFSIGACVPHLKKILDEAAASGAPATCVVSGVDHVLLAAREMGLPAVAFWTTSACGLMAFLQCKELIDRGIIPLKDAEKLSNGYLDSTVVDWVPGMPADMRLRDFFSFVRTTDTDDPVLAFVVSTMECLRTATSAVILNTFDALEGEVVAAMSRILPPIYTVGPLPQLTAASHVVASGADPPDTPALSAASLCPEDGGCLEWLGRKRPCSVLYVNFGSIVYLTSTQLVELAWGLADSGHDFLWVIRDDQAKVTGGDGPTGVLPAEFVEKTKGKGYLTSWCPQEAVLRHDAIGAFLTHCGWNSVLEGISNGVPMLCYPMAADQQTNCRYACTEWRVGVEVGDDIEREEVARMVREVMEEEIKGKEVRQRATEWKERAAMAVVPSGTSWVNLDRMVNEVFSPGNNM

SEQ ID NO: 50078 - protein, 215 aa, Oryza sativa
MALLASSGRASQKDKPSEDVDGATAAQSKPSTGEDDRSKICYKCKKSGHLSRDCPESTSEVDPADVNVGRAKDGMDRSSAPAGSSVTMDEDDIHELGDEEKEKLIDLDYLTGNPLPSDILLYAVPVCAPYNALQAYKYRVKITPGTAKKGKAAKTAMSLFLHTADATNREKELMKACTDPELVAAIVGNAKITAPGLTQLKQKQKQKGKKSAKEN

SEQ ID NO: 50079 - protein, 283 aa, Oryza sativa
MRAGAGGRRVQAVQLVLGGRARDDGSESESSDDEDDDEPMQMTDEQRRTLRRKIREMMDRVPETAEITDPAERKAKMLELLTKYQLVVEEEDPNWPEDDEDGHGFSLGQFFDKITIKAEKKNDDDEEDDAKGNQSDKEIVWEDDNYIKPIRDVKTMDWDDTVFTDFGPLIVLVHNRYKRPQDNENARDQLVKAIEMFWEYNLPSPRCVAVDACAEPDLVKALNVSGFPEVLFTNAGKIVHRDKVVRSAEEWTRMMAFFYYKAARPPCLSEADGQGQEKVPLMS

SEQ ID NO: 50080 - protein, 505 aa, Oryza sativa
MVGTMDEARIIEYFKNKSILITGSTGFLGKILVEKILRVQPDVRKIYLPVRAVDAATAKQRMQTEVIGKELFGLLKEQHGKGFQSFIDEKVVPLAADMMHQNLGLEESTLQELAKDLNIIVNGAATTNFYERYDVALDVNVMGVKYLCQLAKKCANLEVFLHVSTAYVCGERSGVVQERALREGETLREGTYLDIETELRLVGEQRQQLEDAGDAKAERKAMKDLGLARARHFGWPNTYVFTKAMGEMMLQEQLVAGAGRRHGIPVVIARPSIITSVHRDPLPGWIEGTRTIDAIIIGYAKQSLSCFLADLDLIMDVVPGDLVVNAMMAAMVAHSRGSSSEMAVYHVTSSMRHPAAYAVLYRTGWRYFLENPRVGKDGVAVRTRPVYFFRTIASFRAFMAVAYALPLQLLRLLSLLCFGLLFARRYADLSRKYSFVMQLVDLYGPFALFKACFDDLNMEKLRLSMATPPSSAAAALFNLDPKNIDWDDYFYRIHIPGVMKYVLNK

SEQ ID NO: 50081 - protein, 977 aa, Oryza sativa
MVINLSSPPIFLLFFLWCVVVFFVAGDGGAVVAEAALDAQAAYLSQMKQEFAGPAMARWDFSAPAVDYCKFQGVGCDASGNVTAIDVTSWRLSGRLPGGVCEALPALREVRLGYNDIRGGFPGGLVNCTSLEVLNLSCSGVSGAVPDLSRMPALRVLDVSNNYFSGAFPTSIANVTTLEVANFNENPGFDIWWPPESLMALRRLRVLILSTTCMHGGVPAWLGNMTSLTDLELSGNLLTGHIPLSLARLPNLQLLELYYNLLEGVVPAELGNLTQLTDIDLSENNLTGGIPESICALPRLRVLQMYTNKLTGAIPAVLGNSTQLRILSVYRNQLTGELPADLGRYSGFNVLEVSENQLTGPLPPYACANGQLQYILVLSNLLTGAIPASYAACRPLLRFRVSNNHLDGDVPAGIFALPHASIIDLSYNHLTGPVPATIAGATNLTSLFASNNRMSGVLPPEIAGAATLVKIDLSNNQIGGAIPEAVGRLSRLNQLSLQGNRLNGSIPATLADLHSLNVLNLSYNALAGEIPEALCTLLPNSLDFSNNNLSGPVPLQLIREGLLESVAGNPGLCVALRLNLTDPALPLCPKPARLRMRGLAGSVWVVAVCALVCVVATLALARRWVLRARQDGEHDGLPTSPASSSSYDVTSFHKLSFDQHEIVEALIDKNIVGHGGSGTVYKIELSNGELVAVKKLWVSRRSKQEHGHGGGGGCLDRELRTEVETLGSIRHKNIVKLYCCYSGADSNLLVYEYMPNGNLWDALHGGGGWGFGFLDWPTRHRVALGVAQGLAYLHHDLLFPIVHRDIKSSNILLDADFEPKVADFGIAKVLQARGDRDASTTTIAGTYGYLAPEYAYSSKATTKCDVYSFGVVLMELATGKKPIEPEFGDTRDIVQWVSGKVAAGGEGEALDKRLEWSPFKEEMVQALRVAVRCTCSIPGLRPTMADVVQMLAEAGPAAGRTAKDAANKKDSSGEPKL

SEQ ID NO: 50082 - protein, 289 aa, Oryza sativa
MAPMAGGGGVPWGDRARVVGAQIRSRFRVGVAPVDRRWLWRRGDGRVASEAVRQWTERVRSLWQREKSTDQISSSPGTSQVAAAAKPSSSALRFYRKKVGKEVDGIEDSVIFRSLQALAVPLIGNACHIFMHGLNSVQIYGAEKLQQALQERPKGKPLLTVSNHVAAMDDPFVIASILPPSVMLEAQKLRWTLCASDRCFTNPILSTFFRSVKVLPVSRGDGIYQKGMDMALSKLNNGGWVHIFPEGSRSKDGGKTVAPAKRGVGRNAGYNACRKTYSKSRQKGDCGCW

SEQ ID NO: 50083 - protein, 321 aa, Oryza sativa
MGKTSTLSFSHGELVESVLFLPSGGLLATAGGNVVRIWDVIGGGRLLHSVESHVKTVMALALAKMTNTGETRLLSAGSDGYVKSFDYGELKLTHSMRYPKELLSLACSPCGTVLVAGSSKGTIYMGRRKKKSTGEDEEEGKGVGGELDWAPTKPEKRRLAPSNYRYFLRGQNAKAKEGDLVIEKPKKVKVAEHDKLLRKFRHKDALVSALARNNPRSIVAVMEELVSRRKLVRCIENLDTEELVLLLLFLHRNATLPRYARFLMGVANKVLEMRADDIRSDENLRGCVRNLKRMAAEEIQIQHTLQGIQGMISPMLALASR

SEQ ID NO: 50084 - protein, 327 aa, Oryza sativa
MALILDVARFKYPPHWVPLPLLWEAMNTTDDATGLLRGFMLISRHTAAPSLLYTVSCRDESWKSMAKYCMEDVPDLLKDESVDNVPALLSRLVKSLPANAGNLIKWVIEVRRQEEGGSGLSKEEEERLILKEMILQQVRDTELFRLVRELQFTKQPCCSCSYSSDDDSFTRIAASVCCQGAALLTGNLSSKDGFCCRETCFKCVQVDGDGPKTVVTGTAVSGVNEQSVDMLLPISTLETSVCNSNSSNEVVKYPSRTDILTVLLLALHPSTWVGIKDERLKAEFQSLISTDILHDDLKREILHLRRQLHYVRSCKEEEYGDPVPQSH

SEQ ID NO: 50085 - protein, 212 aa, Oryza sativa
MTRVYMKQKEVEEKWSGNICPKIKQKLEKTAELANTCYTLPAGKGIFQVTDRDHQFIVDINVKCCDCRRWQLTGIPCSHAISCFRNERIQPEDMVSPCYSLESFRAAYKYNIVPSRDQSKWEKMNGVNVQPPKYEKKVGRPKKTRRKQSIELEGGTKLSKHGVVIHCSYCDGAGHNRNNCELLGTTKKMRPRRKRSVQVMQDDKDVYMNEKN

SEQ ID NO: 50086 - protein, 328 aa, Oryza sativa
MGTVTTADPHASFLADKGGKVFVAGHRSLVGSAILRHLVSLGFTNVVVRTHAELDLTRQSDVEAFFAAELPRYVVLAAAKVGGIHANSTFPADFIAANLQIQTNVVDAALKCGSVRKLLFLGSSCIYPKFAPQPIPENSLLSGPLEPTNEWYAVAKIAGIKMCQAYRIQHGFDAISAMPTNLYGPQDNFHPENSHVLPALIRRFHEAKASNAAEVVVWGTGSPLREFLHVDDLADAVIFLMDHYSGLEHVNVGSGSEVTIKELAELVKEVVGFQGKLVWDSSKPDGTPRKLMDSSKIQEMGWKPKVPLKEGLVETYKWYVENVISAKK

SEQ ID NO: 50087 - protein, 565 aa, Oryza sativa
MTKVFTRSLLMYFNKIVRSLRPLVHSPPPQPAAADNIVRWPSDDELLPAPDTTTTSVVTTVCKVEGGLLMSPSTFPYFMLVALEAGGGGGGLLRGLLLLLLYPALRLLGHDRAIRVMAMVSFAGVRKDGFRLGSSTLPRLLLEDVSAEVFEAAVRRRRCVCVSGMPREMVEPFLREYLGVDAVVAPEVRAFGGYYLGLMESDGEVLRRLDMEEVIGGGEKEETCGDGDGRVVVGIGGRGRSFSRIFQKYCKEVYVATKSARRRWRPLHPRRYAKPLIFHDGRTAFRPTAAATLAMFMWLPLGAPLAILRTAVFLLLPFSISVPLLAALGMHSRRISSSSLPPAAAAAHNLFVCNHRSLVDPLYVSAATGRTDLSAATYSISRLSEILAPIRTFRLTRDRATDRAAMQAHLSLPGGGGGGLVVCPEGTTCREPFLLRFSPLFTELGADVQPVALQSAVSMFHGTTAGGWKLLDPLYLLMNPTPAYVVQLLDPVAVGGEGGGGGPELANEVQRRIAEALGYTRTALTRRDKYLALTGNDGGVDRRRLHAWCLLWVKYVLCLCLAWRN

SEQ ID NO: 50088 - protein, 296 aa, Oryza sativa
MTTSMEKPRQVVRKFLARPQHEGVGAVVRRSIGRFELRYFDPFLVLDEFSVSAPAGFPDHPHRGFETVTYMLEGAVTHEDFEGHRGTIKASDVQWMTAGRGIVHSEMPAGPGTSRGLQLWVNLSSHNKMIEPGYQAIQSKDIASTTSDGVTVRVIAGQSMGARSPVRTRTPTMYLDFTVRPHAAARQPVCATWNAFAYVLEGEGVFGGGGDKAGAHHLLLLGQGDGVEVWNRSDKPLRFLLIAGEPIGEPVAQLGPFVMNTEEEIDMTINDFEFSINGFEKAKHWKSQALVALGLE

SEQ ID NO: 50089 - protein, 447 aa, Oryza sativa
MPPRQWRPMLASATKCCAAEDAVVAVDGSGGGGGLARCRPARSEFSRRLASFRKLSSMTNSPASSVAGAAEGGKDDGEEGGGGGGGVSGPLQLYSFSFSELRSITHDFSSSYLLGEGGFGAVHKGFVDAGMRPGLLPQPVAVKQLDIAGLQGHREWLAEVIFLGQFRHPHLVKLLGYCCEDEERLLVYEFMPRGSLENHLFKRISATVPWGTRLKIAIGAAKGLAFLHGASTPVIYRDFKASNILLDSEFTAKLSDFGLAKMGPEGSETHVTTRVMGTHGYAAPEYVMTGHLNIKSDVYSYGVVLLELLTGRRAMEHVRGRSLHADQVVKIVDWTRPYLGSSRRLRCIMDPRLAGHYSVKAARAVAHLAVQCTSPQPRDRPRMAAVVDALERLQGFKDMAVTVGLWPTNAPVAGRNAISAKIHAEVRGAGSGGGAASRRRSASAKLP

SEQ ID NO: 50090 - protein, 307 aa, Oryza sativa
MILGSNQAAAAAAAAAAAEEEAAELARKHTAAVATSRQWSAQTESRIVRVSRVFGGKDRHSKVKTVKGLRDRRVRLSVPTAIQLYDLQDRLGLNQPSKVVDWLLNAARHEIDKLPPLQFPPQDHLCMGHHHHLPSAMPLMHHHGHHHHADDDKYHVAAAAAALAAEKEAAAAGGGGGGGGDDVDGGGGGGAAHIVGRFPAGGYHRFMGLNNPLGMVNSAAGAAMPFHYAGESWNNGSVQDSGAGSPQVAAAAAHHTSPFPSLLSLAPGPHHQLVFYSSEAKQFTVDNLGSQGLSLSSARAFHDQTGS

SEQ ID NO: 50091 - protein, 274 aa, Oryza sativa; identical to SEQ ID NO: 32906

SEQ ID NO: 50092 - protein, 273 aa, Oryza sativa; identical to SEQ ID NO: 30912

SEQ ID NO: 50093 - protein, 316 aa, Oryza sativa
MSTISDQKKRTLEALQQRYAAAKAKKLQDKPRCQTRNKDSAPKPNLDASRKGKAPDFIPSRTSAPFPSKKGLAISSSSASSGGETNPVYSELSFAPHDNLLQRSISDLDSMDVVHNVVYDIIQKGGDAGKITKGAKKLKLEKGILLDNYVHRGPRLVDAQAKSLLIHSKRSKRHMSLKQHKKCGSFDLPETLRKFDLYKPMHEMWKEYITELTKSTPKKQLSETLLSADLHGALVIVAECKSASSYQGVCGIMIRDTAETFGIISDDNRFRVVPKAGSVFILQADCWKVTLIGDKLSPREKLKENQRQQRVQAQIR

SEQ ID NO: 50094 - protein, 123 aa, Oryza sativa
MIQPQTLLNVADNSGARKLMCIRVIGAASNQRYARIGDVIVAVIKDAVPQMPLERSEVIRAVIVRTCKEFKCEDGIIIRYDDNAAVIIDQKGNPKGTRVFGAIAEELRELNFTKIVSLAPEVL

SEQ ID NO: 50095 - protein, 241 aa, Oryza sativa
MGAGASSMMGPEGYGRGWGQTSLGDMPESCVAAVLLYLDPPEICKVARLNRAFRGAASADCVWAAKLPANYRYLAALAAAADDDSGGDGATEGNGSRCSSAAMIKKEIYARLCRPTPFDGGTKEFWMEKNKGGLCISISSKAMAITGIDDRRYWSHLSTEELDSTMSRIFSKYGGLRWLGKLISASLLVHTVFSFGSSWADRTSTWAAESMAMSQSTAGTLNRQGFSFQLQMISKLRRNII

SEQ ID NO: 50096 - protein, 368 aa, Oryza sativa; identical to SEQ ID NO: 43131

SEQ ID NO: 50097 - protein, 356 aa, Oryza sativa
MASLTDLVNLNLSDTTEKIIAEYIWIGGSGMDLRSKARTLSGPVTDPSKLPKWNYDGSSTGQAPGEDSEVILYPQAIFKDPFRKGNNILVMCDCYTPAGEPIPTNKRHNAAKIFSSPEVASEEPWYGIEQEYTLLQKDINWPLGWPVGGFPGPQGPYYCGIGADKSFGRDIVDSHYKACLYAGINISGINGEVMPGQWEFQVGPSVGISAGDQVWVARYILERITEIAGVVVSFDPKPIPGDWNGAGAHTNYSTKSMRNDGGYEIIKSAIEKLKLRHKEHISAYGEGNERRLTGRHETADINTFSWGVDNRGASVRVGRETEQNGKGYFEDRRPASNMDPYIVTSMIAETTIIWKP

SEQ ID NO: 50098 - protein, 299 aa, Oryza sativa
MDAVAGASVSSSSARLRPCPRPRRIGNVAPATVRRRSRRRAVTCAAAADADVVGLFDAAKLTVDRFVESGMVVGLGSGPASGLAIQYLGTRLRRGSLTGILGIPSSTISASEAVKAGIQVSSYEEGTQIDFAFTDADIIEEDTMTAVIGRRKTESGEPSFMVEKGIVKSADKLAFIIGHEKYVKGIEGSIPVLVKSANWIDTAEEIDDLFLGDAEVWRRPSIGTAGPLGGDFPLVTKEGHHVLDVIFTTPIPDLGKVAESLEKIAGVVDHGIVSSIPSYVVVALNGEVQVLDEKSSVIP

SEQ ID NO: 50099 - protein, 302 aa, Oryza sativa
MVVYEQDPDVLRWSLHLLLPPAAALHYQQRTSSVDCDEMIAHALQEELSYAQSQSLSSSILHLPPSAPPLKEDEQDDAPPPPPPFSSCSTPADYTNTNNHNAHDCLIEFVDDFSALDGQVGKRLHDMIPIPHVPKTNGDIPSVDEAFSDHQRLLHRLELYDLAELKVEGDGNCQFRALSDQFYRTTEHHRFVRQQIVKQLESYPEIYAGYVPMDYREYLKKMIKNGEWGDHVTLQAAADSYGVKIFILTSFRDTCYIEILPVVQKSERVICLSFWAEVHYNSIYPEGELPVMENKRKRWWHF

SEQ ID NO: 50100 - protein, 329 aa, Oryza sativa
MGFSWGWLCGRRNGPSGFGGASTADEVTAGVDASRLTVVVTGATNGIGKETARVLALRGAEVILPARTLESGMKVKQSLAEEIPSSKLHVMEMDLSSLDSVRSFAKSFNSSYRHLNVLINNAGVMSCPFGLSKDGIELQFATNHVGHFLLTNLLLDKMKATAKETGLQGRIINVSSISHRGSDGSCFDLDKLNDKSKYRPFKAYGHSKLANILHANELSRRFQEEGCNLTANSLHPGVIATNLPRHILTNSLIISIFSVMKPFLKSIPQGAATNCYLALHPGLKDVSGKYFADCNEATPTAVARDAELAKKLWEFSEELTSGDQKLKEK

SEQ ID NO: 50101 - protein, 406 aa, Oryza sativa
MRLGFFDGDPRKLPFGSLGPKDVCTSSNQELAREAARQGIVLLKNTGALPLSAKSIKSMAVIGPNANASFTMIGNYEGTPCKYTTPLQGLGANVATVYQPGCTNVGCSGNSLQLSAATQAAASADVTVLVVGADQSVERESLDRTSLLLPGQQPQLVSAVANASRGPVILVVMSGGPFDISFAKSSDKISAILWVGYPGEAGGAALADILFGYHNPGGRLPVTWYPASFADKVSMTDMRMRPDSSTGYPGRTYRFYTGDTVYAFGDGLSYTKFAHSLVSAPEQVAVQLVEGHACHTEHCFSVEAAGEHCGSLSFDVHLRVRNAGGMAGGHTVFLFSSPPSVHSAPAKHLLGFEKVSLEPGQAGVVAFKVDVCKDLSVVDELGNRKVALGSHTLHVGDLKHTLNLRV

SEQ ID NO: 50102 - protein, 88 aa, Oryza sativa
MTWSNKILGPSLVALYNPLQPACSTILSTIFLGTPIYLGRYNGKFWHVIMRNVFFELCHLTVSEIWDSFNCSRSALRSLVASDTRSRQ

SEQ ID NO: 50103 - protein, 394 aa, Oryza sativa; identical to SEQ ID NO: 42858

SEQ ID NO: 50104 - protein, 587 aa, Oryza sativa
MRGGGGGGGGGGEEAGQKLKSMDVDKLENGGDKPALKYHGWRAMPFIIGNETFEKLGTLGTSANLLVYLTQVFHMRSVDAATLLNGLNGTTSLAPIIGAFLSDAYLGRYLALAIASVASLIGMFLLTMTAAADGLHPAECGVGETCSKATSGQFAVLFMSFAFLVLGSAGIRPCSMPFGADQFDPHTESGKRGINSFFNWYYFTFTSAMLVSATVIIYVQSNVSWPIGLGIPTALMLLACVLFFMGTRLYVRVTPEGSPFTSIVQVFAAAARKRSLKQPKDPKQDLFDPPHTSAIVTKLAHTDQFRCLDKAAIVSGPDDVRAGGAAPSNPWRLCSVQQVEEVKCLIRIVPVWSTGIIYYVAVVQQSTYVVLSALQSDRHLGRSFQIPAASFTVFAMLAQTLWIPIYDRLLVPRLRRVTGKDEGLTLLQRQGIGIALSTVAMVMSAVVEDRRRHIALTQPTLGTTITGGAISAMSSLWMVPQLMVLGLSEAFNLISQIEFYYKEIPEHMRSVAGALAFCNLALGNYLSGFLVTIVHRTTGAGSNWLAQDLNKGRLDLFYWMIAGIGIFNIIYFMICAKWHRFKGAAAN

SEQ ID NO: 50105 - protein, 381 aa, Oryza sativa
MGCFAFKSKAKNQRAAASGARSPAPTSDGQKSKASSASTPTRSIQELSDERGAQRLRVFDLDELSSATNGFSRALKIGEGGFGSVYRAFFRSAAGGGGGRVVLAVKRLNQRSLQGHKQWLAEVQFLGVLEHPNLVRLVGYCAVDSETSKHRLLVYEFMPNKSLDDHLFNRAHPPLSWRLRLQIMIGAARGLDYLHEGLQEVQVIYRDFKAANVLLDADFKPELSDFGLAREGPTEGKTNVSTAVVGTHGYAAPDYIETGHLTTKSDVWSFGVVLYEILTGRRSLERSRPAEEQKLLGWVRRHPPESQSFRSIMDPRLGGRYPAAAARQVARLADRCLVKNPKERPAMREVVEELERVLQMEPPTTTAADKDGDRRLPPAKR

SEQ ID NO: 50106 - protein, 569 aa, Oryza sativa; identical to SEQ ID NO: 48588

SEQ ID NO: 50107 - protein, 347 aa, Oryza sativa
MDLGSCYLGGNADAVEFCPHRPFRHVLAAATYTLQEQGGERQDRAGSVSLFAVDVGEEDAPRRLRLLHTVETAGVFDMKWSPVAPLLAQADAHGRLALWRLEQEDGSDKGAVLRDVCSGDISSSMCLFVDWNQTAKALSVGLSDGSLSVVSMREDRLEVSEQWTAHQYEVWTCYFDRANPHLLYSGSDDCSFSCWDLRQNPSNAVFQNKKSHNMGVCCIAQNPLEGNMLLTGSYDEFLRVWDIRSMVKPVNVKSLNLGGGVWRIKYHPLIADVVLAACMHNGFAIVKVGTGDAAVVETYCKHESLAYGADWQINEGAEQNKNFSVVATCSFYDRLLRVWQPENLGNL

SEQ ID NO: 50108 - protein, 294 aa, Oryza sativa
MHCHGWRSIYCIPKLPAFKGSAPLNLSDRLHQVLRWALGSVEIFFSNHCPLWYGYGGGLKCLERFSYINSIVYPFTSIPLLAYCTLPAICLLTGKFITPELTNVASLWFMSLFICIFATGILEMRWSGVGIDDWWRNEQFWVIGGVSSHLFALFQGLLKVIAGIDTSFTVTSKGGDDEEFSELYTFKWTTLLIPPTTLLLLNFIGVVAGVSNAINNGYESWGPLFGKLFFAFWVIVHLYPFLKGLVGRQNRTPTIVIVWSILLASIFSLLWVRIDPFLAKNDGPLLEECGLDCN

SEQ ID NO: 50109 - protein, 443 aa, Oryza sativa
MAAAASSSLLAAASSSSRAAAVSARRAPSASPAAAASLPSPSRASCAPPLRASAARTLRSRVVASAAPAMQPPPASRVSTVVDVDLGDRSYPIYIGAGLLDEPDLLQRHVHGKRVLVVTNTTVAPLYLEKVTWALTHNNPNVSVESVILPDGEKYKDMGTLMKVFDKAVESRLDRRCTFVALGGGVIGDMCGFAAAAFLRGVNFIQIPTTLMAQVDSSVGGKTGINHPLGKNLIGAFYQPQCVLIDTETLNTLPDRELASGIAEVVKYGLIRDAPFFEWQEKNMPALLAREPSALAYAIKRSCENKAEVVAQDEKESGLRATLNLGHTFGHAIETGTGYGAWLHGEAVAAGTVMAADMSHRLGWIDESIKKRAIDILEKAKLPITPQEAMTVEKFKSIMAVDKKVADGLLRLILLKGPLGSCVFTGDYDRNALDETLRAFCDC

SEQ ID NO: 50110 - protein, 517 aa, Oryza sativa
MARRSCFFFLLPLLVAALAGSPVVTAQRNALPAAAAAAASVRVGVILNLTSAVGVRRRVGIQMAVEDYYAANSGSATRVELHFRDSAGDVLPAASAAVDLIKNVQVQAMIGPPSSAATEFVAHIGSHSRVPVLSYSATSPSLSPAQTPFFVRAAVNDSFQAAPVAAVLDAFRWRAAAVVYEDSPYGSGILPALADALQGAGAKIMDRTAVPVDATDDRLDALLYRLRAMPTRVFVVHMLHNVAGRLFRRAKMLGMMSDGYIWVATDGVATFMDRFSPEEVDAMQGVVSLRPYVQETDAVKNFSARFKARLRRDHPTVDDVREPTVLRFWAYDTAWAIAAAGGVGRCRRPGVPDTADERATDGPGPARRVGHRHGAPQRRPEHDVRRARRQVQARRRAAPAAGVRGREHHRQGRQDGRVLDAGVRDHARPERRQRQDAEANPLARRAARHAERLDRVAERAAAPCQRADEAGLHAVRRRRQRHGDRAAKHHRLLHRRVRRGHEDYALSGELRVRPLPR

SEQ ID NO: 50111 - protein, 298 aa, Oryza sativa; identical to SEQ ID NO: 49961

SEQ ID NO: 50112 - protein, 346 aa, Oryza sativa
MQTEARVGMAAATMDSGAAAAAARRYSTQQQQQQPPPPQLHHHQPQLGTVPHLLAGGVAGAVSKTCTAPLARLTILFQVQGMHSDVATMRKTSIWREASRIVYEEGFRAFWKGNLVTIAHRLPYSSISFYTYERYKNLLQMIPVLDRNGGFGADVGVRLIGGGLSGITAASMTYPLDLVRTRLAAQTNTAYYRGISHALYAICRDEGVKGLYKGLGATLLGVGPSIAISFCVYETLRSHWQIERPYDSPVLISLACGSLSGIASSTITFPLDLVRRRMQLEGAAGRARVYQTGLFGTFGHIVRTESLRGLYRGILPEYCKVVPSVGIVFMTYETLKSILTELASDD

SEQ ID NO: 50113 - protein, 67 aa, Oryza sativa
MMSKLNLCPNLSSECWIELHPQPVTGKVRMNSIPAIRRRGHALLGLDMSQLLVLSSAIHSSSHNEES

SEQ ID NO: 50114 - protein, 406 aa, Oryza sativa
MIPLNRRASQTRGGMEYFDARRKPHNVGKVIAALVLTTLCIFILKQSPGFGGSSVFSRHEPGVTHVLVTGGAGYIGSHASLRLLKDNYRVTIVDNLSRGNMGAVKVLQELFPQPGRLQFIYADLGDQKTVNKIFAENAFDAVMHFAAVAYVGESTLEPLRYYHNITSNTLLILEAMASHGVKTLIYSSTCATYGEPEKMPIVETTRQLPINPYGKAKKMAEDIILDFTKGRKDMAVMILRYFNVIGSDPEGRLGEAPRPELREHGRISGACFDAALGIIPGLKVKGTDYPTTDGTCIRDYIDVTDLVDAHVKALNKAEPSKVGIYNVGTGRGRSVKEFVDACKKATGVNIKIEYLSRRPGDYAEVYGDPTKINTELNWTAQYTDLKESLSVAWRWQKSHPRGYGSN

SEQ ID NO: 50115 - protein, 227 aa, Oryza sativa
MLALVVSPFRFEAHRQELPSPVGELPPPRPQARPHHRRRGAPHPPPPLPVGQPLVPHRPQPPRPHRQRDQELLANPHAQDRPPRQEEDQFTIAGADDLLRFLVLLAHHGDDDDGDGCGAARKQQLRRRRRGRRPAGGGVHHAGEPAADDGLHHGPALERHRGGGSRYELLRRGGDGLAAVAGLGILHRLLAVEDRRRGVLQEDARCLAIVLLKLQTSNALIQLLLLA

SEQ ID NO: 50116 - protein, 531 aa, Oryza sativa
MAPPLVYLSPTEDGTGASTLMKAAFCGNLGSLKGAMPIKRLEIEKVKAQDAVLAFKNDGIGLLHAAACQGQLNVCKFLVEELGGDVNIAGAQGLTPFMAAAESDDVPTVKYFLDHGGDVTKADVRGCTVLHHAAGTGCCKVTEFLLSKGIPVDIDCGLGTPLLHAANDDKDKTLKILLDHKADPNVIVNNGACSLLMSSLVCRSLKCMKLLIKAGADVNGKGALVSPLMFAASQGCYTNFIKFLLKAGANPNIPDDLGWLPVEHAALRDCREDVERLFPLTSPIPNVPEWSVNGIISHAKVKDIRPMTIDHGPTTVLYTNRSICRLLMGDGEDAQSDGNRSRMMRPNWEKACYRWSAGHMLLKEYKQLWDALMDAQKLDPGSVEIEKEQREYDIQESKDVVESKVGLYDKPTASYGVKPPNVSSVMGKTQVFVKHPHGTLSLQIDTCKDVVFLKEEVEKRMRLDVSGSFFVYQMSTLEAGIPLSSYGIGKDSNIYMCGRLLGGQRFHGSRRVHGRRKFHGRRKFKTLSQFF

SEQ ID NO: 50117 - protein, 389 aa, Oryza sativa; identical to SEQ ID NO: 46112

SEQ ID NO: 50118 - protein, 389 aa, Oryza sativa
MSHRKFEHPRHGSLGFLQRKRSSRHRGKVKSFPKDDVNKPCHLTSFVGYKAGMTHIVREVEKPGSKLHKKETCEAVTIIETPPIVVVGLVAYVKTPRGLRSLNSVWAQHLSEEVRRRFYKNWCKSKKKAFTKYALKYDSDAGKKEIQMQLEKMKKYASVVRVIVHTQIRKMKGLKQKKAHLMEIQINGGTIADKVDYGYKFFEKEIPVDAVFQKDEMIDIIGVTKGKGYEGVVTRWGVTRLPRKTHRGLRKVACIGAWHPARVSYTVARAGQNGYHHRTEMNKKVYKIGKSGQESHAACTEFDRTEKDITPMGGFPHYGVVKGDYLMIKGCCVGPKKRVVTLRQSLLKQTSRLALEEIKLKFIDTSSKFGHGRFQTTDEKQRFFGKLKA

SEQ ID NO: 50119 - protein, 347 aa, Oryza sativa; identical to SEQ ID NO: 46950

SEQ ID NO: 50120 - protein, 417 aa, Oryza sativa
MASRAAAAMVLAGALPVFPGRPLVAAGARCCDGGIRGRVSCSSHRRSDHPSCAAEEGGVVELLKGAVAALAVIAQISVSLPAYAILYSPDTNVPRTGELALRRAIPANPNMKTIQESLEDISYLLRIPQRKPYGSMEGDVKKAMKIAMDNKDAILASIPVELKEKGSKLYTSLLEEKGGLQTLLKYIKENDPDRLSVALASSLDTVAELELLQAPGLSFLLQQQYLEYPRLAGRGVVEFSVEKGDGSTFFPTAGGEPKSVATIQVVIDGYSAPLTAGNFAKLVLDGAYDGIKLKCASQAIIADNENGKKGYTVPLEVMPAGQFEPLYRTPLSIQDGELPVLPMSVYGAVAMAHSVDSDEYSSPSQFFFYLYDKRNSGLGGISFDEGQFSVFGYTTDGREVLSQIKTGDNSFCQACTR

SEQ ID NO: 50121 - protein, 396 aa, Oryza sativa
MDSSILPALLIALFIPILLHLVTRFKYSSYNLPPGSLGFPFVGQSISFLRALRSNTDHQWYQGRIGKYGPVSKMWLFGSPAVLMAGPAANRFIFSNKDLLFTGTRSMNLLSGRNILMLSGEELKQVRGALQNFLSPEMVIRYVSKMDEEVRRHVKVNWVGHKTVKVLPLAKRLTLDIICSVIFGQEAGSVREALATDFPAMVRAALSIPVKIPFTRFSRGLSASQRIRKLLRGIARERETLLQQQQAHGASAADDFFTYMLALRAEGAHSLTVEDIVDNAIFLLIAGYETTSVLITFMLWHLDKEPEVLSKITEEQDEIARNKGPEDALTWDDVSRMKYTWKVAMETVRTIPPIFGSFRTATRDIEYQGYHIPKGWMVSNFWENKSCILSVFSCLT

SEQ ID NO: 50122 - protein, 567 aa, Oryza sativa
MRGDEAKMVCPSINLVQVPVARDKADLNVYRSAGSEVVTILSTKGKCERASIDEVYLDLTDAAKEMLLESPPELLELIFEEATKSNILGLPSDVSNREDSVRAWLCRADADYQDKLLSCGAIIVAQLRVKVLEETQFTCSAGIAHNKMLAKLVSGMHKPAQQTVVPSSAVQDFLVSLPIKKMKQLGGKLGSSLQDDLGVNTVGDLLSFTEDKLQEYYGVNTGTWLWKIARGISGEEVEDRLLPKSHGCGKTFPGPKALKNNASVKTWLDRLCEELSERIQSDLNQNKRIAQTLTLYARACKKNKSDSIKKFPSKSCPLRYGTVKIQEDAMKLFESGLHDFLGSQNTKWSITSLSVSASKIFDIPIGTSSILRYIKGPNSTVSPANLDCSSLPEDPSLGNKLYIAPNHEEHCEPSLSEKEDYGNNSNLAKQCQIKEEKKVSKKLTEVKGTCSILKFLSQSPVLSEKRKIDSLICSHPGPESSSEPNKAEEHKAAQYVDRNKFNTAGSNSASSSTWMFNVEDIDPAVVEELPPEIQREIHGWIRPPKQSSSKTRGSTISSYFQPAKRSG

SEQ ID NO: 50123 - protein, 550 aa, Oryza sativa
MALLLRHSPKLRRAHAILGCERGTVVRHFSSSTCSSLVKEDTVSSSNLHPEYAKKIGGSDFSHDRQSGKELQNFKVSPQEASRASNFMRASKYGMPITANGVHSLFSCGQVVPSRCFSSGADLPPHQEIGMPSLSPTMTEGNIARWVKKEGDKVSPGEDLCEVETDKATVEMECMEEGYLAKIIHGDGAKEIKVGEIIAVTVEEEEDIGKFKDYKAPSSAESAAPAESKPQSEPTEPKKEKEQPKAPEPKATKTEESFLSEDRTFSSPIARKLAEDNNVPLSSIKGTGPDGRILKADIEDYLASVAKGAKKETAAAPGLGYVDLPNTQIRKVTANRLLHSKQTIPHYYLTVDTRVDKLIKLRSELNPLQDTSGGKKISINDLVIKAAALALRNVPECNSSWMNDFIRQYHNVNINVAVQTEDGLFVPVIRDADKKGLATIADEVKQLAQRARDNSLKPEDYEGGTFTVSNLGGPFGIKQFCAIVNPPQSAILAIGSAEKRVIPGAEGQFEVGSFMSATLSCDHRVIDGAIGAEWMKAFKGYIENPTTMLL

SEQ ID NO: 50124 - protein, 51 aa, Oryza sativa
MQFQHPSRWSQGGICLLGLWYILSQNHLMGRFRLSTLGQLVSSVAEDVEHI

SEQ ID NO: 50125 - protein, 465 aa, Oryza sativa
MAELPLAAGLLDLRPCKLAPPPPPPLPVSPSPRHHRRPHSTATACRAAPDLHSSTELADGSIVFRFARPRDDDDEEQQQRRADAVAPGAAAVFKSWLDGDAAAAAEPEARDGGGEGEVTATATGLGAEEVVASGGAEATATSGLEDAGEEASDGSTARDSDTDVYTESSASTVADDDQPAEFAVPPPRRKEVCNKVDWEKDTSEVKNTDRMVPVASSTLVLASGAAILPHPSKAATGGEDAYFIACDGWFGVADGVGQWSFEGINAGLYARELMDGCKKFIMENQGAADIKPEQVLSKAADEAHSPGSSTVLVAHFDGQFLNASNIGDSGFLVIRNGEVYQKSKPMVYGFNFPLQIEKGDNPLKLVQNYTIELEDGDVIVTASDGLFDNVYEQEVATMVSKSLQADLKPTEIAEHLAAKAQEVGRSAAGSTPFSDAALAVGYLGFSGGKLDDIAVVVSIVRKSEI

SEQ ID NO: 50126 - protein, 115 aa, Oryza sativa
MSSTSMSVRSPASFPFPTAAGARGRVGSAQPVGPKLLSSPLPPAATPAVPRRLLFPVAAGIWDFLSGGGAGGAAAASLAVRGGMQLFRQGDVAGSVAEFDRAIELDQRQKKCMYL

SEQ ID NO: 50127 - protein, 290 aa, Oryza sativa; identical to SEQ ID NO: 32176

SEQ ID NO: 50128 - protein, 557 aa, Oryza sativa
MTSDELAGEGEVDGAELILSLPEDVLGLISAHLRPRDLLALSAASRSLRNAVSTADKAWLAQCRRLLPTASHLLAWRTALAHSSLAVCRFLHSAAPLLGLWAHQNPELGNLVLALPGFLSLVAVRSIPQELSPRLLWAPVFELLADHRGHPAFLFLHGAAHDSLFPGLLSSSLHPLANTLFLEAHTSTSTSHFSRLAFADRRRLLNALVAASRLTLPPDVATAPLFARSDADLPLLAARREAMLRLHSQSGGGMVRRAEIEALLIGARKTAALPADTAGDKMRLRRTFSVVAGFVRNSLRQMVTRSASANSRAEYAHPKHLPLDEFLRAGESVGLSLRGARMRLSIYRNWPSMHDNRFVLYKLTTQAPMPGREYAGLWGGSFGWPPGRPEDERKPGKALFFLLLSYEEDSEGKLQLIATKVLEGTHYVVHPNGSSMFIVRVGEPSTETFPWQTDEEPRAVEINRSFAGEGIATGYGFRYPGSKPGSLFVLLDGRLAFVWRENKAVLTLQRLDLEDMIRRGERVPSLPPIPNFAYLTKSYSNVFAVAPGSTSFPASPR

SEQ ID NO: 50129 - protein, 190 aa, Oryza sativa
MTPEAALDHARSVRPRVLLAPSQWQAVKLFSNLNTRCLSIENSNQTHSAKSCEESSEPFSRLASSCHQIQSSNRTHPVRFREQSSEAIVEAEVDGFTTEFDNEHFVLPLWEGMLAKPSSPSRSIDAVVVTEEDLEGYETYADASSDTVSVEVVIRQKPMIRRLSCFLGSLKLTSNCEPSPPRRLAEVRAC

SEQ ID NO: 50130 - protein, 1076 aa, Oryza sativa; identical to SEQ ID NO: 44912

SEQ ID NO: 50131 - protein, 157 aa, Oryza sativa; identical to SEQ ID NO: 46516

SEQ ID NO: 50132 - protein, 398 aa, Oryza sativa
MGNAFRCMSRKEHRGGGGAAVSRSKRMGSARSGRGGGGGKLTPAEEELLHRQALAMAIHQHLDAGGSMSRRIDAGGSMSRRIGPGSTSSRRRGDLPDSVTGAKPVQIVLENLETKKIVLVHGEGFGAWCWYKTISLLEEAGLDPIALDLTGSGIDNADTNSIATLADYSKPLIDYLNKLPENEKVILVGHRCGGASVSYALEQCPKKISKAIFLTATMVKDGQRPFDVFSEELASADVFLQESQLLIYGNGKDKPPTGLMFDKQQIKGLYFNTSPSKDTVLAAVSMRPIPLAPIMEKLSLTPENYGTVPRYFIQTLDDRMLSPDVQEKLVRENPPDGIFKIKGGDHCPFFSKPQSLNKILLEIAQIQAPTALLPGKAKTEAIEATEAKTEEEKTEKLS

SEQ ID NO: 50133 - protein, 425 aa, Oryza sativa
MEAPRLRLPFLLLVALVVSPPAVAAAASRMRIEPLPTAALRRLYDTSNYGKLQLNNGLALTPQMGWNSWNFFACNINETVIRDTADALVSTGLADLGYNYVNIDDCWSNVKRGKKDQLLPDPKTFPSGIKDLADYVHGKGLKLGIYSDAGIFTCQVRPGSLHHEKDDAAIFASWGVDYLKYDNCYNLGIKPKDRYPPMRDALNSTGRQIFYSLCEWGQDDPALWAGKVGNSWRTTDDIQDTWKSMTDIADKNNKWASYAGPGGWNDPDMLEVGNGGMTFAEYRAHFSIWALMKAPLLIGCDVRNMTKETMEILSNKEVIQVNQDPLGVQGRRILGQGKNGCQEVWAGPLSGNRLAVVLWNRCEESANIIVKLPSVGLDGSSPYSVRDLWKHETLSENVVGTFGAQVDVHDCKMYIFTPAVTVASS

SEQ ID NO: 50134 - protein, 891 aa, Oryza sativa
MVYRFHEDEHGEVVAESRRNNLEPYIGLHYPATDIPQASRFLFRQNRVRMIADCHAAPVRVIQDPALTQPLCLVGSTLRSPHGCHAQYMANMGSIASLVMAVIISSGGDDDHNISRGSIPSAMKLWGLVVCHHTSPRCIPFPLRYACEFLMQAFGLQLNMELQLAHQLSEKHILRTQTLLCDMLLRDSPTGIVTQSPSIMDLVKCDGAALYYHGKYYPLGVTPTEVQIKDIIEWLTMCHGDSTGLSTDSLADAGYPGAAALGDAVSGMAVAYITPSDYLFWFRSHTAKEIKWGGAKHHPEDKDDGQRMHPRSSFKAFLEVVKSRSLPWENAEMDAIHSLQLILRDSFRDSAEGTSNSKAIVNGQVQLGELELRGIDELSSVAREMVRLIETATVPIFAVDTDGCINGWNAKVAELTGLSVEEAMGKSLVNDLIFKESEETVNKLLSRALRGDEDKNVEIKLKTFGPEQSKGPIFVIVNACSSRDYTKNIVGVCFVGQDVTGQKVVMDKFINIQGDYKAIVHNPNPLIPPIFASDENTCCSEWNTAMEKLTGWSRGEVVGKLLVGEVFGNCCRLKGPDALTKFMIVLHNAIGGQDCEKFPFSFFDKNGKYVQALLTANTRSRMDGEAIGAFCFLQIASPELQQAFEIQRHHEKKCYARMKELAYIYQEIKNPLNGIRFTNSLLEMTDLKDDQRQFLETSTACEKQMSKIVKDASLQSIEDGSLVLEKGEFSLGSVMNAVVSQVMIQLRERDLQLIRDIPDEIKEASAYGDQYRIQQVLCDFLLSMVRFAPAENGWVEIQVRPNIKQNSDGTDTMLFLFRFACPGEGLPPEIVQDMFSNSRWTTQEGIGLSICRKILKLMGGEVQYIRESERSFFHIVLELPQPQQSASRGTS

SEQ ID NO: 50135 - protein, 466 aa, Oryza sativa
MISLEECCWEMQLQQQQKRGATQQQLVVVPIRVRKDGWASDAMLYVNVELVDANTPSENIGRTVSFRESRARTTTPAPTMRDNRKSLEAGTYHEVLDLKQLLDLADREHKVAVYSRSKRNSDSSSVSSMSSVSSSSTISISSASSSGGASPEPGLSSKRRLLPWRRKSRDFDKRSSESLSQELPMKYMDDDLAGSWETREFTSRDSETKLRTPVFFASIDQRDDSAGGESACTALVAVLAAALHANHPTMPTRPELDALIRDGSSEWRRLCDDEAHMAAFPNRHFDLETVLAARARPIAVQHDRAFVGFFQPESFASLSGAMSFDDIWREIAAAAGGEPGRADVYIVSWNDHFFVLKVEGDCYHVVDTLGERLFEGCDKAYMLRFDATSEMRSVSPPPSSPSPEEEVIVTGKECCREFIKRFLAAIPLREELEMERKGCADAPHRRLQIEFHFTVLKEEEQDQARR

SEQ ID NO: 50136 - protein, 607 aa, Oryza sativa
MAAAERPSRSDVDFADVFGGPPRRSSGHDSLRRSSMDSSFGSATKGRSGAEERPVFGDRTSSDRRRQLGQEFYKDIFAGSESMSPRRGGAAGDLDVFGAQASPGSTSRLHSSFSMKFNGGLDSSVPTSPSRHTSNKNDDGISYAYSVPTSPNSSMNSFLAQGAPQQDSTKNPFSWHRYPFLSRFRSNSGDKKDTSHYVSSMDSEYEGTPVSLESSIANNKFHFSFYKWGGKGAVLVLPTTAQENAGDIVGVRSFPQVIVQGMDLIDEEDSTSTATGASKSQTDYEDYKSGKDVSLGALLKTKDGALPLAFDDYVLGDKSEESGTKHNTNNAKNNVLGASPSSKSSRSPSGEKSRGSRVKGKVKDFMKIFSPESSPKSKRDRTSSGKNGSKSGPEDKFSISNSEVDDNVRTANMNKQNVFPPVPSPISEAQDRTEIPVFTVDNEMDSKADFGRKEVTPPSFDESSDAQTKYKVDEITDLAEGPVEDLEECVVEDVSEDFILRNNEEKEQIKISESKIWEWSKGKEGNIRSLLSTLQYVLWPESGWKPVPLVDIIEGAAVKKAYQKALLCLHPDKLQQRGAAMHQKYIAEKVFDILQEAWKEFNTVTFG

SEQ ID NO: 50137 - protein, 262 aa, Oryza sativa
MAEICCEEAMSPPATATAAVAAAVSASAAAAVSSAIDRRRRRMEMRRIRIASDLELQAGEDGRPGKRQRLARTASGAPRPDEDSASERPSCGRTEEFPRYGVTAVCGRRREMEDAVSIRPDFLPASGKFHFYGVFDGHGCSHVATTCQDRMHEIVAEEHNKWASGEVAPWRDVMEKSFARMDGEVGNRASTRSDDEPACPCEQQTPSRRDHAGSTAVVAVVSPTQVVVANAGDSRAVISRAGVPVALSVDHKVRICSHHRAG

SEQ ID NO: 50138 - protein, 674 aa, Oryza sativa
MSRQPPTQELVAKDLHGVEWRFRHIFRGQPRRHLLQSGWSVFVSAKRLVAGDAFIFLRGENGELRVGVRRAMRQQTNVPSSVISSHSMHLGVLATAWHAVNTGTMFTVYYKPRTSPAEFVVPYDRYMESLKQNYSIGMRFKMRFEGEEAPEQRFTGTIVGMGDSDPAGWPESKWRSLKVRWDEASSIPRPERVSPWQIEPAVSPPPVNPLPVPRTKRLRPNATALPADSSAIAKEAATKVVVESEPNGTQRTFQTQENATPKSGFGNSSELESAQKSIMRPSGFDREKNNTPIQWKLGSDGRMQMSKPESYSEMLSGFQPPKDVQIPQGFCSLPEQITAGHSNFWHTVNAQYQDQQSNHNMFPSSWSFMPPNTRLGLNKQNYSMIQEAGVLSQRPGNTKFGNGVYAALPGRGTEQYSGGWFGHMMPNSHMDDTQPRLIKPKPLVVAHGDVQKAKGASCKLFGIHLDSPAKSEPLKSPSSVVYDGTPQTPGATEWRRPDVTEVEKCSDPSKAMKPLDTPQPDSVPEKPSSQQASRNMSCKSQGVSTRSCKKVHKQGIALGRSVDLTKFNGYEELIAELDDMFDFNGELKGPKKEWMVVYTDNEGDMMLVGDDPWIEFCDMVHKIFIYTREEVQRMNPGTLNSRSEDSHANSMERGSVGREMRGCLSTSSLNSENC

SEQ ID NO: 50139 - protein, 169 aa, Oryza sativa
MFIANECQGGTAAPPNFDHGAIAELYSTHDTSVEISKRRTYACHVVCSPCVQKPISCSLTITIVIHDHLFLSEMHLLCCSIRSRFPGKQHAHHLGHEQSRLLLGLCQVHLHLTLVLVFLNDITRNIISSNDAEILLVYYGYRVHPQAHGYTIVAFHPRVFQGYRIYFIP

SEQ ID NO: 50140 - protein, 375 aa, Oryza sativa
MSGGSGGGAASAVFYAEKYHPIQAGSIDGTDVAPHDNAVLRALLCSTAGLYDPFGDPKATGDPYCTVFVGRLSRYTDDETLRKEMSRYGRVKSMRLVRDIVTGASRGYAFVEYETDREMRRAYEDAHHSIIDGSEVLVDYYRQQLMPGWIPRRSGGGLGGKKESGQLRFGGRERPFRAPLRPIPYDELKRLGIPPPPEGRYMTRYQVPPPPRRKSSDIYREESPPKRRSKDRVDSSHYRRYCSPTQDDDSTVNTHRRKGSHDRREETERRTRAYISREAGSYSKRSPTEDDGDRRKRRRSREPGELSPYKEDDDNSKRGRSSVEPGFSPYQSHHHRHHRERHDSSSHSRHGERRHQDDRGNHSRNRRSESRDYSH

SEQ ID NO: 50141 - protein, 180 aa, Oryza sativa
MTSTSAVMPCSPAKSSMAWQSLMPPTQLPVMPFPPGTMAYAGSSSGLVGPPTNTICAIGFISENSGAIGCQADTVLRIPSMVAAAAAIWPASRLTRNSSAPRCSSASCRFPGDVLMTVTRIPNALANLTATWPSPPRPTTPTCFPGAFRPWITIGLYTVTPAHSSGAALSSGSPAGTRST

SEQ ID NO: 50142 - protein, 646 aa, Oryza sativa
MRPTAMLRWPAAAAALALVFLLLIAAAPPAAAFYLPGVAPNDFQKKDPLQVKVNKLSSTKTQLPYSYYSLPFCKPDTIVDSAENLGEVLRGDRIENSPYVFEMREPKMCQIVCKATISDKQAKELKEKIEDEYRVNMILDNLPLVVPITRPDRDDVVFQGGYHVGVKGQYAGSKDEKYFIHNHLIFLVKYHKDENSDLSRIVGFEVKPFSVKHQFEEKWNDANTRLSTCHPHANKIIINSDTPQEVEAGKDIIFTYDVGFEESDIKWASRWDTYLLMTDDQIHWFSIVNSLMIVLFLSGMVAMIMLRTLYRDISRYNQLETEEEAQEETGWKLVHGDVFRPPTNSDLLCVYVGTGVQFFGMLLVTMMFAVLGFLSPSNRGGLMTAMLLIWVLMGLFAGYASSRLYKMFKGSEWKSITLKTAFLFPGIAFGIFFVLNALIWGEKSSGAVPFSTMFALVLLWFGISVPLVFVGSYLGFKKPAIEAPVKTNKIPRQVPEQAWYMNPAFTILIGGILPFGAVFIELFFILTSIWLHQFYYIFGFLFLVFIILIITCAEIAIVLCYFQLCSEDYMWWWRSYLTSGSSAIYLFLYAGFYFFTKLQITKLVSGILFFGYMLLASFSFFVLTGTIGFCACLWFTRLIYSSVKID

SEQ ID NO: 50143 - protein, 198 aa, Oryza sativa
MSPPLELDYIGLSPPPPPPSSSSAAAARADDVDLKGTELRLGLPGSESPDRRPAAIAAAAATATTLELLPAKGAKRVFPDEAALTPPTAAAGKGKAAREGEEVGAEEEDKKVAAPPQPAAKAQVVGWPPIRSYRKNTMATNQIKSNKEDVDAKQGQGFLYVKVSMDGAPSEEGGPQNLQELQGHVFGSRENVHWLQHR

SEQ ID NO: 50144 - protein, 542 aa, Oryza sativa; identical to SEQ ID NO: 31536

SEQ ID NO: 50145 - protein, 227 aa, Oryza sativa; identical to SEQ ID NO: 32151

SEQ ID NO: 50146 - protein, 358 aa, Oryza sativa; identical to SEQ ID NO: 42604

SEQ ID NO: 50147 - protein, 103 aa, Oryza sativa
MVKEMPKKVLVKEVQRLQLALGEQTKMAKLSQQQCDKLKNEQILCRICFERDICIVLLPCRHYVLCEACSDKCRSCPICRVSIENKLPVCDAMSSADSISDTV

SEQ ID NO: 50148 - protein, 357 aa, Oryza sativa
MPPHPSLHRLYLTCFNEYKSAVVVVGDEELHLVAMPSKVEKVPCFWCCSVRSGIYAASVGMLNLRCLAIVFDLDETLIVANTMKSFEDRIEMLSREMDIEDDPVRIAGMSAEIKRYIEDRELLKEFIDTDTVTDNGRIVGTQKEEVLPISGGQERVLRPVIRLPERNAILTRINPEVRDTSVFVKLRPAWEDLRSYLTAKGRKRFEVYVCTMAERDYALEMWRLLDPEANLISSHNLAERVVCVKSGSKKCLQNVFKDKGCHPKMAMVIDDRLQVWDEKDQPRVHVVPAYTPYYAPQAEMANAVPVLCVARNVACNVRGGFFREFDENLLRKVFELMYENELLDLPYAPDVGDYFSL

SEQ ID NO: 50149 - protein, 121 aa, Oryza sativa
MDKGWMKASRSSIEYNIGVNKFIDFALSTSASDNRILCPCKTCGNRYWLGEHEVREHLICDGFLAGYTSWIHHGESMLNSKPSDASSSHCEEHNDDMDQMLLDGLGMYDIRTLGTNDGPNS

SEQ ID NO: 50150 - protein, 357 aa, Oryza sativa
MDANQVRQDKNGCTPLHWAAIRGNYEVCTVLVHAGTKEELTLKDSGGFTPVELANDKGHRHLSYILSNATKVTFEDKYCSGRSRKIGYASILFCFLIVLITLFLNSIIFAPNFSRITAAVGIWSWGAISLAFASLVMFYRVSRKNPGYIQANTKRLDPKEPLMEIDLNSSAWTGNWSQLCPTCKIIRPMRSKHCPTCKHCVEQFDHHCPWISNCVGRRNKWDFFVFLCMGTTTAFLGAAIGFHRLWTEPIILSSSESWINFMLSNHPGAVLFMFMDVFLLTGALILTGAQATQIARNLTTNEAANQSRYAYLRGPDGRFRNPYSRGCRRNCADFLVNGYSNDEEAAWPTLQQTVQRS

SEQ ID NO: 50151 - protein, 120 aa, Oryza sativa
MAAAVAELWETLKQAIVAYTGLSPAAFFTAVAAAAALYHVVSGIFAGPPPPPPPRPRDEPEAEPLPPPVQLGEVSEEELRQYDGSDPKKPLLMAIKGQIYDVTQSRSVPYVSEIISFFPL

SEQ ID NO: 50152 - protein, 480 aa, Oryza sativa
MVEAASAAPATVVVPLTQTLCANAPATSVTVVSKQTVRPDGASAVGDVKLSVSDMPMLSCHYIQKGLFFPPPGVPIASLVSSLVCALSRALAVFPALAGRLVTLDDGRIVIRCDGVAVEFYHAVAPALSLGDFLVPNADVPTRLTKDLFPMDRTVSYDGHRRPLTSFQLTVLGDGAVFVGFVANHAVVGGTSFWHFFNTWAGLCRGTPVQPPGLRRNFFGDSTAVIRFPGGAGPAVTFDADAPLRERVLHFSAAAIRELKAKANQWKRSDKFAEANGKHVDETKAHGGYREISSFQSLCAHIWRAVTRSRRLLAADATTTFRMAVNCRHRLRPAISPLYFGNAIQSVATTATVAELASNDLRWAAARLNATVVAHEDGAIRRAAAEWEAAPRCFPLGNPDGAALTMGSSPRFPMYDGNDFGWGRAIAVRSGRANKFDGKMSAFPSQAGDGSVDVEFCLAPDTMARLLGDHEFLQYVSRAP

SEQ ID NO: 50153 - protein, 314 aa, Oryza sativa; identical to SEQ ID NO: 47929

SEQ ID NO: 50154 - protein, 391 aa, Oryza sativa
MVNLSLAGCRSMTLLKLSCPNLQNVNLDGCDHLERASFCPVGLESLNLGICPKLSDLHIEAPKMSLLELKGCGVLSQASINCPRLTSLDASFCRKLMDDSLSQTAEACPLIENLILSSCVSIDLNGLSSLHCLHKLALLDLSYTFLTNLKPVFDSCPQLKILKLSACKYLSDSSLDALYREGALPMLVELDLSYSSIGQTAIEELLSCCTNLVNVNLNGCTNLHQLVCGSDDCSSGDMPVDVCPPDSAPVRSEEISERSDRLLEVLNCTGCPNIKKVIIPSMTTYLRLSKINLNLSTNLKEVDLTCSNLYTLNLSNCSSLEVLKLDCPRLTNLQLLACTMLQDEELESAISRCSALEILNVHSCPKINVLDFSRLRVVCPSLKRIQSSLIT

SEQ ID NO: 50155 - protein, 243 aa, Oryza sativa
MVTSRGINHIYDIRIDKVYMPYLPIAAGDLSVHTAWLLVILFAFAGFSIVATNFGPFITSLSRLGLFLGTIYSVPPFRLKRYPDAACLIIATVRGFLLNFGVYYDTRAALGLTFQWSSPVAFITCFVTLFALVIAITKDLPDVEGDRKYQISTLATKLGVRNIAFLGSGLLIANYVAAIAVAFLMPQAFRRTVMVPVHAALAVGIIFQTWVLEQAKYTKDAISQYYRFIWNLFYAEYIFFPLI

SEQ ID NO: 50156 - protein, 437 aa, Oryza sativa; identical to SEQ ID NO: 40821

SEQ ID NO: 50157 - protein, 327 aa, Oryza sativa; identical to SEQ ID NO: 36377

SEQ ID NO: 50158 - protein, 540 aa, Oryza sativa; identical to SEQ ID NO: 44090

SEQ ID NO: 50159 - protein, 436 aa, Oryza sativa
MRGLLACATLARRAAGATSTARRHLAGAADVAEAELKKTALYDFHVAHGGKMVPFAGWSMPIQYKDTIMDSTLNCRANGSLFDVSHMCGLSLHGRQAIPFLESLVVADVAALKDGTGTLTVFTNDRGGAIDDSVVTKVTDQHIYLVVNAGCRDKDLAHIGEHMEAFNKKGGDVKWHVHDERSLLALQGPLAAPTLQLLTKEDLSKMYFSDFKMIDINGYACFLTRTGYTGEDGFEISVPSENAVDLAKALLEKSEGKVRLTGLGARDSLRLEAGLCLYGNDMEQHITPVEAGLSWAIGKRRKAEGGFLGADVILKQLQEGPKIRRVGLLSQGPPPRSHSEIVSNSGENIGEVTSGGFSPCLKKNIAMGYVKSGLHKAGTEFKVVVRGKSYDAVVTKMPFVPTKYYKPSWICTKDAPSVEIFSCNSLVAACSAAPQL

SEQ ID NO: 50160 - protein, 378 aa, Oryza sativa
MDPYTSRAPASGGVAAGDDDEEAACLQAFELMCIFTVPMTLKAAIELGLLDALAAAGDGRALTADELAAARLPDAAPDKAEAASSVDRMLRLLASFDVIKCSTEAGPGGEPPRRQYSPAPVCKLFTAGGNSHRGSLAPSVLFGVEENYLCTWRQLAAAVGGGGPSAFERAHGMRMFEYMGTNRRLNTLFNQAMAQQSMIVIDKLLDRFHGFDGVGVLVDVGGGTGATLEMITSRYKHITGVNFDLPHVISQAPSIPGVKHIAGNMFESISNIGDAIFLKMILHMQNDEDCIKILKNCHQALPDNGKVIAVEIVLPTIPDLAQTARYPFQMDMIMLSNSRGGKERTELEFAKLATDSGFSGALRTTYILANYWVLEFSK

SEQ ID NO: 50161 - protein, 306 aa, Oryza sativa
MECLTTSFTRNPGREYSLICPSEALSEKQRIQRRVLCYFPASTNSRRCRKFTTMAYPVSPIAGRRSNWRSFAASLNLEDGPASSDSTSSPSEQTSDGGEVYGDPSENLNSRKLKSDELKSLLADSERSKLLKKLSEANQYNRFLKRQLQMKDNDVVKFKSELAVMELELQALVALAEEIANFDVPSGSRKINGKYIQSHLLTRLEAVHDKVMEQIKDVDSLKHQEISVFWVGIAENVQIMGSFDGWSQGEAMSMEYSGYQARFSATLNLRPGRYEIKFLVDGEWRLSLEYPIDGEGSMQNNILVVN

SEQ ID NO: 50162 - protein, 477 aa, Oryza sativa
MGAAAAHVLVFPMPLQGHINVMLHLATALAAAAGVHVTFLHTDHNLHRLGNAAAATTAGSPRRLRFLSVPDGLPDDHPRSASDVPVMVDSLLGAGQAAYRALLGSLLVGSGGAGGFPPVTSVVADALLTFAIDVAEELGVPALAFRTASASSLLAYMSVPRLFELGELPFPPGGDLDEPVRGVPGMEGFLRRRDLPSTFRRHGNDHDVHPKLQMLVDLTTGSCKARAVILNTAASLEAPALAHIAPRVRDVFAVGPLHAMSPAPAAATSLWREDDGCMAWLDGQADRSVVYVSLGSLTVISPEQFTEFLSGLVAAGHPFLWVLRPDMVTARLQHADLQEAVAAAAGHSKARVVRWAPQRDVLRHRAVGCFLTHAGWNSTLEAAVEGVPTVCWPFFVDQQQQVRGRRVGDGAGHEGRVRRRRRGEDGEGGDGVRRDQGDGPSAGGEGETGRRRRRLVGDGVQEARRLPSGARHAYPTR

SEQ ID NO: 50163 - protein, 612 aa, Oryza sativa; identical to SEQ ID NO: 36770

SEQ ID NO: 50164 - protein, 534 aa, Oryza sativa
MADAATTPLLTSHEAKPAKALSIDDAIETYIGATGARQLLTAMLLAFAWAFEAQQVFMSVFTDAEPTWHCTGVAAGDPGSFCSLAAASASASACALPPGTWEWDRPAETSVVSEWALKCGGGGPALVSLPASSFFAGNLAGGFMLTTLADTLLGRRKMLVLSLVTMSVAGVLTVFSPNVWVYAALRFVCGFCRSTAGTSAMVLSTELVGKWWRNTVSVAAFVFFSVGFMSLPALAYTLREASWRNMYVWTSLPSLCYAVLLYFLVQESPRWLLVRGRKQEAIAALRQIASLNGGEGITTSSFTKLETCAGEVGDGVPGGEGMFSTLRSICERRWALRRLAAITTATFGVGVVYYGMPLSVGSLSSDLYLSVAYNAAAELPSSVLSWLLMGRFNRRSSLVALTAASGLCSLACVVIPDPEAGAGGSHLRLAAELASFFASCAAYDVLLMYSIELFPTSVRNSAVGLVRQAGVLGGVVAPMLVALGRERSYWSFGVFGLTVGCLGLFVTFLPETKGRRLSDTMEDEEEAAAVLYGG

SEQ ID NO: 50165 - protein, 58 aa, Oryza sativa; identical to SEQ ID NO: 38573

SEQ ID NO: 50166 - protein, 658 aa, Oryza sativa
MFDTVSRSSVSDYLHEIKVGCENDPSFARGRNLITYAVKLMESTSPDGYLSGARILDTLIKFNRDDASGSELPGQSMQIYNMIGSASSSPILHNLVQMLDFKSAYDGEIRLRAARIVEHFAGEVRLDKILQGIRCVSSLLELEQKGFQNDHHSSFQEDDGDQLSFEEEDDHQISVKEKDYYPKDYKQMQLTGMQILLKLSYDKNNLFLMSNTDDPALINKIVALITSKGSLHKKQHNEWSCMAELGVKILSRFMRFMYGPTKSNNILWHEISTSSKAIGTLESILECDQCDSVLKKHAIRILKRIFMDTSSAMGEGDRERFIGSLMDMSLHNSNGDFQNLAGVDLALKKQGLSILKEIYLNPSSIMGEGDRERFIGSLMDMFLDNSKGDFGNLPGEDLDLKKQELSILKEICMDPSSFMGEGDREKFIGTLMDMFLHNSKGDLFEKLAGDDLVQICRRSGSSATIILRKYGHDIVDCIADTRSSVYSSMHRKIAAKILNHLCSPYSTDEEHLQNLKEAIIDLIPKVLREALGWGLTGEEILRVAVSGLEGTQDDDWKLQEALASLCATVFNRIVSKDADLTARFNNIAAGICDQTTKPRMTFADLINEAVKVHRIEFKKPEKPKPAARPELYEFVTAKYTPPHFMFLGEEDPNACCIS

SEQ ID NO: 50167 - protein, 557 aa, Oryza sativa
MDRDPSVSDEDDDLETLVPQNHVKPPSSSFHVAGLRAAVPPSAASLGRVLWSRRYLLLFVALPVLFLVLFVSLGGASSLRLPASIRLPSAAAPAADPAASRMRDAELRALYLLRSQRSGLLALFNRTAAPTNGSSSGSNAVSYADLHDALLGQIKINREIQAALLSAHRTGAAGNATEDGLDLDLPADGCRRRELPSNRRTIEWNPKKDRFLFAICVSGQMSNHLICLEKHMFFAALLGRILVVPSQKLDYQYDRVLDINHINDCIGRKVVITYEEFTENRKKVSIDQFICYAASPPCFIDDDHVKKLKGLGISLGKIQAAWPEDAKLKEPKKRFVGDIMPKFTTDAEVLAIGGMFYADVEEEWVMQPGGPLAHKCNTLIQPSRLIMLTAQRFVQTFLGGNYIALHFRRHGFLKFCNVKKESCFFPIPQAAECILRIVEKANAPVIYLSTDAAESETSLLQSLVVFNDRQVPLVKRPEHHNSEKWDALLYRNHMGGDNQVEAMLDKTICALSNVFIGASGSTFTEDILRLRRGWGSASHCDEYLCQGELPNFIAELD

SEQ ID NO: 50168 - protein, 253 aa, Oryza sativa
MPRPRGRKRAAAAAEEEDAATRGRGKRVKASPKPETEAEYFPDKRNLEDLWLSAFPVGTEWENIDKIKEFNWNFENLEKALEEGGELYEKTVYLFGSTEPQLLGVNGESKIVLIPIVVAVDCPFPPSDKIGINSVQRENEEILPMKAMKMAWVPYFPLEDRLSRIDSLKTKIFTLGCTQRRSALRHLKTERVKLFDYCMPYYMPLNPPENEDDTVINILYPFEPPVFCEFNWEMDDYEVCTNLVVLLWFYLWK

SEQ ID NO: 50169 - protein, 322 aa, Oryza sativa; identical to SEQ ID NO: 38328

SEQ ID NO: 50170 - protein, 520 aa, Oryza sativa
MFVALICVCIVVGHLLEESRWMNESITALIIGLGTGGVVLMVSSWKHSRILVFSEDLFFIYLLPPIIFNAGFQVKKKQFFRNFMTITLFGAIGTLISFSVISLGSLGLISRLNIGSLDLGDYLALGAIFSATDSVCTLQVLNQDETPFLYSLVFGEGVVNDATSVVLFNAMQNFDLANFSSVKFLQFIGNFLYLFATSTFLGVAAGLLSAYIIKKLYFGRHSTDREVSIMMLMAYLSYMLAELLDLSGILTVFFCGIVMSHYTWHNVTESSRVTTKHAFATLSFIAETFLFLYVGMDALDMEKWKIVGETFSPMKSIALSSTILFLVLVARAAFVFPLSFLANLTKKTEEGKISIKQQVIIWWAGLMRGAVSIALAYNKFTRSGHTQLPSNAIMITSTITVVLFSTMVFGLLTKPLIRLLIPARHLNRESSALSDPPSPKSFLDPLILNGSDVDPEIGVGIRRPTSLRLLLASPTQSVHHYWRKFDNAFMRPVFGGRGFVPFVPGSPTERSVPLLQGNEN

SEQ ID NO: 50171 - protein, 93 aa, Oryza sativa
MPETGRTAAGRRRRPHRRRRSPRPRGSSASSASGSPATRTRSAATSSSATCRSGAAARASSAPPPRPHRGRLSRSGGGGVREGSSSARRAPRL

SEQ ID NO: 50172 - protein, 283 aa, Oryza sativa
MRWDAAEAEEVLERIWDLHDRLSDAILAVSRAHFLLPPPPPPPPPPPSQPSAPPAREGRNGYVFVKGLKGGGGGGGGGVGDGVGVGSAKAAAAEAMAEARSLHAIRTALEDLEEHLEFLHTVQSQQRAEQDAAIARLEQSRLVLAMRLAEHQGKKYRVIDEALAFVGEVGDKSRFISPEDVRATHNQSGEDVMDSGSNGSSIMGNVLSCSLSLAKNSFRVDKIGSALGNAAAFAVSMFAFLQLHQVAFGSKSPAMDYRRHSYHSGSSLQSGKGKQLEVYLARG

SEQ ID NO: 50173 - protein, 454 aa, Oryza sativa; identical to SEQ ID NO: 34726

SEQ ID NO: 50174 - protein, 396 aa, Oryza sativa
MSNPESNPPPPSATSCPPPGSAAHAGHAPLCRSCGAPTTTPVPPPWSASSDSPPPAYRPIRMPAINAPTNTAAIVLSPVPQPLPVPPASPPFAFQVPAKRITSPDDIARFHASVHGRHFLGFVAALSASVHGRKLSDPLPSPPSPVVSALLELISALSAFVASTPQLPHNSRYGNAAFRLWHEKLSDSANQLIAPIMATAGSPDLAGAEAELAPYLLDSFGNATRIDYGTGHETNFAAFLYCLARLGLITEADYPAVVLRVFAAYLDLMRTLQDTYLLEPAGSHGVWGLDDYHFLPFIFGAAQLIDHKYMKPKSIHNPDILDNFSKEYMYLACVAYVKKVKKGPFAEHSPMLDDISGVPHWKKVNSGLLKMYKAEVLEKVPIMQHFLFGSLIKWED

SEQ ID NO: 50175 - protein, 329 aa, Oryza sativa; identical to SEQ ID NO: 38685

SEQ ID NO: 50176 - protein, 258 aa, Oryza sativa
MSQLQKQKRKRKMAPRLTAKRPASLSSRGRNAVLQLWCGSEKWRILQSHRRLPGGVRCSSGSPDSGGGGAPPLVRAAVSAVTELLRVLTPKNPRVVDDDLQKGDEGGGGAELDSPRSVDDVIAVLEADYQRAYFLTGNFTPDIYTEDCLFEDPTIKFRGRSRYSQNLDLLVPFFDSPSLELENIEKGLRVETKFIMATWTLRTYLRLPWRPLIAIRGNTTYDLDEEYKVTRHAESWDVSALEAIGQIFVPAPKQTDDI

SEQ ID NO: 50177 - protein, 207 aa, Oryza sativa
MKTLLQAGANVQISKPIGKAIVADLTSSESMVQILLDSGANADAIDEVMFEDPPIIAAAKRKQMNVVQLLLSSSTPIEGVDWSLNGIIAYTESVTFKAEDDVHTAARVTALRERMFNALENINYLLADICCKALRNDVSTTEWDRLRNLNLLYLSHSFHGQKPVLSSDAIVNMALVYQKQDKGKEVMCLKAALALNPQNERAESLLR

SEQ ID NO: 50178 - protein, 443 aa, Oryza sativa
MASDTKAVAALFSMYNDDEEEDDGDEPRPPSPPAAATSSSPSPQTEGEGSNPNPNAAASSAPPSPPLAEDPAGRRTLASPYPSPGLPPLPSRRSSSPFAISSPSPLRPAAAMPPADLPRPPRRGPLAIVDYAHDETAMSPEQEDGEINGIDRSGLDAQVAEGNYEEKTLSGIVHILTPNIRSEMSQQNDAPEQNQVGAAAAMSVTGAEMEDVQVEEAADNMQNDDPLSRFLPPPVTAKCSAALQQKINKFLAYKRAGKSFNSEVRNRKDYRNPDFLQHAVRYQEIDQIGTCFSKDVFDPYGYDRSDYYDEIEADMKREVERKELEKKKSGKVDFITGGVQAPISAAIPKIAAAVSAAAAAGAPLVSISGEGVQKEARPNKKSKWDKVDGDIKNPVAPSGLDNLSAAALLTSANVGAGYAAFAQQKRKEAEEKKTSDHKSDRRS

SEQ ID NO: 50179 - protein, 533 aa, Oryza sativa
MLSNYRAQPAPPLAEPLLLDKPQRAHWLRQLKPWRRNAADDHLSAGIAINWSSVRSATKDWITNPMNIAMLLWLLCVAVSGAMLVLLLLGLLDGAFPTPAARNHWIEINNQVLNALFTLMSLYQHPVLCHHLFLLCRWRPADAADLRAAYFKDGAGPRHGERAHMAVVVALLHLTVACQYVLCGLYWGYTKKTRPELVENGFFVLGVVAPVVAVVYTVCSPLGKDNYGELACPNAFDSVSQHKCTGHAVVEPEWAGGMFDCGGDATAWWLSLSCTFCAFGWNMERLGFGSMFVHTATFVLLCFAPLWVMGVSALHIHDVVIGDMVGGAGALLCVCGLLYGGYWRIQMRERFGLPASTACCGSPSVTDYARWLFCWPCALAQEVRTESLYHIDCETFYKKLPVVDDVEDEKRLPLLASHHVQFHEPPDTMIMAASEGSNDHVVIVHEEMVPPAVQVVVEQVVVEGDKSEEECSAVHDEKIMGSPLPESVVIVDDDEIPASLSDGSWTVEKVKRLINVVTLVSLLILLYTRGFIR

SEQ ID NO: 50180 - protein, 352 aa, Oryza sativa
MISVVYICTHVSIFFYLLPSLLDTWIRTYVADWVFAMQVPGQGGHHGGGPGSVAGEDEPDIGGAGGDGDGGGGGEDGGEAAAHLVDLHPLLGGVLPDDHLLRRAGHPHGPPPPPGRRPRRVRHPGGLPLRLHLPLHPPLHLPQRARPRAGGPPPHPPPPGPHLAPARRRGPRPRHRRHGHLRARREEAARRRQRRRRRRHDQRVLAGAAVLPGGRRRGVRVRRAAGVLHPRGAGADEVDEHGALPGDAVHGILPQQLPRLRRRRRHAGGVDTERPRRRQAGPLLLDAGRARGGQLRRVPRVREAPRVQAARRHGRRGGGARRCQGRRRRRGEGDGRLRRGQGGRRRDGCVDV

SEQ ID NO: 50181 - protein, 394 aa, Oryza sativa; identical to SEQ ID NO: 48066

SEQ ID NO: 50182 - protein, 394 aa, Oryza sativa
MEPLVRSPVTSPPAIAGAASPSPSRSLSRRRAPPDAAAFPKPWVIPSSSVKSAACLQLQQARAPRRCARLLASAAEGGRRGEEGSPASSSDADDQAEALPFLESDSHHTQTSKHGESGGSNSGGSRAGLFRTPISGGVHTATSVHDLPPPARAVRNLMEQARFAHLCTVMSRMHHRRAGYPFGSLVDFAPDPMGHPIFSLSPLAIHTRNLLEDPRCTVVVQVPGWSGLSNARVTIFGDVVPLPADLQEWAHQQYVLKHQQWASHQWGNFYYYKMQTISDIYFIGGFGTVAWLDVKEYEALKPDKIATDGGEQSLKELNAMYSKPLKELLSTEIEVDDAALISIDSKGIDIRVRQGAQFNIQRIAFELHYSVETLEEAKEAIRRILGKSRWHAKF

SEQ ID NO: 50183 - protein, 47 aa, Oryza sativa
MFLRCCVFNSSPMCNRVGLMATQDQFVYSQSCLTLGVLWSRIACALF

SEQ ID NO: 50184 - protein, 229 aa, Oryza sativa
MDGGRVGGDYISSLLSSSPRLDFGVPVLDAIVAPGGGGGGGDCSLDKLCGDPGFAERAARLSSFNNGGGGVGQRYGGAGAGLFGMPPPAPGDFAGGGSREASSVSDPASSAMKDAAANAKKRKSTAAAAAAAKGKGKEPPVGEEKESDGKRCKTGNGEKESSVKPKAEQAGSDSSVETAAVAGRSKGRGRMPSRWSHPRTMSMSGRGEAKPLTATASLRGSEERGSARG

SEQ ID NO: 50185 - protein, 394 aa, Oryza sativa
MASSPEKKDPPSCGPRDSQPIPCTDDPPLSESPTTDLGCHDPRDEDADHPAPPMGKGDIDEDSDDDGYADEETTCPGQNFTKEQAKEIIRKWLETYDKRNREFMVACEEFQKQGGDETSASCPVFPLKPLPETTDFCTTKSLCYHREYKTNDTSETASTIGWLEPKEMLQIFSLRLSSSMSYPISVYGIFAVRDYLDPLRNYVFNRTRDDPVIVEQDSFTLPLCSPCRGMYVVEYALFEVDLWVKMEGGVSNDKQLVSAYVEIFARGVFNKEIRGRILSDHCYLDIHYMYLSQSIEAVIQVSTEIDSNDPRHVRFTAFCSGFDREILLFNGKFCKDKSFQHIVAMKSKGKLVVHLEFEGSLFCWTFNNGELGAVNSPDDSVLKQFHVRVLFSPK

SEQ ID NO: 50186 - protein, 391 aa, Oryza sativa
MAAAAREAAESPNPRSAPRRAAAAAAKDASSFLSPRFRSAAAQAGWDEESLLHAALVVEDTPVRESRRRRRASTTSSSAGGGGSAGSNTRKRRSWRQPPGSIPPVVFLLDDDEKKPDTTADGKKEVEEEEKKTVVVGEKEACSEKAAATSELPCMDRLREELSCAICLEICFEPSTTPCGHSFCMKCLKHAAAKCGKRCPKCRQLISNSRSCTVNTVLWNTIQLLFPSETEARRTSIASSSETNDDLAQQISQRSNSMAQGGIRSSSSNGIGYITQRSTRSSATNNRSFTTTGSRRSTFVAQEGSSTATGRGFVRASQLVPSARVVSVRSHQSDDAALAYRLQQEEFMTAFESEGERQPPRSSSSTVSAARANLRAMASRAIRLRARGWPV

SEQ ID NO: 50187 - protein, 458 aa, Oryza sativa; identical to SEQ ID NO: 43942

SEQ ID NO: 50188 - protein, 408 aa, Oryza sativa
MAMARRGNGGYQYGAYSYGYGYSKPQVNYHSQSSESVTTVVTKMDEMSVHENAVQKMSSSFREEKVYEQQGGAGGDVQVCRNGGAAAGAVQKHTYEEKKEEEVYEESNHGGGGGGCGGYARQHGAGGGQKHATYQHEVLKGYESAGGGYAAARHNGAGAGGVKKQYSYREEEEYDAGGYARHNGGGVQKQYSSYRRDEEECDAAAGGGYGRHHGAGGGAVKQHATYKQHQAIEGVNGCGAGGYNYNRHQAVAVAGGGQHHYGGATAAAYGNASNKQHFTAAAAGHDSSGGHTQYHHQSYECEEEDSDEDDCEDDDDDESDDDDDDGHCPPSRQGSVHSYHQAAYQHEEKQHAGGRNHYHAYERHEEHGGGAQRYQKYESSTQVGYAGGGGGNGGCVRGNAKPCFRIMA

SEQ ID NO: 50189 - protein, 388 aa, Oryza sativa
MAAAVHLRPIHSLSLPLPLLAAKAATPNPGWLPLSAKPGAGRRRSLLVCAASDPSKAAGKGEAGDAVARWAAWIPRAAVGGAGPEQVLRLISGAAATPICQFVDSPRTFLHAIDPRVKLVWLLALVVLPARSNIYLRFGLVAYLTLLSMWVLPNHIWKDQLGRVALLSGIIFIMLGFGSDGAPSLVQTRTPPPSVIGLPNIPTSTNGYSYTIMKLGPLQFTRKGLSVASTSACLSFAIFQSASLCLTTTTPEQLASALWWFMIPLKHIGVPVPEIILTLLLSLRFINLVFDEVRNSALAIVARRINWEKLATMETIDIFFNYVRRIFKNIFDHAEQISKAMIARGFRGDPNNHKIYFLTESSFGIVDVFSLLCLFALVALASISDKLV

SEQ ID NO: 50190 - protein, 460 aa, Oryza sativa
MSTPAGVAPRRSSRLASSAPPLGAGQPSSSPLPRRRRRRASPSGCAREVDNSPPPVVILDDNEMEQHVEAEEMKKQGEESVEANEAEEKDKDAEVLEELPDWLPDGWIMEVRCGDNGNIYRYYTSPVSGYTFSTKMETLHYLFSEMDERVLESQACADDNELHRMHTWLPDGWAIEVRAGGKKMEKMYKFYVHLPTGMRFLSKENVLLYSNEGKISRCDVKGLCDTSSEDNILAMVEFNPDGLPEGWVKEIIFRKCNDGIRKDPYYTDPVSRHVFRTLKSVINYLETGQITKHAYIPRRSVTDMYSFDRCTDLPQSMLKRLKIQGKAKKKSVGASVKGKKLSNGLASNNCMSSGLDPEIGPEERKLGTVKSITKEAVNSDTIKRSRGRPPKILMPTIESTKPEIALVTSEAIKRSRAEGVNSCLIHLSEPNEKMVKATSAVEPASSNNAKRHGGSPQKKI

SEQ ID NO: 50191 - protein, 702 aa, Oryza sativa; identical to SEQ ID NO: 46495

SEQ ID NO: 50192 - protein, 472 aa, Oryza sativa
MEPNTGVTFDDVAGVDEAKQDFMEVVEFLKKPERFTAVGARIPKGVLLVGPPGTGKTLLAKAIAGEAGVPFFSISGSEFVEMFVGVGASRVRDLFKKAKENAPCIVFVDEIDAVGRQRGTGIGGGNDEREQTLNQLLTEMDGFEGNTGIIVIAATNRADILDSALLRPGRFDRQVSVDVPDVRGRTGILKVHGSNKKFDTDVSLEVIAMRTPGFSGADLANLLNEAAILAGRRGRTAISSKEIDDSIDRIVAGMEGTVMTDGKSKSLVAYHEVGHAICGTLTPGHDPVQKVTLIPRGQARGLTWFIPMDDPTLISRQQLFARIVGGLGGRAAEEIIFGEPEVTTGAAGDLQQITGLAKQMVVTFGMSDIGPWSLMDSGAQSGDVIMRMMARNSMSEKLAEDIDTAVKRLSDEAYEIALSQIRSNREAMDKIVEVLLEKETLSGDEFRAILSEFTEIPVENRVPPATPAALPA

SEQ ID NO: 50193 - protein, 630 aa, Oryza sativa
MWRGCVSRGLRSLSKGKGSSSSAPVSAAARLFSTASSSYTVVDHSYDAVVVGAGGAGLRAAIGLSEHGFNTACITKLFPTRSHTVAAQGGINAALGDMTEDDWRWHMYDTVKGSDWLGDQDSIQYMCREAPKAVIELENYGLPFSRTEDGKIYQRAFGGQSLDFGKGGQAYRCACAADRTGHAMLHTLYGQAMKHNTQFFVEYFALDLIMDSEGTCQGVIALNMEDGTLHRFRATNTILATGGYGRAYFSATSAHTCTGDGNAMVARAGLPLQDLEFVQFHPTGIYGAGCLITEGSRGEGGILRNSEGERFMERYAPTAKDLASRDVVSRSMTMEIREGRGVGPLKDHIYLHLNHLPPEVLKERLPGISETAAIFAGVDVTKEPIPVLPTVHYNMGGIPTNYHGEVVTMKGDNPDSVVPGLMAAGEAACASVHGANRLGANSLLDIVVFGRACANRVAETAKPGEKQKPLQKSAGEKTIAWLDKLRNANGSLPTSKIRLNMQRVMQNNAAVFRTQETLEEGCKLITKAWESYHDVKISDRSLIWNSDLIETIELENLLINACITMHSAEARKESRGAHAREDFTKRDDEQWMKHSLGYWENEKVRLAYRPVHMNTLDSEVESFPPKARVY

SEQ ID NO: 50194 - protein, 329 aa, Oryza sativa; identical to SEQ ID NO: 37062

SEQ ID NO: 50195 - protein, 337 aa, Oryza sativa; identical to SEQ ID NO: 37446

SEQ ID NO: 50196 - protein, 396 aa, Oryza sativa; identical to SEQ ID NO: 33294

SEQ ID NO: 50197 - protein, 470 aa, Oryza sativa
MDLAAAAVAVSFPRPAPPPRRCAPRRHRRALAPRADSSSPYPYTAVAAPVYAPTPRDRALRTPDSGYHYDGTARPFFEGWYFKVSIPECRQSFCFMYSVENPLFRDGMSDLDRVIHGSRFTGVGAQILGADDKYICQFTEKSNNFWGSRHELMLGNTFIPNNGSTPPEGEVPPQEFSSRVLEGFQVTPIWHQGFIRDDGRSKYVPNVQTARWEYSTRPVYGWGDVTSKQKSTAGWLAAFPFFEPHWQICMAGGLSTGWIEWDGERFEFENAPSYSEKNWGAGFPRKWYWVQCNVFSGASGEVALTAAGGLRKIGLGETYESPSLIGIHYEGKFYEFVPWTGTVSWDIAPWGHWKLSGENKNHLVEIEATTKEPGTALRAPTMEAGLVPACKDTCYGDLRLQMWEKRNDGGKGKMILDATSNMAALEVGGGPWFNGWKGTTVSNEIVNNVVGTQVDVESLFPIPFLKPPGL

SEQ ID NO: 50198 - protein, 313 aa, Oryza sativa
MSQLTKHEDGKNQLEALLSRLHSVNVPTLTAGSVKLNVGQFGSALQKSSMSREDYKKAVVQAKEHILAGDIFQVVLSQRFERRTFADPFEVYRALRIVNPSPYMAYLQARGCILVASSPEILTRVEKRTIVNRPLAGTIRRGKSKAEDKVLEQLLLSDGKQCAEHIMLVDLGRNDVGKVSKPGSVKVEKLMNVERYSHVMHISSTVTGELRDDLTCWDALRAALPVGTVSGAPKVRAMELIDQMEGKMRGPYSGGFGGVSFRGDMDIALALRTIVFPTGSRFDTMYSYTDKNARQEWVAHLQAGAGIVADRQA

SEQ ID NO: 50199 - protein, 85 aa, Oryza sativa; identical to SEQ ID NO: 42513

SEQ ID NO: 50200 - protein, 364 aa, Oryza sativa
MSLPALAAGRAASVRPPRASAASGEAAAAAAADQPAGRRPVKVILPKKKPQKWSTGMAPGEYGGGPATPKPRKYWMGKEDRDPVGNTDDFIWNKDFLPHMERVIANGGADTPPTITRLTPVDEDSESGFLSINRAMSLDSVDVDLSKELQAPTRPILKTQVEAAWRGRAIGAEAVNGVASPRWRLVPTRREQAKWDRAAKAATGGSDVILRESKSRGQQGDPEVLAAKSREQYLELKQRLQLFTLGIGGIGLVSAYFSYSPEIAASFGAGLIGSVLYLRMLGTSVDSLAGGTGETVKSAAAQPRLLIPVALVMMYNRWNEILVPDYGFMHLELIPMLVGFFTYKIATFAQAIQESIPAVGNRES

SEQ ID NO: 50201 - protein, 472 aa, Oryza sativa; identical to SEQ ID NO: 34820

SEQ ID NO: 50202 - protein, 792 aa, Oryza sativa
MGPTAPPPDAGGGEPEAWYGSIQYLVNISAVGAASCVLLFLLVKLRFDHRRIPGPSALAAKLLAVYHATAPQIALHCGADAAQFLLFERASFLVLAAVAAAAVAAALPLNLLAGDAAIADQFAATTISHIPKSSPLLWLHLLLTAAVVAIAHLGISRMEDALRITRFRDGNGNPSDPNSSSVAVFTIMIQGIPKTLAADKTPLKDYFEHKYPGKVYRVIVPFDLCTLEYLAEEWGKVRNRISWLEARMDARNLFDEFAQGGRHSEEHWIVRRCKELWVMTAERFGFTDEEMLRRLQTKKLVLGSRLSDYKDGRAPGAGIAFVVFKDVYTANKAVRDFRMERKKTPIGRFFPVMELQLERSRWTVERAPPASDIYWNHLGLSKTSLGLRRIAVNTCLILMLLFFSSPLAIISGMQSAARIINVEAMDNAKSWLVWLQSSSWFWTIIFQFLPNVLIFVSMYIIIPSVLSYFSKFECHLTVSGEQRAALLKMVCFFLVNLILLRALVESSLESWILSMGRCYLDSVDCKQIEQYLSPSFLSRSSLSSLAFLITCTFLGISFDLLAPIPWIKHVMKKFRKNDMVQLVPEENEDYQLMHDGEETNNLRAPLMSEREDSGILNGIEEHDLSLYPINRSFHMPKQTFDFAQYYAFDITIFALTMIYSLFAPLTVPVGAVYFGYRYLVDKYNFLFIYRVRGFPAGNDGKLMDMVICIMQFCVIFFLVAMLLFFAVQGDPMKLQAICTLSLLVFYKLLPSRSDRFQPSLLEGMQTVNSFVDGPTDYEVFSQPDLDWSLYQS

SEQ ID NO: 50203 - protein, 220 aa, Oryza sativa
MTMADFSDQLFDWQDRLFDNTNGRLEFSGNTWTSLWPGTGKPGLWTASISRMGALYSLIVREEEIHIAQRKHSNNGQEDDRDEDIELVIPPVFNGCTQVLTADDQKAARDLYWDAVCSGGEDETDWRKVEEILRRCIGRNPFVGEPHLVLAQVLLNMEMYEEAEEQIEAGVKLLLEWGSSWDKRMPWEAWVSWGRAMLIKAKDKDWPHTSFGILSIGLVK

SEQ ID NO: 50204 - protein, 517 aa, Oryza sativa
MAGGGFPVAGGAPPGDYGGGITFSVVVTCLMAASGGLIFGYDIGISGGVTAMESFLAAFFPGVLRRMAAARRDEYCVYDSHVLTAFTSSLYLAGLAASLAAGRVTRAVGRQAVMLAGGALFFAGAAVNAAAVNIAMLIVGRMLLGFGIGFTNQAAPVYLAETAPAKWRGAFTTGFQLFLGIGNLTANLTNYGAARIPRWGWRLSLGLAAAPASVILVGTLLISDTPSSLLVRGRVEQARAALRRVRGAKADVDAELEGVARAVDAARANEEGAYRRILWRQHRPHLVMAVAVPLLQQLTGVIVIAFFSPVLFQTAGFGSNASLMGAVILGAVNLGSTLVSIATVDRYGRRVLFLTGGLVMIACQVAVAWIMGSQIGRDGESAMARRYSVAVLALTCVFSAAFGWSWGPLTWVIPGEIFPVEIRSAGQGISVAVNLGATFVLTQTFLAMLCSFKYATFLYYAAWVAVMTAFVWAFLPETKGVPLEAMGAVWARHWYWRRFVQPPPAAKDAMLPEVLVN

SEQ ID NO: 50205 - protein, 318 aa, Oryza sativa
MPPGASPAASAEAWTWENAAAGAAAGFATVATLHPLDVVRTRFQVSGGRGCYDLPPYRNTAHAVYTIARSEGLRGLYAGFYPAVLGSTVSWGLYFFFYNRAKQRYLQGKDDQLRPVHHLVSAAEAGALVCLFTNPIWLVKTRLQLQTPSHHTSRYSGFSDALRTILKEEGWLALYRGIGPGLLLVTHGAIQFTAYEELRKALIFAKSRQTRTDNRSCDDSLNSIDYAALGAGSKVTAILLTYPYQVIRARLQQRPGSDGTPKYKDSWHVVKETARHEGVRGFYRGITSNLLKNLPAASLTFVVYENVIKLFKAAKEKT

SEQ ID NO: 50206 - protein, 74 aa, Oryza sativa
MAAVSWPPRGRRSGLGDGVSCAAGTHLSLAIFLASATTAPPRRTTSLMVAAQEQARVSRSLHPLPLPPTRQMAS

SEQ ID NO: 50207 - protein, 447 aa, Oryza sativa
MGAKDSKPSYSYSSSYDHGNSSSGYNSRYPAYPANASSSQNTRYAPSMENYVQPETHARLQRKYSRIGDDYRSLNQVTEALAQAGLESSNLIVGIDFTKSNEWTGKLSFNRRCLHDIGNTPNPYEQAISIIGRTLSAFDEDNLIPCFGFGDASTHDQEVFSFYPENRPCNGFEEALERYREIVPTLRLAGPTSFAPMIEIAIGIVDSTGGQYHVLLIIADGQVTRSVDTQSGQLSPQERDTIDAIVKASQFPLSIVLVGVGDGPWDMMHQFDDNIPARSFDNFQFVNFTDIMSKSIAADRKEAEFALSALMEIPTQYKATLDLQLLGRRQRIQPRIPLPPPMRNAYSRSTSFDQHSGVYSRSSSFGPQTSGFQQSESFKQRQPVATTAPDTYTSESSLEGRLLCAICMDKSKDLAFGCGHQTCYECGKNLVRCPMCQQHITTRIRLY

SEQ ID NO: 50208 - protein, 357 aa, Oryza sativa
MDFPGGSGRQQQLPPMTPLPLARQGSVYSLTFDEFQSTLGGVGKDFGSMNMDELLRSIWTAEESHAVGAATTTTATTASVAAAEHAAVGAPPVQRQGSLTLPRTLSQKTVDEVWRDMMCFGGGGASTAPAAAEPPPPAHRQQTLGEITLEEFLVRAGVVREDMSVPPVPPAPTPTAAAVPPPPPPQQQTPMLFGQSNVFPPMVPPLSLGNGLVSGAVGHGGGGAASLVSPVRPVSSNGFGKMEGGDLSSLSPSPVPYVFKGGLRGRKAPGIEKVVERRQRRMIKNRESAARSRQRKQAYMMELEAEVAKLKELNDELQKKQDEMLEQQKNEVLERMSRQVGPTAKRICLRRTLTGPW

SEQ ID NO: 50209 - protein, 378 aa, Oryza sativa
MKASIKFRDDDRPLLRARVPIRVLGLPLHSGLSAGGDPRELRLDLSTAFSFGPAIRLSYRPNDPALPFSVSVRAGVGPLGSPARAPFSLAAEFNLLSGNPGSPAFFLLLKPRLGDFSLSHTLRSSPHPGNKVGEVSDGDGHGREVNYKAFSFAAAGKSGGGVGALLSGMRLTTRSVLPLWGRASLRFSWGLRAPPELQAALAADDAMVGASRSRKGGARVPVSKMPLLVIDKISIEQSPRAADKTRGNADSSPPAPAIAAAADADAADGTGRGGEGFSLVRRQLEALNAESGMLRRAVEDLRAEVGSRRAAVSTAGAPDTWRTPPAPPQPAQPYHYSSPVKPDRRGSGKDMAAAENATKPSSDELGDELKRALEARLR

SEQ ID NO: 50210 - protein, 336 aa, Oryza sativa
MPGDVATSPAPAPPSASSQQSHHATSARGLLCHAAAGASAGVVAATFVCPLDVIKTRFQVHGWPKLATGTIGGSVIIGSLQQIAQREGFRGMYRGLSPTILVLLPNWAVYFTVYEQLKSLLSSNDRSHHLSLGANVIAASCAGGATTIATNPLWVVKTRFQTQGIRAGVIPYKGTLAALKRIAHEEGIRGLYSGLVPALAGISHVAIQFPAYEKIKAYLAERDNTTVEALSFGDVAVASSLAKVAASTLTYPHEVVRSRLQEQGAHSKARYTGVMDCIRKVYHIEGLTGFYRGCATNLLRTTPAAVITFTSFEMIHRFLLDVFPPLPEQQPQPLKH

SEQ ID NO: 50211 - protein, 108 aa, Oryza sativa
MCRRPLPCTPPSATSHAVSCVASNTCRRAVVVAGSDQIWQETPDPATRHRSLEPTPKVPPALPLCLPVLRRLSPRPWDQASDLRGEREGPAAAVLAVTWFSGGLLRRR

SEQ ID NO: 50212 - protein, 899 aa, Oryza sativa
MMSRSYTNLLDLAAGNFEALGPAGGGRRRSFGAKRMTRVMTVPGTLSELDDEDDEPAATSSVASDVPSSAACERLIVVANQLPVVARRRPGAAAGGWAFSWDDDSLLLRLRDGVPDEMEVLFIGTLRADVPACEQDEVSQSLIDGFGCAPVFLPAGLYDRFYQHFCKGYLWPLFHYMLPFASALPAAASGDGRFDRGAWEAYVLANKYFFEKVVEVINPEDDYVWVHDYHLMALPTFLRRRFNRLRIGFFLHSPFPSSEIYRSLPVREEILRTLLNCDLIGFHTFDYARHFLSCCSRMLGIEYQSKRGYIGLDYFGRTVGIKIMPVGIHMGQLQSVLRLSEKEKKVAELRQQFEGKSVLLGVDDMDIFKGINLKLLAFENMLRTHPKWKGRAVLVQIANPARGKGKDLEAVQAEIRESCDRINKEFGQSGYSPVIFIDQSVPSAVRLAYYTVAECVVVTAVRDGMNLTPYEYIVCREGIPGSECAPEVSGPKKSMLVVSEFIGCSPSLSGAIRVNPWNIEATAEALNEAISMSEREKQLRHEKHYRYVSTHDVAYWSKSFVQDLERACKDHFRKPCWGIGLGFGFRVVALDPHFTKLNFDSIIMSYERSKSRAIFLDYDGTLVPQASLNKNPSEELLRIINTLCADRNNTVFIVSGRSKDDLSKKLISCPKLGIAAEHGYFLRWTRDEEWQTTAQTSDFGWMQMAKPVMDLYTESTDGSTIETKETALVWHHQDADQGFGSSQAKEMLDHLESVLANEPVSVKSGQFIVEVKPQGVTKGLIAEKVLTSMKEKGQLADFVLCIGDDRSDEDMFENIADVMKRSIVAPKTPLFACTVGQKPSKARFYLDDTFEVVTMLSSLADASEPDLMADLEDDLATSVSSIEISDRVVSFSNLRTEGS

SEQ ID NO: 50213 - protein, 295 aa, Oryza sativa; identical to SEQ ID NO: 34855

SEQ ID NO: 50214 - protein, 507 aa, Oryza sativa; identical to SEQ ID NO: 38171

SEQ ID NO: 50215 - protein, 994 aa, Oryza sativa
MPPAGDAAHAPPPPHRRLVFAFYLTGHGFGHATRAIEVVRHLIAAGHEVHVATAVPEFVFTAELPRSPSSQGLLHIRRAILDCGAVQTDALTVDPLASLLKYHETAVVPRESILRTEAEWLTSINADLVISDVVPVACRVAADVGIPSVCIGNFSWDYIYAEYIVASGDHHRSIVWQIAEDYSHCDILLRLPGYCPMPAFRDVTDVPLVVRGLRKSRSEVRKELGIAENAKVVVFNFGGQPAGWNLKQEWLPDGWICLVCGASDSQEVPPNFIKLAKDAYTPDAMAASDCMLGKIGYGTASEALAYKLPFIFVRRDYFNEEPFLRNLLEHYQSSIEMTRRDFLHGHWKPYLLRALTLQPCYDGPTNGGEVAARILEDTAVGKKCISDKFNGARRLQDAIVLGYQLQRAPGRDVAIPDWYSLSETEVGACPISENIKTKESTESCFEDFEILHGDLQGLPDTMSFLKSLSEFNQSELKSNGKQPQERIAASVLFDWEEEMYIARAPGRLDVMGGIGDYSGSLVLQLPLREACHVAVQRNHPSNQKLWENTQARRLENGGMEPVVQIVSFGSELSNRSPTFDMKLSDLMDVDKPISYEKAREFFCRNPSQKWAAYVAGTILVLMTELDVKFTDSMSILVSSDVPEGKGVSSSASVEVATMAAIAAAYGLNIAPRDLALLCQKVENHVVGAPCGVMDQMTSACGEANKLLAMVCQPAEVKELVAIPNHMRFWGLDSGIRHSVGGGDYGSVRVGTYMGRKMIKCAASDLASESSVSDAPVQSNDYKQNAIELLKSEASLEYLCNIPPHRYEAIYAKDIPEVITGDAFLKKYGDHDDTVTAIDPKRSYNVKAPTRHPIYENFRVETFKALLEAANTDEQLSALGELMYQCHYSYNACGLGSDGTDLLVNLVQEMQHRNMSKGESPSLFGAKITGGGSGGSVCVMGKNCLKSSEEIIEIQQRYKAATGYLPILFDGSSPGAAKFGYLKIRRRPSSPIAAK

SEQ ID NO: 50216 - protein, 484 aa, Oryza sativa
MVWDNITGGSFNLDEGIIEALFGTAAVNRKTKPADSKDASGGSTSAGLGRSNSPEQIFLLEPRKSHNISIILRSLTVGREEIIDALLNGHTELSTEVLEKLSRLNISKEEENTLLKFSGNPDRLAPAEFFLLRLLLDVPSPFARVNALLFKANYAAEVAQLKQSLRTLEMASQELRTKGLFFKLLEAVLKAGNRMNAGTARGNAQAFNLTALRKLSDVKSTDGSTTLLHFVIEEVVRSEGKRLAINRNYSLRRSGSLAKSTDGGNPAASSTSQGPSREERQNEYLNLGLPIVGGLSTEFANVKKAALVDYDTVVNECAILGNRLAGTKKLLETYGDDGFARGLRGFVKAAEQELNELKGNQEKVLELVQRTTEYYHTGATKDKNAHPLQLFIIVRDFLGMVDQACVVIKRKLQQQKKPTPPPSSSQPAAPAATTKGAADDAPAPAQKPPEEVDSKRKRVMPRFPNLPAHFMKDNADSDSSSDEE

SEQ ID NO: 50217 - protein, 621 aa, Oryza sativa
MEGGKPTVITNAEDQRTTPSVVAYTKGGERLVGQIAKRQAVVNPENTFFSVKRFIGRKMAEVDDEAKQVSYHVVRDDNGNVKLDCPAIGKQFAAEEISAQVLRKLVDDASKFLNDKITKAVVTVPAYFNDSQRTATKDAGRIAGLEVLRIINEPTAASLAYGFEKKNNETILVFDLGGGTFDVSVLEVGDGVFEVLSTSGDTHLGGDDFDKKVVDWLASNFKKDEGIDLLKDKQALQRLTEAAEKAKMELSTLSQTNISLPFITATADGPKHIETTLSRAKFEELCSDLIDRLKTPVTNALRDAKLSVDNLDEVILVGGSTRIPSVQELVKKITGKDPNVTVNPDEVVSLGAAVQGGVLAGDVKDVVLLDVTPLSLGLETLGGVMTKIIPRNTTLPTSKSEVFSTAADGQTSVEINVLQGEREFVRDNKSLGSFRLDGIPPAPRGVPQIEVKFDIDANGILSVAAIDKGTGKKQDITITGASTLPKDEVERMVEEADKFAQEDKEKRDAIDTKNQADSVVYQTEKQLKELGDKVPAPVKEKVDAKLNELKEAIAGGSTQSMKDAMAALNEEVMQIGQAMYNQQPNAGAAGPTPGADAGPTSSGGKGPNDGDVIDADFTDSN

SEQ ID NO: 50218 - protein, 300 aa, Oryza sativa
MDPLKGVEESSLVTKGEMKSLLQDLIATGMMGPRIGGASPEIKLEQMPNEVKLEESQNYLSWSGRTRLMLRAKGVEHYLEETCIEPDDKLSVDWKVWNSTNSTVATWLMTSVAPSIARMVETISNASTVWKTLSKMYSGEDNAMMMVEAQDKVENLKQEGRTVQEYASELQQLWADLDHYERGTGRRIGTGVRRNGLWYINNEEVGLAAVAGNAEEIILLHCRLGHPSFDNVSKLYPILFNGVNKSRLVCDACEFGKHTRTPYVGSGLRSYEPFILIHYDVWGPWPVTLVSGFKWFVFLH

SEQ ID NO: 50219 - protein, 455 aa, Oryza sativa
MGFLACLFPCPQEVRDEDEEPRSGQRVSSVEYSKSSESCPLKTEGSIDMVGIRRNKGHGEATIFTLRELADATNNFSTECLLGRGGFGSVYKAFLNDRQVVAVKQLDLNGLQGNREFLVEVLMLSLLHHPNLVKLFGYCVDGDQRLLIYEYMPLGSLEDRLHDLRPGQEPLDWTTRMKIAADAAAGLEYLHDEVIPAVIYRDIKPSNILLGEGYNAKLSDFGLAKLGPVGDKTHVTTRVMGTHGYCAPEYLSTGKLTIKSDIYSFGVVFLELITGRRALDSNRPPDEQDLVAWARPLFKDQRKFPKMADPSLHGHFPKRGLFQALAIAAMCLQEKAKNRPSIREVAVALSYLASQTHESQNTAARHTLPGPSVPRVLDNQINQDTSLPSQHGVHMPPLAGTDHMVQEVKENCRSSSHRPGRGRVTPNGADRERALAEANVWVEAWRRQEKTSKMR

SEQ ID NO: 50220 - protein, 227 aa, Oryza sativa; identical to SEQ ID NO: 32151

SEQ ID NO: 50221 - protein, 808 aa, Oryza sativa
MAAKLARLHSLRERLGATFSSHPNELIALFSRYVNQGKGMLQRHQLLAEFDALIEADKEKYAPFEDILRAAQEAIVLPPWVALAIRPRPGVWDYIRVNVSELAVEELSVSEYLAFKEQLVDGHTNSNFVLELDFEPFNASFPRPSMSKSIGNGVQFLNRHLSSKLFQDKESLYPLLNFLKAHNHKGTTMMLNDRIQSLRGLQSSLRKAEEYLMGIPQDTPYSEFNHRFQELGLEKGWGDCAKRVLDTIHLLLDLLEAPDPANLEKFLGTIPMMFNVVILSPHGYFAQSNVLGYPDTGGQVVYILDQVRALENEMLLRIKQQGLDITPKILIVTRLLPDAVGTTCGQRVEKVIGTEHTDILRVPFRSENGILRKWISRFDVWPFLETYTEDVANEIMREMQAKPDLIIGNYSDGNLVATLLAHKLGVTQCTIAHALEKTKYPNSDIYLDKFDSQYHFSCQFTADLIAMNHTDFIITSTFQEIAGSKDTVGQYESHIAFTLPGLYRVVHGIDVFDPKFNIVSPGADMSVYFPYTEADKRLTAFHPEIEELLYSEVENDEHKFVLKDKNKPIIFSMARLGRVKNMTGLVEMYGKNAHLRDLANLVIVCGDHGNQSKDREEQAEFKKMYGLIDQYKLKGHIRWISAQMNRVRTGEMYRYICDTKGVFVQPAFYEAFGLTVIEAMTCGLPTIATCHGGPAEIIVDGVSGLHIDPYHSDKAADILVNFFEKCKQDSTYWDNISQGGLQRIYEKYTWKLYSERLMTLTGVYGFWKYVSNLERRETRRYIEMFYALKYRSLASAVPLAVDGESTSK

SEQ ID NO: 50222 - protein, 250 aa, Oryza sativa; identical to SEQ ID NO: 30432

SEQ ID NO: 50223 - protein, 548 aa, Oryza sativa
MAAATSTSSTALAHPKTLNPAAAKVSSPQVIGATVPSLDFETSVFKKEKVSLAGHDEYIVRGGRNLFPLLPEAFKGIKQIGVIGWGSQGPAQAQNLRDSLAEAKSDIVVKIGLRKGSKSFEEARAAGFTEESGTLGDIWETISSSDLLLLLISDAAQADNYEEIFSHMKPNSILGLSHGFLLGHLQSVGLDFPKNISVVAVCPKGMGPSVRRLYVQGKEVNGAGINSSFAVHQDVDGRATDVALGWSVALGSPFTFATTLEQEYRSDIFGERGILLGAVHGIVEALFRRYTEHGLDEDSAYKNTVECITGIISKTISKKGMLEVYNSLTEEGKKQFIEAYSAAYYPCMDILYECYEDVSSGSEIRSVVLAGRRFYEKEGLPAFPMGNIDQTRMWKVGERVRSTRPAGDLGPLHPFTAGVYVALMMAQIEVLRKKGHSYSEIINESLIESVDSLNPFMHARGVAFMVDNCSTTARLGSRKWAPRFDYILTQQAFVTVDKNAPVNQDLISNFFSDPVHSAIEVCAQLRPTVDISVPADADFVRPELRQSS

SEQ ID NO: 50224 - protein, 448 aa, Oryza sativa
MEMTTTTEKCISSSSSVHGGNNRREEYPKEGADDDVEAGVLGRDGEAAATTTRQRLVSLDVFRGITVALMILVDDVGGIVPAISHSPWDGVTLADFVFPFFLFIVGVSLAFAYKKVPDKMLATKKAMLRAVKLFIVGLILQGGFFHGIHELTYGVDIRKIRLMGVLQRIAIAYLVVALCEIWLRRVSSGGNIGSGSMLITRYHHQMFVGLVLVVTYLVILYGLHVPDWEYEVTSPDSTVKHFLVKCGVKGDTGPGCNAVGMIDRSVLGIQHLYAHPVYLKTEQCSMASPRNGPLPPNAPSWCEAPFDPEGLLSSLMAIVTCLIGLQIGHVIVHFKKHNERIKRWSILSLCLLTLGFSLHLFGLHMNKSLYSLSYTCVTTGTAGLFFVAIYLLVDVKGYKRPVLPMEWMGKHALMIFVLVACNVIPVLVQGFYWKEPSNNLLKLIGIGG

SEQ ID NO: 50225 - protein, 270 aa, Oryza sativa
MVSVVQQLLMLYHMYGGKFCRYFIASILLWRLRLHVDLLPPSFKHMQFSRFLKNGFLLLARVIAATCCVTLSASMAARLGSVPMAAFQICLQIWLASSLLADGLAFAGQAILASAFARQDHSKAAATASRILQLGLVLGLLLSIFLGIGLRLGSRLFTDDQDVLHHIYLGIPFVSLTQPINALAFVFDGINYGASDFGYAAYSMILVAIVSIIFIVTLASYNGFVGIWIALTVYMSLRMLAGFLRIGTARGPWTFYAAQRMHSHEVVGLC

SEQ ID NO: 50226 - protein, 375 aa, Oryza sativa
MAEDANAGRKSSTHLAQSPELHASLESHELYNIPITRGEGTLITELRKVMEELRVSYYADTDEETREQLKQFWDDEFNAISSGETTIERDLKWMRKEVIEAFETYSEANVVDYELEDLSRQCLIFDDCGQPYHHYNFTMKSKRPDSDLESSTNCPDSDLESSTNLESCISRHYFAEVKLMDGKKHYFCCPLESFDNGHCHGCRNSGIDLKHPSNGGYEEGNAYSGLSFDDDEFDAISEETTKEKGIEWMREGVIEAFETYSNANVVDYELEDLSRQCLIFDDCGQPYHHYNFTMKSKCPNSDLESSTNVESCISRHYFAEVKLMDGEKHYFCCPLESFDNGHCHGCRNSGIDLKHPSNGGYEEGNADSGFSFDPI

SEQ ID NO: 50227 - protein, 771 aa, Oryza sativa
MPPARVDRSEMRQNTSHQGSNDPRVQKERQAEWARPGRVFNRNTNKGGYFRNSLPGVTREFRVVKDNRQKVVGETIPGSFHNGVPSNEQIASNIGDKSSTEKLPAQRHPVTQNSNGRGVAQADNGRKEVKPSNDQTVGQSDGMITTMVGSHAVLAKGNQNRVLAVPSGTNNFTGELCCSSSDPIHVPSPGSKSAGTFGAIKREVGVVGARQRPSDNTATNTSTSNSSVKVPTSTATKENASNGQQSRSSGVSSKNSRPSSSTHLSSRPSSSSQYHSKPNTPVGHPKVNPQLEWKPKSVSPSPANHADNVVHSSAASSVDGNQAHMAGLPKKLSQTNVSEDEHVIIPAHLRVPDSERTHLIFGNFECDVESKAFTLAPDASTNREFNAHSSSRSTDDVPPTDQTDLVGSCVMLPKSDSFVSVSEYQHPLTEDMEVLSPGVFGEHRTNDMISTQVSHSSPQPQHQDNSAVHDFKEYEPDSRYEMPFITKAVDSEATQNIPYPSEVMGLHAANFNQLSVTAATQHPVPQMYHMHVSQYPNCLPYRHVFSPYYVPPVAVQNYSSNPAFTQLPSASSYLVMPNGTSQLAPNGMKYGPPHQCKQMFPGGPAGYGGFTNQNGYPVNTGVIGGTGSVEDANMSKYKDNNLYTLNPQAETADVWIQAPTDIPVMPSTPFYNMMGQPMSPHTAYLPPHNGHAPFSPVQHPAHLQFPAMPHGLQPTTMTMVQNPQPMVHQPACPPLAGNIGIDMAAMASGAQVGAFQQNQLSHLGWAPPSFL

SEQ ID NO: 50228 - protein, 167 aa, Oryza sativa
MDGELKLQPNLDCAFSGTTAVCAIKQGRDLIIANLGDSRAVLATMSDTGYLQAVQLTVDHKPSVPEEAARIKRSGGRVFGLKDEPGVMRVWLPGENSPGLAMARSLGDMRLKRHGVIPAPEVTSRRVTGADLFMVLATDGVWDVLSNEEVVSIVCDAAEAARTPPAS

SEQ ID NO: 50229 - protein, 455 aa, Oryza sativa
MAAAGASALRPHLALLPAGGGGGGGGGTRSYALQALSFVSPLLTHCGRRRRCVLRSKASSSPSPPPSPGKEAVAVPTAESCVNLGLELFSKGRVKDALEQFENALELNPNPVEAQAALYNKACCHAFREESNKAADCLRTALRDYNLKFGTILNDPDLAPFRASPEFKELQEEALRGGEDIGSGFRRDLKLISEVQAPFRGVRRFFYVALTAAAGISTFFTIPRLILAVQGGDGAPDLLETVGNAAINIGGIVVLVALYFWENKKEEQQITQISRNETLSRLPVRLSTNRIIELVQLRDITRPVILAGSKASITRAMQRAERYRTELLKRGVLLIPVIFGASQKAQSKPRGFGSSRSAASAPSVGDDFEKRTESIAAKSRLKAEERFKADIVSPEQWESWIRDQQESEGVTPGEDVYIILRLDGRVRRSGRGMPNWNDILQELPRLEELLSKLER

SEQ ID NO: 50230 - protein, 569 aa, Oryza sativa
MDFFSEYGDANRYKIQEVIGKGSYGVVCSAIDQHTGDKVAIKKIHNIFEHLSDAARILREIKLLRLLRHPDIVEIKHIMLPPSRRDFKDIYVVFELMDTDLHQVIKANDDLTKEHHQFFLYQMLRALKYIHTANVYHRDLKPKNILANANCKLKICDFGLARVAFNDTPTTVFWTDYVATRWYRAPELCGSFFTKYSPAIDIWSIGCIFAEILTGKPLFPGKNVVHQLDLMTDLLGTPSMDTVTRIRNEKARRYLSSMRKKQPVPFSERFPKADPAALKLLQRLLAFDPKDRPTAEEALADPYFKGLAKTEREPSCQPITKMEFEFERRKVTKEDVKELIFREILEYHPQLLKDYMNGTEKTNFLYPSALDNFRRQFANLEENGGKNGDAVPSDRKHVSLPRTTTVHSAPIPPKDHQNITSQVPQRIPGRTGRGACPVIPFENLSAMGPYNQRRVVRNPVLPPATTNLSAYAYHRKSDSSERELQQELEKDRMRYQPSEHFMDAKVVSHMSHDLRASSYYVSKAKSDVADRAALQSNMMQGIGPFNGIAAVGGNYNKVSTVQYGVSRMY

SEQ ID NO: 50231 - protein, 780 aa, Oryza sativa
MTQADQAVISLRPGGGGGIGGPRAGRLFPFGASTGSLDFLRPRGGASSGFAAKLGDLRFEPLERVRYTRDQLVELHEIIDIPENILKLKQDIDIELHGEDEPWINNDSSVQTQSYNRYAETDNRDWRSRIEQPVQTPAIGGEEKSWDKFREAKESYISSGKQDQFNNQDKLSSQFSAKAQVGPAPALVKAEVPWSIQRGNLSNKERVLKTVKGILNKLTPEKFDLLKGQLIEAGITTADILKDVISLIFEKAVLEPTFCPMYAQLCFDLNEKLPSFPSEEPGGKEITFKRVLLNNCQEAFEGADNLRSEVNKLTGLDQEMERRDKERLVKLRTLGNIRLVGELLKQKMVPEKIVHHIVQELLGSESNRCPAEENVEAICQFFNTIGKQLDENPKSRRFNDVYFNRLKDLTTNSQLASRLRFMARDVLDLRSNQWVPRREEMKAKKISEIHREAENNLGLRPGSTASIRTGRTGTGGGGPLSPGAFSMNQPGIVGMLPGMPGARKMPGMPGLGSDDWEVPHSRSKPRADPVRNLTPSLANKPSPNNSRLLPQGSAALISGKTSALVGSGGPLSHGLVVTPSQTTGPPKSLIPAPSVDPIVEQPAAAPKPSSTELQKKTISLLKEYFHILLLHEAQQCIEELKSPDYYPEVVKEAINLALDKGTNSIDPLLRLLEHLYNKNVFKATDLETGCLLYSSLLDELAIDLPKAPVHFGEVIGRLVLSHCLSIEVVEDTLKKIEDSFFRAAVFEAMMKIMKANPSGQAILGSHVAKIDACSKLLSSE

SEQ ID NO: 50232 - protein, 351 aa, Oryza sativa
MAMKCLFLFFAFLVAFFPGAAVGAGLKVGFYNKTCPSAERLVQQAVAAAFKNNSGVAPGLIRLHFHDCFVRGCDASVLIDGNDTEKTAPPSNPSLRGFEVIDAAKAAVEAACPRVVSCADILAFAARDSVALTGNVTYKVPAGRRDGNVSIAQDALDNLPPPTFNATELVGRFANKSLTAEDMVVLSGAHTIGVSHCDSFTSRLYNFTGVGDADPAISAAYAFLLRAVCPSNSSQFFPNTTVDMDVITPAALDNKYYVGVANNLGLFTSDHALLTNATLRASVDEFVKSETRWKSKFVKAMVKMGGIEVKTGTTQGEVRLNCRVVNKRSANAELELELAAAMDDGDEVAAS

SEQ ID NO: 50233 - protein, 602 aa, Oryza sativa
MSATTTAPSPTPIPITTIAELRQHHSQLVRLGLASHPPHARRLLAFLARDPAHLPYAARLLAHHPDPRPALLNPLFASLPPRAAASLLALMLSLPLLHDHFTFPRLLPAAPLPLAAQLHALLLKLNLHSHAHSLNALLAAYLAAARPDLARVLFRTSGGGALDVVSWTTMVGGLCRLGLVDDAREVFDAMPARNLVSWNSMISGYVKADRFLDALEVFDEMRALGVEGNGFVATSALVACTGAGALGRGREIYRWVEQSGIEVDAKLATAVVDMYCKCGCVDEAWGVFDSLPARGLTTWNCMIGGFAVHGRCDDALELFHQMEAAGVAPDDVTLLNVLTACAHAGEVSEGRRYLNHIVSRHGIEPKGEHYGCMVDLFGRAGQLDEAKKVIDEMPMDPDLAVLGALLGACKIHGDVDLGEAIGWRVIDLDPDNSGRYVLLANLLAGAGRWDEVGKVRRLMDERNVSKEAGRSVIEVDGEACEFRCGNLRHPQAREIYAMAVDMVSRIRAEGYVPDTGEALHDVAEEDKEAALLCHSEKLAIAFGLLRARPRETLRITKNLRVCRDCHEATKYVSRVFGREIVVRDRSRFHHFKDGMCSCKDYW

SEQ ID NO: 50234 - protein, 536 aa, Oryza sativa; identical to SEQ ID NO: 29770

SEQ ID NO: 50235 - protein, 1007 aa, Oryza sativa
MQNGNGSCLTVQGEYLQGEYQEYPQPDYGSFDMANEIVLHDLPQNNQSYELEQLPQNICESSSMQVGSPDQYCDDTSLSDYYMDDVSSIESMSSEQNRSEDICFRSESSTDSSPVPSSRNSTTEDADKYFGDAPKHLQNSMFPVSTQHQHSFMNSSDPMHPTFHKKYDIPRNGSSSILGNSSRNCFSLDSNRDSDLCILEGSRSLASGHVLPPQGLQHNFQQSVCANPNLPRFGGRYRPHEERMTLRLALQDISQPKSEANPPDGVLAVPLLRHQKIALSWMVQKERNGSSCSGGILADDQGLGKTVSTISLILTERSPVPSSAVKQEPCEAVTLDDDDEDDDAEPHLKKPALAHLADTCKPEATSSTIKTENPIANVKARPAAGTLVVCPTSVLRQWADELRNKVTSKANLTFLVYHGSNRTKDPNDLTKYDVVLTTYSIVSMEVPKQSSPDSDDEEKGKPDRYGAPVGSSGSKKRKTSSSKKNKSGSTPESKLPEKPLAKVAWFRVILDEAQSIKNYRTQVARACWGLRAKRRWCLSGTPIQNAVEDLYSYFRFLRYDPYAEYKKFCFMIKTPISRNPITGYKKLQVVLKTVMLRRTKATMLDGKPIISLPPKTVSLKTVDFTSEERAFYNTLEAESREQFKEYAAAGTVKQNYVNILLMLLRLRQACDHPHLVRGHESTSSWMSSLEMAKKLPVERQQSLLVCLQSCSAICALCNDAPEDAVVTICGHVFCNQCILEQLTGDDSVCPVSNCRVRLNSTSLFSRGTLECALSRSTCEFLSDDSCEDMVQGKQPRFDSSYASSKVRAALDILLSLPKLDLTHMSDDKNKIVHPDKINGNSTPSEYAGTKITEKAIVFSQWTRMLDLVEVHLKSSHLSYRRLDGTMSVAARDRAVKDFNTNPEVSVMIMSLKAASLGLNMVAACHVLLLDLWWNPTTEDQAVDRAHRIGQTRPVTVSRLTIKDTVEDRILALQEKKREMVASAFGEDKSGAHQTRLTVEDLNYLFMV

SEQ ID NO: 50236 - protein, 374 aa, Oryza sativa
MRPPAPATTAGAGGKVTPNLAMDAEGTRLLNLTVLQRLDPAVEDILITAAHVTLYDFNIELNQWSRKDVEGSLFVVKRNKQPRFQFIVMNRRNTDNLVEDLLSDFEFELQPPYLLYRNAAQEVNGIWFYNQQDCDAVAGVFGRILNAYAKVPPKPKVPSTKSEFEELEAVPTSAAIDGPLEPSSSSTVLVSNAPDESLTDYFSGAVNVGNVSITPMVGRTHQPIESVASSHVPLIIPSAAPTHQMGVPSGAASAPPLPVIDTNVHSSHSTNLVTPAFFAPPSSSSASLVAPASSFMPTASPFHPTSADAHRPAYGHGTPLLQPLPPPTPPASLTPVHNDEPVISRDKVKDALLRLVQNDEFINLLYQELQNAHA

SEQ ID NO: 50237 - protein, 554 aa, Oryza sativa
MAAAILRFFFFFFFFILPASLTATASTSTSSCPDGWQITPALDKCFIYIPTPLSWDRSEALCRNNFTAHLAALSSLQDLNLAKSLCGPSPSGCWVGGHRNNTASAFAWKWSDDSSSWNDTAFPADPLRANCSTTGCALATTNDACTLVTNTHAALTAKRCSDSHGLICMINHDRCYHDHCHKEYFIVLVVVSGFILLTTLAVVVWLLVYRRSKRRRRSREGSSTSATALVPPLWKVFTSEELRSITKNFSEGNRLPGNAKTGGTYSGILPDGSRVAIKRLKRSSLQRKKDFYSEIGRVAKLYHPNLVAVKGCCYDHGDRFIVYEFVANGPLDVWLHHVPRGGRCLDWPMRMRVATTLAQGIAFLHDKVKPQVVHRDIRASNVLLDEEFGSHLMGVGLSKFVPWEVMHERTVKAATYGYLAPEFIYRNELTTKSDVYSFGVLLLEIISGRRPTQSVESVGWQTIFEWATPLVQSHRYLELLDPLIQELPDVGVIQKVVDLVYACTQHVPSVRPRMSHVVHQLQQLELKSAASEQLSGTSTSATSPMLPLEVRTPR

SEQ ID NO: 50238 - protein, 489 aa, Oryza sativa
MGSSWWWHGRAAAAVACWVWLAAAAAVGVEAIGANWGTQASHPLAPDTVVQMLKDNGFDKVKLFDAGEDTMSALRKSGLEVMVGIPNDMLAAMASSMAAANKWVDQNVSNYLNDGVKIRYVAVGNEPFLETYNGSFLQTTFPAIRNIQSALVKAGLGSQVRVTCPLNADVYQSSTSKPSDGDFRTDIHDLMLTIVKFLSDTGGAFTVNIYPFISLYSDSNFPVDYAFFDGAASPIVDGSATYTNMFDANYDTLIWALKKNGFGNLPVIVGEIGWPTDGDMNANIQMAQHFNQGFLTHIATGRGTPMRPGPVDAYLFSLIDEDEKSIQPGNFERHWGIFTYDGLPKYQLNLGQSHGLLKAKNVKYLERKWCVLKPSIGLTDPRLSDSISYACSLADCTSLGYKTSCGGLDTRSNISYAFNSYYQKNDQDDVACGFSNLATITGQDPSTGTCRFGIMIEVDSAFSWKLQHVRSSNLLMLLLVLLQLCLSFS

SEQ ID NO: 50239 - protein, 361 aa, Oryza sativa
MSPSSSSSSTGPMGVAVSPEVEAALARGGAVVALESTIICHGMPYPKNLQTAMEVEAVVRENGAVPATIAILNGVPHVGLSGEQLKSLAVSGRQFQKTARRDIAHVVASGGNGATTVSATMFFAHKVGIPIFVTGGIGGVHRNGEQTMDISSDLTELGKTPVTVISAGVKSILDIPRTLEYLETQGVTVAAYKTNEFPAFFTEVSGCKVPCRVDSPEECAKIIYANKNLHLGSGILIAVPIPKEHAASGNAIESAIQKALKEAEYCPYSQPPALSLYLFCVFVILTEMISNDFLCCFRDKNIIGNAITPFMLDRVKVLTGRSSLEANIALVKNNALVGAKIAVALSDLHQRVTNRFRRSAL

SEQ ID NO: 50240 - protein, 246 aa, Oryza sativa
MLLTCGNGESVKLWNVATGECSLKFSSSVGHIINSCAWFPNSEKIVCASCEPESSPKRIFTCDLEGQELESWVGDRIPKVSDIAVTPDSKHLICVCSNEIWIRELPKGREWRIREQQTISSLSLSGDGQSLIVNLNSQEIHLWRISESSTAADNKFKGHKQGKFVIRSCFGGSNSLFIASGSEDSQVYIWKRHLETPIKVLYGHSLTVNCVSWNPAKPHMLASASDDRTVRIWLAHKGSHRTRLTA

SEQ ID NO: 50241 - protein, 128 aa, Oryza sativa
MNCNCNFKKFMDLLPPFHLSVQAKRELNDPENALIGAFAGAITGAITTPLDVMKTRLMVQGSANQYSGIVSCAQTILREEGPGAFLKGIEPRVLWIGIGGSIFFGVLEKTKSMLAERRSREPPAGKDE

SEQ ID NO: 50242 - protein, 738 aa, Oryza sativa
MDSRSALLLLVLLVSPFFTNASSRLYIVYMGEKKHDDPSVVTASHHDTLTSVLGSKDGAMKSIVYSYKHGFSGFAAMLTESQAEELARLPEVISVKPNTYHQAQTTRSWDFLGLNYNEQSGLLKKAKNGEDVIVGVIDSGIWPESRSFDDNGYSPVPARWKGKCQTGAAFNATTGCNRKIIGVRWYSGGIPDENLKGEYMSARDLGGHGTHVASTIVGGQVRNVSHRQGGALAAGTARGGAPRARVAVYKVCWGLRAQCGGAAILAAIDDAMNDGVDVLSLSIGGAGEHYETLHAVARGIPVVFGGGNDGPTPQIVRNTVPWVITVAASTIDRAFPTVISLGNNKKFVGQSLYYNATASSTKFQMLVDGSSCDTQTLASINITSKVVLCSPPSLMPPRLSLGDIIGRVIKAGANGLIFVQYSVSNALDFLNACSRASVPCVLVDYEITRRIESYMTSTSTPMVKVSSAMTVVGSGVLSPRIAAFSSRGPSSLFPGILKPDIAAPGVSILAAVGDSYELKSGTSMACPHVSAVVALLKMVHPDWSPAMIKSAIVTTASVTDRFGMPIQAEAVPRKVADPFDFGGGHIEPNKAIDPGLVYDIDPSHYTKFFNCTLPEAEDDCESYMEQIYQLNLPSIAVPNLKDSVTVWRTVTNVGEAEATYHAALEAPVGMTMSVEPSVITFTRGGSRSVTFKVTFTTTQRVQGGYTFGSLTWLDGNTHSVRIPIAVRTIIQDFVADTS

SEQ ID NO: 50243 - protein, 800 aa, Oryza sativa
MWLSLFVLPAAPFDVVRTEVLPLAARLARGRGVALAPAALASIYSDLSALKRYINLEKRYQAFVVWAPLQIVQLWLWKRFPELRPPETTGTNQPDGHGIPTESQWQNALKVLDPVYVHAVFMSPKKFEWRPYGSSSFALRPEMGSHRVHGQDIAESAELLSFILCLRACELVGMRCIEHYRPHRVARQLSFDQDIPGTLPRVNSNWVAAWETYKMEPKKFVFIVPKYKPAVTIDYVQWWKPYLLGCAAAVVKARKMKELPLLLSPRKRKIDVPPDVSPKRVGNGAKEKAVELSFEAPIGSVSTINELSCVSATKIVQGKSFQQGNKEPPDLVVAHDRENRSSLHSEVLQNLLVEDATNTGSNEALCAVTIADMHSTEVSFDVPVALVSIVDELPCVSASIEEQGKPCQQDKEEAHNLSVTHDRENRSSLHSEVLQNLVVEDATNTGSNEALGAITVADMHSAEVSFDVPVDLVSIVDELPCVSATKEEQGNDCQQDKEEARDLSVTHDKENRSSVVYVHSTPVVAANTGNNKAFGPSPIIDVQSAPEDVVVISDDDNEDEVGGMHQKPPQLETAPSSLEGQNAESQIISASSNPQDSRVMKDVRVQSNCDHETDNVRSNIVLRKESFEVLAVDTVQPGFNLLDTPTGETQTCAVTGQIDKGYMVEKEILAGVEGIKNVNEDVSPSFQEINSPVEDCMVANRRMGSGNNYSSGLAHVNTQLINRVVCTRTLYYLRPFWLSKHGQNKDASDTTTDEGTFQPRREVGTPQMIEEAFAARQAQKVELQKVIDRLKEEIVALEVP

SEQ ID NO: 50244 - protein, 1213 aa, Oryza sativa
MEEAAAAAADFDGGFGGAGEDNLSMPLGDFMAFLDNEDWKEQQHEGNQGLEMPVDSTSSENAFQNHEDPSHSQMDVMVELNNGGESFDHSEDTSYRLLSNDFLENSRNGNPEMHLPMDALNHAKTVDEEIVPPYEDYTNGLYYDSGCDMFAEQSGLSEVKCEGTGPMLGNSEQEGNHFTSVPMFDHSAVIPDIPYTELNIGDVPGSMQNGNGSCLTVQGEYLQGEYQEYPQPDYGSFDMANEIVLHDLPQNNQSYELEQLPQNICESSSMQVGSPDQYCDDTSLSDYYMDDVSSIESMSSEQNRSEDICFRSESSTDSSPVPSSRNSTTEDADKYFGDAPKHLQNSMFPVSTQHQHSFMNSSDPMHPTFHKKYDIPRNGSSSILGNSSRNCFSLDSNRDSDLCILEGSRSLASGHVLPPQGLQHNFQQSVCANPNLPRFGGRYRPHEERMTLRLALQDISQPKSEANPPDGVLAVPLLRHQKIALSWMVQKERNGSSCSGGILADDQGLGKTVSTISLILTERSPVPSSAVKQEPCEAVTLDDDDEDDDAEPHLKKPALAHLADTCKPEATSSTIKTENPIANVKARPAAGTLVVCPTSVLRQWADELRNKVTSKANLTFLVYHGSNRTKDPNDLTKYDVVLTTYSIVSMEVPKQSSPDSDDEEKGKPDRYGAPVGSSGSKKRKTSSSKKNKSGSTPESKLPEKPLAKVAWFRVILDEAQSIKNYRTQVARACWGLRAKRRWCLSGTPIQNAVEDLYSYFRFLRYDPYAEYKKFCFMIKTPISRNPITGYKKLQVVLKTVMLRRTKATMLDGKPIISLPPKTVSLKTVDFTSEERAFYNTLEAESREQFKEYAAAGTVKQNYVNILLMLLRLRQACDHPHLVRGHESTSSWMSSLEMAKKLPVERQQSLLVCLQSCSAICALCNDAPEDAVVTICGHVFCNQCILEQLTGDDSVCPVSNCRVRLNSTSLFSRGTLECALSRSTCEFLSDDSCEDMVQGKQPRFDSSYASSKVRAALDILLSLPKLDLTHMSDDKNKIVHPDKINGNSTPSEYAGTKITEKAIVFSQWTRMLDLVEVHLKSSHLSYRRLDGTMSVAARDRAVKDFNTNPEVSVMIMSLKAASLGLNMVAACHVLLLDLWWNPTTEDQAVDRAHRIGQTRPVTVSRLTIKDTVEDRILALQEKKREMVASAFGEDKSGAHQTRLTVEDLNYLFMV

SEQ ID NO: 50245 - protein, 849 aa, Oryza sativa
MKGVDDAFLGVGDKPGLDIWCIMGSNLIAIEKSLHGKFYTGNTYIILSTVELKSGVRQHNVHYWVGEEAKEEDCLTASDKAIELDVALGSNTVQYRETQGEESDKFLSYFKPCIIPIQGSLSSHMRIYGDKSKDTTMFRCEGEHVARVTEVPFSRSSLDHKAVFVVDTESKIFLFSGCNSSMQTRAKALDVVKHLKENRHCGRCEIATIEDGKLVGDSDAGDFWNLFGGYAPIPRDVQDTVMTELMTTSSKKLFWINKRNLVPVETNLLEREMLNSDRNYILDCGTEVFLWMGMTTLVSERRTSVTALEDYVRCEGRQSNARSVILTEGHETVEFKMHFQHWPKNAVPKLYEAGREKVAAIFKHQGYDVTEIPEDKPRHFISCNGSLKVWLVDNGSVTLLCTEEQEQLYNGDCYIIRYSYIEDGKDYHLFFAWSGLNSINEDRVAAASLMSGMIDSVKGHAVVAQVFEGREREMFFLVFKSLIIFKGGRSMAYKNFVSQRSDANGWYQKNGVALFRVQGLKHDCIRAIQVDLAASSLNSSHCYILQAGGSFFTWLGSLSSPSDHNLLDRMMDKLCPLKQSLLVREGSEPDRFWEALGGRSEYLREKQVKDWPADPHLYTCHFEQGLFKAKEVFSFSQDDLVTEEILILDCVEELHIWVGHQSGVLSKEQALDIGKMFLQAGIHQDGRRPIDTTMYIVTEGDEPRFFTSFFNWDYSKQTMLGNSFERKLAILKGISQKLETPERSLRKSSSSSLPRRSPGTSSSEPTTPEQRAAARTFASASTGKLLRERSPAALSPSLSTPSPSPRSRSSASSSPASWNSTPSTVARRLFPPSLHASAEAVATGTPRRR

SEQ ID NO: 50246 - protein, 262 aa, Oryza sativa; identical to SEQ ID NO: 33290

SEQ ID NO: 50247 - protein, 587 aa, Oryza sativa; identical to SEQ ID NO: 43142

SEQ ID NO: 50248 - protein, 197 aa, Oryza sativa
MPLSYSAAAAAAPSPLAARSRGLLRRPPRSSPVVVRCKKIDQLRAVNGIPPYAPVSNRSLLSPVTLPIIRDANIKNDTRLRIFSGTANPSLSQEIASYLGLELGKINIKRFADGEIYVQLQESVRGCDVFLVQPTCPPANENLMELLIMIDACRRASAKNITAVIPYFGYARADRKSQGRESIAAKLVACLWSACDS

SEQ ID NO: 50249 - protein, 285 aa, Oryza sativa
MFNGPFDKAKLEASVLDKWLLINLQSTEEFSSHMLNRDTWANEAVAQTIRSNFIFWQVYHDTSEGRKVCTYYNLVSVPAILLIDPITGQKMRGWNGMIHPDRLLEDLMPYLDKGPKEHHAAQPQKRPRKVDQETSIGKQGKTPVPVVATEDEDEELARAVAASLEESKGSDTSEEKIEPEVENEPSLSAKLNYPPLPEEPKGSRELLCRVAIRLPDGRRIQRNFLHTDPIKLLWSFCYPQVGDGDKKAFHFVQPIPRASTNLEYESDKTFKEAGLANSMINLLWD

SEQ ID NO: 50250 - protein, 515 aa, Oryza sativa; identical to SEQ ID NO: 48240

SEQ ID NO: 50251 - protein, 660 aa, Oryza sativa
MATAVLTYLQSLWSLSALLREDDLRASARLLRGVPVPEETKQFVLALRDREPGSGSRGGVIYILAAQNLSERSASDADSLIRRVRPAAVVTQLAHTAADDVRAEEECLEGGGAGGVPASPFQVIKRCVTEKRSKDQYVKAAACQVLQEIFGVGFYGHVLAAKRAAEETGSCFLLLESPYERNCNGGASGGQSTMEEGSGQQLASRCSLAQSSTDDGTGGQSQGSCLLTQSTSSIVSSHVRKICLVDDIGGQLVKSLAPTVNLLMSQAISSDGVSECKLAECKPSDRYEAPPFAQTVYPLLADLYDIFVDIPSIGKAMASAQELLRQVHDGKPISTEMLSDVYVFRIAIEALRIGLNNAGRSHIDTRDNHGSKKLDFSELNSEEKCHILLVQALRSQVREFGSVVAVVDASCLAGIRRHWDTPVPSEIAQLASSCFKQYGNKNDSEDNELPSSVDSTDKKSWVAEKPVVVVGAGGTAILGFSSLSKTVQASAFLKLAPYKTPVVLKYGLIQLQRHASIVLSKVLSNGVFSASSNASVLQFTASSEKIRAVTHTVISSAKRTSLMAMRTSFYEIMQKRQKQPFRITPWATFGCSMAACAGLLMHGDGIECAAEVAPSVPMIATLGRGLEILRLTSQEVRQTRGQHIKEALGALMSNLKKTAK

SEQ ID NO: 50252 - protein, 316 aa, Oryza sativa; identical to SEQ ID NO: 32299

SEQ ID NO: 50253 - protein, 275 aa, Oryza sativa
MSSSTNSTVLAESVATGSSVDVELLPFVNDKHGGVIVEMTAPMDPQLFSASLKASLSKWREQGIRGVWIKLPISLANLIQYAVEEGFWYHHAEETYLMLAYWLPATTHTLPVNATHRVGVGAFVMNDKREVLAVQEKSGVLRGLGVWKFPTGVVEPGEDINLGAVREVKEETGIDTEFVEVLAFRQSHKAFFDKSDLFFVCILRPLSFDITKQDSEIEAAQWVPVEEFAAQPFVQKHELVKYILEVGLAKVDKDYAGFSPILIKSAFTDKNRSFT

SEQ ID NO: 50254 - protein, 564 aa, Oryza sativa
MSTPFDLNSAADPQTLAPPKRGRGRPRKNPPPPPPPATDPNPHPPSGAGAGAGAGAGACPFAPGDLVWGKKLSHPAWPGEVISAAPTGAQLLVSFFGDKALAWCDAAQLRPYEPYFPVAELYDGEADDFDAALDASLLEFERRVELALTAPGRIARPFLPRDFIALLHDLAAHRMGFSNRVHAAVAKAHLRAFDKFRGLPDPPEYTLHLGLPNVSAAAATPNNCNSYPPSRRRGRKRKEVEEEILDDSDEDWDPRKKGATDSDSEVDFDRKRVSKGGRGSGAPRGRPRGRPRKNNAGRPAHLKDEDEVIQETVEYQYPPAADMFLQLTSVAADPFNFKGYDSVPVILSFFSKYKDSEVPATYDDKELLQTLGGKKGRKNTARSLYPAAKEEGDLEVADGHRGRRKSAGSIYSARKAEDSYWCDIIISDFDDGDTSSDYEGRKMKRLSQNRSFNKKMKQEVAPQDEASADSPAVKQADGPAALILHFSNAEAIPSVDDINSIFRMHGPIMEGATEINKKSKIARVVFSKSADAEQAYSSSGKYNAFGPALLRYDLKYLPMVPQVP

SEQ ID NO: 50255 - protein, 316 aa, Oryza sativa; identical to SEQ ID NO: 28952

SEQ ID NO: 50256 - protein, 629 aa, Oryza sativa
MKNLCNLQELDLYDININSSISELMERLPKCSWNKLRKMDLHCANLTGELPTWIGHLASLSYLDLSENMIVGSVPDGTGNLTNLNYLDLSQNSLVGHIPVGIGAFGNLTSLNLGQNSFSGVLAEYHFATLERLEFLDLSSNSLKLDLHEAWIPPFKLKKGYFESCDLGPQFPSWLRWQTDIVVLDISNTSIKDDLPGWFWTVSYNAYELYLSSNQLGGALPEKLELPSMQAMDLSDNYLSGKLPANLTVPNLMTLHLHHNQIGGTIPACLCQLRSLRVINLSYNQLTGEIPQCSVDQFGFSFLVIDMKNNNLSGEFPSFLQNAGWLLFLDLSYNKLSGNVPTWIAQRMPYLEVLILRSNMFCGNLSNQLNKLDQLHFLDVAHNNISGSIYSSIRSLTAMKYSHTSGLDNYTGASISMSIKDQELNYTFQSTNNIMLIDMSYNSFTGPIPRELTLLKGLQSLNLSGNQLSGTIPNDIGILRRLESLDLSYNDLVGEIPSILSDLTFLSCLNLSYNNLSGRIPSGQQLQTLNNLYMYIGNPGLCGLPLSTNCSTNRTNKIVQNEHDDASHDTTYLYISTSAGFVVGLWIVFCTILFKKSWRIAYFQFFDQIYDKIYVQAAVSKAVLIRKFL

SEQ ID NO: 50257 - protein, 358 aa, Oryza sativa
MSCSHLSTAWSSSALATRRRSAPSCGSSGRLQVVRCSLRELRSRIDSVRNTQKITEAMKLVAAAKVRRAQEAVVSSRPFSEALVEVLYNMNQEIQTEDIDLPLTRIRPVKKVALVVLTGERGLCGSFNNNVLKKAETRIEELKQLGLEYTVVSVGKKGNAYFIRRPFIPTERTLEVNGIPTVKDSQSICDLVYSLFVSEAVDKVELLYSKFVSLVRSDPIIQTLLPMSPKGEICDINGVCVDATEDELFRLTTKEGKLTVEREKVKIETQPFSPVVQFEQDPVQILDALLPLYLNSQILRALQESLASELAARMSAMSSATDNAIELRKNLSMVYNRQRQAKITGEILEIVAGADALA

SEQ ID NO: 50258 - protein, 261 aa, Oryza sativa; identical to SEQ ID NO: 31083

SEQ ID NO: 50259 - protein, 386 aa, Oryza sativa
MAKPISIEVWNPSGKYRVVSTKSMPGTRWIRLLADNDCRLEICTETKTILSVDDILALIGDRCDGVIGQLTEEWGEVLFSALKRAGGTAFSNMAVGYNNVDVEAANRNGIAVGNTPGVLTETTAELAASLSLAAARRIVEADQFMRAGLYDGWLPHLFVGNLLKGQTVGVIGAGRIGSAYARMMIEGFKMNLIYYDLYQSTRLEKFVTAYGQFLKANGEQPVTWKRAATMEDVLREADVISLHPVLDKTTYHLINPERLAIMKKEAVLVNASRGPVIDEVALVEHLKANPMFRVGLDVFEDEPYMKPGLADMKNAVVVPHIASASKWTREGMATLVALNVLGKIKGYPVWGNPNLVEPFLKEDATPPAACHSIVNAKQLGLPSSKL

SEQ ID NO: 50260 - protein, 442 aa, Oryza sativa; identical to SEQ ID NO: 49240

SEQ ID NO: 50261 - protein, 822 aa, Oryza sativa
MSNLLPPWGFSRVNFEKLIANLGNLRELYLGLVYMSNGGEGWCNALANSTPKIQVLSLPLCQISGHICQSLFSLRSLSVVDLQGNDLSGAIPEFFADLSSLSVLQLSRNKFEGLFPQRIFQNRKLTAIDISYNYEVYGDLPNFPPNSSLIKLHVSGTKFSGYIPSSISNLTDLKELSLRANNFPTELPSSLGMLKSLNLFEVSGLGLVGSMPAWITNLTSLTDLQISHCGLSGSLPSSIGNLKNLRRMSLFKSNFTGNIPLQIFNLTQLHSLHLPLNNFVGTVELTSFWRLPYLSHLDLSNNKLSVVDGLVNDSAVSSPKVKFLSLASCNISKFPNALRHQDKIIFLDLSNNQMNGAIPTWAWETWKESFFLDLSNNKFTSLGHDTLLPLYTRYINLSYNMFEGPIPIPKESTDSQLDYSNNRFSSMPFDLIPYLAGTLSLKVSMNNVSGEVPSTFCTVKSLQILDLSYNILNGSIPSCLMENSSTLKILNLRGNELRGELPHNMKEDCAFEALDVSYNWIEGTLPKSLVTCKNLVVLNVANNQIGGSFPCWMHLLPKLQVLVLKSNKFYGPLGPTLAKDDECELQYLRILDLASNNFSGVLPYEWFRKLKSMMSVSINETLVMKDGDMYSTFNHITYLFTARFTYKGLDMMFPKILKTFVLIDVSNNRFHGSIPETIATLSMLNGLNMSHNALTGPIPNQLASLHQLESLDLSSNKLSGEIPQKLASLDFLSTLNLSDNMLEGRIPESPHFLTLPNSSFIRNAGLCGPPLSKECSNKSTSNVMPHLSEEKSADIILFLFVGLGFGVGFAIAIVVRKPCIGK

SEQ ID NO: 50262 - protein, 280 aa, Oryza sativa
MNRGEVVRTLSTRARIEPGFTTLVWQKLEEENSEFFRAYYIRLKLKKQINLFNHLLEHQYHLMKYPVPQQVPLTPTQNGIRPMPVDNLPMGYPVLQQPGIPAPVQPHVNSISCGPPGCHVVNGIPAPGGYNPIRMSSGNGMTENEVPGTAHAGAMSSEMAVSPSSAMSSNHVSFTPDISGMDVDASTVNATFGDDLGNGGPLQIGPNGGDSSSLGQQIWDFSLSDLSADLTNLGDLAALENYSGNPFLPSDSDIFESPDDDIVEYFADAINGPSQSDEEK

SEQ ID NO: 50263 - protein, 142 aa, Oryza sativa
MELWQKPTGYKLMQSEATSSATYLISADWTITESCKLSYKITLEDGEVDVYWLNTMGQEFLYEQLIFHKEEFATVWVYQSTSFIKSKGSGRVVTIAASTSFTNSIPLPLQYWNYGSVWKLQFCCMVFLISVKQACGAYGYLG

SEQ ID NO: 50264 - protein, 549 aa, Oryza sativa
MAAAAARRGSSLLSRCLLSRPAAAASPAVPSALRRADGTQGLLPGILQRFSTAAVAEEPISPPVQVNYTQLLIDGKFVDSASGKTFPTLDPRTGELIAHVAEGDAEDINRAVHAARKAFDEGPWPKMTAYERSRILLRFADLIEKHNDEIAALETWDNGKPYAQAANIEVPMVARLMRYYAGWADKIHGLVVPADGPHHVQVLHEPIGVAGQIIPWNFPLLMFAWKVGPALACGNTVVLKTAEQTPLSALFASKLLHEAGLPDGVVNVVSGFGPTAGAALASHMDVDKIAFTGSTDTGKVVLELAARSNLKSVTLELGGKSPFIIMDDADVDHAVELAHFALFFNQGQCCCAGSRTFVHERIYDEFVEKAKARALKRVVGDPFKNGVEQGPQIDDEQFNKILRYIKYGVDSGANLVTGGDRLGDKGYYIQPTIFSDVQDNMRIAQEEIFGPVQSILKFNDLNEVIKRANASQYGLAAGVFTNNLNTANTLTRALRVGTVWVNCFDVFDAAIPFGGYKQSGIGREKGIDSLKNYLQVKAVVTPIKNAAWL

SEQ ID NO: 50265 - protein, 69 aa, Oryza sativa; identical to SEQ ID NO: 43288

SEQ ID NO: 50266 - protein, 497 aa, Oryza sativa
MATASSPASVQDYPDLQEDDDDDFQDDDDLDDEDEEDDDDQEPSPSPSDEARLQSVLRRLTAEEVRIRVHDVEIRGCCRTRRAAVEAAVGSDLPRAATVRDLVRAAAAAADRIRRLGAFDTVSITLDAAPPGIPGNAAVIVLVDVAEARGRAAGELGIFANKGTRSCSVQGSVKLKNLFGYCETWDASGDLGLDQTVELSTGVAIPRIGAIPTPLVARISFLSEDWLKSSLREHMMGVSVGLLSTMNHNLAYNLSWRTITDRALMSSNSIRGQLGHSLLSSIKYAYKVDQRDSRIRPTRGYAYLFSSQVGGLAPESKDARYIRQELDLRVALPLGVLNGALNAGVAAGIIHPLARGSTGSISPLSEQFYLGGNRSLMCRLGGPSSLLGFKKRGLGTDLQSSTPENSENVASTSPELSARGGDIAVTAFADLSFDIPLKPLRELGIHGHAFVSAGNLAKLTEPDLRKFPLAEFLQTFRSSAGFGVVVPTRLFRIEVCL

SEQ ID NO: 50267 - protein, 535 aa, Oryza sativa
MAARRWAWGPPARAFSTITAKATVPLAHLAELPTSLQTSRYTVTPPVQPWPRRLTARSLARLLLRLPTPHLAVLAFRHALFHAAPPLPPSLPVFAAVLSRLPAADPALLPPVLSALRAANLPAFSDRPFLPLLRSLPPLPSLRLFLSLPSFNSHPSVRSFNALLHSLVSARRLRLAAALFRAAPTKLYITPNLVSCNILLKGLVGIGDLDAALKVLDEMPGLGITPDVVTYTTVLSAYCGKGDIEGAQKLFDDIIASGRRPDVTMYTVLIDGYCQCGNLQDAARIMDEMEAARVQPNEVTYSVVIEACCKEEKPIEARDFMREMLGAGYVPDTALGAKVVDVLCQDGKSEEAYQLWRWMEKKNVPPDNMVTITLIYWLCKNGMVREARNLFDELERGFKPSLLTYNSLISGLCENEELQEAGRVWDDMVERGYEPNAMTYEALIKGLCKTGKPNEGATVFEEMVSRGCKPSSLLFQVLVDSLSEPRHEDTIRKILETAALYGRYFLDGDSWEIFVRKVVNATDTSNKHLDLVLDM

SEQ ID NO: 50268 - protein, 423 aa, Oryza sativa
MEALRFVRGISPAASAAPQPPPPPVAQRHHQQQPSRGVLHAPLLRLWPLGGGGGGGGGGGGGGGGERVGAGGGAVRGEEARSQRAAEAEADERKQGNWVLQMLRVQPQWAEAADAEAAGVTGAAREGGQEALTAGRDGDECCASCGGGDDEGCCGVEEDDESDGKVFDRATFSRLLRKVSLGEAKEFSKMSYLCNIAYMIPKITPKLLRRYNLRFVTSSVQEKAKTGVDQKQELKTEEGESSDQESEVVENPEPGSNKKKESGLGVNPFGAYHVMSSAASYLHSRAMGVVPFGSRNDGKNDPTIMAIVNGESGEGLTMDEASFVATTNSVTSMVAAKEETRQAVADDLNSSRSCPCEWFICDDDQGQHKILCGSGPRSQSLLGRPTSYLNQLNLRDSMCSFIGEYMKQPRECITKCCHMSNLT

SEQ ID NO: 50269 - protein, 414 aa, Oryza sativa
MALELSLVSASPPGGLAASPPPPAAIPGKEQQVAGVGILLQISMLVLSFVLGHVLRRHRFYYLPEASASLLIGLVVGGLANISNTETNTRMWFNFHDEFFFLFLLPPIIFQSGFSLSPKPFFANFGAIVTFAILGTFIASVVTGVLVYLGGLTFLMYKLPFVECLMFGALISATDPVTVLSIFQELGTDVNLYALVFGESVLNDAMAISLYRTMSLVRSQAAAGENFFMMVFQFLETFVGSLSSGVGVGFISALLFKYAGLDIDNLQNLECCLFVLFPYFSYMLAEGLGLSGIVSILFTGMVMKHYTFSNLSNNSQRFVSAFFHLLSSLAETFVFIYMGFDIAMEEHSWSHVGFIFFSIIFIIIARAVNVFSCAYLVNMSRPEHRRIPLKHQKALWFSGLRGGHGFCTCSPICQ

SEQ ID NO: 50270 - protein, 570 aa, Oryza sativa; identical to SEQ ID NO: 48418

SEQ ID NO: 50271 - protein, 120 aa, Oryza sativa
MQVFVHIFMATLPCSFLDRFSGSYNNTSLLKMLLYIPDAWWLSLVFKALTRKFTDPEAFYLLRNITGLYHQTAATTFNIHEGVIALAYLIKGVQVVNSSLPVDQKGMLTCPTTDHLLFHP

SEQ ID NO: 50272 - protein, 607 aa, Oryza sativa
MDDVDSVVGSGDKAGEAPGDDGSSTPLPETVQVANSPTYKLDRKLGKGGFGQVYVGRRISSPGVTDRTPGANALEVAIKFEHRTSKGCNYGAPYEWQVYNTLSGIHGVPRVHYKGRQGDYYIMIMDMLGPSLWDVWNNNSHSMSVEMVACIAIEAISILEKMHSKGYVHGDVKPENFLLGTPGTLEEKKLFLVDLGLATRWKDTGSGEHVEYDQRPDIFRGTVRYASVHAHLGRTGSRRDDLESLAYTLVFLLRGRLPWQGYQGENKGFLVCKKKMATSPESLCCFCPQPFRQFIEYVVNLKFDEEPNYAKCISLFDGIVGPNPDIRPINTDGAQKLIYQVGQKRGRLTMDEDDDEQPKKKIRMGMPATQWISVYNARRPMKQRYHYNVADGRLAQHITKGNEDGLFISSVASCSNLWALIMDAGTGFTSQVYELSQHFLHKEWIMDQWERNFYITSLAGANNGSSLVVMSRGTQYAQQSYKVSDSFPFKWINKKWKEGFYVTAMATAGSRWAVVMSRNAGFTDQVVELDFLYPSEGIHRRWDNGFRITATAATWDQAAFILSIPRRKPADETQETLRTSAFPSQHVKEKWSKNLYLASICYGRTVS

SEQ ID NO: 50273 - protein, 665 aa, Oryza sativa
MSGRDVLVIMAAGGGKSLCYQLPAVLHDGITLVVSPLLSLIQDQVMGLAALGIQAYMLASTTNKEVEKFVYKALDKGEGELKILYVTPEKISKSKRFMSKLEKCHHAGRLSLIAIDEAHCCSQWGHDFRPDYKNLGILKVQFPSVPMIALTATATNKVQIDLIEMLHIPRCVKFVSTINRPNLFYKVFEKSPVGKVVIDEIANFISESYPNNESGIVYCFSRKECEQVAKELSERGILADYYHADMDVISREKVHMRWSKSKLQVIVGTVAFGMGINKPDVRFVIHHSLSKSMETYYQESGRAGRDGLPSECILYYRPGDVPRQSSMVFYENCGLQNLYDIVRYCQSKRSCRRGAFFRHFGEAAQDCNGMCDNCTSSLELKEIDATRMMILHQLGNFTVALNYILDTCMFFSLYFYKMVFLGDIFLGKISFMYIYTSIVSMTYCTDHTKIIVSLLHDIQLNDQRATLLQLVDKFKAKWKDLGCSNESIDLKKEGIEQLVVQLILDRVLKEEFQHTAYATNAYVALGPLWKPALQGNRPVKLSVAFHSQDKGSGSKRTKRNQMSNLEAKLDDLRRELSSSNGGVFPHAVLSAQQISLLNRQKPTTVAELEKLIGKVKTGKYGSAIIELMLLHIDSEVAGGKACASKRQKKDKEDVICVESSEEEDV

SEQ ID NO: 50274 - protein, 120 aa, Oryza sativa
MSLRRHHLAVKWEDGHLCICYLTLYIMGLLYSCYALSGQFILWSVAMLFLSERLSIQSIVWSLNYCMGAYYLFYRIRGMESLNCYIGAYFLFHLIRDVKILWAYSLFYLIIDVGSTCTLT

SEQ ID NO: 50275 - protein, 592 aa, Oryza sativa
MAVTESLPLPAMENGEGKGGGEYTQDGSVDLRGNPVLRSKRGGWTACSFIVVYELFERMAYYGIASNLVIYLTDKLHQGTVEASNNVTNWSGAVFIMPLLGAYAADAYLGRYWTFVAGSAIYFLGMCLLTLAVTIPSLKPPPCAGGVCPPASALQLGVYFGGLYIIAFGNGGTKPNISTIGTDQFDEFDPREKMHKMSFFNWWMFTIFVGILFSSTVLVYLQDNVSWSVGYGIPTLGLLVSISIFLAGTPLYRHKVPQGSPVHPHGQGRRRRRLEVARGRAGGRQGAARAGARGVHEEAQVQDGLHQRHEVPKQGRREGGRLAGGEVEPVHGDPGGGDEADRQGDPSAGDHVRAVHAHRADEHPIREAGQDDGPPHRAPLPDPSGQPRRVRHPEHARRRRGVRPAVRPGHPEVHQEPEGHHAAEADGRRAAAAGGGDGDGVADGEPAAGVRAAARAGRRRRGGSRAAHHLRAAAAVRADGGGGRVPGGGQDRVLLRPGAGEHEEPRHGHVADGVRRRQRAQQLPPLARVARHAGAGRRLGHQQPQRLAPRLLLRLPHCPRRHQRRRLRRAQQQVQVQGRVDGDDRHRRGREG

SEQ ID NO: 50276 - protein, 705 aa, Oryza sativa
MSSSSSSVVYEGWMVRYGRRKIGRSFIHMRYFVLETRLLSYYKRKPQHKMPKLPIKSLHIDGNCRVEDRGLKMHHGHMLYVLCVYNKREKHQRITMAAFNIQEALIWKEKIEMVIDQQQGVVASDGNLAHSSSQQKVSLENGRKSSFSDHESLYSHEEEEEEEDNQRSLMRRTTIGNGPPESLYDWTRENDLGISNQGSPDHVFSRRHWRLVRCQNGLRIFEELQDVDYLARSCSRAMKAVGVVEASCEAIFQLVMSMDTTRYEWDCSFQLDWFSMFVWPRDLCYVRYWRRNDDGSYVVLFQSREHPNCGPQPGFVRAQIESGGFNISPLKSRNGRIRTQVQHLMQIDLKGWGVGYLPSFQQHCLLHMLNSVAGLREWFSQSDENLILPRIPVMANMAPPVSSKKGRTTQDNTMQTGLQMDQSRQSTMLDEESDEDGDQIPESEQETSTHGHDAPVKLPVLDEEDSDQIDVSGFSGNLRRDDRDNTRDCWRMSDGNNFRVRSKTFIYDKSKIPAGKPLMKLVAVDWFKDVKRMDHVARRKGCAVQVAAEKGLFALAVNLQVPGTTNYSMVFYFVTKKLIPNSLLQRFVDGDDEFRNSRFKLIPSVPKGSWIVRQSVGSTPCLLGKAVDITYIRGPNYLEIDVDIGSSTVANGVLGLVCGVITTLVVDMAFLVQGNTYEELPERLIGAVRVSHIELKSAIVPVLGD

SEQ ID NO: 50277 - protein, 817 aa, Oryza sativa
MAHLLLHGTLEATILEADHLSNPTRATGAAPGIFRKFVEGFEDSLGLGKGATRLYATIDLGRARVGRTRVVDDEPVNPRWYEVFHIYCAHFAADVVFSVKAAQPIGATLIGRAYLPVRELLSGEAIERRLDILDAGRRRISHGPTIHVRLQFRDVAGDRHGWGRGVSGARYPGVPYTFFSQRPGCRVTLYQDAHVPDAFAPRIPLAGGGYYRQGRCWEDVFDAISNAKHLIYLTGWSVYTEITLIRDGTRQRPGGDATLGELLKRKASEGVRVLLLVWDDRTSVESLGMKWGFMSTHDAETADYFRGTDVRCVLCPRNPDAGRSAIMGAQIAYMITHHQKTVIVDHDMPVPRGGGSRRIVSFVGGLDLCDGRYDTQFHSLFRTLDTAHHSDFHQPNLDGAAVTKGGPREPWHDIHSKIEGPAAWDVLYNFEQRWRKQGGDKDLLLDLKAMADLIIPPSPVMFPDDGEAWSVQLFRSIDGGACFGFPSTPEAAARSGLVSGKNNTIDRSIQDAYIHAIRRAKNFIYIENQYFLGSSFAWKADGIRPEDIEALHLIPREISLKIVNKIEAGERFAVYVVLPMWPEGPPASGSVQAILDWQRRTMEMMYYDIAVALEAKRINADPRDYLTFFCLGNREVKLNGEYEPAGRPLDGTDYAKAQKARRFMIYVHSKMMIVDDEYIIVGSANINQRSMDGGRDSEIAMGAFQPCHLNTKGLVARGQIHGFRMSLWFEHLGMLHDNFLNPESLECVQRVNKMADKYWDLYASDELNDDLPGHLLTYPVRVTKEGTVTELPGAKFFPDTQAPVIGTKGNLPPFLTT

SEQ ID NO: 50278 - protein, 820 aa, Oryza sativa
MNALIEIKCSEASHSLQAGDDTAMNLLASVAGEISKSELISSSASPRNSPGNEEGCEGDNIGKLKVQSDMGLSRHAGPTNDAEKIISDKGEKIGAGLVAKEEQHLGDAKDNKVTSSGLPSPPGIDVKAVESPAKTENHEVRTTDKGGDGDKSVTKQPVDIKIDAKLNIYPSTTSELRGGDKQSHGLLKSTDQKNRQCLPDNSEAIDRSGDSAAVKLDVEPSFSSSTVEVNKADGLLVGNAVLREDEKKEQPSSTSADATKLAVPAGVPFGPENGISSKELKDNSSESSSHARPGTTVSQDTERSARRSSKKSSDDASGNEDLVSSDDGSSFAAKIRPSATAKLDFDLNEGIPGDDVHQSEAETSPAVCSSAINLPCLSPFISPMSSGLPAPIKVAATAKGPFVPPENLLRFQPETGWKGSAATSAFRPAEPRKIFEMTLSAPGIPVSDAADKHRPALDIDLNVADEQFLEEDISQSSVQTTGSESGNTRRSNGPVRSVGIELDLNRADEVAENHFVSNTPHRVEVPLLSSRPLPAIFSSADTNGSRDFDLNNGPTLDETGTEHAARSLSSKNTSSIPFIPQVAGGRMNSAEMSNISPWFASAHPYAPVAAQPFLPSRGEQPHPVETAAGSGTQRIITSLADGVQRGSDPCRAPVISTSPTMVFHPPAYQYAGFPFTPGVHLQAPGFSIGSTSYANSAPAGVPYFPSIAPTLLGPAGALPAQHTRQYAINLPEGSSTVGHDSNRKWGRQGLDLNSGPGSVDAEIKDERVSLPVRQNLITPPHAFGEEHTRMYQMPSVGIKRKEPEGSWDAERSSYKQLSWQ

SEQ ID NO: 50279 - protein, 791 aa, Oryza sativa
MASLSESEGTNRGSMWELDQNLDQPMDEEASRLKNMYREKKFSSLLLLRLAFQSLGVVFGDLGTSPLYVFYNAFPHGVDDEEDVIGALSLIIYTLTLIPLLKYVFVVLRANDNGQGGTFALYSLLCRHAKISTIPNQHKTDEDLTTYSRQTYEENSVGAKIKRWLEAHAYKRNCLLIVVLIGTCTAIGDGILTPAISVLSASGGIKVQNPNMSTDVVVIVSVIILIGLFSMQHYGTDKVGWLFAPIVLLWFILIGSVGALNIHKYKGSVLKAYNPVYIYRYFQRRNSDSWASLGGIMLSITGTEALFADLCHFPVFAIQIAFTLIVFPCLLLAYTGQAAYIIAHKDHVADAFYRSIPDSIYWPAFVIATAAAIVASQATISATYSIIKQALALGCFPRVKIVHTSKKFLGQIYIPDINWVLLILCIAVTAGFKNQSQIGNAYGTAVVIVMLVTTFLMVPIMLLVWKSHWILVVTFIVLSLMVEIPYFSACLLKIDQGGWVPLVIATAFFIIMYVWHFCTVKRYEFEMHSKVSMAWILGLGPSLGLVRVPGIGFVYTELASGVPHIFSHFITNLPAIHSVVVFVCVKYLPVYTVPMDERFLVRRIGPKNFHIFRCVARYGYKDLHKKDEDFEKMLFNCLLSFLRLESMMEGYSDSDDFSVPEQRTEGSISNAFLAEKTNNNTMCSNGDLSYSSQDSIVPVQSPLRGNSLLRYSSQASHTVSDELEFLNRCKDAGVVHILGNTIVLARRDSGIIKKIAVNYMYAFMRKICRENSVIFNVPHESLLNVGQIYYI

SEQ ID NO: 50280 - protein, 508 aa, Oryza sativa
MDPRARYPPGIGNGRGGNPNYYNRGPPLQQQHNHHQQQQTSAPHHQQYVQRQPQQHHHHNHHQQHQQQQQQWLRRNQIAREAAGTDRNSEPKAVAQSPAVDGIDSSSQDWKAQLKLPPQDTRYRTEDVTATKGNEFEDYFLKRELLMGIYEKGFERPSPIQEESIPIALTGSDILARAKNGTGKTAAFCIPALEKIDQEKNAIQVVILVPTRELALQTSQVCKELGKHLKIQVMVTTGGTSLKDDIIRLYQPVHLLVGTPGRILDLTKKGICILKDCSMLIMDEADKLLSPEFQPSVEQLIRYLPASRQILMFSATFPVTVKEFKDKYLPKPYVINLMDELTLKGITQFYAFVEERQKVHCLNTLFSKLQINQSIIFCNSVNRVELLAKKITELGYSCFYIHAKMLQDHRNRVFHDFRNGACRNLVCTDLFTRGIDIQAVNVVINFDFPKTAETYLHRVGRSGRFGHLGLAVNLITYEDRFNLYRIEQELGTEIKPIPPQIDQAIYCQ

SEQ ID NO: 50281 - protein, 462 aa, Oryza sativa
MLEKKATRSTRVDGVSGEAVIEEFERVTRDAANVQRETLRRILAENGGVEYLRGLGLAGATDPATFRARVPLATHADLEPYIDRIADGDASPVLTAKPATSISLSSGTTQGKRKYLLFNEELVKSTMQIYRISYAFRNREFPVENGKALQFIYSSRETRTKGGLTATTATTNVYRSEEFKATMRDIQSQCCSPDEVIFGPDFAQSLYCHLLAGLLAAGDVQIVSATFAHSVVLAFQTFERAWEDLCADIRRGEVSPSRVTSPAVRRAMAALLAAPNPGLADEVARKCAALSNWYGVIPALWPNARYVYGIMTGSMEHYVKKLRHYAGGLPLVAAEYGASEGWVGANVEPGTPPERATFTVLHDIAYFEFIPLKPVAGDGGYAEAEPVGLTEVAAGELYEVVMTTFAGNTRSSSSCMTLVAYYYLQSKKWMNICRFCISVHETSRNLVTCTFAATGHIMFAQK

SEQ ID NO: 50282 - protein, 842 aa, Oryza sativa
MGSTRSKNEDDKAIVLCHERKRYVREALDGRCAFAAAHFAYIQSLRHTGFALRKFLEPEVPTDSSLYTSTSATPEPPTIRQKSRNLSPSISHQASDSFSPVPSPLSSGRFRINHMKSGGNPVMTIEEKVPVPVTATLQTSSLVPKAVHDLDDSSTFEAPPGTPPWDYFGLFNPVENQFSFHDEKEPGHDFENADIRRLREKEGIPELEEEGEKTPVHPDNVRRFRDEKTSDLKDAEKSPINGREDDFAESEDDFDNPSSEPLVRVFQNRNDMPVENTVMNQTPEHVASEKLASENSVSFSRKQENSDSFSRKQENSDSFSRKQENSDSFSRKQENSDSQIDRPNNDKEVLDISMFESDDESPVASPVKEVRSSIAALPMNGKSKEPFHDVRNGAKDLHSCMKEIEILFIRASDSGKEVPRMLEADKVNFRPLLPEEKAHGSKASGFFATFFACCGGEEIPIPQPPPEAEVKYLTWHRSVSSLSSSSRIPLGVTSKDDADGLTGNIFSGVYMNSGSHASTLDRLYAWERKLYDEVKASGAICRQYDEKCRQLRHQESKAESQMSIDRTRATVKDLHSRIIVAIQRIDMISKNIEDLRDKELQPQLEELIGSLTRMWSTMLECHKHQREIIKSSSGNTKVLIRSESQFQAALLLQVELNTLYSTFLKWIAYHRSYLHSLNSWLLKCVKPLRGKKSSRRKKEADTPITKFAVAPMFKTCESWIKLLDDLPTKDLEDAIKGLVADINHSVPRQEKRRGTSKLTSSLSRSSSTKTISSFSRNGELNGEMSEIHRNSHTTDLQSSLETFLEGFAEFSDVSLKKYMELAVDINKAKEQYENVKLKNMGK

SEQ ID NO: 50283 - protein, 281 aa, Oryza sativa
MSYRSNQFSLFHYIQTPGLNVITEYIIGYLYPGRPVANMCFKVYGYISMKQALAFLEDFKLGHYMKIPPRTMFMAQVVGTSIAAFVYIGTAWWLMETIPNICNTELLPSDSPWTCPGDHVFYDASVTWGLISPRRIFGDLGTYSALNWFFLCGAIAPLLVWFAHKTFPGQNWILLIKTPVLIGATFQMPPATAVNYTTWILVGFLSGYVVYRYRRDWWERHNYLLSGALDAGLAFMAVLIYLCLGLEDISLNWWGNDLDGCPLASCPTAKGIVVKGCAVYT

SEQ ID NO: 50284 - protein, 548 aa, Oryza sativa
MAAASSAHYFGLGEPQMQQQQQQPPLQNNAAAPVAATPPPKKKRNQPGNPNPDAEVVALSPHTLLATNRFVCEVCNKGFQREQNLQLHRRGHNLPWKLKQKNPKETRRRVYLCPEPSCVHHDPSRALGDLTGIKKHYSRKHGEKKWKCDKCNKRYAVQSDWKAHSKTCGTREYRCDCGTLFSRRDSFITHRAFCDALAQESGRIMPPMGAALYAAAGAGMAIGGLTGMAASHQLQPFQDHSSAITTAANAAAQFDHLMATSSAAAGSPAFRAAQPTSSSSSPFYLGGGGDDGQAHTSLLHGKPAFHGLMQLPEQQGSNGGGLLNLSYFSGGNGGHHHHHQEGRLVFPDQFNGVAAGNGARAGSGEHGNSGNNADSGSIFSGNMMGGGGGFSSLYSSSDQTVPPPQMSATALLQKAAQMGATTSSGGAGSVNSLLRGLGSGGGGGALNGKPAGAAGFIMSGESSSRSTASQTAENESQLRELMMNTLSATGGGTGAGTVFVGGGFPGVDDGKLSTRDFLGVSGGAPGLQLRHGGAAGMGMAGSLDQEMK

SEQ ID NO: 50285 - protein, 115 aa, Oryza sativa
MPCSPFFVLTASIFGQVVTTVTVDELTPGLKSILSFAVPDQRSGKFELQYSHDYAGVSASIGLTASPVVNLSSVFGTKALAVGADVSLDTATGNLTKYNAGLSFSNDDLIASLNL

SEQ ID NO: 50286 - protein, 600 aa, Oryza sativa
MESHDGGGGGGGDGDSLFEGMVLFTPSLSVDPDPAPPVAEAPDPKPPTPRDDAAVAGADGAASQQQPPPPLDEDLFSDLTLLSPQSPVDLSGAHQGQDQDHSAAAPPSPVPAPAAPVAVLARQASSSASSSLRKKKRAVRIGYGRSPQPAPPSPPAVAIAATTATAAATASVIHGSVLPDASMHHQSAPTIPVHHLEHLDNGVEQAAAVAVVDPDENSLHVKEEDGELEEDGGAGAEAMGIEERLALLRSQISGKLESIQQRATAVAAKRRQLAGRRRKVAEDVGSAASRHKDLERELEEACEAEDFERAEKISDSLAALEKDKDRLLTALRDAELNYDSVDLELQDVLDSRIAAEEEAASLLEHFAKDATDHTDSASKEAEEISLKEIEGWRESMELLETKKLETEVESELVLAARSGLEDSIEHLVEDDKREKDMLSKKGDTLAEELTELLKLVRLKEAEIAENNAQIQEVQERITAVVSRFYGSQTDIDLKLKTLQEAQTKMDSEAQALALKKNEIDSFISLSEQKDSKLREIINDCSSEAKACQQSVDIRRKLASSILKSREDRIGLLKMEEEILQDIQVLRQQTSDARISLQEIS

SEQ ID NO: 50287 - protein, 183 aa, Oryza sativa
MPCAAAELANGEAAAAAACAVKVGTTGTIGSLMTRELEAIKAAPPHATAAATTPRRLRRQSSPVSVPCGASPRKIAALRKSSSSLSTTSSGGGSGRRTDRVSAEESSACKTAACRRSSSTTPASSPMLAADVDRSGGGGKAKKAAARGRRGVGGVEVVDVRCGNPMSSRLRRLGFSKLSETFA

SEQ ID NO: 50288 - protein, 824 aa, Oryza sativa
MPSLPNSGDEGGAPPPTPPPPGARRVVVAHRLPLRADPNPGAPHGFDFSLDPHALPLQLSHGVPRPVVFVGVLPSAVAEAVQASDELAADLLARFSCYLVFLPAKLHADFYDGFCKHYMWPHLHYLLPLAPSYGRGGGLPFNGDLYRAFLTVNTHFAERVFELLNPDEDLVFVHDYHLWAFPTFLRHKSPRARIGFFLHSPFPSSELFRAIPVREDLLRALLNADLVGFHTFDYARHFLSACSRVLGLSNRSRRGYIGIEYFGRTVVVKILSVGIDMGQLRAVLPLPETVAKANEIADKYRGRQLMLGVDDMDLFKGIGLKLLAMERLLESRADLRGQVVLVQINNPARSLGRDVDEVRAEVLAIRDRINARFGWAGYEPVVVIDGAMPMHDKVAFYTSADICIVNAVRDGLNRIPYFYTVCRQEGPVPTAPAGKPRQSAIIVSEFVGCSPSLSGAIRVNPWNVDDVADAMNTALRMSDGEKQLRQEKHYRYVSTHDVVYWAQSFDQDLQKACKDNSSMVILNFGLGMGFRVVALGPSFKKLSPELIDQAYRQTGNRLILLDYDGTVMPQGLINKAPSEEVIRTLNELCSDPMNTVFVVSGRGKDELAEWFAPCDEKLGISAEHGYFTRWSRDSPWESCKLVTHFNWKNIAGPVMKHYSDATDGSYIEVKETSLVWHYEEADPDFGSCQAKELQDHLQNVLANEPVFVKSGHQIVEVNPQGVGKGVAVRNLISTMGNRGSLPDFILCVGDDRSDEDMFEAMISPSPAFPETAQIFPCTVGNKPSLAKYYLDDPADVVKMLQGLTDSPTQQQPRPPVSFENSLDD

SEQ ID NO: 50289 - protein, 504 aa, Oryza sativa
MPEEQQEAEEGIAGGGGGWASTALQPVRWLRMLCRELGATFVAGVVLVYGLSQGFAGSFFRVASDYYWKDVQRVQPATVQLLSAVFFIPWVLKPLWGIMTDVFPVRGYRRRPYFLFAGVLGTASAAIVTMVNGLPMTSAILSFVGISTAVAIADVTIDACIAKNGIDKPSLVPDMQSLCAFSSSLGALIGYATSGMFVHHLGAQGALGVMALPPATLVFLGFFIYELKMYQHNVKEKVLNKVHMAVKGMAQTIKYPVVWKPSLYMFLSLALSISTHEGQFYWYTSKEPPNPGFSQEFVGMVHAIGAVASMVGVLVYHKYLKDYPFRSILFYAQLLYGVSGLLDLTFVLRWNLLLGVPDAAFVTLEECCARVVGRVRLMPMMVLSTKLCPPGAEGTFFALLMCIDSAGMLAAKAGGAAVLRALRVTRTDFARLWLAVLVRNLLRLSTLAAISLVPTADQTDVLLPRDLLAVAGDGSPPAAGDGDDEERLQLAKFADHVDDDDDDD

SEQ ID NO: 50290 - protein, 211 aa, Oryza sativa
MLIAYLAYLFFQLNTHRQLFEPQQVEDDDDDDLVIAQDDEPVLGFSSAMIWLALMTLLTALLSGYVVSTIEAASESWELSVSFISIILLPIVGNAAEHAGAVIFALKNKMDITLGVSLGSATQISMFVVPVSVIVAWTMGIPMDLDFNLLETGSLFLAILVTAFTLQEGESHYLKGLILVLCYAVISVCFFVIRRRSAGGTDGVHHLDVIV

SEQ ID NO: 50291 - protein, 607 aa, Oryza sativa
MSRFVDKLPLFDRRPSPMEEAEGLPRSGYLGQLHHHQYYQPHSNMLPLEQSPPTSTKHTSVTLAQLLKRVNDARSGSSTPISSPRYTIELGGSKPESVSSESDDHHSDDGGSEGQPRALVLKFTDLTYSVKQRRKGSCLPFRRAAADEPELPAMRTLLDGISGEARDGEIMAVLGASGSGKSTLIDALANRIAKESLHGSVTINGESIDSNLLKVISAYVRQEDLLYPMLTVEETLMFAAEFRLPRSLPTREKKKRVKELIDQLGLKRAANTIIGDEGHRGVSGGERRRVSIGVDIIHNPIMLFLDEPTSGLDSTSAFMVVTVLKAIAQSGSVVVMSIHQPSYRILGLLDRLLFLSRGKTVYYGPPSELPPFFLDFGKPIPDNENPTEFALDLIKEMETETEGTKRLAEHNAAWQLKHHGEGRGYGGKPGMSLKEAISASISRGKLVSGATDGTVSVAASDHSAPPPSSSSVSKFVNPFWIEMGVLTRRAFINTKRTPEVFITRLAAVLVTGFILATIFWRLDESPKGVQERLGFFAIAMSTMYYTCSDALPVFLSERYIFLRETAYNAYRRSSYVLSHTIVGFPSLVVLSFAFALTTFFSVGLAVA

SEQ ID NO: 50292 - protein, 577 aa, Oryza sativa; identical to SEQ ID NO: 42812

SEQ ID NO: 50293 - protein, 269 aa, Oryza sativa; identical to SEQ ID NO: 46142

SEQ ID NO: 50294 - protein, 602 aa, Oryza sativa; identical to SEQ ID NO: 36761

SEQ ID NO: 50295 - protein, 519 aa, Oryza sativa
MEQAVSMRQTGEVICRLHMWNRDGLSTAANSHYECINRPPLSIRTNLTHFCSCPCDSSERSSPDNYASSVASDSNGGGIGARNGHPLRYSSNVHLLDENVNLISTESVAQLDTAMGRCGEIIGDHREELLMVFTNNSDMLSSLFYEYDTPWILGKNTKTSMDFSKCEDLGKDYLIMLKISTKVLQSMFCQFCGQNQPFFQTKKDYFQQFAKSPIKKMLEIALSFSESNWSEEHIRPMLLAYDTLQDVLPTIRELSPDEPDEFFTSILHNMRNASRGIIDNMKRFIQHKVQTWDNIAIHPTTCFLINAIKIFNVHKNLLHSTLVPGDGQDSFGYLINGVIACWKLKIKELSMLDDPDKNDSGGNNPNLFIFLLNNIKHFNRDTNGLLDGLLVHRELVEECKNEFQSDMENYTSRYMTASWGPAISCLNNHTGGSIRQSMNAFISKFEGTFDCQKVLKVPDSELKQKLRDDIENLIFPAYEISFEELQRNSNSGLFCSCFPKFNMQHVYPRDITTFCARLV

SEQ ID NO: 50296 - protein, 175 aa, Oryza sativa
MLSHHRGRGVRDGGGGGGASPAAAGHRRLHHRVREQAPRRRQAQVVQARAPGDAAVTARARRLPRRPWRRRRPGAPDIGGARHGGHPSAAQAGRVLRLPLLRPPHPARPLYQEEGEQWRFSGRRLLRNRGESLQWEAPAHRCFRQGLLFGREAAHREPLLGGSVATAQQCICQCI

SEQ ID NO: 50297 - protein, 617 aa, Oryza sativa
MRGTTFWSYTALRRCTFCASVGSTRTMPEGEVGGGAGLGGASAAAEAATRRARRGGGERRRRRTLREEEAVVVTGKGAGEDGRVTAVAAIGACAEHRLLRKGGAAAAGGGLTVEGFHRWLCSDANAALDPQKRVYQDMGLPLSHYFIYTGHNSYLTGNQLSSGCSEVPIVKALHDGVRVIELDLWPNAAKDAVEVLHGRTLTSPVGLMKCLEAIREYAFVASPYPVILTLEDHLTPDLQSKVAKMIKETFGDMLYVSETENMAEFPSPDELKGKIIVSTKPPKEYLQTKNDADADEAGVWGEEITDDKVAATAMTTEEKCAAAEEAVAAAAVDEEMQEAETDKKTQHGVDNEYRRLIAIPLTRRKHDMDQDLKVDPDMVTRLSLGEKAYEKAIVTHGAHIIRFTQRKLLRIFPRSTRITSSDYNPLMGWRYGVQMVAANMQGHGRKLWLTQGMFRANGGCGYVKKPDILMNNDPDKLFDPTSKLPVKTRLKVTVYMGDGWRFDFRKTHFDKCSPPDFYARVGIAGVEADTRMEQTKVKMDTWIPAWDHEFEFPLSVPELALLRVEVHESDNHQKDDFGGQTCLPVWELRRGIRSVRLCDHRGEPLRSVKLLMRFDFT

SEQ ID NO: 50298 - protein, 663 aa, Oryza sativa
MQIMKIDDGRPYHSNVFHELVSNGGPKVDGEIERETKQHILLDTMVQQTNPSEYSFMKAGQQNVDKAIQIRPEDVSYDKDVVEIKLPDIMVSSNYGVQFVKDVCIDEGVLADQKAIAEKVSLNLNSSKGDTNGIRIKETADEPAKSVNDLKSQIVVLPEACVTDGDTVEQNHPCKLHDLEGNSSVDGLTVVNVEKSTPKQLVSNDNAEYCQQMGADVSESSENHGPNLNGEPVDQVPSNDSHETGASIASAITNVNGLSVESTADGHSGVVTEDGVSGVALNKTEINQINHYNPFIAYGSLEDTWEPKYSLPTIVDDVYSVPCPVEKTDSFSDIVYGALRGFNFLETGESIAEDSTLDSVVENSSMTDVQASEEKDEARSDDILSDERKIPVDQRSPVENSDSLSDPVDRALSSTETDGARNEDSRLDSTEASPSRSYVQPSEDRNDQVDNFVYGIRTDAAHGTSSGTSPLTGKTEPIDAKSENDPKCEIDSVQDGHDFNPREANDGTNISEDNKDSKSSTRQTGPVTEQNEPDSAKMTMQTEPVAQRNEPDSAKVTMQTESVAQPNEADSAKVTARNVIRNPFESSFSGPSIISGPLTPSGHIPYSGNISLRSDSSTTSTRSFAFPVLQTEWNSSPVKMAKADRRRLRRDRGWGYRILCCKF

SEQ ID NO: 50299 - protein, 109 aa, Oryza sativa
MALRVVAGEDRAVDGLHRRPLLPPPASHPALREGRAFRSRGVSGDLARFHLTMFTPAIDIWSIGCIFAELLTGKPLFPGKNVVHQLDLMTDLLGTPAESLAKIRNEKAR

SEQ ID NO: 50300 - protein, 63 aa, Oryza sativa
MGCSMFRALITPSQLPVKDFMTLRARHLFLYLYLLVIDILLSAHRTQELLHCNLSTNNLTMIV

SEQ ID NO: 50301 - protein, 311 aa, Oryza sativa
MGNMKVGLTRESSGPSSRRNSSEQPHSKNVSLERRWSLEVAIEKFIGHDATGSSGLERSESINDSDLPMLEREYMQGVLISEVVLDRSFSDSSKKAKRRQKKIVRETKKPGETIIKGHRSYDLMLSLQLGIRYTVGKITPIQKREVRASDFGPRASFWMTFPKEGSRLTPSHPAEDFKWKDYCPMVFRNLREMFKIDAADYMISICGNSALRELSSPGKSGSVFFLSQDDRFMIKTLRKSEVQVLLRMLPKYYHHVRTYENTLITKFFGLHRVKPSSGQKFRFVVMGNMFCTELRIHRRFDLKGSSLGRFY

SEQ ID NO: 50302 - protein, 413 aa, Oryza sativa
MKNSYHSLSFDVRHGLLQTVTRNKDGEHTDVGEEIGMYRSHGSGAYLFKPIGEAQSIVEEGGYFILSEGPLVQEAHSLPKTQWHKSPISHSTRIYSCGDSIQDMLIEKEYHVELVGHVFNDKELIVRFKTDIDNQGVFYSDLNGFQMSRRQTYDKIPLQGNYYPMPSLAFLQDSLGNRFSVHSKQSLGAASLKNGWLEIMLDRRLTQDDGRGLGQGVVDNRPMNVIFHLLRESNVSALPKTHSLLTLQPSLLSHRVGAHLNYPMHAFVSKKAQEKSFKLAQQTFAPLTSPLPCDVHVVNLKAPQPLKFHHAEAVEARFALLLQRRGWDASFCRRGGLNCTTIGEEPVNLFYMFKDLAVLDVKATSLNLLHDDPEMLGYLEQIGDVAQEGNVLISPMDIQAYKLDLQPPSSQEE

SEQ ID NO: 50303 - protein, 77 aa, Oryza sativa
MSIYDHKSVCRVHQTSKKYMGSDGTFLREGIYEFNGKILSISPYSSSCLAFLTYLHCSPIFSYIRTICMSPHQSCCI

SEQ ID NO: 50304 - protein, 139 aa, Oryza sativa
MVAMPRRPVLWPPAGGRRTLLRASPDRRRVALVRAGPHALRLCSARWPARGRRRWGKRKRTREREIMTCGTHIYLAHSNSLPMMIIPVHDAWVRMIRNLIKTNIKFTLHDKLDPLVIKTAGLALVNLGWSHVSANVSYG

SEQ ID NO: 50305 - protein, 239 aa, Oryza sativa
MGQKINPLGFRLGTTQNHHSFWFAQPKNYSEGLQEDKKIRNCIKNYIQKNRKKGSNRKIEADSSFEVITHNKKMDSGSSSEVITHIEIQKEIDTIHVIIHIGFPNLLKKKGAIEELEKDLQKEVNSVNQRLNIGIEKVKEPYRQPNILAEYIAFQLKNRVSFRKAMKKAIELTKKTDIKGVKVKIAGRLAGKEIARAECIKKGRLPLQTIRAKIDYCCYPIRTIYGVLGVKIWIFVDEE

SEQ ID NO: 50306 - protein, 622 aa, Oryza sativa
MAAPAAACDLRFLLVGLLLVVVVGSRLVRPPDGGGIPTTLDGPFEPATRAFDRALRQGSDDVPLTDPRLAPRARPPAPEQIALAASSDATSVWVSWVTGEAQVGSHLTPLDPSTVRSEVWYSERPSPTAAAAGDVSGHYPHVARGKAEVYSQLYPYPGLLNYTSGAIHHVRLRGLRPATRYYYRCGDSSVRGGAGLSGELSFETLPSSAAAAYPRRVAVVGDLGLTGNSTSTVEHLARNDPSLVVVVGDMTYANQYRTTGGRGVPCFSCSFPDAPLRESYQPRWDGWGRFMEPLTSRIPMMVIEGNHEIEPQGQGGAVTFASYLARFAVPSEESGSNTKFYYSFNAGGIHFIMLGAYVDYNRTGAQYSWLEKDLRKIDRRVTPWVVAAWHPPWYNSYSSHYQEFECMRQAMEGLLYQHGVDIVFSGHVHAYERMNRVFNYTLDPCGPVYITIGDGGNIEKIDIDHADDPGKCPGPGDNHPEFGGVCHLNFTSGPAKGKFCWEKQPEWSAFRESSFGHGILEVVNSTYALWTWHRNQDAYGEDSVGDQIYIVRQPDKCLLQTTSASSENNCPSEGCPSLVSNSGYGAQKDIIRSGHLIWNASLVIWMILISTVFMKGNLCSRF

SEQ ID NO: 50307 - protein, 417 aa, Oryza sativa
MEHLPVEVIGNILAHLSAARDVMVASGVCRKWRTACRKHLHSLSFNSDDFPRDMTTRQLEIVITQTIFQTMGLQCLSIHIDRTHEFSAAPVIAWLMYTRETLRSLSYNVRTNPNVNILEKCGRQKLEVLDLDHNTITGVEPSYQRFTCLKSLSLRHVSISALDLSLLVAACPKIESLALDFLEVVTSDPQSTMELTSHTLKSLFAKSVGVDKIILDTDNLEVLNLNALNLDLFELIGKGTLKHLKIDDVSVTHMDIGESTDHLEVVDVSNFTIVRPKLYSMISRASNLRMLRFWGVVFDDEDEIVDSETIAVSFPLLRHLSLSYELRDGLLHYSLQGSSPLDNVSVLELGWTVISEHFGPWVFGMIERCPNLKKLVIHGVLSEAKTREERQMLASFTSFIVCLMRKYVHVDVQFEYE

SEQ ID NO: 50308 - protein, 103 aa, Oryza sativa; identical to SEQ ID NO: 37908

SEQ ID NO: 50309 - protein, 700 aa, Oryza sativa
MIAAVTSLSHPSTASSAKFDGRRSEERRKKGLIVAAASSALTSIPLSLLAMSRNLESPVQTQMAVSALNRALSSEYPSKSRSEGRASGWKRIFVQTGTGCVLAVQLDRGDNAHTVKRKLQLALNVPTEESSLTFGDRVLKNDLSTIRNDSPLLLTKTFMHRSSSTPCLSPTGKDIQQQRDRGGPIELLVCPSRCSRTKQLVKDVARAIRNGVDPIPVNSGLGGAYYFRNSKGENAAIVKPNDEEPFAPNNPKGFTGKALGQPGLKRSVRVGETGFREVAAYLLDYDNSANVPPTVLVKISHPVFNVNECVSSANMKASKDYPGAVSKIASFQQFIPHDFDASDHGTSSFPVSAVHRIGILDIRIFNTDRHAGNLLVRKLTGPGKFGNRTELIPIDHGLCLPECLEDPYFEWIHWPQASIPFSDDELDYIANLDPMKDADMLRMELPMIHEACLRVLILSTIFLKEATSFGLCLAEIGEMMSREFTGMEDQPSELEVVCMEARRLAIEREESSPEIDSGDEDAIQFELDCEDDHEMLKAQPAYHFELKGGSSRNPLSKLDEAIEEEEDDIEEEESNAEKLGYPKAINKWLPNISKLSTSLNGVRLGDKIQCQLPAAPKIMDPVKIFEGNSNHSGSQVGNWRSADEQLPTSASFVKLADMGSETWALFLEKFQELLPEAFRSRKCGAAGQRARQRLGTSCQF

SEQ ID NO: 50310 - protein, 484 aa, Oryza sativa; identical to SEQ ID NO: 49414

SEQ ID NO: 50311 - protein, 133 aa, Oryza sativa
MPLLARAPPPPPPLRHRGRLLPRFTSSSSPRRRRRPRAARVRASGSDPPPQQQQQQVNLSVLRFTLGIPGLDESYLPRWIGLGFGALVLLNHLLSPSPTPAQLVEVGGTRAVPGRVLGDSAVPREVPRGCWCC

SEQ ID NO: 50312 - protein, 576 aa, Oryza sativa
MLQRLGIGGRAAEETEPARFAFADALPAWPQGGGFATGRICVGELELAAVTAFEKICALSATKGGGGGVTFYRPAGVPGGFSVLGHYCQSNTRPLHGHLLVAKAVAGKPESESLPPLRPPHDYELVCAFRADGVGEDRKSCRGYGRTGAYFWLPVPTDGYRALGLLVTAEPDKPPLREVACARADLTDECEPHGSLLQLQLVGQSACWSSSTVPAAFALRGIRPTHRGMWGRGIGAGTFCCGAVGLSPREQGMACLKNVDLDLSAMPTLEQAHAVIRHYGPTLYFHPKEVYLPSSVSWFFKNGAALCKKGEDAAVELDVEGSHLPCGECNDGEYWIGLPDGKRGESIIYGDIDSAELYAHVKPAMGGTCTDVAMWVFCPFNGPARFKLGPITIPLGKTGQHIGDWEHFTLRVSNFTGELMAVYFSQHSGGRWVDASALEYTAGNKPAVYSSRNGHASYPFPGVYLQGSAALGIGIRNDAARSELAVDSSAKYRIVAAEYLGEGAVEEPRWLNFMRVWGPTVVYKSRQRMERMTSAMHRRLRSPAERMLNKLPNELSREEGPTGPKEKNNWEGDERW

SEQ ID NO: 50313 - protein, 111 aa, Oryza sativa
MDRQVRGDHEGINVVGFEVPTSPDSSYNNPVPGNEDEAREPPLVPPHLQHTLLSFPPSQDDSSSLPPPQNVVLNHLYIEKENSRSVVALGITHRFRAKFVTVVLYKPVQRR

SEQ ID NO: 50314 - protein, 497 aa, Oryza sativa
MLARGIRLLYHAVMHGLLCPEKYKQQNKQKQSKKVHPKKKVFVIFGGDTSERQVSLMSGTNVWLNLQGFDDLDVTPCLLTSGNGYSSFHNQNMNGISRDVWTLPYSLVLRHTIEEVNAACIEAIDPERMELTSRLRDQVMNELGQSLSKYDWFAGFDIADKQPIKYSLQQWINHVKEAQAVVFIAVHGGIGEDGTIQSLLGSAGVPYTGPGQIASRTCMDKVATSLAVSHLASYGVHTIPKDLRATDEILKSSPDDIWNDLKAKLQTETVCVKPARDGCSTGVAGLCCPKDLEVYANALERKLQRMPANCLSRAHGVIEMPVSPPESLIFEPFIETDEIIISTKSVDDSTRHLVWKGENKWLEVTVGVVGKRGEMLSLNPSITVKESGDILSLEEKFQGGTGINLTPPPSTIMSEEALQKCKSCIETLANTLGLEGFSRIDAFVNVQNGEILLIEVNTVPGMTPSTVLIHQALTEKPPIYPHKFFRTLLDLAFARAN

SEQ ID NO: 50315 - protein, 946 aa, Oryza sativa
MYYRRQRKASSEANANVFMPGGPNDISFPASNRDHDWGYGGVGKEWEASYARKLQLMNFLSSLHQRTANPLVTTRMDANMDTPLEQKLKDSSAIIVLDSDDEDGYTEGCEQLTSENNKQQAPSGLTSPYTTWIVSSAKDQVNGTLHVDGVQSTQIVPYYGQNAPLINQFPLQTSWQPSIQYERVILQKRPEEQRVQDLVAASHAEKIAETQVLLTLPTLPNERKRRKTEPTTLVDVDGGTNLGKRKRKNHQNQAAVDSNLDLQQNDVPSQSYRTMIEEEKPVKESDGLEDLWKDFSLAAECTKLDTNEDMSNEKDVDDENEMDDDCNHDIRIHEDLGHVCRICGMIVRKAETIIDYQWKKASRTRTNYYESRSKDADEIDTGAVKVSEDFIVSDIAIHPRHAKQMRPHQLEGFSFLVKNLVGDKPGGCILAHAPGSGKTFMLISFIQSFLAKYPSARPLVVLPKGILGTWKREFQRWQVEDIPLYDFYSVKADKRVEQLEVLKSWEAQMSILFLGYKQFSRIICGDGDGNIAAACRDRLLMVPNLLILDEGHTPRNRETDVLASLKRVQTPRKVVLSGTLFQNHVSEVFNILDLVRPKFLKMESSRPIARRIMSQVAISGIRSLKGVHDSAFTESVEDTLLNDDNFTRKAHVIRSLRELTKDVLHYYKGDILDELPGLVDFSVFLKLSTKQKEIVHKIEAYEKFKRSAVGTALYIHPCLSEISEGDAADRASNLTDATVDSLIESIIIKDGVKAKFFFNILSLANSAGEKLLAFSQYILPMKFLERLLVKRLGWHVGKEIFMISGDTSADDREVAMDQFNNSADAKVLFGSIKACGEGISLVGASRVIILDVHLNPSVTRQAIGRAFRPGQQKKVFVYRLVAADSPEVKFHETAFKKEVIPKLWFEWSELCTTEDFKLNQVDIDDSEDELLEANAIRQDIKALYRR

SEQ ID NO: 50316 - protein, 60 aa, Oryza sativa
MVETSTDLEGTLDQVSGIFSLWVDRAKWTVQGIPTRPRGNNYRKGSYSVCYNNSIIYTVT

SEQ ID NO: 50317 - protein, 248 aa, Oryza sativa
MAATSSSSSPCMIASLRSSHRCRLSPSATATSPPRLRTLPPRRCRRNPSSSSSSSRQAAAISMAPANPRHRLIAPIHAAAAAGGGGGGAGATSPSGLPSLVGIAHLLVSLGIVLASDKFLKQAFAAASIKFPSALFGMFCVFSVLVVLDAFAPALAKGFMDFFEPATLFIQRWLPLFYVPSLVVLPLAVRDVPAASGLKIFLIICMHITTLLSLHAFCYFFLPPDHRAYLLRLCFLRILHSTTSYLIC

SEQ ID NO: 50318 - protein, 398 aa, Oryza sativa
MGVLSAADPPPVSAIGFEGYEKRLEITFSEAPVFADPDGRGLRALSRAQIDSVLDLARCTIVSELSNKDFDSYVLSGSSLFIYSDKIVIKTCGTTKLLLTIPRILELAEGLSMPLAAVKYSRGMFIFPSAQPAPHRSFSEEVAVLNRYFGHLKSGGNAYVIGDPAKPGQKWHIYYATQHPEQPMVTLEMCMTGLDKEKASVFFKTSADGHTSCAKEMTKLSGISDIIPEMEICDFDFEPCGYSMNAIHGSAFSTIHVTPEDGFSYASYEVVGFDASTLAYGDLVKRVLRCFGPSEFSVAVTIFGGHGHAGTWAKELNADAYKCNNMVEQELPCGGLLIYQSFDATEDVPVAVGSPKSVLHCFEAENMVNPAPVKEGKLGNLLPWGEDALEENDGVFDE

SEQ ID NO: 50319 - protein, 551 aa, Oryza sativa
MDMDSSPSTQDCGGWLLYVSLAAKCGGDPCRVVGFVAVAVVAFAVTSLLHWLSPGGPAWGRYWWNRRGGLGIAAAIPGPRGLPVLGSMSLMAGLAHRKLAAAAGGSPARRRLMALSLGETRVVVTADPGVARELLASAAFADRPVKESAYGMLFHRAIGFAPYGTYWRALRRVASTHLFSPRQVSASAAQRAVIARQMVEAMRSAAAAAAGGGVAARPFLKRASLHNVMWSVFGRKYELAAPESEETAELRSMVDEGYDLLGQLNWSDHLPWLAPFDLKKTRSRCSSLVPRVNRFVTRIIDEHRARLSLAVDAAVDFTDVLLSLHGGDKLSDADMVAVLWEMIFRGTDTVAVLIEWVAARLVLHQDVQARVHDELDRVVGSDRAVTESDASKLVYLQAVIKEVLRLHPPGPLLSWARLATSDVHVGGFLIPSGTTAMVNMWAITHDPAVWPDPNEFKPERFVAGPSSDQATEFPIMGSDLRLAPFGSGRRSCPGKSLAIATVGFWVATLLHEFDWLPLSDKSRGVDLSEVLKLSCEMATPLEARLRPRRKV

SEQ ID NO: 50320 - protein, 794 aa, Oryza sativa
MHAKATTAVVGNTVQRFCQQCSRFHPLQEFDEGKRSCRRRLAGHNRRRRETRPEVAVGGSAFTEDKISSYLLLGLLGVCANLNADNAEHLRGQELISGLLRNLGAVAKSLDPKELCKLLEACQSMQDGSNAGTSETANALVNTAVAEAAGPSNSKMPFVNGDQCGLASSSVVPVQSKSPTVATPDPPACKFKDFDLNDTYGGMEGFEDGYEGSPTPAFKTTDSPNCPSWMHQDSTQSPPQTSGNSDSTSAQSLSSSNGDAQCRTDKIVFKLFEKVPSDLPPVLRSQILGWLSSSPTDIESYIRPGCIILTVYLRLVESAWKELSDNMSSYLDKLLNSSTGNFWASGLVFVMVRHQIAFMHNGQLMLDRPLANSAHHYCKILCVRPIAAPFSTKVNFRVEGLNLVSDSSRLICSFEGSCIFQEDTDNIVDDVEHDDIEYLNFCCPLPSSRGRGFVEVEDGGFSNGFFPFIIAEQDICSEVCELESIFESSSHEQADDDNARNQALEFLNELGWLLHRANIISKQDKVPLASFNIWRFRNLGIFAMEREWCAVTKLLLDFLFTGLVDIGSQSPEEVVLSENLLHAAVRMKSAQMVRFLLGYKPNESLKRTAETFLFRPDAQGPSKFTPLHIAAATDDAEDVLDALTNDPGLVGINTWRNARDGAGFTPEDYARQRGNDAYLNMVEKKINKHLGKGHVVLGVPSSIHPVITDGVKPGEVSLEIGMTVPPPAPSCNACSRQALMYPNSTARTFLYRPAMLTVMGIAVICVCVGLLLHTCPKVYAAPTFRWELLERGPM

SEQ ID NO: 50321 - protein, 485 aa, Oryza sativa
MAIGWHRSQSLASAGLGLHVLLCSSLLLNAVFIAHQFLGASPPATPERLGDGLSWALQAAKEAEDVAAVDCSGHGSVFLDGVTGEDGRPGCECNSCFSGPDCSVRIPNCAADGQGGDPLFLEPYWKRHAAASAVVFSGWHRLSYITTDGHLKSVELDRQIRRLHRAVGNAVVDDKYLVFGTGSTHLINALVYALSPEGNAASPPASVVATVPYFAMYKSQTVMFDGREYRWDGTTAAWANNNSSRNPTRGFIEFVTSPNNPDSTLHEPILAGSSAIVDHAYYWPHLTHIPAPADEDVMLFTTSKLSGHAGSRFGWALVRDEKVASRAISYIEESTVGTSRETQLRVLKILKVILANLHGKEDIFAFGYDVMSSRWRRLNAVVSRSTRISLQKMPPQYCTYFNRIKEPSPAYAWVKCEWVEDDDCYETLLAAGINSLTGTVNEAGTRYTRLSLIKTQDDFDMLLERITEFVDAEKHGRAPAASSSM

SEQ ID NO: 50322 - protein, 1160 aa, Oryza sativa
MSASNEKWIDGLQFSSLFWPPPQDSQQKQAQILAYVEYFGQFTADSEQFPEDIAQLIQSCYPSKEKRLVDEVLATFVLHHPEHGHAVVHPILSRIIDGTLSYDRNGFPFMSFISLFSHTSEKEYSEQWALACGEILRVLTHYNRPIFKVDHQHSEAECSSTSDQASSCESMEKRANGSPRNEPDRKPLRPLSPWITDVLLAAPLGIRSDYFRWCGGVMGKYAAGGELKPPTTAYSRGSGKHPQLMPSTPRWAVANGAGVILSVCDEEVARYETANLTAAAVPALLLPPPTTPLDEHLVAGLPPLEPYARLFHRYYAIATPSATQRLLFGLLEAPPSWAPDALDAAVQLVELLRAAEDYDCGMRLPKNWMHLHFLRAIGTAMSMRAGIAADTSAALLFRILSQPTLLFPPLRHAEGVELHHEPLGGYVSSYKRQLEVPASEATIDATAQGIASMLCAHGPDVEWRICTIWEAAYGLLPLSSSAVDLPEIVVAAPLQPPTLSWSLYLPLLKVFEYLPRGSPSEACLMRIFVATVEAILRRTFPSETSEQSRKPRSQSKNLAVAELRTMIHSLFVESCASMDLASRLLFVVLTVCVSHQALPGGSKRPTGSDNHSSEEVTNDSRLTNGRNRCKKRQGPVATFDSYVLAAVCALSCELQLFPFISKNGNHSNLKDSIKIVIPGKTTGISNELHNSISSAILHTRRILGILEALFSLKPSSVGTSWSYSSNEIVAAAMVAAHVSELFRRSRPCLNALSALKQCKWDAEISTRASSLYHLIDLHGKTVTSIVNKAEPLEAHLTLTPVKKDEPPIEEKNINSSDGGALEKKDASRSHRKNGFARPLLKCAEDVILNGDVASTSGKAIASLQVEASDLANFLTMDRNGGYRGSQTLLRSVLSEKQELCFSVVSLLWQKLIASPEMQMSAESTSAHQGWRKVVDALCDIVSASPTKASAAIVLQAEKDLQPWIARDDEQGQKMWRVNQRIVKLIAELMRNHDSPEALVILASASDLLLRATDGMLVDGEACTLPQLELLEVTARAVHLIVEWGDSGVSVADGLSNLLKCRLSTTIRCLSHPSAHVRALSMSVLRDILNSGQINSSKLIQGEHRNGIQSPTYQCLAASIINWQADVERCIEWEAHSRRATGLTLAFLTAAAKELGCPLTC

SEQ ID NO: 50323 - protein, 723 aa, Oryza sativa
MESRWRKAKMSLGLNLCVYVPRTLDDGDSPSTGSSTAALVSPVASSSSAATSANTTPTAEQRVKGAGALMPTTPTPTSAGLRLSKSGSKSFKKTCAICLTTMKPGQGHALFTAECSHTFHFHCIAANVKHGSNNCPVCRTKWKELPFRGPLPGEFPQGSARINPVNGHQNGGQMTILRPLPRARSSGRLHHMTSLLPDTDRSIFNDDEPLDSLSEANEGSQQGCLRTVEIKTYPEFTEVPESTSERNFTVLVHLKAPLAQTLQTSSKLEDGNSLGTTRAPVDLITVLDVSGSMAGTKLALLKRAMGFVIQNLGSSDRLSVIAFSSSARRLFPLRRMTETGRQQSLQAVYSLTSNGGTNIAEGLRKGSKVIEDRQAKNPVCSIILLSDGQDTYTVSPTAGVHKAAPEYCSLLPYTSNGCQQVPVHVFGFGADHDSVSLHSISQTSGGTFSFIETEAAIQDAFAQCIGGLLSVVAQDLHVKVESLHPDVHFGSIRSGSYSSRLADDKRNGSIDVGDMYAEEERDFLMSVNVPPGYGETALLKVGCVYKDPLMKETINMADVQVKISRPAFVSVQSVSIEVDRQKNRLHAAEVMAEARLSAERGDLTHAVSLLEDCRRMIMGSTSGQSGDRLCQALDAELKEMQERMANRQRYEASGRAYVLSGLSSHSWQRATARGDSTDSESLIQAYQTSSMVDMLLRSQTMSRSSTPPQMRHVKSFPARPQPR

SEQ ID NO: 50324 - protein, 569 aa, Oryza sativa
MDFELRKAREKLEREQRERVQRAKDKADRERRAKAEAARRRDALEASHRERRLDAARAQEEAQQKMEEVMQLGKGISFLHMFVALRYDGPGDKIKLPPSSFKELSDEGALDKGPMYFRLSKVRDSVPGAPQDNDADEATCCGVLEFTAREGSAELTPHVWNNLFRGDSPDVPLIEVRYVSLPKGTYAKLKPEGVEFSDLPNHRAVLETALRNHATLSENDFVVVNYGQLQYKLKVLELKPASSVSVLETDVEVDIEGPDSVLDNVENQHVLVPLETGKVESGVVEEGKFRYYKFLVDEGMGEKVASRHANIEVKIETYTSGGDTDIYVSRHPLVFPTQHRHEWSSHEMGSKVLILKPRDASLSSGTYSIGVYGFKGTTKYQLSVAIKDVLNGQRIGEQASASSSVDVDSVVCKNCKRYISNRTSLLHEAYCVRHNVVCMHDGCGVVLRKEEATDHVHCNKCGQAFQQREMEKHMKVFHEPLQCPCGVVLEKEDMVQHQSSTCPLRLIVCRFCGDTVQAGGEPLDARDRLRNMCEHESICGSRTAPCDSCGRSVMLKDMDIHVIAVHQKS

SEQ ID NO: 50325 - protein, 123 aa, Oryza sativa
MQLFQQFSCRASNLCSSKMLVAESLRESWLCTVFSITRNAVLGNVRIARIERQKNHPVVVMGISPCYCIAFFSASPEAKLKSRATYVGQSCCLPIQILLWFSLLFGWILMSTHHSCIAHPPGL

SEQ ID NO: 50326 - protein, 666 aa, Oryza sativa
MHPALLLLPLASLLHAAAAIGHNETSTSGNTSCTPARCGNLTISYPFSLSGVQPVSCGYPVLDLTCDNRTGRAFLSRTFRDHLFRVDSIFYENNSLVAAVETTFAGDADCPVPDFNVTSSLSPYPFIISNTNKYLAFIYDCSIPEHVGQLQRPCGNRTMGAYISDKWNSTPPSGVRGNCNSVSVPVRGYYDGMKPVSGHYEQLIKDGFVLEWMRSVMGDQDCDGCRRRGGECRFEQLSFQCFCPDGLLCSNSTRTNTTSSHPSGKVNRGIKIAAGTAAAVVCLGILGVGSTVLYTRRKRKRSASFEGLIHGGTPLPSLTKEFSLAGLAYTHIFTYEELDEATDGFSDARELGVGGFGTVYKGILRNGDTVAVKRLYKNSYKSVEQFQNEVGILSRLRHPNLVTLFGCTSQTNSRDLLLVYEFVPNGTLADHLHGGAAARSSSLDWPTRLGIAVETASALEYLHTVEPQVVHRDVKTNNILLDEGFHVKVADFGLSRLFPADATHVSTAPQGTPGYLDPMYHQCYQLTDKSDVYSFGVVLVELISSKPAVDMNRRGGDVNLANMAVHMIQSYEMEQLVDPQLGYASDGETRRTVDLVAEVAFRCLQPEQDVRPPIGEVLDALREAQRMDKVGYVKDDAGLVKKSRDGSPDCVMYQWISPSTTSNNSS

SEQ ID NO: 50327 - protein, 797 aa, Oryza sativa
MDRRSWLWRRRSTEKSPAETESSVSSPSERLSDEQDTPKSSPSSVQSPEISSKEAQDDNVKVKVLSERLSSAVLDIRAKDDLVKQHSKVAEEAVLGWEKAEKEIASLKTQLNAATAKNSTLEDRIVHLDGALKECVRQLRRAKEELDHGIQDALAQQSREWESEKADLELRVVELKAKLEAKSEFSVNAETDASSRLASLEKENSALKVQLLAMSEEVELRTIEKELNRRAAETASKQQLESIKKIAKLEAECRRLQANARRELKRAPSSVYAESVTDCQSDCSDSWASILITELDQFKNDKSITRSASLAAADIGMMDDFLEMEKIASANSPSKSEAEDAASVQLVKLEEKIKRLAMEKADREKALHEAQRELRNTRHRAMVAEEKSVELQRQLNLVKGVKHSMETEMEAMENRRNELEGRIELAHGEITSLLDKGRILEERLESEKALTLELAAKYQQMDALEAERRELRGHLEASQSEAKNLGDKITLLEKKLEEEKAFSTRLAVRCHGIEALEEKKKGTEHELESAREEIASLQKKVSILELKIQEERALSEKLATRSCDLEALGVQTNELRSQLQSANSEIAGLNEKVKMLEEAEEKHKPLTAGLESQLRLAQAEAMRLKDHVSSLEKKLESQKNLSSAYITALDASEAQKNKFASRFELKEAEVEELRRKIRLLEEEIHKEKAQSSELGVQCQNLKEQFTSRALSQPMKPMASKELHIKKEKELARAAGKLADCQKTIASLNRQLKSLADFDEFVPGFENDSVIAEGWEENGLKLLNSANYPAQLGCLAVK

SEQ ID NO: 50328 - protein, 522 aa, Oryza sativa
MSGARRCGDRRSERSSVVGDNRNGYVETDPTGRYGRLSEVLGKGAMKTVYRGFDELRGVEVAWNQATISDVLRTPDALHRMYAEVSLLADLRHDAIIAFHASWVHPSRRTFNFITELFSSGTLRSYRLRYPRVSRRAVAAWARAILRGLAYLHSRGVIHRDLKCDNIFVNGHLGQVKIGDLGLAAVLRGCTSARSVIGTPEFMAPEMYDECYGVGVDVYSFGMCMLEMLTNEYPYSECDNPAQIYKKVTAGKLPDAFYLLTDADARRFIGRCLVDAAHRPSAEELLLDPFLSPPQNHDDHNTIAHATAPPPPLPLACSNSSEEQEEEEAPAAKTTGMAITGKLNKEHDTIFLKVQIGGGGNVRNIYFPFDVANDTAMEVATEMVKELDIADREPTEIAAMIEQEIVRLVPGYKQHEYSYADDDDDDDVNGQPNPFYYLSSSPTSSQGSLCGVGPTSSEGFPGPHGKVDWSRDYCYYPPSSVSVSDDDDSSTSSLSAAVSNQPAAAALFGLFQQIGASICISI

SEQ ID NO: 50329 - protein, 62 aa, Oryza sativa
MLSPMQFQLFDSLLFNQFYLLDLFDRPHIFKTSYQQVRRIHIIKQNKVARRSIIIRLHHKAW

SEQ ID NO: 50330 - protein, 243 aa, Oryza sativa
MFYWQTGIYVGGSKVVHFTRKKEAEGSDSSNSTSSLLLEPSSECPTFPDCGFQLPDSGVVLTCLDCFLRNGSLYCFEYGVPSAVFLAKLRGGTCTIAQSDPSEVVVHRAMYLLQNGFGNYDIFENNCEDFALYCKTGLLPVEEPGIGTSGQASSAIGVPLAALLSTPLKLFAAGPLGMATVTAGMYCAGRYITDIGVRKDVAKIEVENLSSHLGRRLIEDEGSVNVRSEKPKTLLPMKRKRER

SEQ ID NO: 50331 - protein, 411 aa, Oryza sativa; identical to SEQ ID NO: 46976

SEQ ID NO: 50332 - protein, 27 aa, Oryza sativa
MLEKPKRPRLQIRRLAGFTPTTALSKQ

SEQ ID NO: 50333 - protein, 327 aa, Oryza sativa; identical to SEQ ID NO: 36377

SEQ ID NO: 50334 - protein, 669 aa, Oryza sativa
MQMQAATTTTAARRLAPKPQPQANRCRPSSVSVVAAGRSRRRSARSSLRASASLDQEVKERASPAAGKSGQATRRDVRNIAIVAHVDHGKTTLVDSMLRQAKVFRDNQVVQERIMDSNDLERERGITILSKNTSITYKGTKINIIDTPGHSDFGGEVERVLNMVEGVLLVVDSVEGPMPQTRFVLKKALEFGHAVVVVVNKIDRPTARPEFVVNSTFELFIELNATDEQCDFQTVYASGIKGKAGLSPENLGDDLGPLFEAILRCIPEPRIEKGGALQLLVSNTEYDEHKGRIAIGRLHAGELQRGMEVKVCTPDDACRISKISELFVYQNFSRVPVDNVSAGDICAVCGINDIMIGETIADKVSGTPLPTIKIEEPTVRMSFSINTSPFVGKEGKYVTSRNLRDRLYRELERNLAMKVEDGETADTFLVSGRGTLHLTILIENMRREGFEFMIGPPKVINKTVDGKLQEPYEIAAVEVPEEYMGSVVELLGKRRGQMVDMQPSGPEGTTLLKYKIPTRGLIGLRNAVLTASRGTAILNTIFDSYGPWAGDLSSRDQGSLVAFEDGSTTSYALLNAQERGILFVSPGQDVYKGQIVGIHQRPGDLAINVCKKKAATNVRSNKETTVVLDEALSYSLDDCIEFIQEDELVEVTPASIRMCKNPKVSKKNR

SEQ ID NO: 50335 - protein, 709 aa, Oryza sativa
MEGMWRKAKKALGAGLCVRLPAVAGDWEDGVSERRASDALSHDASSAAAAHVSAPNTPAAALPGAGPLRRSKSGTKSAKGMCAICFDPMKSGHGQALFTAECSHMFHFHCISSSVKHGNYVCPVCRAKWKEIPFNRSLSSIVPRGRSGLNVNQARLPQQGTYMALLRQVPSHHREASGSHTSEPVDFNDDEPLQLIESGDSRDARCSRAVEIKTYPEFSAIPQSSSEDDFAVLIHLKAPCANPEQVTGRPFNATSIGYPTSRAPVDLVTVLDVSGSMAGTKLALLKRAMGFVIQHLGPSDRLSVIAFSSTARRLFHLRRMSHSGRQQALQAVNLLGAGGGTNIADALKKAAKVIEDRNYKNPVCSIILLSDGQDTYNISSNVRGTRPDYRSLVPSSILNHTICTVPVHGFGFGADHDSDALHSIAESSGGTFSFIEDESVIQDAFAQCIGGLLSVVVQDMRLTVECVHPSVQLHTIKSGSYLSKVAGDGRNGSIEVGHLYADEERDFLLSLSFPQSRDQTMLLKVACAYRDSVTNEAIKIHADEVKILRPKSPTSEPVCMEVDRERNRVRAADAIEAARAAAERGALSDAVAILEHCRRILSESFSRKSGDRLCISLDAELKEMQDRMASRQRYEASGRAYLLSGLSSHSWQRATTRGDSTDSTTLVYSYQTPSMVQMLQRSQNQCPSPPGLRPQLRQTRSLLEKPHPR

SEQ ID NO: 50336 - protein, 401 aa, Oryza sativa; identical to SEQ ID NO: 31157

SEQ ID NO: 50337 - protein, 438 aa, Oryza sativa
MRRFRVWPPSPSPWPLLASRPCPHSHHHRSPFHASANSGARQGNFILPGATAATLVMFGILHARRMYEDQKVVERKEKGIEPEFSPDFKASFLRLLPLRSMSRLWGSLMEVELPVFMRPAIYKAWARAFHSNLQEAAMPLEEYPSLQAFFIRSLKEGSRPIDADPNCLVSPVDGKVLRLGELRGPGTMIEQVKGFSYSAASLLGASSSLHGAEEEDFSREHTEQSNPADSNAKSWWRVSVAKPKLWDQTLLSPKKGIFYCVIYLHPGDYHRVHSPVDWNIIKRRHFSGHLFPQNERAVRTIRNLYVENERVVLEGQWKEGFVAIAAIGATNVGSIKLYIEPELRTNRAGSKILNSQPEPPDDRVYEPVGTGVMVKKGEEIAGFKMGSTVVMVFEAPVVSKARWREDGSGTVTSDFDFCIKAGDRIRVGEAIGRWTSRE

SEQ ID NO: 50338 - protein, 379 aa, Oryza sativa
METVSVCGLHPGVAVTGFCPACLRDRLAGLHPPSDLRRCKSFSYYARSSSYLEPHPQQDALVLPDAADAPTNTKLALGSLGKRWQEWRRKSKLKHHHPPPATATDPALLARRSCDAFSTRTMLDEPRASYHPTLFVPRSDDQIPVEEEERAYVPGGSAQTRDYYLDSSSSSRRRRSVDRKSSSDAGDQIPRMVAAAANARVSPATELYHQPHTFHYHQPSFEPPPLLARERQEAKSKPKNKGIKGWSIWGLLHKKSSTTNSVGATASAFAGEARAAPPELRARGYDGQMLRCNSSVSARSSFSGIGSSFNGGRLGMRRADEVLLERNFSARYSSSSSCRYQFHKDDYSNSIANNSGAGAGSRPPRSSTLPRTSLGLYYY

SEQ ID NO: 50339 - protein, 548 aa, Oryza sativa
MDKNGSSYGESSSDDVEAPLLLPASRGGTMAKGDRRRPASSAAAAWVRALLAHKYPAIAAGPAACAAVCAAVDLGDGHGEARNMLGVLAWVFLWWVTGAVPLAVASMAPLFLFPALGISSSDDVARAYMGDVISLVLGSFILALAVDHHRIHRRLALNVLSLFCGDPVRPSLLLLGVTGTTALVSMWIHNTACTVMMMPVATGILQRFPRGDIDDGGGQEVRRFSKAVVLGVVYASAIGGMATLTGTGVNIILVGMWSSYFPEQRPITFSSWMSFGLPMAIILFLALWLTLCLMYCSNNTAKALSAYLDRSHLRRELSLLGPMAFAEKMVLAVFGGLVVLWMSRNITDNIPGWGVLFHNKVGDGTVTIMMATLLFIIPSGKREGEKLMDWNKCKKIQWNIILLLGAGFAIADGFKTSGLTDILSNGLRFLKGAPTLVIVPVACVFSGIMTEFTSDDSTTTLVLPLFAELAKSIEVHPALLMVSGAIGAQLSYLLPTGSPSNVVGFSTGYITIKDLVATGLPLKIVAIAALTVLLPTLGSTIFGMDIKS

SEQ ID NO: 50340 - protein, 929 aa, Oryza sativa
MVVALSQSFESLYKTEVLDLVEKFDKYLSDKNAGSEMHEELHDILTAANSLPKAPWEDGVCKVCGIDRDDDSVLLCDKCDSEYHTYCLNPPLARIPEGNWYCPSCMLGQTKAHHDQGVQNVKRQQKKFVGEEAHAFQEELNKLATAMEEKEYWDLNMQERIYLLKFLCDEMLNTALIREHLDQCSDKLGDLQQKFRASNFELKDLKYKEEMRTSYARQSRSSKTEQHFNNSSGPVENQQQCTPTALDHLEEAEQGNVGVNLNNPADGVPDGQLNVGKPYKSDKDISSASMVEERKSSGLSEQPSGMAIDQIDGDAIDEGSQSCEKRSLGAKSSTCDNLNLKDTEFSTPGRELPDERASTSFQDNLEASSTKSIELDADNNEMDTLSDDISKLQDSISLLESQINMASSRRECLGKDSIGRLYWVIGRPGKRPWLVADGSMLKPKERDISMVNSYPPSAFDCKGWNSASIFIYESDEEIQCLLDWLRDYDPREKELKDSILQWQRHFCHQSSSPLVDPPISGPKGEQLMELPNTKAAVILEQKYGLQLDQDTSDLPKKRGKKIKLSSEDRTYRCDCLEPVWPSRYHCLTCHETYLISTEFEGHNDGKCSKIHQSPDESRENDEPKVKVTKSDTKEKDSLECSSVIEPSSDRKLMQCPYDFEEICRKFVTNDSNKETVKQIGLNGSNGVPSFVPSPAFFLEPAIVQSQNRKDDELKDWTSSLEECNAMSAQKLVQEVSKSGQSCPGNVGDEKVQKSKKPTPDNTSGEEAHSTTGKPTRLLAVNGGLVPESSLRPLIGRNSHILKQQKINLLDIEAALPEEALRASKCQQIRRRSWRAFVKDAESISQMVLAANLLEGMIKAEFLKNDWWYWSSFTAAMKTSTVSSLALRVYTLDDCIIYSKDQVPSVEPADNTRSGNRGGRRRRELESLAS

SEQ ID NO: 50341 - protein, 331 aa, Oryza sativa
MGMRRGSGGAGADQEGGVPMGGSRGSGDAGTNKEHGVPMGGRRGSGGAGADQEGGIPMGGRSGGSGAGFGLDWVWDWRNPNRSVPPPPTEDIPAVPGSSGVLPLSNLQSKRQYLVSSLMLLSSLPLSDLQRHSEKLSDTHGSDKEDEVVDSSDDDCDPYFNYLVDSFMTATKAQPKQLYGNIDLVAAAQRQSNEYASSALDYYNKDENNKIQYSLIKALKSSTIREKGEKYGHVNFIASLDSKEELFFAEVCWDPKNYDMVPTCIVSLEEKRRIGGRSFINDEYVVCLDLQNPPIDGKHCYGCSEEIKHPEDGSTFKAGHVAATGFYDSFM

SEQ ID NO: 50342 - protein, 463 aa, Oryza sativa
MGYGMSRMEEEYSEHEDQNNGGSNSQVNNEFLNTHNDIFHMTQIRSGPSESLRKSIGTSKDVISTTRLLSGREINSSGNGKFSSVDRAFLLGRYLPVDGPEIVDRMDSRAYVSQFSADGSLFVAGFQGSHIRIYDVDKGWKVHRDIHARSLRWTISDASLSPDQQFLVYSSLAPIIHIVNVGTAAKQSYANITDIHDGLDFSQHEDVRYTFGIFSVKFSSDGRELVAGSNDDSIYVYDLVANKLTLRLPAHHSDVNTVAFADETGHLIYSGSDDNLCKVWDRRCLSTEEPAGVLTGHLHGITHIDSRGDGRCFISNGKDQAIKMWDIRKMTSNADSYEDRTSNWDYRYSRYPQQYKQLKHPHDQSIATYWGHSVLRTLIRCYFSPAYSTGQKYIYTGSYDSSVCIYDVVSGSQVAKLKGYHQLAIRDCSWHPFDPMLVSSSWDGRVAKWSRSSCQQEETTDLD

SEQ ID NO: 50343 - protein, 626 aa, Oryza sativa
MPPHLSSSLFSSSPLPTTLLSSLTRRARALLPLPLPLPAASTRRRLPLRRGPLLTRGIMASAAAEAPAPSPSPTAAANSRPRRVLEELSWDDSFVRELPGDPRSDAIPREVLHACYTKVSPSAPVDNPKLVAWSQSVADILDLDHKEFERPDFPQLFSGANPLVGSSPYAQCYGGHQFGSWAGQLGDGRAITLGEVINSRGERWELQLKGCGKTPYSRFADGLAVLRSSIREFLCSEAMHGLGIPTTRALCLVETGKSVVRDMFYDGNSKEEPGAIVCRVAPSFLRFGSYQIHATRDKEDLEIVRHLADYTIRHHYPHLENIKKSEGLSFEAAIGDSPAIDLTSNKYAAWAVEVAERTAFLIARWQGVGFTHGVLNTDNMSVLGLTIDYGPFGFLDAFDPSYTPNTTDLPGKRYCFANQPDVGLWNIAQFTSPLTAAELISKDEANYVMERYGTKFMDEYQSIMTRKLGLPKYNKQLIGKLLNNLAVDKVDYTNFFRLLSNVKADHNIPEKELLVPLKAALLDIGPERKEAWISWVQTYIEELVSSGVPDEERKAAMNSVNPKYVLRNYLCQTAIDAAEQGDYDEVRRLLKVMEHPYDEQPGMEKYARLPPAWAYRPGVCMLSCSS

SEQ ID NO: 50344 - protein, 117 aa, Oryza sativa
MIKEEEHPCFHMAGAADGEGLRPMPSRRSLPPSSSDLVPATTVSCFWLPASTSPTARSSTAPTPQAPTVPLPASSTLSTSPSTARSAPLLPRLHRLSSCRTSTMTRLRLSTPKPSPF

SEQ ID NO: 50345 - protein, 525 aa, Oryza sativa; identical to SEQ ID NO: 43268

SEQ ID NO: 50346 - protein, 138 aa, Oryza sativa
MPRQWSATSRGAMAESSDGRRRLSAPRLLSPAMGLREGSTVAGGGSRRRRPPGRRGGGEQGRCPSLRRIQREGRRRQPVGVPAAVAPSPPLDPAGGEPAAARRTCDGGTLPFDLAVWEFLDKICVYMLQFFLSLILFV

SEQ ID NO: 50347 - protein, 429 aa, Oryza sativa
MADGEASSGAYREFKALTEAADRKFARARDVPLYGGGVDHHSRKAFKAYTRLWRLQQERRRELVAGGLRRWEIGEVASRIGQLYYARYLRTAEPRSLVGAYVFYEAIYSRGYFAAAAQVVVGGGYRHQGLLIRYKELRFIARFLVVAMLMRRAEAVDHLASRLRSLVEETKSAYPKTNFKEWKQVLQELGRFLKADGAYKGSRSLRYDNLFDSFPSNLAPIARFHSKRVLKLKEAVLTSYHRNEVKFTELTLDTFRMLQCLEWEPTGSYQIAAKELTENGTISDQSGPSGLIDIHLSSEISDGNLPANPQKAIIYHPTVSHLLAVLATVCEELSQDSILLVYLSASGFSEQNITSQKYASSSSYARATSVYPIDKPNSNGNSDNHLWLGPRGSGGPNNLYPEDLIPFTRYPLFLVIDSENSHAFKAGYT

SEQ ID NO: 50348 - protein, 407 aa, Oryza sativa
MGALCDFCGEQRSMVYCRSDAASLCLSCDRNVHSANALSRRHTRTLLCDRCASQPAMVRCLVENASLCQNCDWNGHSAGSSAAGHKRQTINCYSGCPSSSELSKIWTFVSDIPNVAPEPNCEQGISMMSISDSGVSNQDNAAGDSSLLDIASATLMSDLGTAGKPKSLIGSSSEAGVNLLPLATDQMAGSVDSTSAKVPYTADQDMFSKDSIYEDFCVDDVDLSFENYEELFGTSHIQTEQLFDDAGIDSYFESKEIPSGNSDEPKLMQPVTSNAVSADSGMSIPGAKGDSSLCIPVRQARSSISLSFSGLTGESSAGDYQDCGVSPVLLMGEPPWHPPGPEGSFAGATRDDAITRYKEKKKRRKFDKKIRYASRKARADVRKRVKGRFVKAGEAYDYDPLCETRSY

SEQ ID NO: 50349 - protein, 369 aa, Oryza sativa
MASSSSSWLVLLSAALCIGALPASHAAGAFFVFGDSLVDNGNNNYLITSARADSPPYGIDTPDHRATGRFSNGKNMPDIISEHLGAEPVLPYLSPELDGDRLLVGANFASAGIGILNDTGVQFANIIHIEKQIRYFEQYQDRLRAVVGDEQAKKVVAGSLALITLGGNDFVNNYYLIPYSPRSREFSLPDYIRYILSEYKQVLRHIHALGARRVLVTGVGPIGCVPAELALHSLDGGCDAELQRAADAYNPQLVAMLAELNAEVGGDVFVGVNTKRAHDDFIEDPRAHGFETSTEACCGQGRFNGMGLCTLVSNLCADRDSYVFWDAFHPTERANRLIVQQFMHGSLDYITPMNLSTILKLDQQAQLRN

SEQ ID NO: 50350 - protein, 428 aa, Oryza sativa
MAQAVVPAMQCQVGAVRARPAAAAAAAGGRVWGVRRTGRGTSGFRVMAVSTETTGVVTRMEQLLNMDTTPFTDKIIAEYIWVGGTGIDLRSKSRTMSKPVEDPSELPKWNYDGSSTGQAPGEDSEVILYPQAIFKDPFRGGNNILVMCDTYTPAGEPIPTNKRNRAAQVFSDPKVVSQVPWFGIEQEYTLLQRDVNWPLGWPVGGYPGPQGPYYCAVGSDKSFGRDISDAHYKACLYAGINISGTNGEVMPGQWEYQVGPSVGIEAGDHIWISRYILERITEQAGVVLTLDPKPIQGDWNGAGCHTNYSTKSMREDGGFEVIKKAILNLSLRHDLHISAYGEGNERRLTGLHETASIDNFSWGVANRGCSIRVGRDTEAKGKGYLEDRRPASNMDPYVVTALLAETTILWEPTLEAEVLAAKKLALKV

SEQ ID NO: 50351 - protein, 132 aa, Oryza sativa
MFLESASTFLLRVSACFATSWLSGSKISTTLLPFLLSGKLAFTQLSTVIEFMPPRITRYLLSCRKERSFLVISVSSPSDDSQHECALPNTSLPQYGNESLLWSMFMRKEMILQCPQVTIKSHRSVPNVVPGN

SEQ ID NO: 50352 - protein, 101 aa, Oryza sativa; identical to SEQ ID NO: 35159

SEQ ID NO: 50353 - protein, 809 aa, Oryza sativa
MRGVESGGGGGGASSSSPAAAGNFDAGQYAFFGKEPLEGLELSCLEDGGGDGNGGGFSGPEDGLYRLSSVGEEIDNLSNLSEIDDLASTFAKLNRSISGTRNPGVIGDRRSISRGSSLTVDWAEDAEFPNWVDQDILEGEELQESKRWWSQSRSLGQQGDAKPLSRTSSYPQQPLQHRASEPIIAPQSPPFTSFPPPGARSPYTAQGLTRHGSIPSVGAGLQMGSPSMSLPSSSYHMAGLSHGLPYGGSVSFGSPNLPGSNPIQNDWPNQANPYAVDQFNLLPNMLQKQISLPNSPMSSLLFSQQQQRLAQVQVQPSHQNYLNLPPHLFYQHHSPELTGRFDSINNVPSLRDKRSRSGRGKHSTRFSQPLTDTGSQNGDSGGLKFRSKYMSSEEIESILRMQHSASHSSDPYVVDYYHQACIAKKGASSRQKANFAPTSMKDLPSKSRSSSDHHAYLQVDALGRVSFSSIRRPRSLLEVDLPSSGDGSHDQKSSLRPLEKEPMLAARVTVEDAICLLLEVDDIDRLLQSSQAQDNSFQLRRRRQVLLEGLATSLQLVDPLGPSKSSHSSGLAPKDDLVFLRIVSLPKGRKLLSRYLRLLTPGSELTRIICMAIFRHLRYLFGGLPSDSSAAETTVALAKTVSSCVLHMELGALSACLAAVVCSSEQPPLRPLASSAGDGASLIIKSVLDRATELLTDHHAAASYTVSNRTLWQASFDAFFGLLTKYCLSKYESIKQMFVMQSPCSVTGSEVSKATSREMPVELLRASLPHTNDQQRQLLLDFAQRTMPVTGINPTGANGGYITSESVPG

SEQ ID NO: 50354 - protein, 77 aa, Oryza sativa
MYTHTLNHHPQIIFQIISIQIHQSFIQHSTHFHSYIPRQSARCHLVIYMYPVNNNSWMWLTFCYVCHTIPTNLKLRT

SEQ ID NO: 50355 - protein, 318 aa, Oryza sativa
MRCAVRSAELWTHNTRVAAVVHVTDDGGSGGAIEDEARIADISTRLGNLLRGQSGVRAAAAAAPGGLTHKERRLHQMMFDDRDYDGGGGAASSSPRGRSPTPATEVSVTPCAERGYTAVVVRCRDRPKLLFDTVCTITDMGYVIHHGAVSSEPRGGAYQEYYIRHVDGDPVRSEAERQRVVQCLEAAIERRTADGLALEVRTGDRAGLLSDVTRIFRENGLTIRRAEISSERGEAVDTFYLSDPQGHPVEAKTIDAIRAQIGEATLRVKHNPFADGDGAGGGGGGATDDVAGSTAFLFGNLFKFYRPFQNFSLIKLYS

SEQ ID NO: 50356 - protein, 82 aa, Oryza sativa
MAHFMDLRAFILRARVLKLYRQALRMTRRAPVHACDELRQTVRAEIEKNRRCDDKQKIKFLISEGLQRLKGLDEMLDMTGNS

SEQ ID NO: 50357 - protein, 573 aa, Oryza sativa
MPPPPPPPPPPAAPDPPQLHGVVIITLPPPDQPSKGKTITAFTYTDDDVTPPPPTPPPTHLPTRALVPAGAGAGAEARRSRRGFSPRRAAAMVLVLGALAVAAYYSFYSDVAVQFLGMQEEAQNERNETKSFLLPLYPKARQGRALREFGDIKLAARRFDNDGGGGVGRKSRNKLEVKKAAAAGTNSTALLPIKGNVFPDGQYYTSIFVGNPPRPYFLDVDTGSDLTWIQCDAPCTNCAKGPHPLYKPAKEKIVPPKDLLCQELQGNQNYCETCKQCDYEIEYADRSSSMGVLARDDMHIITTNGGREKLDFVFGCAYDQQGQLLASPAKTDGILGLSSAGISLPSQLANQGIISNVFGHCITRDPNGGGYMFLGDDYVPRWGMTSTPIRSAPDNLFHTEAQKVYYGDQQLSMRGASGNSVQVIFDSGSSYTCLPDEIYKNLIAAIKYAYPNFVQDSSDRTLPLCLATDFPVRYLEDVKQLFKPLNLHFGKRWFVMPRTFTILPDNYLIISDKGNVCLGFLNGKDIDHGSTVIVGDNALRGKLVVYDNQQRQIGWTNSDCTKPQTQKGFPFFL

SEQ ID NO: 50358 - protein, 367 aa, Oryza sativa
MDDHMGRRTVGGLLFTKGGSILLFREDSARHKATNCCTRHGCSSKHLAGKDKQTHRAATAAKEASETPGRSQIFRKPSTRTPQGSTATDNISRNAASSYSENDNRPRETPGRDLIARLKERVNASRKRSLNRENSPSSPNGLSATSSSSSRTVSRPSHRAASRIRKADEGANAGAVNVRRDSSGDTRRNSDRDVDDFLLVEQAARDSTEGFISGFLARYRSNHQGLLSSLDDSIEDANGYWRFNMEGSEELENYFIFNDRYRGMRMDIDGMSYEELLALGDRIGTVSTGLSEDALSKCLDRSMYMATTSGTHEDCERKCSICQEEYSDGEEVGKMVCKHYYHFSCIKNWLRQKNWCPICKSVALNTN

SEQ ID NO: 50359 - protein, 210 aa, Oryza sativa
MEEGAKIGREHEQQQQQHGRVNGSGRVAAVGGGSGGGGDEIEIEVAAAAGASPSRQHGGLHGDVQAPTWKRFLAHVGPGFVISIAYLDPSNLQTDLVAGSSHRYSLLWVLLFGFIFVLTVQSLAANLGIITGRHLAELCMGEYPKYVKYCLWLLAELGVIAATIPGVLGTALAYNMLLHIPFWAGVLACGACTFLILGLQGYGVRIFLCL

SEQ ID NO: 50360 - protein, 523 aa, Oryza sativa
MATPSTSASGPAPAPAPASSAFPLTAAARFLRVSAFSSTRAFALAERRRTPRCRLSEVGGGDRSVAAGRSPGPRSFHGLVLSGNAEGAMQSLRRELSSGMHPLRENFVALVHVFAKNDLTTKGMEILAAMERQSIKSEADTFRPAKIQEAFGMRRCSKSLLQLGTLPCCTMAWLSFAQTAQASEGTNINMVYEVGELFELGIQLSYLLILLGLLGAGTFFVIRQVLVRRELDLSAKELQEQVRSGDASATEYFELGAVMLRRKFYPAAIKYLQQAIQKWDRDEQDLAQMQSLRRELSSGVHPLHGNFVALVHVFAKNDLATRCMEILATMERQSIKRELESSRRRMLLAAGAAVFLSWPNLAANAAEAKKGFLPVTDKKDGYSFLYPFGWQEVVVQGQDKVYKDVIEPLESVSVNTIPTSKQDIRELGPPDQVAEALIRKVLAAPTQKTKLIEAKENDVDGRTYYTFEFTAQAPNFTRHALGAIAIANGKFYTLTTGANERRWEKIKDRLHTVVDSFKIEARV

SEQ ID NO: 50361 - protein, 477 aa, Oryza sativa; identical to SEQ ID NO: 31599

SEQ ID NO: 50362 - protein, 623 aa, Oryza sativa
MGNTCVGPSISKNGFFQSVSTVLWKARQDGDDALPGANGAPDGGGQGRLPAPPPPTSDAPLAVQNKPPEHVKIVSTTDTASAEQDASKSSAGSDSGEAARPRPRVPPVKRVSSAGLLVGSVLKRKTESLKDKYSLGRKLGQGQFGTTYLCVERATGKEFACKSILKRKLVTDDDVEDVRREIQIMYHLAGHPNVISIRGAYEDAVAVHLVMELCAGGELFDRIVQKGHYTERKAAELARVIVGVVEVCHSMGVMHRDLKPENFLFADQTEEAALKTIDFGLSIFFRPGQVFTDVVGSPYYVAPEVLKKKYGQEADVWSAGVIIYILLCGVPPFWAENEQGIFEEVLHGRLDFQSEPWPSISEGAKDLVRRMLVRDPKKRLTAHEVLRHPWVQVGGLAPDKPLDSAVLSRMKQFSAMNKLKKMALRVIAENLSEDEIAGLKEMFKMIDTDNSGQITFEELKVGLKKVGANLQESEIYALMQAADVDNSGTIDYGEFIAATLHMNKIEREDHLFAAFQYFDKDGSGYITADELQLACEEFGLGDVQLEEMIREVDEDNDGRIDYNEFVAMMQKPTMGLPAKKSGGLQNSFSIGFREALRMSWETATRVSHTLVEATTTRSICCLP

SEQ ID NO: 50363 - protein, 443 aa, Oryza sativa; identical to SEQ ID NO: 44891

SEQ ID NO: 50364 - protein, 102 aa, Oryza sativa
MSSDGGPVLGGVEPVGNENDLHLVDLARFAVTEHNKKANSLLEFEKLVSVKQQVVAGTLYYFTIEVKEGDAKKLYEAKVWEKPWMDFKELQEFKPVDASANA

SEQ ID NO: 50365 - protein, 410 aa, Oryza sativa
MDLLRRVAVVAVLLSLPSRGRSGGGGSDLHPVVLVPGYGSNRLYARLTAAYEPAAPRCGAREGKDEWFQLWPIDAAASEPAQAPCLAEKMSLVYDPVADDYRNVAGVVTRVPSFASTRALVGWDPLVRQLEAMGHRDGGSLFAAPYDFRYAVAPRGHPSAVGERYFARLTRLIERASRLNGGRPAVVVAHSFGCALTYQFLRARPLAWRQRFVKHAVLLAAALGGFAEGMDGLASGAGSGLPNLAPPARARLARSQQSALWRLPTPMVFGDRPVVVTKNSTYSANNITEFLDAIGFTEGVQPYVTRVLPMWRALPAPMVPVTSMYGVGVRTPETFVYGEAGFEGTPEVVYGDGDGNMNIVSLMAAEEWSGVEGQILKVVRLPGVSHVGFFSDLALKKVVAEIQKAVSSIE

SEQ ID NO: 50366 - protein, 277 aa, Oryza sativa
MADAPMLHHHSNSANMWGPCTDAAAGQPSCAEDRATPTGSSTTHRGRLFHRRSRLSRQAGLLHQTCLSRQSGLPPSAAPLAPSRPPSPPPAPLAPSRPPLPLATPLCVQPVSDPSSKRCCAGRCSRLPRPRQAVRGCHASSHHRHGHHLTVVARRGRCGRRRGGCGTAPWSCRRWWRWPGGGGGSRICSIISSSSWPGSSATTPSATRSTSRRTATARPSRSSTWPSPRGCRRPRRRRRRRRRCPSTGVLELIVRPFGCTYVREIKVWVSFSFFFVV

SEQ ID NO: 50367 - protein, 328 aa, Oryza sativa
MDWSNLGGEGPAGLIAERVLANDVADYIRFRAVCRLWRLRSVDPLSRALDCRFLPRRWIMLDKAAPPRCRRFLYLSTGECIRTDLPELESHTLVALAPEGLLLLLHQRTLLLRLLNPLTRHLTDLPPVTALLTPEQLRSWHSDGGLEDDPLLARGVGLASATTVALFLCRPKLIAVAKPGDECWAVVVADKNRPYIDSALPFAGRFYCAIGGSVMVLDSSPSSDQIIEGGRGWSPPLSRASPCISPGCQELFTLWTMVGSLMLVYRKIRQSNVDDESRQGAAKYEMKYDVYRVDFDAGDLIPVKGLGGRAVFLGLCRSVTLLPAEARS

SEQ ID NO: 50368 - protein, 475 aa, Oryza sativa
MEVAAGARGGGAGGGGGGPAPFLLKTYEMVDDPSTDAVVSWSDASDASFVVWNHPEFAARLLPAYFKHSNFSSFIRQLNTYGFRKIDPERWEFANEYFIKGQKHLLKNIHRRKPIHSHSHPPGALPDNERAIFEDEIERLSREKSNLQADLWKSKQQQSGTMNQIEDLERRVLGMEQRQTKMIAFLQQASKNPQFVNKLVKMAEASSIFTDAFNKKRRLPGLDYSIENTETTSSYDDHSSTSKQETGNLLNQHFSDKLRLGLCPAMTESNIITLSTQSSNEDNRSPHGKHPECDMMGRECLPLVPQMMELSDTGTSICPSKSSCFAPPISDEGLLTCHLSLTLASCSMDVDKSQGLNANGTTIDNPTEAATATMEKDDTIDRSFDDNQKKSADSRTADATTPRADARVASEAPAAPAAVVNDKFWEQFLTERPGCSETEEASSGLRTDTSREQMENRQAYDHSRNDREDVEQLKL

SEQ ID NO: 50369 - protein, 522 aa, Oryza sativa
MDSGLGRSSETSLKALPSMASNATRNTDPDQQGVRFSSMDQPPCFARPGQSFPAFPPLFGVQSSSLYLPDDIEAKIGNQFESNPSPNNPTMDWDPQAMLSNLSFLEQKIKQVKDIVQSMSNRESQVAGGSSEAQAKQQLVTADLTCIIIQLISTAGSLLPSMKNPISSNPALRHLSNTLCAPMILGTNCNLRPSANDEATIPDISKTHDYEELMNSLNTTQAESDEMMNCQNPCGGEGSEPIPMEDHDVKESDDGGERENLPPGSYVVLQLEKEEILAPHTHFCLICGKGFKRDANLRMHMRGHGDEYKTAAALAKPSKDSSLESAPVTRYSCPYVGCKRNKEHKKFQPLKTILCVKNHYKRSHCDKSYTCSRCNTKKFSVIADLKTHEKHCGRDKWLCSCGTTFSRKDKLFGHVALFQGHTPALPMDDIKVTGASEQPQGSEAMNTMVGSAGYNFPGSSSDDIPNLDMKMADDPRYFSPLSFDPCFGGLDDFTRPGFDISENPFSFLPSGSCSFGQQNGDS

SEQ ID NO: 50370 - protein, 262 aa, Oryza sativa; identical to SEQ ID NO: 46690

SEQ ID NO: 50371 - protein, 314 aa, Oryza sativa
MEGESSAVTSPFPALTSTTPNELEMTNKNSNVVGGMTHSNSMPTLTAAKDGNTKVLPFEFRALEVCLESACRSLEEETSTLEQEAYPALDELTSKISTLNLERVRQIKSRLVAISGRVQKVRDELEHLLDDEMDMAEMYLTEKLTRQEISETSSRVEVDDPSQLEVDRDEDYRSEADVSNGTFIGYKPHIEELEMLLEAYFVQIDGTLNKLSHLREYVDDTEDYINIMLDDKQNQLLQMGVMLSTATVVITAGVAVVGLFGMNIGISLYADPTNEEEKRASNMKFWETTLGTIAGCTVMYIVAMGWGKRSGLLQ

SEQ ID NO: 50372 - protein, 209 aa, Oryza sativa; identical to SEQ ID NO: 30266

SEQ ID NO: 50373 - protein, 486 aa, Oryza sativa
MEAKPVAMEVEGVEAAGGKPRFRMPVDSDLKATEFWLFSFARPHMASFHMAWFSFFCCFVSTFAVFARLAMGTACDLVGPRLASASLILLTTPAVYCSSIIQSPSGYLLVRFFTGISLASFVSAQFWMSSMFSAPKVGLANGVAGGWGNLGGGAVQLLMPLVYEAIHKIGSTPFTAWRIAFFIPGLMQTFSAIAVLAFGQDMPGGNYGKLHKTGDMHKDSFGNVLRHALTNYRGWILALTYGYSFGVELTIDNVVHQYFYDRFDVNLQTAGLIAASFGMANIISRPGGGLLSDWLSSRYGMRGRLWGLWTVQTIGGVLCVVLGIVDFSFAASVAVMVLFSFFVQAACGLTFGIVPFVSRRSLGLISGMTGGGGNVGAVLTQYIFFHGTKYKTETGIKYMGLMIIACTLPVMLIYFPQWGGMLVGPRKGATAEEYYSREWSDHEREKGFNAASVRFAENSVREGGRSSANGGQPRHTVPVDASPAGV

SEQ ID NO: 50374 - protein, 488 aa, Oryza sativa
MGARCSKLSVCWWPPHFKSPLLENGAAADDGSGVPVFAEYSLDELRVATDGFSPERIVSEHGEKAPNVVYRGTLFSTGRTVAIKRFGRSAWPDSRQFLEEAMAVGQLRSVRLANLIGCCCENGERLLVAEFMPHETLAKHLFHWETKPLSWAMRVRAAFYVAQALEYCSSKGRALYHDLHAYRVLFDVDGNPRLSCFGLMKNSRDGKSYSTNLAFTPPEYLKTGRVIPESVVYSFGTILLDLLSGKHIPPSHALDLIRGKNYLVLMDSCLEGHVSSSDGTELIRLASRCLQYEGRDRPNLKSVVSALGNLQKDASAPSHALLGIQHDKENTERISLSAIAKVYARADLDEVHEMLENDGYCEDERATFEVSFHSWTGQQVSDSILVKKHGDSAFQSKDFATAVECYSRFIDTGVMVSPTMLARRSFVYMVLGKLQEGLADAKKAADISPEWPTAHYLQGMAYLAMGMEPEGHEELKQGAALEAERNAR

SEQ ID NO: 50375 - protein, 172 aa, Oryza sativa
MGLSRFSDWIWPGSRTTRRARDAPASSVALAVAGALFPDSPSGFREPTVGTLRGPASSGGGARRARKGTSRRRSREVVDREHDMVVVPLGGGGDGYSSDSGSDDSDWSIGWLEPQGPELHSDGDSDGSFAVLVPCYRHGRCRVEEPGRGRLADGNVSGGKNFVERWLSSLPN

SEQ ID NO: 50376 - protein, 282 aa, Oryza sativa
MRSPQAQIDLASGRLWSQLLHFKQEGFLLGAGSPSGSDAHISSSGIVQGHAYSILQVREVDGHKLVQIRNPWANEVEWNGPWSDSSQEWTERMKHKLKHVPQSKNGVFWMSWQDFQIHFRSIYVCRVYPPEMRYSVHGQWRGYSAGGCQDYDSWHQNPQYRLRVTGRDALYPVHVFITLTQGVGFSRKTNGFRNYQSSHDSSMFYIGMRILKTRGCRAAYNIYMHESVGGTDYVNSRGISCELVLEPYPKGYTIVPTTIHPGEEAPFVLSVFTKAPIKLEAV

SEQ ID NO: 50377 - protein, 500 aa, Oryza sativa
MGKKGNWFSAVKKVFSSSDPDGREAKIEKADKSRSRRKWPFGKSKKSDPWTSTVAVPTSTAPPSQPPPPPPTHPIQPQPEEIKDVKAVETDSEQNKHAYSVALASAVAAEAAAVAAQAAAEVVRLTTATTAVPKSPVSSKDELAAIKIQTAFRGYLARRALRALRGLVRLKSLVDGNAVKRQTAHTLHCTQTMTRVQTQIYSRRVKMEEEKQALQRQLQLKHQRELEKMKIDEDWDHSHQSKEQVETSLMMKQEAALRRERALAYAFSHQWKNSGRTITPTFTDQGNPNWGWSWMERWMTSRPWESRVISDKDPKDHYSTKNPSTSASRTYVPRAISIQRPATPNKSSRPPSRQSPSTPPSRVPSVTGKIRPASPRDSWLYKEDDLRSITSIRSERPRRQSTGGASVRDDASLTSTPALPSYMQSTESARAKSRYRSLLTDRFEVPERVPLVHSSIKKRLSFPVADKPNGEHADKLMERGRRHSDPPKVDPASLKDVPVS

SEQ ID NO: 50378 - protein, 519 aa, Oryza sativa
MAMGLLAWMVAAAAAAVLASWAFSAVVHLVWRPRAISRRLRAQGVGGPGYRFFSGNLGEIKRFRGDGAGVVLNVSSHDFLPIVQPHFRKWIPLYGRTFLYWFGAQPNICLADVSMVWQVLSDRTGIYPKNLTNPHFVRLLGKGLVLTDGDEWKRHRKVVHPAFNMDKLKMMTMTMSDCSRSMMSEWESELAAKGGLVEIELSRRFEELTADVISHTAFGSSYKEGKQVFLAQRELQFLAFSTFLTVQIPGFSYLPTMKNFKTWSLDKKVRGMLMDIIKTRHANKDVAGYGNDLLGLMLEACAPEHGESCPQLSMDEIIDECKTFFFAGHDTTSHLLTWTMFLLSTHPDWQEKLREEIAMECGDKVPTGDMLNKLKMVNMFLLETLRLYSPVSLIRRKVDTDIELGGIKMPEGALLTIPIATIHRDKEVWGEDADEFRPERFENGVTRAAKHPNALLSFSSGPRSCIGQNFAMIEAKAVIAMILQRFSFTLSPKYVHAPTDVITLRPKYGLPMILKSLKL

SEQ ID NO: 50379 - protein, 406 aa, Oryza sativa; identical to SEQ ID NO: 34777

SEQ ID NO: 50380 - protein, 350 aa, Oryza sativa
MASLPVPSVQAMVAAIGIDHVPPRYLRPTDADEPVASDGGEAEIPVVDFWRLQLGDGDELARLHIACQDWGFFQLVNHNVPEDVVEGMKASIKGFFELPAETKKQVVQEPGQLEGYGQLFVVSEDQKLDWADILYVKTQPLQDRNLRFWPDQPAGFRMALDRYCAAVKITADGLLAAMATNLGVESEVIAERWVGGVQSVRVQYYPPCGQADKVVGISPHSDADLVTILLQANEVDGLQIRRGGAWLPVRPLEGALIVNVGDIRQVFTNGRYESVEHRVVVDGKKERLSMATFHSPSKNAIVGPLSEMVEHEDDAAYTSMDHDELLKLFFAKKLEGKNFLNPIKKLKNSG

SEQ ID NO: 50381 - protein, 564 aa, Oryza sativa
MSVLIVTSVGDIEVDLHTDMCPLTTKNFLKLCKMKYYNGCLFHKVEKDFLAQTGDPTGTGAGGDSVYKFLYGDQARFFDDEIRPDLRHSKKGTIAMASAGENCNASQFYITLRDDVDYLDDKHTVFGMVAEGFDTLTKISETYVDDKGRPFKDIRIKHTYVLDDPFDDPPQLSELIPENSPVGKPQDEIAEERLEDSWVPMDEMVAPEELEEMIRSKEAHTNAVILESVGDIPDAEIKPPDNVLFVCKLNPVTQDEDLYTIFSRFGTVTSAEIIRGYKTGDSLCYAFIEFETKEACERALFKMDNCLIDDRRIHVDFSQSVSKLWGQFRQSKRNANKDGCFKCGAPDHIAKDCDQGTEQKNKGPSYVLKDENTQRGGNNRRSYDLVFDEDGENYTDQQDPGSTGRRKIQRTDDRKSGLPPRGDHDRISRERTHSDENGREGGKEGDRDRGIRKHEDYHRYNKSGERSSSRYDDRGYSKHESRGKYRDGNDDYRRQPGGGSRYGRDKYEGERRYREDDGHGRSDRHKRDESDNRKRSPDTGKHRREDGGHRETSKHRERRQRDDR

SEQ ID NO: 50382 - protein, 346 aa, Oryza sativa
MLYLEGPAGVGFSYSTDPSFYGGVGDSRTARDNLRFLQGWFAKFPQYKGRDLYITGESYAGHYVPQLAQRMVEFNKKEKLFNLKGIALGNPVLEFATDFNSRAEFFWSHGLISDSTYHSFTTVCNYSRYVSEYYHGSLSSACDTVMTQVARETSRFVDKYDVTLDVCVSSVLMQSKSLAPQRGSRELDVCVEDETMGYLNRKDVQEAMHARLEGGVPKWTVCSSVLEYKQLDLQIPTINIVGGLVKSGVPVLVYSGDQDSVIPLTGSRTVVQRLAGWLRLGTTAAGYRVWFEGRQVGGWTQSFGGGALSFATVRGASHEAPFSQPERSLVLFAAFLAGRPLPDSFQ

SEQ ID NO: 50383 - protein, 556 aa, Oryza sativa
MAAMATPQQCWLPTRARAPPPPPPRAPSSASPVSGAPASLRFRGRRAASASASAARRRRGASLPCSPRCALETAGPGFDPLGLYNDGPSRNDTQSPLSNFFGVLSPVFGSSSGGRKEKSYGRGAAAAIEDSSIDIGDFFKGPLPGKFLKLLGYLALSRLGIYIPLGGVNRDAFAGNLDQNSLLGTLDSFSGGGIGRLGICSLGIVPFINAQIVFQLLAQLYPKLQDLQKKEGEAGRKKVLQYTRYASVGFAIVQAIGQVLFLRPYVNDFSTEWVLTSVTLLTLGSVFTTFIGERISDLKLGNGTSLLIFTSIISYLPASFGRTVAQAFQDGNYVGLLTIILSFLFLVLGIVYVQEAERKIPLNYASRYSSRSGGLQRSAYLPFKVNSSGVMPIIFSTSSLALPGTLARFTGLEFLKKAAISLNPGGALYIPTNVLLIAFFNYYYTFLQLDPDDLSEQLKRQGASIPLVRPGKSTAAFIKTVLSNIYVLGSAFLAVLAAGPSVVEQITHLTAFRGFAGTSVLILVGCATDTARKVQAEIISQKYKNIEFYDVNRFDQ

SEQ ID NO: 50384 - protein, 281 aa, Oryza sativa; identical to SEQ ID NO: 29271

SEQ ID NO: 50385 - protein, 397 aa, Oryza sativa
MLELCYELRTPFVMSVVANQILSFKRYEVSWVHRRAVGHSIPYRFLQGDFDIIGGASPIPEAEIVKVTLDVGAHFYDPKAIIIRLNHSKLAEAVCSWAGVPQERRQNVAEFFSSTLVQYWPNKADRKSQWSLIRGQLLQDLRLSEEVVEKLHKDDQRFCGSADQVLARLRGTLFYDKSACKALDEISAFLKCLRIWSIEEHITIDVLMPPSECYYTDLFFQIYVKEGNPGSSSHEKLLAIGGRYDWLIEQAWDRTYKSKPPGAVGVSIALEKFLPNSPSSDIGFPRIEPSISVLVCSKGGGGLLNERMELVAELWEANIKAQFVPQEDPSLQEQYEYASDHDIKCLVFITEAGVSQTELVKVRHLDAKREKEVKREELVKFLSDAICLQFKNPTIWS

SEQ ID NO: 50386 - protein, 621 aa, Oryza sativa
MGDGGVACAVPPQRAVEGFRAGGLVRRPGGEAMPDKGERGHHTTSNNHHSHSHSHRKHHAELEEGELLNGEADNSSSRDLERSMPPKKWRKVLAASSAAEVEPGEIVMPSKKARKNGELEKGEIAPERQRKDKSDKSGRKSNKDEVEPGEVAPPDKKQDRDHNKKLGSSAQVRDDGSKKGSSRDSDEEPGEIRPESSSTGSARKSRATEPENSNHKHQADTCDQTGSKSRRKGEAKSSGRHLSGRNRDISPMTRDRHERSPGILGRFPHDRLRHDRSPSRLEPSPRDRGRHYDNRDRSPYISPRHRMRPSHYRDNTPSRGEMHHHRDNTPSRVDSSPRRSQHEDFRDRSPSRRDKSPSERGRTTESHEAGKKSRGAKLENNSLEKAQHKSKSTKQSTKSKSSSNGSNEKISKEKATETIQYTELPPPPPLPPPPPPPPPPPPPLPPNMPPPLPPPPEPELNGAPAEDVSMEEDMDICDTPPHTTSSGCGGGCGGGCGGGMVMEASKAGHVKSGGCGSGCGGGCGGGCGGGVAMESSKAGHVKSGGCGSGCGGGCGGGCGGGMVMESSKAVHVKSGGCGGGCGGGVAMESSTVGHAKSGGCGSGCGGGCGGGGCGAMLNAST

SEQ ID NO: 50387 - protein, 346 aa, Oryza sativa
MSDSALKDLNLAQSAELEKTKDSSAKSCITKPVLNGNKCNNTEENAPPVLPDAVTNGCEAGNADVEYIDSESLTDLEDAGATLSTLVARLDSKDWVMTCEALNNVRQLAIFHKDRLQELLEPLVPLIVKSVKNPRSAVCKTALMTCADIFKAYGDLMVDSIDPLLVQLFLKSSQDKRFVCEAAEAALISMTSWIAPSALLPKMQPYLKNRNPRIRAKASMCFSKSVPRLGVEGIKEYGMDKLVQIAATQLSDQLPESREAARKLALELQAFYEKSQASSSGEVDDAPATSPDADADAGAESWEAFCQSKLSPLSAQAILRVTSTTKEGVAVGVTSTPPKEGVTVGC

SEQ ID NO: 50388 - protein, 333 aa, Oryza sativa
MGLGTPATQYVMVVDTGSSLTWLQCSPCLVSCHRQSGPVFNPKSSSTYASVGCSAQQCSDLPSATLNPSACSSSNVCIYQASYGDSSFSVGYLSKDTVSFGSTSLPNFYYGCGQDNEGLFGRSAGLIGLARNKLSLLYQLAPSLGYSFTYCLPSSSSSGYLSLGSYNPGQYSYTPMVSSSLDDSLYFIKLSGMTVAGNPLSVSSSAYSSLPTIIDSGTVITRLPTSVYSALSKAVAAAMKGTSRASAYSILDTCFKGQASRVSAPAVTMSFAGGAALKLSAQNLLVDVDDSTTCLAFAPARSAAIIGNTQQQTFSVVYDVKSSRIGFAAGGCS

SEQ ID NO: 50389 - protein, 318 aa, Oryza sativa
MRLLEARLANASAIPDDPPVPPPQFTDPALYHYAIFSDNVLAVSVVVASAARAAAEPARHVFHVVTAPMYLPAFRVWFARRPPPLGTHVQLLAVSDFPFLNASASPVIRQIEDGNRDVPLLDYLRFYLPEMFPALRRVVLLEDDVVVQRDLAGLWRVDLGGKVNAALETCFGGFRRYGKHINFSDPAVQERFNPRACAWSYGLNVFDLQAWRRDQCTQRFHQLMEMNENGTLWDPASVLPAGLMTFYGNTRPLDKSWHVMGLGYNPHIRPEDIKGAAVIHFNGNMKPWLDVAFNQYKHLWTKYVDTEMEFLTLCNFGL

SEQ ID NO: 50390 - protein, 157 aa, Oryza sativa; identical to SEQ ID NO: 46899

SEQ ID NO: 50391 - protein, 395 aa, Oryza sativa
MDKGTNAVDMLEGRSYRLQYPWIGVVNRSQQDINKSVDMIAARHIEREYFANTTEYRYLAHRMGSEHLVKMLSKHLESVIKSRIPGIQSLISKAIAELEAELHRLGKPIAADAGGKLYTIMEICRMFDGIYKEHLDGMRPGGEKIYYVFDNQFPVALKRLQFDKNLSMENVRKLITQADGYQPHLIAPEQGYRHLIESCLVSIRGPAEAAVDAVHAILKELVRKAISETDELNQFPTLRVEISNAAFESLDRMRNESKKSTLKLVDMECSYLTVDFFWKLPQDVEKGGNPTNSIFDRYNDSYLRRISTNVLAYVNMVCSSLRNSIPKSIVYCQVREAKRTLLDRFFTELGAREIKHISKLLDEDPAVMERRANLAKRLELYRSAQAEIDAVVWAR

SEQ ID NO: 50392 - protein, 414 aa, Oryza sativa
MEIISPSSSSNNNSPVLATFLVVLVVLLASSRPASSQNQQSFTINPGGAAAARPGGGKGGGGGGGPGSFSDFLTQNVQHYVLSEQKYAGKVKALDAELSAAEAGAARYVVSGDGKGKFRTITEAIKAVPEYNKKRVILDIRPGTYKERLLIPFTKPFITFVGNPRSPPTIMWDDRAATHGKDGQPMGTMLSATVAVEADYFMASSIIFKNNAPMAAPGAHGGQAVALRVFGSKVAMYNCTIDGGQDTLYDHKGLHYFKNCLIRGSVDFIFGFGRSLYADCTIESVTKEVAVVTAQQRSKNIAEAIDTGFSFLRCKISGIGQIYLGRAWGDSSRVVYSYTTMGKEVVPIGWDGWEVQKPEHSGIYYGEYKCSGPGALPSKRIGWSLVLSDIQAKPFTGSHFVYGDSWILPPPKSM

SEQ ID NO: 50393 - protein, 360 aa, Oryza sativa; identical to SEQ ID NO: 29961

SEQ ID NO: 50394 - protein, 307 aa, Oryza sativa; identical to SEQ ID NO: 31595

SEQ ID NO: 50395 - protein, 361 aa, Oryza sativa; identical to SEQ ID NO: 47434

SEQ ID NO: 50396 - protein, 398 aa, Oryza sativa
MVSASRFVLLSRLPAAAASSRFLRPLAAAGSLLPAALAPFAPPAAGARCFATQPATSSLRDSSPNWSNRPPKETILLDGCDFEHWLVVMDPPPGDPSNPEPTRDEIIDGYIKTLAQIVGSEDEARHKIYSVSTRHYFAFGALVSEELSYKLKELPKVRWVLPDSYLDVRNKDYGGEPFINGEAVPYDPKYHEEWVRNNARANERTRRNDRPRNFDRSRNFERRRENMHNFQNRDVPPGQGFNSPPPPGQGPVLPRDAPPMPPPPSPPNPGAPPSYQPHAPNPQAGYTNYQGGVPGYQGRAPGYQGGNQKYRGPPPPPPSAYQGNNPGYQGGGPGYHGGNPPPYQAGNPPPYQAGNPVFAGGAPGYQGQGGNPSYQQGSDNYNAGAPAYKRDEPGRNYQ

SEQ ID NO: 50397 - protein, 298 aa, Oryza sativa
MLLPSGVFSGSTVSSPWMRRPAITSGKQCTRRSAVKSIGGNAERRDTTSPYLVIHQSWYSRMTNTTRRRRWFDVTNSGRIPSLNSWYTLPVYPPVENTTAGTSCTTSHRAAPPAGTRRSRTSSIVAMTFASHLRVYGRILSSSTAAAVAFPDDDDTSWNDALAECIRTSPRAKQMSARVDVRSQQRLSFPMPEHGAAATSTARRAAAAAPPPPSSECTKEKNDTGATNSVPTETNDSSSRPKEAAHAERPRLRRLAVLAGAAAAVVVVVVHDTAAGAGLGRRRDLACDLLILLALPEL

SEQ ID NO: 50398 - protein, 385 aa, Oryza sativa
MGRVVVVVAAAAVAVAVVVLLGAAAPAASAMEFGDKDVASEEALWELYERWRGQHRVARDLGEKARRFNVFKDNVRLIHEFNRRDEPYKLRLNRFGDMTADEFRRAYASSRVSHHRMFRGRGERRSGFMYAGARDLPAAVDWREKGAVGAVKDQGQCGSCWAFSTIAAVEGINAIRTSNLTALSEQQLVDCDTKTGNAGCDGGLMDNAFQYIAKHGGVAASSAYPYRARQSSCKSSAASSPAVTIDGYEDVPANSESALKKAVANQPVSVAIEAGGSHFQFYSEGVFAGKCGTELDHGVAAVGYGTTVDGTKYWIVRNSWGADWGEKGYIRMKRDVSAKEGLCGIAMEASYPIKTSPNPAPKKIKKVTDDDEDDDDEEHRHHDEL

SEQ ID NO: 50399 - protein, 183 aa, Oryza sativa
MIIWCYLMVVFTDPGAVPENWRHASEEDGIGVNSRTISYNWDATYPNPEGQSAQKYCSRCQNGKPPRCHHCSVCNRCVLKMDHHCVWVVNCVGARNYKYFLLFLVLPKHFDLQFLIICIHDKFSIKHLCSVKERRFVSFSTRTLPEQLNGMFFCKNFLYEICLKNNINPFLKFKIVNTQLITR

SEQ ID NO: 50400 - protein, 313 aa, Oryza sativa; identical to SEQ ID NO: 46581

SEQ ID NO: 50401 - protein, 303 aa, Oryza sativa
MDDAVETAAEILVSFQNRRLVRWPEWVPRPDEKGAAAEEKKLPGWKDRRKRTSKSKPPPAILVCGLELRDSGGEKAASIPAPLPPPARKKMLFKMKVKDEPTAARGPETPPEYGAGAGSGANFSRDGVARPLPPRAVVKAEPTPAARMPESPPYYVAAAGSAPSTAGGDRRPRPRPVERAHVKTVLAAAKEAMEASSPETPLDYAATTGSGASSSGDESSRKRKAAPGGGGSGGASSSGDEGCSSPEKRPCLVAGGGAQTAAAAKAEGEKFADSMNRNEDGVLLFDLNECVDNAKIGPNGSLC

SEQ ID NO: 50402 - protein, 569 aa, Oryza sativa
MARPLLKIGHGLDRFRWRRSTSSSSSSPLALSLSSSSAAALSDDDPGSPMDPEMPPAARRALSRSSGSRGRLSFELPPLAGGPSDKEEAPPRTSSAPAPARPAPAALHEGPPSDAEMVREKFSKLLLGEDMSGTGKGVSSALALSNAITNLAASVFGEQRRLQPMAADQKARWRREIDWLLSVSDHIVEFVPSKQVSEDGSTMEIMITQQRRDLQMNIPALRKLDAMLLEYLDNFKDKQEFWYVSKDASESEKGNTPRQDDRWWLPTVRVPPGGLSDASRKWVQHQKDLVNQVLKAAMAINANVLMEMDVPEAYIESLPKNGKSTLGDSMYKIITEDHFNPEELLGTVDMSAEYNIIDLKNRIEASVVIWQRKMVHKEGKLSWGHGVKFEKREKFEARAENVLLLIKHRFPGIAQSALDISKIQYNRDIGLAILESYSRTLESLAFTVMSRIEDVLHADSLAQASNTRTQESMRMASLSRYDTDKVVIDAKAEVERLGRMEPVSATLFDFVSPRDQDVVATKMDSKEKGCRGDAHSRKLTKVSPIATKRYSYLEKLENLSGTRSPISRH

SEQ ID NO: 50403 - protein, 373 aa, Oryza sativa
MARRSAPLLRRILSSPAPAPAHHGGAGARRTVTYMPRPGDGNPRAVTLIPGDGIGPLVTGAVQQVMEVMHAPVYFETYEVRGDMPTVPPAVIESIRRNKVCLKGGLATPVGGGVSSLNMQLRKELDLYASLVNCSNFPGLPTRHQDVDIVVIRENTEGEYSGLEHEVVPGVVESLKVITKFCSERIAKYAFEYAYLNNRKKVTAVHKANIMKLADGLFLESCREVASKYPGIQYNEIIVDNCCMQLVAKPEQFDVMVTPNLYGNLVANTAAGIAGGTGVMPGGNVGQDHAVFEQGASAGNVGNENILEQKKANPIALLLSSAMMLRHLQFPSFADRLETAVKRVIAEGKYRTKDLGGTSTTQEVTDAVIANLD

SEQ ID NO: 50404 - protein, 922 aa, Oryza sativa
MLTATQTLAPAVLSRSHGAPSSFSSQPRRTAAAASRVSCTRVGALSEVVNGELVVGDQEQTTDDLLTRHKNVVADYTLSATVTVSLKQDDSTPQKVADMVNRDWLFLDFFSSHIEGMHTEPQLARYSHMDGKGSFIYEASFSIPSSLDAVGAVQVVNRYSSEVYISDIDVHLCGGRHQWTDITFHCNSWIDYNPNDQRFFFPLKSYLPSQTPRGVKNLRKEELRAIRGDGRGERKEWERIYDYDVYNDLGDPDNDPATRRPVLGGRGRPYPRRCRTGRRRCRTDPSSESPPAKDGAGIYVPRDEAFTERKAGAFATKKALSALSAFTTAQRVSGDRRRGFPSLAAIDALYEDGYKNRPSSSQQEADNLEGYFREVLQKQVKLLLKGEKEEFKEELRKVFKFQTPEIHDKDKLAWFRDEEFARQTLAGMNPLSIQLVRDTDFPIFSKLDEETYGPGDSLITKELIEEQINGVMTAEEAVEKKKLFMLDYHDVLLPFVHAVRELDDTTLYASRTLFFLTEDGTLRPIAIELTRPKSPNTPQWRQVFTPGSSVAASWLWQLAKTHVLAHDTGYHQLVSHWLRTHCCVEPYVIAANRRLSQMHPIYRLLHPHFRFTMEINAQARGMLINANGIIESAFAPGKLCMELSSAVYDKFWRFDMEALPADLIRRGMAIECEDGKLELTIEDYPYANDGLLIWDSIKEWVSDYVNHYYQLASDIHMDKELQGWWNEVRTKGHPDKEEGWPELNCHGSHVEVLTTIIWVASGHHAAVNFGQYPYAGYFPNRPTIARRNMPTEGQACSHDGMQPTFVEDPVRVLLDTFPSQYQTTLVLPVLNLLSSHSPGEEYMGTHAESAWMADREVRAAFGRFNERMMSIAEMIDCRNKDPERKNRQGPGVVPYVLLKPSYGDPKDMTSVMEMGIPNSISI

SEQ ID NO: 50405 - protein, 373 aa, Oryza sativa; identical to SEQ ID NO: 50403

SEQ ID NO: 50406 - protein, 567 aa, Oryza sativa
MVLASTPKVVLGCVAFTIFWVLAVFPSVPFMPVGRTAGSLLGAMLMVLFRVMTPEEAYAAIDLPILGLLFGTMVVSIFLERADMFKYLGNMLSWKSRGSKDLLFRVCVVSAVASALFTNDTTCVVLTEFILKVARQNNLPPQPFLLALASSSNIGSAATPIGNPQNLVIAVESGITFGQFLLGVFPAMVVGILANTCILLCYFWRYLSADRDQLEGGGGAHGPEVVADEEVTSHRFTPARMSHASSVNDSDCISEPIRRSESMNRADALRSRSYNSEGDIQVAIRSLRASSLSREMVEVSTVCDRRDVVVDGGGGGGPRKITRSTSHQRSVIIEDAPEQHQHPAGLFDGEKDKDDEAIGKRRRWKVIVWKYAVYLTTLGMLAALLLGLNMSWTAITAALILLALDFTDAQACLEKVSYSLLIFFCGMFITVDGFNKTGIPNTLWELVEPYARIDSPKGVVLLAIVILVLSNVASNVPTVLLLGTRVAASAAAISPASEKKAWLILAWVSTVAGNLTLLGSAANLIVCEQARRAQFFGYNLTFWSHLRFGVPSTIIVTAIGLLIVMSY

SEQ ID NO: 50407 - protein, 244 aa, Oryza sativa
MENARITGDLVPHVYGSEPIIGSWDPARAIAMERELASMWALSFVVPPDHETLDFKFLLKPKDADTPCIIEEGPTRHLTGGMLEGDVRIAWFKMNGDHETLEFRVFNKADIVSPLDLAASWRVFKENFQPSKVRGIPDVSINVAPAHGTEDTSTESLELDLEHYVIPTPSAATSEYAANLAANPASLIQTGALWTNDMLLSDGIQSPSSATADFEDHNNCNKDNVALPSDSFKKLQVSGIVESK

SEQ ID NO: 50408 - protein, 1006 aa, Oryza sativa
MRRGKGGRNGLLPSSLRIISSCLKTVSSNAGSVASTVRSAGASVAASIAPQAEDEKDQVLWAGFDKLELHPSSFKHVLLVGYSNGFQVLDVEDAANVCELVSKRDGPVTFLQMQPTPVYSDGTEGFRTSHPMLLVVAGDETNGSGMVQGGRLSALIRDNSSETPNGNCISTPTVVRFYSLKSHSYVHVLRFRSAVYIVRCSPRIVAVALAAQVYCFDAVTLENKFSVLTYPLQGAPGINIGYGPMAVGPRWLAYASNSPLLSSTGRLSPQNLTPSPGVSPSTSPSSGSLVARYAMESSKQIAAGIINLGDMGYKTLSKYCQEFLPDGSGSPLSSSPGRRSGKLPSSVHPLEADNAGMVVIKDFISKEIISQFRAHTSPISALCFDPSGTLLVTASVHGHNINVFRIMPTVIANSSGSIRYDWTASHVHLYKLYRGMTAAVIQDISFSHFSQWISIVSSRGTCHIFTLSPFGGDASLLPQNSHSDGLPLAPCQSRPWWSKPSFLMDHQLHPAPSTVTNSVVSRIKNSSSGWLNTVSNVAASASGKLSVPSGAVTAVFHNSNYEGSLPVPSKANAMEHLLVYSPSGHVIQHELLPSGSESSDSSPIVGPGSLQIQDDELHVTAEPTQWWDVCRRTNWPERDENIANIVFHNQRNSMMAMDASDCDSEHSDSVPSDGISGKEMMRSRERSSWYLSNAEVQISSWRIPIWQKSKIFFYVIDQPPAKSGESLSSSGGEIEIEKLPLHEVELRRRELLPVFKQFHYSEQNFSDRFRNLAIGRFQNALTYIDKDNGAHGSKAGFPISGFYSDMRKMQNMNGLEGQLLLEPITNDLQPMEKCNSVQSPKVANFTALHNVDNESMNHVSTATGATTSVTTVDTLPSTIRPLSSYSLLDGSLDDGLPSPASNVSFRPQITNNSSVSNGTMTDISNGCLTSINSGQNEASDSHNSVEFTQYFQEGYCKISELDDCRELTEAVTDADSSSSHCEREKPEEDGDNDDMLGAVFAFSEEG

SEQ ID NO: 50409 - protein, 475 aa, Oryza sativa
MVPDQWYDVNGVWTGSATTLPDGRLAMLYTGSTNASVQVQCLAVPSDPDDPLLTNWTKYHANPVLYPPRTIGDRDFRDPTTAWRDPSDGDWRIVIGSKDEHHAGIAVVYRTADFVTYDLLPGLLHRVEATGMWECIDFYPVAGGEGVDMTEAMYARNKGVVHVMKASMDDDRHDYYALGRYDPARNAWTPLDAAADVGIGLRYDWGKFYASKTFYDPAKRRRVLWGWVGETDSERADVAKGWASLQSIPRTVELDTKTGSNLLQWPVEEVETLRTNSTDFGGITVDYASVFPLNLHRATQLDILAEFQLDPLAVDAVLEADVGYNCSTSGGAAGRGALGPFGLLVLADKRHRGDGEQTAVYFYVAKGSDGGVTTHFCQDESRSSHADDIVKRVVGNVVPVLDGETFSLRVLVDHSIVESFAQGGRSTATSRVYPTEAIYANAGVFLFNNATSARVTAKKLVVHEMDSSYNQAYMA

SEQ ID NO: 50410 - protein, 381 aa, Oryza sativa
MGYNELIPGLPEEVARECLIRVGFDQLPAVRRISRQWKAEVESPAYNRLRKAEGLARPALALVQARRELAEAGPAADKQSSAGGVPGNSYRMVLLDPAEGRWTPLPEVGGASGSLPLFCQVAAVDGGVEGRKRLVVVGGWDPETWAPTDSVLVYDFLTGAWRRGAAMPGPRRSFFACAAVGGKVFVAGGHDEEKNALRSALAYDPDADAWAALPDMAEERDEPRGLCVDGKFLVVGGYPTPAQGRFVGSAEWFDPATSTWSAVQEGFVDDGACPRTCSAAPEAGDRMYMLRDGHLVARHGAISSAPAAWRPVAPVPEDARTAAAVSVIPDGRVVVIGSDCHGGDQTVYTLREEAGKPASWARAPAPPEFSGHVQAACLLEI

SEQ ID NO: 50411 - protein, 481 aa, Oryza sativa
MLPYFDPEYENFSQRINPPRVCIDNSTCSDCTLVKVDSMNKNGILLEVVQVLSDLDLAISKAYITSDGGWFMDVFHVVDKQGQKVTDEKTIKHIEKALGPDSNLLGGAKGGSSPVRSVGMHSIGDHTAIELKGPDRTGLLSEVFAVLAELGCNVLAAEVWTHRARVACVVYVNDVASGQAVGDPCRLSRIEHRLRLVLRGHAGGDDGDGDDGPAHANFFSSGGAGSNTHVDRRLHQLMHADVDADDDDGLDSRAIVSGEAGNAAAAEERPVVTVEHCEEKDYSVVNVKCRDRSKLLFDIVCTLTDMHYVVSHASVSSDGIYGIQELYIRRKDGRTLQKDEAGRVIKCLEAAISRRVSEGFTLELCGRDRVGLLSDVTRVLREHGLTVTRADVTTVGGQAINVFYVRDASGEPVDMKTIEGLRVQVGHTVMLNVKKVPSSPSSSSAAAAAAANGKSPGQPASGALSRTSFFSFGNLFAKLRA

SEQ ID NO: 50412 - protein, 431 aa, Oryza sativa
MAMPLRDPTDRAAMSAPLLPRSAFVSSASFSSFSSIASFSSTSSSFSDPAVPSDVVEALPMSRDSFKALAVLRDHQGSVSSLSLCGEFLLSASTGADIVAWQQPDLRRFARFGHGEGSVKALAAAGGRVFSAHQDGRVRVWRVSRRSENAFKLVAALPTTRDYLGKIFRHASYVQTRRNHRRLWIEHADSISCLAVHDGVVYSGSWDKTLKVWRISDLKCLESIHAHDDAINAVAADSGTIYSASADGHVKAWGKGKAAHFLQGILISRDGVSWNALVASADAGARRVYAAGSDGHVVGWDRVGGRGSRWSLSCDVKAHDMAVLCLCVAGDLVFTGSADKTIGLWRWQTSGDGDGAAAAALARVGVIRGHEGPVKCIQASWCRVSNGCMVYSGGLDKSIRVWWVPNGWKANEQKQQQENDTKDHKNCVFLR

SEQ ID NO: 50413 - protein, 479 aa, Oryza sativa
MMGAKLLLLLVASSLCLSAAIATQQTCPADLDSKCGDAASGDWEGEFFPGIPKIKYEGPSSKNPLAYKWYNAEEVILGKKMKDWMRFSVAFWHTFRGTGGDPFGAPTKSWPWEDGTNSLDMAKRRMRAHFEFMEKLGVDRWCFHDRDIAPDGKTLTETNKNLDEIVELAKKLQEETNIKPLWGTAQLFMHPRYMHGAATSPEVKVYAYGAAQVKKALEVTHYLGGENYVFWGGREGYQTLLNTDMKRELDHLASFLQAAVDYKKKIGFNGTLLIEPKPQEPTKHQYDWDVATTFSFLQKYGLTGEFKINVECNHATLSGHSCHHELETARINGLLGNIDANTGDPQIGWDTDQFLTDISEATLVMSSVVKNGGLAPGGFNFDAKLRRESTDVEDMFLAHISGMDTLARGLRNVVKLIEDGSLDELVRKRYQSFDSEIGALIEAGKGDFETLEKKVLEWGEPIVPSGKQELAEILFQAAL

SEQ ID NO: 50414 - protein, 347 aa, Oryza sativa
MARCGSAIAAVAALLVLLGGHAAARIRVEHSGMVIRRPSSSIPSFREAPAFRNGEECGGGGRVDVAMTLDANYLRGTMAGVLSILQHTACPESVSFHFLAAGMDADLAAAVRATFPYLDLRVYRFDPSRVRGRISRSIRHALDQPLNYARIYLADTLPPDVRRVIYLDSDVVVVDDIRALASVDLGGHVVGAPEYCHANFTNYFTDAFWSDPALNGTFAGRRPCYFNTGVMVMDVGKWRAGGYTRRVERWMEVQKQTRIYHLGSLPPFLLVLAGDIQAVDHRWNQHGLGGDNVKGRCRGLHPGPISLLHWSGKGKPWIRLDARRPCAVDYLWAPYDLFRPSSPVLEE

SEQ ID NO: 50415 - protein, 251 aa, Oryza sativa
MSTKMKKGILRPFRYISNMMDGKEAAQDMQIGFPTDVKHVAHIGWDGPSVPNNNNNTAGAPSWMKDYHSAPLDSASFRSDRGGSAAANPWASQEIVVDGGSLGDTSFSETRSEASGSMDITAGDSPPSPDSRRSRRHRSRGSAATSSMDCTAADGGAAPEKKDKAKKSSRGKNRKKDKSDKSAAAGAGDDASGATCQDLPAVPKKSNRRKNEGGSEGTGAAAASKADGAGAGGEDAAAPEPPATEEAQDHD

SEQ ID NO: 50416 - protein, 545 aa, Oryza sativa
MWPRAPATPPPPPWPSKPSAASRSALRRLDLDDGRRQGTEGEENHAPLLCSPAMASSTAFAAAFALLLLASSAAAEGEAVLTLDAGNFTEVVGAHDFIVVEFYAPWCGHCNQLAPEYEAAAAALRSHDPPVVLAKVDASADLNRGLAGEHGVQGYPTIRILRDRGARSHNYAGPRDAAGIVAYLKRQAGPASVEIAASASPPAADSIANDGVVVVGVFPELSGSEFESFMAVAEKMRADYDFRHTTDAGVLPRGDRTVRGPLVRLFKPFDELFVDSQDFDRDALEKFIESSGFPTVVTFDTSPANQKYLLKYFDNAGTKAMLFLSFSDDRAEEYRTQFHEAANQYSANNISFLIGDVTASQGAFQYFGLKESEVPLVFILASKSKYIKPTVEPDQILPYLKEFTEGTLAPHVKSEPIPEVNDQPVKTVVADNLREVVFNSGKNVLLEFYAPWCGHCQKLAPILEEVAVSLKDDEDVVIAKMDGTANDVPSDFAVEGYPSMYFYSSGGNLLPYDGRTAEEIIDFITKNKGSRPGEATTTESVKDEL

SEQ ID NO: 50417 - protein, 475 aa, Oryza sativa; identical to SEQ ID NO: 43610

SEQ ID NO: 50418 - protein, 578 aa, Oryza sativa; identical to SEQ ID NO: 47069

SEQ ID NO: 50419 - protein, 490 aa, Oryza sativa
MATASSIRPPRAALVLLLLALSFSLTLAAHFEGFGSDDLHSAHADAASADDEDDEGLDVELPPPPRISLSTSTPSPPVTTTTTTTSAPNPNPDPNPTLTPPNPTPTLDLWDEDEFEGIPVPEAASSDESSTPAEAAPSDPAADAAAEAAPAPPRRPAELLRAYTVEIACVSFLICFLLNYFTGKRQNEAIALAWATRFATRDSIFDKNFSLLGTGDGKDTPLLMKEGQDVFKFYASGRRYCQGMLATMEMRARHDLLSKLVELVFPRKDTITFEVVMNEEAMDHVMLAVARKKAAKTMQKEERDLQKFAGVLTSAPAGRRWVADELAVVAESKEVAGDMITEAVLDQVLGDKAFEKFGKWFISLHFSDQLAGSYKKVLSFKFVLPDASNMAEMTRLVALVPYYIDLVGRYKLSNHARSKTEAARTKASQEAFREQQGLRQEALQRKKAEKKKLMEEAEAKLSAEALRKKEEKERARQMKKSMPKVKMLRS

SEQ ID NO: 50420 - protein, 477 aa, Oryza sativa; identical to SEQ ID NO: 47733

SEQ ID NO: 50421 - protein, 90 aa, Oryza sativa
MIKGLLLITLGIRTTWKTSQIIQKKLSECKGSRIFSIEFVALIAFCPFSSELFILSERRPHKASVNLSIQYEIPRKPTKMIVGNNLARRT

SEQ ID NO: 50422 - protein, 574 aa, Oryza sativa; identical to SEQ ID NO: 38154

SEQ ID NO: 50423 - protein, 352 aa, Oryza sativa
MEKEQSEDILSLPFETSFFKKEDRSLPPFQSFAEPENVESEPSITADAEETFEDQFSKNAAEAARALSASDEKSSHGVRPDGSLWWKETGVEQRPDGVTCKWTVIRGVSADGAVEWEDKYWEASDRFDHKELGSEKSGRDATGNVWREYWKESMWQDFTCGVMHMEKTADKWGQNGKGEQWQEQWWEHYDSSGKAEKWADKWCSLDPNTPLDVGHAHVWHERWGEKYDGCGGSAKYTDKWAERSEGDGWSKWGDKWDEHFDPNGHGVKQGETWWAGKYGDRWNRTWGEHHNCTGWVHKYGRSSSGEHWDTHVPQDTWYERFPHFGFEHCFNNSVQLRSVKRQTPKNTKPEKD

SEQ ID NO: 50424 - protein, 288 aa, Oryza sativa; identical to SEQ ID NO: 31587

SEQ ID NO: 50425 - protein, 1063 aa, Oryza sativa
MDTASVTGGEHKGKEKTCRVCGEEVAAREDGKPFVACAECGFPVCKPCYEYERSEGTQCCPQCNTRYKRHKGCPRVEGDEDDGGDMDDFEEEFQIKSPTKQKPPHEPVNFDVYSENGEQPAQKWRPGGPALSSFTGSVAGKDLEQEREMEGGMEWKDRIDKWKTKQEKRGKLNRDDSDDDDDKNDDEYMLLAEARQPLWRKVPIPSSKINPYRIVIVLRLVVLCFFLKFRITTPAMDAVPLWLASVICELWFALSWILDQLPKWSPVTRETYLDRLALRYERDGEPCRLAPIDFFVSTVDPLKEPPIITANTVLSILAVDYPVDRVSCYVSDDGASMLLFDTLSETAEFARRWVPFCKKFTIEPRAPEFYFSQKIDYLKDKVQPTFVKERRAMKREYEEFKVRINALVAKAQKKPEEGWVMQDGTPWPGNNTRDHPGMIQVYLGSQGALDVEGSELPRLVYVSREKRPGYNHHKKAGAMNSLVRVSAVLTNAPFILNLDCDHYVNNSKAVREAMCFLMDKQLGKKLCYVQFPQRFDGIDRHDRYANRNTVFFDINMKGLDGIQGPVYVGTGTVFNRQALYGYDPPRPEKRPKMTCDCWPSWCCCCCCFGGGKRGKSHKNKKGGGGGEGGGLDEPRRGLLGFYKKRSKKDKLGGGAASLAGGKKGYRKHQRGFELEEIEEGLEGYDELERSSLMSQKSFEKRFGQSPVFIASTLVEDGGLPQGAAADPAALIKEAIHVISCGYEEKTEWGKEIGWIYGSVTEDILTGFKMHCRGWKSVYCTPARAAFKGSAPINLSDRLHQVLRWALGSVEIFMSRHCPLWYAYGGRLKWLERFAYTNTIVYPFTSIPLLAYCTIPAVCLLTGKFIIPTLNNLASIWFIALFLSIIATGVLELRWSGVSIEDWWRNEQFWVIGGVSAHLFAVFQGLLKVLGGVDTNFTVTSKAAADETDAFGELYLFKWTTLLVPPTTLIIINMVGIVAGVSDAVNNGYGSWGPLFGKLFFSFWVILHLYPFLKGLMGRQNRTPTIVVLWSILLASIFSLVWVRIDPFIPKPKGPVLKPCGVSC

SEQ ID NO: 50426 - protein, 431 aa, Oryza sativa; identical to SEQ ID NO: 50412

SEQ ID NO: 50427 - protein, 998 aa, Oryza sativa
MSVDYANYTVLMPPTPDNQPSGGAPPAAPSAGGARPGDLPLPPYGSSSSSRLVNRRGGGDDGAKMDRRLSTARVPAPSSNKSLLVRSQTGDFDHNRWLFETKGTYGIGNAYWPQDNVYGDDGGGGAVKMEDLVEKPWKPLSRKVPIPPGILSPYRLLVLVRFVALFLFLVWRVTNPNMDALWLWGISIVCEFWFAFSWLLDQMPKLNPINRAADLAALKEKFESPSPTNPTGRSDLPGLDVFISAADPYKEPTLVTANTLLSILATEYPVEKLFVYISDDGGALLTFESMAEACAFAKVWVPFCRKHSIEPRNPDSYFTQKGDPTKGKKRPDFVKDRRWIKREYDEFKIRVNSLPDLIRRRANALNARERKLARDKQAAGDADALASVKAATWMADGTHWPGTWLDPSPDHAKGDHASIVQVMIKNPHHDVVYGEAGDHPYLDMTDVDMRIPMFAYLSREKRAGYDHNKKAGAMNAMVRASAILSNGPFMLNFDCDHYIYNCQAIREAMCYMLDRGGDRICYIQFPQRFEGIDPSDRYANHNTVFFDGNMRALDGLQGPMYVGTGCLFRRYAIYGFNPPRAIEYRGTYGQTKVPIDPRQGSEAMPGAGGGRSGGGSVGGDHELQALSTAHPDHEAPQKFGKSKMFIESIAVAEYQGRPLQDHPSVLNGRPPGALLMPRPPLDAATVAESVSVISCWYEDNTEWGQRVGWIYGSVTEDVVTGYRMHNRGWRSVYCITRRDAFRGTAPINLTDRLHQVLRWATGVGGDLLLQEQRGAGVQAAQVPAADGVPQRWDLPLHVALPHHVLPPPGAVALLGAVHRGDAGPDVPLLPAAHHHHPHAALPAGGEVVRDRAGGVVAERAVLGDRRHVGAPGGGAAGPAQGGGRDRDLLHAHGQGGGGGRRRPLRRALPHQVDVALHPAARRHRDQHHRARRRRVADGVRGDPAVQQAARRRLLQLLGARALLPVRQGPHGPPRPDAHHRLRLGRPHLHHRLSPLDHH

SEQ ID NO: 50428 - protein, 442 aa, Oryza sativa
MISLFRRRHGLPFSTLHTPAGDVAATPPSPLDATAVLETLSLYANDWRRALEFFHWSASPDGANVPPTPATVARAVDVLGKHFEFPLATSLLVSHHDPGRADPSFLRPALRSLLNRLAAANLIDDAIRAFDSTAGSIGLRDEASFHALVDALCDHRRVDEAHHLCFGKDPPPFPPVTKTYNLLLRGWAKTRAWARLRQLWFDMDSRGVAKDLHSYSIYMDALAKSGKPWKAFKVFKEMKQKGMAIDVVAYNTAIHSVGLAQGVDFAIRLYRQMVDAGCKPNASTFNTIVKLLCKEGRFKEGYAFVQQMHKFGIEPNVLTYHCFFQYLSRPQEVLGLFEKMLERGCRPRMDTYVMLIKRFGRWGFLRPVFIVWKAMEKQGLSPDAFAYNSLIDALLQKGMVDLARKYDEEMLSKGLSPKPRKELGTKIPGAESDSDNALSGVL

SEQ ID NO: 50429 - protein, 664 aa, Oryza sativa
MDIDDDARHRRVIMSRDCRSRTPSSRTQDKNRSLLLDKVRASHAEALERLRPAADLDAGLCFGLLDPVSNAIVNAAVFAEAEDGNDRTGRSLDGAVTFLTTFFPHLPDWEAVRYLLDADADVLVAARLVVRDRGLRRFGFASDTAGAAVRLALRCAALAVKHPHPDRLVHAWLSLSRRLDEAVSALANHDVRGLVALVVDEAEAPAAANMERAWELAASRFLGRDNGIAAPPYRHAMPLQRTLLYAIQGFYLRALARLPSGELRSHYHRSLVKAGHCYGPMDPVSNIILNVVWYDAAHPPVEELELAMIPPKSMSSIATRSFLGLVSFLCTRYPNLGLHDAIRCLLDFDGDLNAAAREADRRQHRPSCTIQESYAAAAAAARHPKPDEQVEFLSSSRAMTTPLLLQNGGQLSSEDVRRLAAALLPPTPSAAVSPMQRKPTKPRRRRQLKLKAQIIRDQNKICRKVKAALDRYALQNNEPGGYELHVICGMNNCVSGPVYCTDDDIVSYTPLIYFRCHVNFLARRRDSDPSAIAGEGALQLFFAECGNYRLNHDGICCPVTISPPCSEQVRCLYCEHEGVGIMHPSIENFHGREVDFEKMVCGEDTCGDEFDPEIDEEPFYTNDGIVNSLKVNILSGLEEEFIYRNSDEGTDEEEGDSDDDIDFV

SEQ ID NO: 50430 - protein, 532 aa, Oryza sativa
MDKIDCYVVPQTTGTGRNIFQGGSPLSASLPLLGVQLVLIVAVTRVLYFLLKPLKQPRVVSEIMGGIILGPSVLSRHAAFREVVFPARGEPVLNTVATFGLMYVIFLIGVRMDPRLVVRSGRKGVVIGLSGFLLPLAMTGAGSSGEAMATEPDVSRRSTFLFALATSLSVTSFAVLSPILSELSLLNSDLGRIAMSASMTTDGIAWIIMVVYILAEAFLVSPATSIWAFLSLAVLAAFILFVVRPVALRVIERTPPGKPVEETYVFVFLLVVLLVGFYSDVIGTNSFHGALMLGLAIPDGPPLGTALGEKIEAMVSGLILPLYYAMTGLSTDVWRMHWGRLQVVMFLAWVGKLVGVMVSSLYLEIPLRDACLAQPLHELQGHRRGHHLQLLLDQQAHRQEHVQHPDLLVGGDHGGVGAGGRLAVRSGAALRRVQAAHGAASQGGRRPADPRVRPRPVARPRHARRARGVERDATDAAQPLPPPARRDRQPLRAGVHPAQAPPQRLPSRRRGGQRGARTPTPTASSTPSSSTS

SEQ ID NO: 50431 - protein, 495 aa, Oryza sativa; identical to SEQ ID NO: 44439

SEQ ID NO: 50432 - protein, 360 aa, Oryza sativa
MADAHGHRRRVALPCAVRLRLCLLEAAIDATQRRDGAINRPLFSLYDRRAPADPRPDAAGVSSTDVTVDASRGLWARVFTPTAPEHEHSSSSSTTTPRPVIVYFHGGGFAMFSAASRPFDTHCRTLCAGVGAVVVSVDYRLAPEHRFPAAYDDGEAVLRYLATTGLRDEHGVPVDLSACFLAGDSAGGNIAHHVAQRWTTTSAATPPPPSDNPVHLAGVILLEPYFGGEERTKAERALEGVAPVVNIRRSDRWWRVFLPEGADRNHPAAHVTGDAGPEPELQEAFPPAMVVVGGLDPLQDWDRRYAGMLRRKGKAVRVVEFPEAIHAFYFFPEFAGDIRKLVGEIRAFVEDSIMSKQSIA

SEQ ID NO: 50433 - protein, 165 aa, Oryza sativa
MGWHMDQSRCQRTLNNADNQPVVPWGPRYSRSTGKDLRINMAISATFIMYISTMGHADWKPMQFLCFAYFYRILDKLKATESASTPIYNEYGEVEGRGIHMAKRVLRSLGLVLGSILAVSLGYTGLANFSQFLGQYIPSVVYNFQELIVTTASSVLLCILASYYR

SEQ ID NO: 50434 - protein, 372 aa, Oryza sativa
MAPRNRSSARRPLWIVILIAFVCAVGIGAYLYTPQHYTPCYLVSSNSCSSRPPPEPARVYTDDEIAARIVVRDIILAQPVQSKNPKIAFMFLTPSSLPFEKLWEKFFMGHEDRYTIYVHASRERPVHASPIFNGRDIRSEKVVWGTISMIDAERRLLANALQDPDNQHFVLLSESCVPLHNFDYVYSYLMETNISFVDCFDDPGPHGAGRYSDHMLPEIVKRDWRKGAQWFTVKRQHAVLILSDFLYYAKFKRYCKPGNEWHNCYSDEHYLPTLFNMVDPTGIANWSVTHVDWSEGKWHPKAYRAVDTSFELLKNISSIDESIHVTSNAKHQVMRRPCLWNGMKRPCYLFARKFYPEALDNLMNIFSNFTII

SEQ ID NO: 50435 - protein, 364 aa, Oryza sativa
MMMANAKLPKQALLPPRSPFPTAAAAAGPYAGDHGPIARPQGAPHHRHGHGHGHHQRTSSESFIEEQPSWLDDLLNEPETPVRQHGRAGHRRSSSDSFAMFDGGAAAGAYANGFEGMGGGGGGGQAAPWGGVQEYYAKPSSFGRHQGRPWEQGMNNLVNYRQSGGPPMPAKEKVGGHHGSPSVLRDHDHGMDRRSSDESGHDQKVGPERKEGVPPKHAQSEADTKRAKQQYAQRSRVRKLQYIAELERKVQALQSEGIDVSAEMEFLSQQNIMLDLENKALKQRLESLAQEQLIKRFQQEMFEREIGRLRSLYQQQQQQQKQPQPTTTLSRSNSRDLDSQFANLSLKHKDPNSGPLRTQSSSIL

SEQ ID NO: 50436 - protein, 743 aa, Oryza sativa
MEFSALLTSAGINIGLCALFLSLYSVLRKQPHNYGVYFGRRLAEEKFRQQVDYFSLERLLPTAGWIVKAYWCTEEEIRRVAGLDSVVFLRLFIFSIRIFSITSLVCIFGVLPVNYHGKETNHGRIPAESLNVFTIANLKEGSRMLWVHCVALYVITISACILLYYEYKYISRKRLAHITGSPPGPGHFSVIVRSIPKSDNELLDDTIRNFFVNYHGSSYLSHQMIYRKGSMQKFVDNAERVYRKFVRVKMSSFGQSRRSDLSRCGLCGVRASSFQQYRNKFINSKKPDLSDPEVIEAQKDCPGAIVFFKTRYAAIVASRILQSSNPMLWVTDFAPEPRDVYWSNLWIPYRQIWLRKIATLAASVAFMFVFIVPVAFVQSMMQLDQIEQLFPSLKNMLKKPFFVKLVTGYLPSVVLLLSLYTVPPLMMFFSSIEGSISRSGRKKSACCKILFFTIWNVFFVNVLSGSVLNQLNVFTRPRDMPSMLAELVPKQATFFITYVLTSGWASLCSEILQVYNLVYNFFRKCIFCYRDDPEYGYSFPYHTEVPKVLLFNLLGFTFSIMAPLILPFLLVYFCLGYLVYRNQILNVYYPKYEMGGKLWPIMHSTLVFALVLTQTIALGVFTIKHATISSGFTVLLIIGTVLFHQYCRHRFSSIFNSFSAQDLIEMDRDDEQSGRMEEIHKHLLDAYSQGTTNMDNSSSSRNGGAPIEMIMEDPAQDAQDSNQELCDAVKEVTGSIQEHADEM

SEQ ID NO: 50437 - protein, 519 aa, Oryza sativa
MAGGAMVQTVGGKTYPGKMTAFVFFTCLVASSGGLIFGYDIGISGGVTSMDSLLSEFFPSVYAQAKASKDTNQYCKFDSQLLTLFTSSLYLAALATSFVAAWVTRVFGRKWSMFCGGVTFLAGSALNGAATDVMMLILGRILLGIGVGFANQSVPLYLSEMAPANLRGMLNIGFQLMTTIGILSANLINYATSSIEGGWGWRIGLGLAGVPALIITLGALVLPDTPNSLIARGYAGDAKRVLVKIRGTDDVHDEYDDMVAASEEAASIEHPWRNILHRKYRPQLTIAILIPCFQQLTGINVIMFYAPVLFLTIGFAGDASLMSAVITGLVNMFATVVSIISVDRLGRRVLFLQGGTQMFISQVVVGTLIALQFGVAGVGEMSRSYAILLVLFICMYVAGFAWSWGPLGWLVPSEVFALEIRSAGQSIAVCVNMMLTFVIGQAFLTMLCHLKFGLFYFFAGWMLVMTTFVALFLPETKGVPIEEMNHVWSRHWFWGSYVTAHDVAGAGAGGGGNRRSHNV

SEQ ID NO: 50438 - protein, 1008 aa, Oryza sativa
MESGGVDGERPLLREAGDLGGEDGGAGGVPEEGDAKGDVMAAAAAQGGDGDEGVEAVDGDGSNEEEEVVQTPDVKQTPGAAAAAAWREAAWEEADGEEFVDVLEGDVDEKREDGSALENGEDLLASRSLAVEGDEEGYGSCADIGIEEDAEGDASRERLEEEAMTESIREYVTEAVLADHIQEQPDKSKSESEHVKVAQHKSQIAKSREEGPKQSGGEPSVVVEELNGSSSSDDESKATSAPPARSISGAAGRSNGPSLPSRPAGLGASTSLSQPSARPVQQTRANGPVAVDRETRQDVESPEDGDENDEIREKLQMIRVKFLRLANRFGQTPNNMVVSQVLYRLGLAEQLRRNTGQGVFSFDRAQDMAERLEAAGNEPLDFSCTILVLGKTGVGKSATINSIFDDVRLETNAFDTSTRKVQEVVGAVEGIKVKVIDTPGLSCSSSDQHHNQKILNSVKRLISRNPPDIVLYFDRLDMQTRDYGDVPLLQTITRVFGASIWFNAIVVLTHAASAPPDGLNGIPLSYEMFVTQRSHVVQQAIRQAAGDVRLMNPVSLVENHSACRTNRAGQRVLPNGHVWKPQLLLLCFASKVLAEANALLKLQDNPAGKPRMRIPPLPFLLSSLLQSRAPLKLPEEQFGDDDDIEDDLADDSDSDDGSDYDDLPPFKRLTKAQLAKLNHAQRKAYLEELDYREKLFYKKQLKEERMRRKIMKKMAAEASARTDDFSNSNLEDDGSAPTNVAVPMPDMVLPSSFDSDHPSHRYRFVDTPSEWLVRPVLETQGWDHDVGYEGLNVERLFAVKGKVPLSVSGQLSKDKKDCSLQMEVASSLKHGEGKTTSLGLDLQSVGKDMAYTLRGESRFKNFRRNNTAAGISATLLGDSVSAGVKVEDKLVVNKQLRVLVSGGAMSGRGDVAYGGRLEATLKDKDYPIGRMLSTIALSVVDWHGDLAVGCNIQSQIPAGRASNLIGHANLSNKGTGQVGIRLNSSEHLEIALIALVPIYQNIKKLLQS

SEQ ID NO: 50439 - protein, 410 aa, Oryza sativa
MRSRTWRRPCSASTASWSPWRRTPRSGGRRRSGGSSPSPTTSSSSSPPARPPRTAPAMEIMSTAQRRDLQMNVPALRKLDAMLIGYMDNFVDQSEFWYEKGGDNKRDDDKWWMPSGEGAGGGAIGGDEEVAAVPEGVREPGAEGGHGDQRAGAGGDGDPGGVHRVAAQEGQDQPRRRHLPEHHRRGVRPDRVPGRRGPVHGAQGARPQEPHRGVHHHLEAQDADQAGGQVVVGSIISFEKREQFEERAETILHLLKLQFPGTPQSQLDISKIQYNRDVGYAILESYSRVLESLAYSVMSRIEDVLGADAAAQNLTATEAARRLMDGDAAARKLDAMEELEKLNEAPASMTLYDFMGWHFDQDELMRKKEEGTLDEAGEAKLKKAPSLAPKKFSYVDSLSAGGMRSPSARH

SEQ ID NO: 50440 - protein, 508 aa, Oryza sativa
MTLGFISLLLSVTGRYISRICIPVGAADTMLPCSLRRSSSEQEVPGGGGHGRRHLSGDPTNFKCAKGMVSLVSADGLHQLHIFVFFLAVFHVAFSAITMSLGRAKTRIWKEWEKETCSLTYEFSYDPSKFRLTHQTSFVRQHASCWSKSTILLYFVSFFRQFFRSVRRTDYLTLRHGFIAAHLSLGTRFNFRKYIKRSLEDDFKTVVGISAPLWASALAIMLFNVHGWHNLFWFSTIPLVVTLAVGTKLQAIIAMMAVEIKERHTVIQGMPVVKLSDEHFWFRKPRLVLHLIHFASFQNAFEITYFFWIWYEFGLRSCFHDNFELIIARVCLGVVVQFMCSYITLPLYALVSQMGSQMKRTIFDEQTAKALKKWHKAAVVKKKQQKGSSHEPGSETPGTETTTTTATATEESQRERDAAAMPVRHLHRYKTIAHVGATGTLSDSDCSDTDTPFASPTRLLIPPTKQRSLDAGRAEVRVDVDSTPTPTPPERHDSFSFPRLPAHNLQQK

SEQ ID NO: 50441 - protein, 357 aa, Oryza sativa
MRVSDQGIKPAALYRVSDPVVRQFIERCLAPAARRPAARELLDDPFLLPLEDDGFFSGDGGDGHGGFGVGYYNLMYNYLHQPACIDDHHACSNGGLSPSNSVGDNDVDAAVQRGDDDGDNWLRDIHMLFDEDDDDAAAADANERVGGVDITIKGRRTDDGGVYLGLRIADKNGTGRGRIICFRFDTEADTAMTVAAEMVAELDITDHEVTRIAQLIDGKVAALVPGWRPGPATDDDDDDDLVGGGDDPDAPGGAAAACCKNCRPAASSSSSCGSLVDFMSSAAAAERHGCRRCAELHGRFEEITFQADDDEEEQHLQGSSSDTGGSNHEQHAMGKDKEVMNINGIAQDGTVQGSEQP

SEQ ID NO: 50442 - protein, 412 aa, Oryza sativa
MAEDPAGSRRWRCDAGDEHGCWLSSSAGGGGDDHFDRLPDPLLLVIFNRIGDVKALGRCSLVSRRFHDLVPLVDSVLVRVDCVIPDDPASSSSSSSSPSAAPSSPTASARARTVFSQIARIVLGGIIKPIQALGQILSPANSASVLAASVTSSPSSSSSSSSSSPPLPGDVSHHSPSEVLRSFKELRRLRIELPAGELSMEEGVLLKWKADFGSTLGSCVILGASSAGKDGGAGAAPAVDCGESDETGSIPESFYTNGGLKLRVVWTISSLIAASARHYLLQPIIADHTTLESLDLTDADGQGVLTMDKWQLQELRVKPVSASGGSHRTLMPALSMRLWYAPHIELPGGLVLNGATLVAIKPTEEATRDTVGSGIAGSAGGCWVSDAFEEPYRTAVGMLLKRRTYSLEMNSF

SEQ ID NO: 50443 - protein, 403 aa, Oryza sativa; identical to SEQ ID NO: 49129

SEQ ID NO: 50444 - protein, 598 aa, Oryza sativa
MGVLGSRVAWAWLVQLLLLQQLAGASHVVYDDLELQAAATTADGVPPSIVDSELRTGYHFQPPKNWINDPNAPMYYKGWYHLFYQYNPKGAVWGNIVWAHSVSRDLINWVALKPAIEPSIRADKYGCWSGSATMMADGTPVIMYTGVNRPDVNYQVQNVALPRNGSDPLLREWVKPGHNPVIVPEGGINATQFRDPTTAWRGADGHWRLLVGSLAGQSRGVAYVYRSRDFRRWTRAAQPLHSAPTGMWECPDFYPVTADGRREGVDTSSAVVDAAASARVKYVLKNSLDLRRYDYYTVGTYDRKAERYVPDDPAGDEHHIRYDYGNFYASKTFYDPAKRRRILWGWANESDTAADDVAKGWAGIQAIPRKVWLDPSGKQLLQWPIEEVERLRGKWPVILKDRVVKPGEHVEVTGLQTAQADVEVSFEVGSLEAAERLDPAMAYDAQRLCSARGADARGGVGPFGLWVLASAGLEEKTAVFFRVFRPAARGGGAGKPVVLMCTDPTKSSRNPNMYQPTFAGFVDTDITNGKISLRSLIDRSVVESFGAGGKACILSRVYPSLAIGKNARLYVFNNGKAEIKVSQLTAWEMKKPVMMNGA

SEQ ID NO: 50445 - protein, 351 aa, Oryza sativa
MDPNQMMGRSFPMWAAADDPSAQPPPFLPPPNRGWKRKNPSTAAGGYQPPALGDLQVQNRAKARRWFKNQSGGGGGGGGPRKHFFPRPKAAAPRNTTSFIIRAKRAGGIASLVSPSPVTPAVLPTPRLSPSREGLSDMAQAQWGVDGYGSMKGLIRLRTSPHPANPSDDDDDANSSGSDVEEHVEVERRLDHDLSRFEMVYPARGDGVFFEEEDDYEYDQEAHVARLEEENLTLKERLFLMEQELGDMRRRLEALESRFAGTDGMPIENSDAVAVDHDKEMAHPILVQRDDLRTEIAADAAGSDKASAQDNAEEVADAAVSEKIVQDNADVVVAGSERTGEEIGVDASEMD

SEQ ID NO: 50446 - protein, 452 aa, Oryza sativa
MGAAVEPLDPTAVASVVRYGLAADSLVRRATGDALVYSQLYPFDGLLNYTSAIIHHVRLQGLEPGTEYFYQCGDPAIPAAMSDIHAFRTMPAVGPRSYPGKIAIVGDLGLTYNTTSTVEHMVSNQPDLVLLLGDVSYANLYLTNGTGTDCYSCSFANSTPIHETYQPRWDYWGRYMEPVTSRIPMMVVEGNHEIEEQIDNKTFASYSSRFSFPSTESGSFSPFYYSFDAGGIHFIMLAAYADYSKSGKQYKWLEKDLAKVDRSVTPWVIAGWHAPWYSTFKAHYREAECMRVAMEELLYSYAVDVVFTGHVHAYERSNRVFNYTLDPCGPVHISVGDGGNREKMATSYADEPGRCPDPLSTPDPFMGGGFCGFNFTSGPAAGSFCWDRQPDYSAYRESSFGHGILEVKNETHALWRWHRNQDLYGSVGDEIYIVREPDKCLIKSSRNRIAYY

SEQ ID NO: 50447 - protein, 529 aa, Oryza sativa
MAAVLPLLAAALLVLFSGLHPAASTAAAGGEAATVVVKAAAAVSRTDDNFVCATLDWWPRDKCNYGMCPWYNASIINLDLNNTILNNAVKAFNSLRIRLGGSLQDQVTYKVGSNYGDCRSFQRDDGGLFGFTDGCLEMNRWDELNVFFKRTNTTVTFGLNALKGRRKAAGGKDTLYSGDWDARNALDLMLYTAGKGYRVESWELGNELSGSGVAARVAAAQYGRDVAVLRKAVERVYGGGGEVPKVLAPGGFYDGAWFSEMLRVSGRGAVDGVTHHIYNLGSGKDRDLARKMQDPGYLDQVEKTFRDMAATVRGSGPWSSPWVGESDGAYNAGGKGVSDRYVNGFWYLDQLGMSAAHGTRVYCRQALVVGNYCLLNTTTFVPNPDYYGALLWHRLMGPVVLKAATTAGGGGSPYLRSYAHCSREKPGVTVLLINLSNATAFDVSVAGGALGAAPCGGRREEYHLSPLGGDIRSQVVLLNGEALALGPGGEIPELRPAVVGDGCAAPLRVAARGIAFVRFTEFKAPACAA

SEQ ID NO: 50448 - protein, 262 aa, Oryza sativa
MAANPSSPSAGGGGDVSASSPTLPPVRLAAAQAASAAAIHPTSPRYFFSSLAGTNASPHRRIAIAVDLSDESAYAVRWAVQNYLRPGDAVVLLHVRPTSVLYGADWGSIPVSVSDDADGEVAPAASAEELQKKREEDFDAFTSTKAEDLAQPLVDAQIPFKIHVVKDHDMKERLCLEAERLGLSAMIMGSRGFGASRKGGKGRLGSVSDYCVHHCVCPVVVVRYPDDAAGADGEAAGPTDELHTVPEDEPVYHDAPDVQKEN

SEQ ID NO: 50449 - protein, 224 aa, Oryza sativa; identical to SEQ ID NO: 35777

SEQ ID NO: 50450 - protein, 249 aa, Oryza sativa
MAALLDRAGLRAHRRVGHRARVRPPCLLRLLGARRHRRPRAALVAARPLLLVEVQPPAPPLQHRVAGARRGVRPEAEVGDGVVHPVRVPQPDRPAGAHLRAAHPRVAAVTGVQRVRPPVPALRVPLRPLRPDLQRPGARPDLHLRRRRRVRGARPVQAVVGVRVLVGGARLRRAAADRERVAGAHHLPAAHPPGAAALRLERVGLAPRRAGHRGPRLRHPQQGVPQHHGHARRAPPLLHHAALPRHGGH

SEQ ID NO: 50451 - protein, 337 aa, Oryza sativa
MMLLAKELGLSPPAAVTPRRRPPPARVPASPSGGSPVAVGDLWLRTKGAGGGGDGFGSHSHESEMDLAMLVTDFLENGGTGGADSRASSDSDSALSDHLADNISIYKQGGDEKENELLSMVHSLLFSIHESDLLAFKRGQCSASCIRHLLVKLLRYSGYDAAVCVSKWQGFDKIPGGDHEYIDVIMNSDTEYRLIIDIDFRSHFEIARAVDSYDSLLNSLPVVYVGTLPRLKQFLHVMVDAAKWSLKQNSMPLPPWRSLPYLQAKWHSKYERIDLHIEQDFRSTASDHALCIGHLKRLKSSLQSELDTERLLMMPIKTDMKRRAKFERRRRRSLLSF

SEQ ID NO: 50452 - protein, 522 aa, Oryza sativa
MGTRRVGLLLLLLLAAVLLQPLLAAAAAEGVVRIALKKRQVDETGRVGGHLAGEDAQRLLARRHGFLTNDAARAASRKARAEAEGDIVALKNYLNAQYYGEIAIGTPPQMFTVIFDTGSSNLWVPSSKCHLSIACYFHSRYKAGQSSTYKKNGKPASIHYGTGAISGYFSQDSVKVGDVAVKNQDFIEATREPSITFMVAKFDGILGLGFKEISVGNAVPIWYNMVRQGLVVDPVFSFWFNRHADEGQGGEIVFGGIDPNHYKGNHTYVPVTRKGYWQFNMGDVLIGGNSTGFCAAGCAAIADSGTSLLTGPTAIITQINEKIGATGVVSQECKAVVSQYGQQILDQLRAETKPAKVCSSVGLCTFDGTHGVSAGIRSVVDDEVGKSSGPFSSAMCNACETAVVWMHTQLAQNQTQDLVLQYIDQLCDRLPSPMGESSVDCSSLASMPDIAFTIGGNKFVLKPEQYILKVGEGTATQCISGFTAMDIPPPRGPLWILGDVFMGAYHTVFDYGNLKVGFAEAA

SEQ ID NO: 50453 - protein, 376 aa, Oryza sativa
MDVAEAASPGVGAWAAIRGYFTPATLFLVVNIVIGTIALTSRTHQRRRRQVYQYHHDGEILHHDQLQPPPPLLHQQYYGGGEHQQMMMQETLYAPPPAPAPLARTSSVLDRLRSFGLYRFRSGDFPPEYATAAAAATSQLHHQRTEEVVSSSPVDEVKLQGHYARSRSEPAAAPAQEERKAASRLRNSSSEVRRAEVVRAPARVVEAFPEEAAAAVDATAEDDFTPKQQRDLPLQQEYVPPPAPAPAPLARTSSVLDRLRSFTLYSFRSGDLATDDIPADAAAAATPAQAHYGRTRSEPAREQDKKAKKQAASEAKTMTKSSSEARKDTAAEDADDGGVDARADDFINKFRQQLQLQRLNSLLNYKEMLSRGSSKQ

SEQ ID NO: 50454 - protein, 399 aa, Oryza sativa
MNKRSFKYAWVLDKLKAERERGITIDIALWKFETTKYYCTVIDAPGHRDFIKNMITGTSQADCAVLIIDSTTGGFEAGISKDGQTREHALLAFTLGVKQMICCCNKMDATTPKYSKARYDEIVKEVSSYLKKVGYNPDKIPFVPISGFEGDNMIERSTNLDWYKGPTLLEALDQINEPKRPSDKPLRLPLQDVYKIGGIGTVPVGRVETGVLKPGMVVTFGPSGLTTEVKSVEMHHEALQEALPGDNVGFNVKNVAVKDLKRGYVASNSKDDPAKEAASFTSQVIIMNHPGQIGNGYAPVLDCHTSHIAVKFAELVTKIDRRSGKELEKEPKFLKNGDAGMVKMIPTKPMVVETFSEYPPLGRFAVRDMRQTVAVGVIKNVEKKDPTGAKVTKAAAKKK

SEQ ID NO: 50455 - protein, 281 aa, Oryza sativa
MLYEAAGQVARMRVTNSIPVPNNPYGFPAHGGFAAPARKASPPPPVSPPATKVAPAAYYHPLAQLLTQRQIQAAQVLGSCRDSSVAPSFSAVFSPRHFSPVSVSSPQAAAAAEVAEGSASRRGRRVGREADGSGEDRRVRSRRVACRHEPCGVASLAEAAARAGTRSRGWRRRRHARRVPHPARRQARAQRHRRLPPSPGRRTGGAKRKTGCSTVLVPARVVQALNLNLDDLGAQPRYPGGFVLDHDALINRSNAMLASQKRRASPAVPSPAPAPALCHSS

SEQ ID NO: 50456 - protein, 448 aa, Oryza sativa; identical to SEQ ID NO: 28609

SEQ ID NO: 50457 - protein, 547 aa, Oryza sativa
MSSSSSSSSRGALAAAAVPSLSADEAGAAADEAFLRYTSPSMRRSGGGGVAIVWFRNDLRVLDNEAVVRAWAASDAVLPVYCVDPRISAGSTHYFGFPKTGALRAQFLIECLEDLKRNLTKQGLDLLIRHGKPEDILPSIAKAVTAHTVYAHKETCSEELLVEHLVRKGLEQVVIPQGGASNQKKPRNPKLQLIWGATLYHVDDLPFSVNNLPDVYTQFRKAVESKSSVRNCSKLPPSLGPPPGSGLDEIGGWGTVPTLESLGLSMTKSEKGMHFVGGESAALGRVHEYFWKKDQLKVYKETRNGMLGPDYSTKFSPWLASGSLSPRYICEEVKRYEKQRIANDSTYWVLFELIWRDYFRFISAKYGNSIFHLGGPRNVESKWSQDQALFESWRDGRTGYPLIDANMKELLATGFMSNRGRQIVCSFLVRDMGIDWRMGAEWFETCLLDYDPASNYGNWTYGAGVGNDPREDRYFSIPKQAKTYDPDGEYVAYWLPELRSIAKERRNFPGASYIKQVVPLKFDGGHQKRDQQFNRQRRPGHMYRRQK

SEQ ID NO: 50458 - protein, 432 aa, Oryza sativa
MVAAALDAMAGTRWGRWLGLVTAVWVQCISGNNYTFSNYSHSIKTLMGLTQLQLNGLSVAKDVGKAFGLLAGLASDRVPTWLLLAVGSLEGLLGYGAQWLVVSRAVAPLPYWQMCVFLCLGGNSTTWMNTAVLVTCIRNFRRSRGPVSGLLKGYVGLSTAIFTDVCSALFADDPASFLVMLAVVPAAVCAVAMVFLREGEVGGGGADGREEEEEDGWCFAAINTLAVAIALYLLAADLTGVGGGGGVVSAVFVAVLLVLLASPAAVPAHVAWKSWMKTRKLANADVEEAEECASAPLLVAKATAAAAAEARGPGEKPVLGEEHTIAQALMSLDFWLMFASFLMGVGTGLAVMNNLGQMGVAMGYSDVSLFVSMTSIWGFFGRIASGTISEHFIKFVSFSHPFPLPSPYTKLNRKIPSAYYSKKKNPQRLLSP

SEQ ID NO: 50459 - protein, 337 aa, Oryza sativa; identical to SEQ ID NO: 50451

SEQ ID NO: 50460 - protein, 436 aa, Oryza sativa; identical to SEQ ID NO: 30829

SEQ ID NO: 50461 - protein, 402 aa, Oryza sativa
MISATATAAFLAAAPASSSSCTTHRRRSGLPAISASLATASSTEEPLLVRAARGEDGLPRPPAWMMRQAGRYMAEYQALAKRHPSFRERSETTELIVEITLQPWRAFAPDGVILFSDILTPLPAIGVPFDISDSKGPVIQSPVRSEEQVRELTPIDFEKLRFVGESLKILRTEIDGQAALLGFVGAPWTIATYVVEGGMTNTYTNIKSMCHTAPNVLRGLLSHLADAISEYIIYQVNSGAQCIQIFDSWGGQLPPHVWEQWSKPHIKQIVNKIKIECPNVPLVLYINGNGGLLERMTDTGVDVIGLDWTVDMADGRRRLGNKISVQGNVDPAFLFSPLPVLTDEIHRVVKSAGPKGHILNLGHGVLVKTPEEAVAHFFDVTRSLRYDTLFQGCVTEVLEPVA

SEQ ID NO: 50462 - protein, 69 aa, Oryza sativa
MIIEEVNKGLNPGTIVLLVVATLLILFFVGNYALYMYAQKTLPPRKKKPVSKKKLKREKLKQGVSAPGE

SEQ ID NO: 50463 - protein, 392 aa, Oryza sativa
MGALRRWLPCCCCCCRGGGGGGGGGSVGDGLVWDVALKAHASGDYSVAVAQANEALEDQAQVFVSPAATLVGVYDGHGGPEAARFVNKRLFSLIQEFAAQSGGISAEVLEKAFGETEEEFVASVQRSWPSQPRILSVGSCCLVGAIEDGTLYVANLGDSRAVLGRRSAAGAAHGRKGKNRVVPERLSRDHNVADEDVRRELKELHPDDSHIVLNTHGVWRIKGIIQVSRSIGDVYLKKPEICKSNPMLQQTICPFPLRRPVMSAVPTIKTRKLRPGDQFVIFASDGLWEQLTDEAAVAIVAGSPRRGVAMRLVRAAQLEAARKKDVKYERIRTIEKGQRRHFHDDITVVVLFLDKCRGKAGRGDEIDGTDGPVDVFSLSPDDREDPTRPVLR

SEQ ID NO: 50464 - protein, 357 aa, Oryza sativa
MTAMAAAAAVLVSLLLVAAAAGQQAALVPGVMIFGDSVVDAGNNNRLATLVRADFPPYGRDFPETHGAPTGRFCNGKLATDYTVDNLGLTSYPPPYLGQLAQSDNRSLLHGANFASGASGYLDTTASLYGAISLSRQLGYFKEYKTKVEAVAGGKKAAALTSESIYVVSAGTSDFVQNYYVNPMLGATYTPDQFSDVLMQPFTTFIEGLYGQGARRIGVTSLPPMGCLPASVTLFGGGSGGGCVERLNNDSRTFNAKLEAASDSIRKQHSDLKLVVFDIYNPLLDLVTNPTAAGFFESRRACCGTGTIETSVLCNQGAVGTCANATGYVFWDGFHPTDAANKVLADALLLQGLQLIS

SEQ ID NO: 50465 - protein, 368 aa, Oryza sativa
MATSPRSPPGAPPPPEFEISRQSRLLAALSKKVIDLDELRMLAAQGVPDGAAVRPTVWKLLLGYLPSDRALWEQELAKKRSQYAAFKEEFLSNPMEIARQRELEGQGSENAGSIYNGLLHRSEVTQEEHPLSLGKTTAWNQFFEYSEIIEQIDRDVKRTHPDMHFFCGDSSFAKSNQESLKNILIIFAKLNAGIRYVQGMNEILAPLFFVFRNDPDDKNANFAEADSFFCFMELLSGFRDNFCQKLDNSAVGIQGTLSKLSQLVAKYDGELQRYLEITTEINPQFYAFRWITLLLTQEFNFADTIHIWDTLLSDPDGPQETLLRICCAMLILVRKRLLAGDFTSNLKLLQNYPPTNISHLLYVANKLH

SEQ ID NO: 50466 - protein, 332 aa, Oryza sativa
MAMSSSSFPTATATATASFPNWVMLERFVFRRDDDKSFPDDTKATLRASGSGSHKTPFTIAFRIADPPAISRLYVQWPQGPNPEEMVASHLVATHRNLVLVCFCYIVECPVPACPQDYFIFTASGDDPVSSPLLKALPPCTYQPKGGEPLPCTYQPEGGFPPSDVEGDGNLRYPLEFRSVGILCQGEEFAVAELQVLRNINANVKARLCVLRSAISSKGEDGDGGGRWDIMELPIVYGSGEEYWDIFYWTTDTVIAFQNYLCWVDYDRGMLFCDVLQKRPGIAFIRFPLDSFPNGRSRRHFSQVYRGVSVTPSATALAPSSLLMSTGSIASC

SEQ ID NO: 50467 - protein, 469 aa, Oryza sativa
MVLVAIGVVVAAAVVVSSLLLRWNEVRYSRKRGLPPGTMGWPLFGETTEFLKQGPSFMKARRLRYGSVFRTHILGCPTVVCMEAELNRRALASEGRGFVPGYPQSMLDILGRNNIAAVQGPLHRAMRGAMLSLVRPAMIRSSLLPKIDAFMRSHLAAWSSSSSSAVVDIQAKTKEMALLSALRQIAGVSAGPLSDALKAELYTLVLGTISLPINLPGTNYYQGFKARKKLVAMLEQMIAERRSSGQVHDDMLDALLTGVEGTREKLTDEQIIDLIITLIYSGYETMSTTSMMAVKYLSDHPKALEQLRKEHFDIRKGKAPEDAIDWNDFKSMTFTRAVIFETLRLATVVNGLLRKTTQDVEMNGYVIPKGWRIYVYTREINYDPFLYPDPMTFNPWRWLEKNMESHPHFMLFGGGSRMCPGKEVGTVEIATFLHYFVTQYRWEEEGNNTILKFPRVEAPNGLHIRVQDY

SEQ ID NO: 50468 - protein, 295 aa, Oryza sativa
MASDLRPPEHQVAGHRASADKLGPLVDGEGLFYKPLQTGERGEHEAAFYAAFTAHPAVPPRVRGAFFPRFHGTRFLPAPASPGGAPYPHIVLDDLLAGLPSPCVADVKIGACTWPPRSPDPYVAKCLAKDRETTSALLGFRVSGVRVVDARGGAVWRPDRSELKGIDAAGVRRVLRRYVSTGGGDGLDCALAAAVYGGEGGVLAQLRELKAWFEEQTLYHFYSASILFGYDANAAAAAAPGGGSGGVRVKLVDFAHVDDGDGVIDHNFLGGLCSLIKFIGDIVAEVTEKASSDHS

SEQ ID NO: 50469 - protein, 341 aa, Oryza sativa
MRVLAVALLAAAVLAAEAAAELQEFREAPAFRNGAGCAGAPTIHIAMTLDTTYLRGSLAGVLSVLRHAACPESIAFHFVASSASPARRLAALRRALAAAFPTLPATVHRFDARLVRGKISTSVRRALDQPLNYARIYLADLLPRSVSRVLYLDSDLLVVDDVARLWATDLGPDAALAAPEYCHANFTSYFTDAFWSHPEYSSIFTNRGRAPCYFNTGVMVIDLDRWRAGGYTVKLEYWMEVQKQEARIYELGSLPPFLLVFAGEVKAVEHRWNQHGLGGDNVAGQCRELHPGPVSLLHWSGKGKPWLRLDAGRPCPLDALWAPYDLLRRRGARDDLLAAVA

SEQ ID NO: 50470 - protein, 131 aa, Oryza sativa
MQVNCAGMSFLKPAVELTPDDCSQVMGMNFESCFHLSQLAYPLLKASQRGCIINISSIASVVAFCSLPNAVYSAAKGQNKQPLLSWTYFKNIFYLKRIYNGVCSSIPASRFFHDNLYLAFDICSTKCLLEN

SEQ ID NO: 50471 - protein, 490 aa, Oryza sativa; identical to SEQ ID NO: 50419

SEQ ID NO: 50472 - protein, 569 aa, Oryza sativa; identical to SEQ ID NO: 48588

SEQ ID NO: 50473 - protein, 279 aa, Oryza sativa
MASSPVSYWCYHCSRFVRVSPSTVVCPECDGGFLEQFPQPPPRGGGGSGRRGAMNPVIVLRGGSLSGFELYYDDGSGDGLRPLPGDVSHLLMGSGFHRLLDQFSRLEAAAPRPPASKAAVESMPSVTVAGSGAHCAVCQEAFEPGASAREMPCKHVYHQDCILPWLSLRNSCPVCRRELPAAAAPESEADAGLTIWRLPRGGFAVGRFAGGPREQLPVAYTELDGGFSNGVGPRRVTWPEGDGHVDGGEGRIRRVFRNLFGCFGRSSRPESSSSQSRSG

SEQ ID NO: 50474 - protein, 928 aa, Oryza sativa
MGSSELEETKAVLHMDCEKPPAISWERTFDDEGKKVAMFSMTLNDMMAIVPLMIKMLGLNLKDNAKGLASVYDPLKKWMDNCYRGVPLGGIGAGSIGRSYRGYFQQFQIFPSIYEEKPILANQFSAFISRPDGKRYSTVLSAPNADVLKGIDKAGIGSWDWKLKEKNCTYHGLFPRSWTVYNGEPDPEIKITCRQISPFIPHNYKESSFPVAVFTFTLHNSGSTPADVTLLFTWANSVGGKSELTGNHKNSRMTTADGRPPVTFAIASRETDGVRVTGCPRFTMGPSNSGDVTAKDMWDQINKNGSFVGDGNAAAAATGASRPGSSIGAAVAATTTVAAGGARAVSFALSWSCPEVKFPAGRTYHRRYTKFHGTDRDAAAERLAHDALLEHMKWESQIEEWQRPILQDKSLPEWYPITLFNELYYLNAGGTIWTDGQPPKNTSLSSATEPFNLDTFSTVANGGSAVDGILSTVAVAAARSNTAAAAAAAMGTALLRDGEENVGQVLYLEGMEYNMWNTYDVHFYASFALLSLFPELELNLQRDFVRGVLLHDPCLRRTLDGATVARKVLGAVPHDMGLNDPWFEVNAYMLHDPVRWKDLNPKFVLQVYRDVVATGNAGFAEAAWPAVYLAMAYMDQFDRDGDGMVENEGRPDQTYDLWSVSGVSAYTGGLWVAALQAAAAMAGIVGDGAAEAYFRGRYHRARRVYTDELWNGGYFNYDNSGGATSSSIQADQLAGQWYARACGLEPIVDGDKARRALATVLDYNVMRVKGGAIGAVNGMRPDGAVDASSTQSKEVWPGVTYAVAAAMIHEGMPEAAFKTAKGIHDAGWGKHGFGYAFQTPESWTADGGYRALHYMRPLGVWAMQWALSPPVLHKEHRVAAVAASPEDAALGQEKFDKVASMLRLPEEQQHKGILRALYDTLRQLLLPS

SEQ ID NO: 50475 - protein, 373 aa, Oryza sativa; identical to SEQ ID NO: 43090

SEQ ID NO: 50476 - protein, 58 aa, Oryza sativa
MIWDVLMSMYVTHVLSLLITPIHGLPFHASRDLDCLHGMACQLEGLYDSQWLIDGLIK

SEQ ID NO: 50477 - protein, 567 aa, Oryza sativa
MAAMQSWRKAYGALKDSTTVSLANLNSDFKDLDVAIVKATNHVECPPKERHLRKIVAATSIARPRADVAYCIHALSRRLAKTRNWIVALKTLVVIHRLLREGDPTFREELLNFAQRGRILQLSNFKDDSSPIAWDCSAWVRTYGLFLEERLECFRVLKYDVEAERLSKQGQGPEKGHSRTRELESQDLLEQLPALQQLLYRLVGCRPEGAANNNYLVQYALALVLKESFKIYCAINDGIINLVDKFFEMPRHEALKALEIYRRAGQQAGSLSDFYENCRGLELARNFQFPTLREPPQTFLVTMEEYVREAPRMVPVREPLELPERLLLTYKPEEQEEDSVPDPVEEEKPPVEEPVPVPPVTEAASPPPPPKTKVADTGDLLGLNDPNPSVSAIEESNALALAIVPADAGASTSSTATWQDKGFDPTGWELALVTTPSNTNSSAADSQLGGGFDKLILESLYDQGDYRQRQQQQLYGSSAPNPFMSNDPFVMSNQVAPPPSVQMAAMSQQHQQIPTMMQANPFGPPMQPQHVGMGPATNPFLDSGFGPFPMANNGHQQANPFGGTQLL

SEQ ID NO: 50478 - protein, 863 aa, Oryza sativa
MGRSSGGGGGRGGGEGEGCGEAETGITDCSPGIIVWVRRRNGSWWPGRILGPDELPASQVMSPKTGTPVKLLGREDASVDWYNLEKSKRVKAFRCGEFDACIEKALTSRGTPVKRREKYARREDAILHALELERKQLASKYQNQGFRSDDISSVPFADMRREFDNSSTEYYSRNNTQKPQFPLGNSASQQCKDLSSTRYKSKKSKKRKGDSSNLPGKTKGLEQNFPYAGSKRDFSESLALEGAENTLSNRNNGSSHLGHMQAGPNLGSDGKNTPLTKKISEESVFEESLVKKHDRCRPLAQVVQSSLKLPHSFQRDDDSGPVLIEEGNDPLTTIYQAQQGWSTYMPNDSGETNNHGDIPPTQITSMGAHFETEGYLKQPDSFSAEQKISEFAEKQRSDSCERECSETETEDDAELLQRYAKRQSPGSDACDPYSIQASKKSRHVDGDVADDMVAFSTGIPQQNVLKEEDGSSELGVSQWHMKGKRNQRSALKRPMGKTDGNISLDRSNSSLKGSLYRVNESNPNMESTGASSHQYFGRSFYQTQELDYDYDNADLTNKARGHAEVRYYGKDYPPSLTPTRDLEQSYTSFNNTETYCKTSPPNKNGDQMSSLGRKACLEGASLYRQNYSSQLGYMGPMLFNVDLNVQAGYQGEHVPLVSLMSRLNGKAIVGHPIQIEILEDGSTDHLVLASDDFLEHSTSASPAWRTGRRTAMPRIPRSNSTRVTLDDGDDEGLWDMNPPFSRSSTPFNQQFRLSKRSNTSFRSPLSHRSQKKPSNSKKGSSSSQKVRALSSISIGKRHHREGRQAKLHNILGDLIKPEGAIPLVTCVPAKVVFSRIMEAVGRPSLSIAHRARVASPAIRDAQR

SEQ ID NO: 50479 - protein, 225 aa, Oryza sativa
MFTKYLQDAFKVPLVIQLTDDEKFLWKNLTVEETKRLARENAKDIIACGFDVERTFIFSDFNYVGGAFYENMVKVARCVTYNKVVGIFGFTPEDHIGKVSFPPVQAVPSFPSSFPHLFSGNDQLRCLIPCAIDQDPYFRMTRDVAPRIGYQKPSLIESRFFPALQGENTKMSASDPNSAIYVTDSAKEIKTKVCFKHCILVENYCNFIFYLRPFKFWSSIKSSVL

SEQ ID NO: 50480 - protein, 380 aa, Oryza sativa
MGNCWFRGSLIVNRVSSNAKPETPKIQSPSERDRSDESKLPSNAKEVEAMRLDSSARNPLVAFSFEELRAVTSNFRQDSLIGGGGFGRVYKGAVAASAAGDGDGAEPQPVAVKVHDGDNSFQGHREWLAEVIFLGHLSHHNLVRLVGYCCEGDHRLLVYEYMPRGSVESHLFSRVMAPLSWATRMKIALGAARGLAFLHEAEKPVIYRDFKTSNILLDEEFNAKLSDFGLAKDGPVGDKSHVSTRIMGTYGYAAPEYVMTGHLTAMSDVYSYGVVLLELLTGRKSLDKSRPPREQTLADWALPLLTHKRKVMSIVDPRLSAAAAAAGAGGELPARAVHKAAMLAYHCLNRNPKARPLMRDIVASLEPLQADDEARDAAGA

SEQ ID NO: 50481 - protein, 256 aa, Oryza sativa
MLSMLHHPNLVNLIGYCADGDQRLLVYEYMPLGSLEDHLHDPPPGKSRLDWNTRMKIAAGAAKGLEYLHDKANPPVIYRDLKCSNILLGEGYHPKLSDFGLAKLGPIGDKSHVSTRVMGTYGYCAPEYAMTGQLTLKSDVYSFGVVLLEIITGRRAIDNTRAAGEQNLVAWARPLFKDRRKFPQMADPALHGQYPSRGLYQALAVAAMCVQEQPTMRPLIGDVVTALAYLASQTYDPEAHGVHHTSRLMSPGTQGV

SEQ ID NO: 50482 - protein, 308 aa, Oryza sativa
MICGELCRRRRRRRGDENGGATRLPPGPWRLPFVGSLHHLAVMRPRGVVVHRALAELARRHDAPVMYLRLGELPVVVASSPEAAREVLKTHDAAFATRAMSVTVRESIGDKVGILFSPYGKKWRQLRGICTLELLSVKRVRSFRPIREEQVARLVDAIAAAAASSTAEAAAVNISRQITGPMTDLALRAIMGECFRWREEFLETLAEALKKTTGLGVADMFPSSRLLRAVGSTVRDVKLLNAKLFELVECAIEQHREQIRAAHDNGGDDDDAHGHGDKECFLNTLMRIQKEGDDLDDTHHGNRQSCHS

SEQ ID NO: 50483 - protein, 656 aa, Oryza sativa
MAMARLTPNGVAAALAGDTNLKPVLQIVELRGVQVNGAGVTRGERFRAVVSDGTAASSALFAAQLSDHARSGALRRGSIVQLSEYVINEVGPRRIIVILNLEVLVSECEIIGNPTALSETGSPIPNPTRVEQFNGAPQYGLMAGNSSNTTTKPSDNVPLFQNSMAGNSSNFATRPSDKVPVFQPTVQPSYRPAPNYKNHGAIMKNEAPARIIPISALNPYQGRWAIKARVTAKGDIRRYHNAKGDGKVFSFDLLDSDGGEIRVTCFNALLDRFYEVVEVGKVYVVSRGNLRPAQKNYNHLNNEWEILLENGSTVDLCPDENSSIPTQRFDFRPINEIEDAQNNAILDIIGVVTSVNPCTTIQRKNGMETQKRTMNLKDMSGRSVEVTMWGDFCNREGSQLQGMVERGIFPVLAVKAGKVSDFSGKSVGTISSTQLFINPDSAEAHSLRQWFDSGGRDASTQSISRDITPGASRNEIRKTVAQIKDEGLGMGDKPDWITVKATVIFFKNESFFYTACPNMIGDRQCNKKVTKSTNGNWTCDKCDREFEECDYRYLLQFQIQDHSGTAWVTAFQEAGQELLGCSATELNALKEREDPRFADTMLNCLFQEYLLRLKVKEESYGDERKVKNTAVKVEKVDPSGESKFLLDLISKSSALH

SEQ ID NO: 50484 - protein, 360 aa, Oryza sativa; identical to SEQ ID NO: 49572

SEQ ID NO: 50485 - protein, 571 aa, Oryza sativa
MPPAAMAPPPPPQGSSTGDPLYDELWHACAGPLVTVPRVGDLVFYFPQGHIEQVEASMNQVADSQMRLYDLPSKLLCRVLNVELKAEQDTDEVYAQVMLMPEPEQNEMAVEKTTPTSGPVQARPPVRSFCKTLTASDTSTHGGFSVLRRHADECLPPLDMTQSPPTQELVAKDLHSMDWRFRHIFRGQPRRHLLQSGWSVFVSSKRLVAGDAFIFLRGENGELRVGVRRAMRQLSNVPSSVISSQSMHLGVLATAWHAINTKSMFTVYYKPRTSPSEFIIPYDQYMESVKNNYSVGMRFRMRFEGEEAPEQRFTGTIIGSENLDPVWPESSWRSLKVRWDEPSTIPRPDRVSPWKIEPASSPPVNPLPLSRVKRPRPNAPPASPESPILTKEAATKVDTDPAQAQRSQNSTVLQGQEQMTLRSNLTESNDSDVTAHKPMMWSPSPNAAKAHPLTFQQRPPMDNWMQLGRRETDFKDVRSGSQSFGDSPGFFMQNFDEAPNRLTSFKNQFQDQGSARHFSDPYYYVSPQPSLTVESSTQMHTDSKELHFWNGQSTVYGNSRDRPQNFRFEQN

SEQ ID NO: 50486 - protein, 191 aa, Oryza sativa; identical to SEQ ID NO: 49924

SEQ ID NO: 50487 - protein, 338 aa, Oryza sativa
MATATSFFQPLTTPIAGAGAGGAARLRRGTLALPFPTRTRPLRRPTPLLVARAKRPGSRTAAASRQPANPSDVPKREADEEVEVEEEMPWIQDKALDLVEFTGTVTQAIPGPRVGSSPVPWLLAVPLAYVGVSFVLAVVRTVRRFTSPRTQKKRRVSKNIFLLKSLDELFQKGREAVDFPALQELMEKTGFDMDDVVRKYIRYTLNEKPFNPDVVVDLIHLRKASMLEDAEVAEILNEISRRIVREKGPVVMDLAGFTEQGFKRKLAVQTLFGKILYLSELPEFCSRDGSLVVKEIFGVTDEDADSIRIHILSETSDIESLEKMVDDSELGHGPSPLS

SEQ ID NO: 50488 - protein, 373 aa, Oryza sativa
MEPQPGSPETAELPAPMVLEPPPPPSDEAAAEEEEAGVKPDRQSSSSSSSSSSEEEKEVSKDVAVETSVVVPSVVAASPDDEAAAVASGDGGDVIKHDDEAVVRPDDWASWPQQPAQTVDDVAAAATTTPQAAPEIQTMSLQPAAVAGFDPERIPKSIFQAKPPGSSSQAEWSVASNESLFSIHHGARPSGDLCGFYAGESRSHFDYFYDEAMAGAAGDHTSDWKLATVAEGSPGGSARSDATDGGGGAAKQKAAIDFRRHESGSAGSSSNFSFAFPILAETTTSPRKRDYGGMYHPLKKEAEQQQAASPASAFEEMTPEEERRRRRSWWCCCCGECCGCCWFACSWSSCCCCCRWRWCSRCSCSCPTFCRRN

SEQ ID NO: 50489 - protein, 943 aa, Oryza sativa
MAESDGGEASPSGGGGGEGSPDPRRPPARPQLTKSRTISGSAASAFDRWGTSNSSSSILVRRSSTAPLPPGAAPRGLLTVAVDEPSYAAPNGGAAMLDRDWCYPSFLGPHASRPRPPRSQQQTPTTTAAAAADSRSPTPAAPPQTASVSQREEEKSLASVVKRPMLLDERRSLSPPPPLQRAPRFDLSPYLVLMLVVTVISFSLAIWQWMKATVLQEKIRSCCSVSTVDCKTTTEAFKINGQHGSDFINSADWNLASCSRMLVFAIPVFLVKYIDQLRRRNTDSIRLRSTEEEVPLKKRIAYKVDVFFSGHPYAKLLALLLATIILIASGGIALYVVSGSGFLEALWLSWTFVADSGNHADQVGLGPRIVSVSISSGGMLVFATMLGLVSDAISEKVDSWRKGKSEVIEVNHILILGWSDKLGSLLKQLAIANKSIGGGVVVVLAERDKEEMEMDIGKLEFDFMGTSVICRSGSPLILADLKKVSVSKARAIIVLASDENADQSDARALRVVLSLTGVKEGLRGHVVVEMSDLDNEPLVKLVGGELIETVVAHDVIGRLMIQCALQPGLAQIWEDILGFENAEFYIKRWPELDGMRFGDVLISFPDAVPCGVKIASKAGKILMNPDNDYVLQEGDEVLVIAEDDDTYVPASLPQVRKGFLPNIPTPPKYPEKILFCGWRRDIHDMIMVLEAFLAPGSELWMFNEVPEKERERKLTDGGMDIYGLTNIKLVHKEGNAVIRRHLESLPLETFDSILILADESVEDSIVHSDSRSLATLLLIRDIQSKRLPSKELKSPLRYNGFCHSSWIREMQHASDKSIIISEILDSRTRNLVSVSKISDYVLSNELVSMALAMVAEDKQINRVLEELFAEEGNEMCIRSAEFYLYEQEELSFFDIMVRARERDEVVIGYRLANDDQAIINPEQKSEIRKWSLDDVFVVISKGD

SEQ ID NO: 50490 - protein, 582 aa, Oryza sativa
MVLFSVTKKATTPFDGQKPGTSGLRKKVTVFQQPHYLQNFVQSTFNALPADKVKGATIVVSGDGRYFSKDAVQIITKMAAANGVRRVWVGQNSLMSTPAVSAVIRERVGADGSKATGAFILTASHNPGGPTEDFGIKYNMENGGPAPESVTDKIFSNTTTITEYLIAEDLPDVDISVVGVTTFSGPEGPFDVDVFDSTIDYIKLMKTIFDFESIKKLLASPKFTFCYDALHGVAGTYATRIFVEELGAAESSLLNCVPKEDFGGGHPDPNLTYAKELVDRMGLGKSSNAEPPEFGAAADGDADRNMILGKRFFVTPSDSVAIIAANAVQSIPYFSSGLKGVARSMPTSAALDVVAKNLNLKFFEVPTGWKFFGNLMDAGMCSICGEESFGTGSDHIREKDGIWAVLAWLSILAFKNKDNLGGDKLVTVEDIVRQHWGTYGRHYYTRYDYENVDAGAAKELMANLVSMQSSLSDVNKLIKEIRSDVSDVVAADEFEYKDPVDGSVSKHQGVRYLFGDGSRLVFRLSGTGSVGATIRVYIEQYEKDSSKTGRDSQDALAPLVDVALKLSKMQEYTGRSAPTVIT

SEQ ID NO: 50491 - protein, 488 aa, Oryza sativa
MAATGGAAGEKTASSLLLGVRGYTSTLKNASTASCRLSAGHPIEVTLWEASPPALSHFSVHCPDLPSFNGNLLGAPKAIAAAVDDADGQLLLLLRVPIDQLGAPHDNDYLVYHPDPPSPKLDLLPNPPPPTLGDHQLAILSCGDDRYVVAALHVWSEFTSTLRLYRSSCSSGSWTSEEVSVEEPVRDRLCPIPDSAKRQLYHVTTKTITLGGAKGTVGWVDLWRGILLCDVLDEMSPRKLRDMPLPWPAKGNWRRYLNEDVSFCRDIAISQHKGSIKYLEMEIVSPRTVTTTIPTSTSADPTSYLEWVRRSREPQPTRRRSVFHPGSWRITTWSMPIPVTSWDDWRRDCTAESREVHLDTNPSHHYELLHSLMLSNSSDEHREEAQGQGATSSLSLGRLRLCYPALSCIDDDVVYLLGNAAGRGAKTGGMMVAVDVRNKELRGVAKLDPEKNTLYSMRCYLATGISKRLNTTTDTRVGRPEEDAEAAE

SEQ ID NO: 50492 - protein, 905 aa, Oryza sativa
MCSPPSMRRHPLLPLLAAVLVGAAVRAGKIATEVVVPDFVASYLLFIDTYGVFLQSGGGGAFQAVVYNPAGQQDRYYLAVVHAPSKTCVWVANRDAPITDRAAPLRLTARGISAEDPNGTVVWSTPAFASPVAALRLDESGNLALLDGRNRTLWQSFDRPTDVLVSPQRLPVGGFLASAVSDSDYTVGGYRLDVTAADAALTWNGSLYWLLSIDVKSTRDRDGAVASMAVNGTGLYLLAADDTVLIQLPLPDAKLRIVKLGVEGKLVITSYASANATSPSPTDAGFVAPNSGCDLPLSCGALGFCAPNGNASSCTCPPLFASSHDGGCTPADGSKAMTVASCGGAGGDAAPTSYISLGNGVAYYANRFSRPDMVGSNGSSCQALCSGNCSCLGYFYDESSLSCFLVQHQIGSLVNANSRRGDMVGFIKVQSSQSPGSPSGSSSNNSTLIAILLPTIVAFVLVVVVGAVIVVSWRKQERRAGRRASRSRDVQLRRHRSPASDSAHLVYGNDDDGNDIVIPGLPTRFTHEEIEDMTNSFRIKIGAGGFGAVYKGELPDSSAVAVKKIEGVGMQGKREFCTEIAVIGNIRHVNLVSLRGFCVEGQRRLLVYEYMNRGSLDRTLFRPAAGQPLEWKERMEVAIGAARGLAYLHFGCDQRIIHCDVKPENILLADGGQVKIADFGLAKLLTPEQSGLFTTMRGTRGYLAPEWLTNTAITDRTDVYSFGMVLLELVRGRKNRSEHVSDGAGAATGDDSNSSNGTTGSSSRGARSDYFPLMALEGHEAGQYAALADPRLEGKVVAGEVERVVKVGLCCLHEDPQLRPSMAMVAGMLEGTMELWEPRVQSLGFLRLYGRGFAGPADGSGGSGGGIKQAMAGSNGDHTRSGTTTVTTMSGWPSYMSSSQLSGPR

SEQ ID NO: 50493 - protein, 430 aa, Oryza sativa
MVAPGGGGGGAASWPSEGELDVVRAKVVEISGRGAGEVRVVACPYRICPLGAHIDHQGGTVTAMTINYGVLLGFVASDDAEISLQSGQFEGVIRFRVDDLQKPIENPENINWESYARGAVYALQNFGYDLKKGIIGYISGVKGLDSSGLSSSAAVGIAYLMALENVNDLVVSPVDNIQLDKSIENKYLGLENGILDPSAILLSRYGYLTFMDCKTATHSYVYFSVLSKSQQCQGELPFKILLAFSGLQHNLPKKSGYNTRVFECKEAARALLCASGCEDASSILRNVNPAIYEAQKCILEENLARRAEHYFSEMKRVVKGRDAWARGDLREFGQLISASGRSSILNYECGSKEMIQLYEILLKAPGVLGARFSGAGFRGCCLAVVESGHAEAAAAFVRAEYEKAQPELVSKIPPGRRVLVCEPGDGARVI

SEQ ID NO: 50494 - protein, 547 aa, Oryza sativa
MSELTMDQEIQLNQRPSPQRQQQAQEHGGATAPAPAPATPQDDEQQGHQAAVARHGCGGATAERHHQTKLTLLPLVFFIYFEVAGGPYGAEQAVSAAGPLFALLGFLASPFAWGVPVSLVTAELAAALPGNGGFVVWADRAFGPLAGSLLGTWKYLSCVINLAAFPALVADYLGRVAPAVAVPGSRARTGTVLGMTVFLSFLNLGGLSIVGWGAVALGFVSLAPFVLMTAMAAPRTRPRRWAARVQVKGKRDWRLFFNTLFWNLNYWDSASTMAGEVERPERTFPRALAVAVVLIAVSYLLPLMAAVGATDAPPEAWENGYLADAAATKLVRNLKGPATSIPLYQNYNSLHHRRAVAQVLDGGRRGALLRRVVRSAAEQRRVPAPRHGGAGPPPLRLRPPRPRTIRHPVGRRRRLRRRLGRRLLPRLRRRRRHRQPALQPRRAARVRRLPPAPREGGEPLLAQAPLPRPAAAPRARRHVPRAVGVPGVRGRRRRVEGLRRRRRAHGPRRRLARRHEGVQVQEVAQVQHRGCRRPSSATTRCSSSSCW

SEQ ID NO: 50495 - protein, 776 aa, Oryza sativa
MAAEPEERLDVLTAGGEKTGASKARSEVHRDGDYHRAVRVWIYSESTGELLLQRRADCKDTWPGQWDISSAGHISAGDSSLSSAQRELDEELGIKLPSDAFELLFVFLQECVINNGTYTNNEYNDVYLVTTLTPIPLEAFTLQESEVSAVRYMHLDEYKSCLARESGEYVPYDVNGTYGQLFSIIEERYKDNIESRSLTLQKQINRYAPIHLEPELTSLSEGDREALGYILKASIVIDDIFYEQVWNSNCTLRDWLKARANYSSFVKLKWLYYSINKSPWSCLDENKAFLSTADSAVKLLTDATKSVSGWKGIEYRAAFPRDNPPGANFYPPDMDKMEFELWKNGLPEKEQKYATGFFTVIKRHDALLPSILAQSDGSNQTKTSDDLFVVPYSEEYKSSLEKAAELLHKASECSDSPSLKNLLKTKANAFLSNDYYESDIAWMELDSNLDVTIGPYETYEDGLFSYKATFEAFVGVRDDIATSQVKLFGDQLRDLEKHLPLDNIYKSDNVSAAPIRVINLLYNSGDVKGPQTIAFNLPNDERIVNERGTSMVMLKNISEAKFRHILKPIANACIREEQEDYVDFEPYYTHIVCHECCHGIGPHSITLPTGKRSTVRMELQEFHSALEEAKADIVGLWALNFLIKKGLLPKSLSESMYVSFLAGCFRSIRFGLEEAHGKGQALQFNWLYEKGAFVLHSDGKFSVDFTKVEDAVESLSREILTIQAKGDKPAAQSLLQSHASLTQPLRVALDKIEHMQVPVDITPIFGTANKLLANDQ

SEQ ID NO: 50496 - protein, 775 aa, Oryza sativa
MATPPESLSPAAAAVEDDWEEARGLLYEAYNELQGLAAELGGAAAPAPAVVVVGHQTDGKSALVEALMGFQFNHVGGGTKTRRPVALHLRFNPRCHAPRCRLLAGSGAGDDEDEEAGVAGRAMPLADIQAYIEAENMRLENDPSQFSEKEIIIRIEYKHCPNLTIIDTPGLILPAPGRKNRVLQSQACAVETLVRAKIKHKETIILCLEDCSDWSNATTRRVVMQVDPDLARTVLVSTKLDTKILQFARASDVEVFLHPPTCALDGSLLGDYPFFTSVPSGRVGSCHEAVFRSNEEFKKAISLRELEDVASLEDKLGRGLTKEEKNRIGVSNLRLFLEELLRKRYIESVPLIIPLLEKEHRGATRKLREVNQEISDLDEAKMKEKARLFHDSFLSKLSLLLKGMVVAPPDRFGETLINERINGGTFTGSENFLIPNKLMPNAGMRLYGGAQYHRAMAEFRLVVGSIRCPPITREEIVNACGVEDIHDGTNYSRTACVLAVAKARDTFEPYLHQLGFRLLYIMKRLIPISAFLLEKDGENCSSHDVLVKRVKAAFDRFAESTEQSCRERCMEDLVSTTRYVTWSLHNKNRAGLRHFFDSFVAQEQLSVNTLTAHSTGLHEQSFGLNDNKQDRPKGDFKSSNSSEANSPTVASETRLVDLLDSTLWNRRLAPSSERLVYALVHQIFHGIKEHFLVTTELKFNCFLLMPIVDKLPALLREDLESAFEDDLDSIFDVTQLRHSLGQRKRDLEIELKRIKRLKEKFAEINKKLNSLQVRQ

SEQ ID NO: 50497 - protein, 875 aa, Oryza sativa
MARSSADDMELKRSCEAGILSKEKDRETVVMSMRVAKGRGVWGKAGKLASRHMAKPRVLAVTTKKKGQRTKAFVRVLKYSNGGVLEPAKVYKMKHLSKVEVVPNDPSGCTFLLGFDNLRSQSVSPPQWTMRNKDDRNRFLMCILNMCKEIYGAIPKVVGMDVVEMAMWAKDNTTVKVTQVSTKDGPIESLVGEADSQVAIQKDLVLQTEDEDTEALLDTYIMAIGEAEAFSERMKRELVALESANVYALMETETVIEEVLEGLEIASICVEDFDEWLGIFNVKLRHMREDIQSIEWRNNKLELQSDSNVALIDELDKMLVLLQIPPEYEASLTGGSFDEGNMVKNIEACEWLTSAIKNLEASNLDPIYVKLRAVREKRAEFVLLKCTFVRRASEFLRNYFPSLIDFMLNDKGNFSQRGQLQRPDHADMRYKCRTYARLLQFIKNLDKSCLMPLRKSYCHSLNLLIRREAREFSSELRAGSKASKSSTPLFEGPASANQSISITDTTADAYCKMITVFIPLLVDESSFFAHFMCFDVAALAPSDESDNNNPVAVSEPPGSSAKPINSSAELGVLNQFLQELLDGIQEDFYAIVDWAFKLDPLSCISMHGITDRYLSGQKAEVAGYVHVLLDDLETRISILFSRFVDDACYQIEKYERNVRQIGVVPYIPRFSQLAARMEQYINGSRDLVDQAYTKIVTIMFVTLEKIAQVEPKYVDIVLLENYAAFQHSLYDLANVVPTLAKYYHQASEAYEQACSRHINLVIYIHFEKLFQFARKIEELMYNMSPEEIPFQVGMSKVDFRKMLKSSLSGLDKTINAMYRKLQKNITAEELLPSLWDKCKKEFLDKYATFLKLISKIYPSETVISVNEMKDTLASL

SEQ ID NO: 50498 - protein, 210 aa, Oryza sativa
MGILVILVDLQCCRCDAKIRKVLGCLEEEYCIEKVEYDVKNNRVIVRGEFDPEKLCKKIWCKAGKIIKEILIVDVWPPPLPQPPPPCKPPPCEKPPEDCKPKPCHCCSCEKPKPKPKPCHCEKPKPCHCEKPKPCEKPPPCKPEEPPKPPPEKPPPKPECKLVPYPYPVPYPYAGQWCCPKPEPPKPPPEPPKEPEPPKPCGCSHAFVCV

SEQ ID NO: 50499 - protein, 540 aa, Oryza sativa; identical to SEQ ID NO: 28599

SEQ ID NO: 50500 - protein, 381 aa, Oryza sativa
MSIWRVPNYDVLEKCTEDILSLIKPVEGDRNKRIYAIQELADTIYSAGALRGASVKPFGSFVSQLYAKSGDLDVSVELFNALNLPISKRKKQDTLREVRRALQKRGIARHMEFIPNARVPVLQYVSNQYGISCDISISNYPGRIKSKIFYWINTLDDRFGDMVLLVKEWAKAQNINDPKNGTLNSYSLCLLVLFHFQTCEPAILPPLKEIYEGNIMEDISGRAYYNEKHLDEVCSINIERFRRQNMGQRNQSSLSHLLASFFHKFFRIDALSDKVISTYTGRLERIQDNPRWMDKSYSLFVEDPFEKPDNAARAVGSFEFQDIVNAFSNASNKFVSDAHALTDRNGLLSLLCTPDVGSKLGGRASASRYTNTLVSPHDRFL

SEQ ID NO: 50501 - protein, 264 aa, Oryza sativa
MDGHSCGDLGRVSEVISDGTSSGSADGGKSLPEKHSALADATSGVAAENADNLSQAGKYMDFSSTTSLGVKKGFQKCMTFPPSSGEAQQQQGSCCDADKNPKDVPTYERSVSLPPTLKIISAMKGSRQKNGMASSTESRHVKWAPDVYDPPVTSVCHSVNNSYQRRSKSRKKDKNKQKQKQKQKGRSKKNHQNAIQSSAVLQAPGEFDRLKDAETTSSNSAPDDLNKHETDILDYGISSQDAKCGSSFLRESAAKMHFSTAEAS

SEQ ID NO: 50502 - protein, 562 aa, Oryza sativa; identical to SEQ ID NO: 47856

SEQ ID NO: 50503 - protein, 554 aa, Oryza sativa
MGSPKMAKSAMKQGIWRRRIGAPFAAVLVAAVLAVVVFSGQFAKGPNASSQFAPVQVDNTLRPTRDKPVSADQDLERTVSSKLEGEDTEQIRLEDGQSPNKEAAIEEQKPSQAAAIDQDDNTLNPGLKQASGDERSAGGSDSLSKESPPQSQEGDGGTAESGAEPYIKCTAQSDIKICDLSNPRFDICELCGDARTIGQSSTVVYVPQNRASNGEEWIIRAQSRKHLPWIKKVTIKSVNSSEPEPICTSKHHIPAIVFALGGLTANVWHDFSDVLVPLFLTARQFNRDVQLIITNNQPWFIKKYSAIFSRLTRHEIIDFDSDGQIRCYPHVIVGLRSHRDLGIDPSSSPQNYTMVDFRLFVREAYGLPAAEVDIPYKADKDDPDKKPRIMLIDRGKSRRFVNVAHVVQGLDWFGFEVVKADPKIDSNLDEFVRLVDSCDAIMGVHGAGLTNMVFLRSGGVVVHIVPYGIKFMADGFYGAPARDMGLRHVEYSISPEESTLLEKYGWNHTVINDPETIRKGGWEKVAEFYMSKQDIVLNMTRFGPSLLNAIEFIM

SEQ ID NO: 50504 - protein, 1116 aa, Oryza sativa
MEQSAATAFTKCVVGKLLEVLDTRYKMLRDLSHESASMHNDLLLLAAFMDDQLRRSSSSPAAERPTAVLRAYTELMRELTHDMEDSIERFLHRVAPRDDHGGAGAPSWPRRAARWVATLRTRLRFAAEIRKLKTRLEDETKRLRNAVEAAAAAGGGGHSSATPALAAAAPRGGHVEPNPVGMEKPIEHLVQLLDEAGAGGGPQQLRVIAIVGFRGSGKTTLARAVYSRSGRQFRERAWVDASRWTDVGDLLADIVRQVCLGEYDVSESHEENLRNRLKNKRYLIVLDDISMEQWNAIESIFENNGRGSRVIVTTAILSVANSCTAYKSGANGGCCIRRHGCVYKMQTLGEAHAKELALGGGSDQRPPELEHGSATLMAKCDGLPLALVSVANHLRCLGNLTGRHCADLCHLLGSLLLDERNVPRLAGTAAAADSFARLRRVLMDSYAGLPDYAARTCLLYLAVFPNDGRRLKRSVLVRRWLAEGYARGGEDVLGNSTDVDVADGHFRSFVDQSIIVAHPADDDDDDDHRTRRCRTHGIVHEFVLHKSIAESFIFSSRAPPRRKRVRHLSIQGGGGNTTTAALSTTDLSCVRSLTVFGDGGDAVSNLRKCKLLRVLDLEQCTTALSDDHLADICKLWNLRYLSIGMSSNVTMLPDNIRRLKLLETIHLSKTKVTMLPLQVVGLPCLAHLVGKFKLLLPDQRGKKTVVISNELEKLAKKSNLQTLAGFVADESQQAFPQLMRHMRKLIKVKIWCEFGGEESDSVSTTATDHLADAIRSYIEAPKVEETDARSLSIDMEQCSKQLIRSCHGESKLLHSLKPPCRSYLTSLKLHGDLFRLHGLISMLKNLYELCLSSTTTTLTRDLVSAIGGLPLLLRLKLVANHIEHFAIGAGEFRSLQHLLLVVHRQNPILLPKIEEGALPQLVSLELLCKHLRGLSGIQIRHLQRLKEVALDSRVSEGTKREWEAEARRHPNRPSILLLKNSYSTVLPDDTDRLDDQMDGELAREKSAPDDDAGNQEQIAEVESESSAFQLANSTMNNSVAGKESTADDADEEGLGSTNAVPMEQINSTGSINETEVSNRGKFTMSYFEDCCPYHEVINYKFGTYYVNSTAFEILFN

SEQ ID NO: 50505 - protein, 85 aa, Oryza sativa
MSSAHVYLRLNKGQTMDDISEGVLEDCAQLVKANSIQGNKTNNIDVVYTPWYNLKKTPSMDVGQVGFHNSKLVRSLFPLLPVLGM

SEQ ID NO: 50506 - protein, 1575 aa, Oryza sativa
MHGWREGGGEGCGKSRRLVRHMWPVTRVEAAAPPPAQGQASPPPRSSVPPPLTTSYPPAPTTPPAAAHKKERVDSPRPASSDSFLKDGREFRVGDCALFQAVEVPPFIGLIRWIEIKEEGFPKLRVSWLYRPADIKLNKGTQLCAAPNEIFYSFHQDETSAVSLLHPCKVAFLRKGVELPAGISSFVCRRVYDIDNKCLWWLTDQDYINERQEEVNRLLHRTKLEMHAAVQSGGRSPKRLNGPSSAQQKSGSDGAQNCGLSKGKKRDRGEQGTDPAKRDRERPLKAEDGESGNFKVENLKSEITKITEKGGLPHAEAVEKLVHLMQLDRTERKIDLPGRVILADIIAATESPDCLGRFVQLRGLPVFDDWLQEAHKGKSGEAGSPKETDKPMEDLVLALLRALAKLPINLTALQSCSIGKSVNHLRSHKNPEIQKKAKCLVENWKKRVDAEMKSNDVKPVVSGQAVSWPGKPGFPEISSAGNRRSGSSESSLKSPVSQLSSSKALTSKPVAADAAAKSSPVISGSSKLQHMQPGNAVTNLKEQPSKSTGGTCGSELPAVKEEKSSSSSQSLNNSQSCSSEHAKTIGSSKEDARSSTAASGVAYKTSGSSSRVHRRTNNGLLGSGIQKEAAVARSSSLDHSSVQEKVSQSGTACEKGADIQSDQGNSHRLIVRFPNPGRSPARSASGGSFEDPSFTGSRASSPVADKHEQSDRRVKMKTENSNPHLGNDTNAESWHSNDVKGASVSEEGDKSPRAMLTDDSKTTEGAGRDVPVSRVACSSYANEKGICSSETGLTKLFNPMNALIEIKYSEASHSLQAGDDTAMNLLASVAGEISKSELISSSPSPRNSSANEQGCEGDNIGKLKVECDVSLPQHAGPSNEVEKVISEKSEKSGVGLVGKELHREDVNMLSVNNLLSQGDKGTTSAGSSPLPEIDSKAKTENREVEDTDKCSHPPSRGDDGVKSNAKQPIGFKIDTNSNIKSSTTSEYRSAFTVRGKVEDGCTTSSDVGSTLGDQCKLAVSNRKMLPAEEPLCGGDKQAHGLLKPTDQKHLLGLPYYSEHIDKSGDSTANKLKLKPSFSSSTVEVNKADGLLVGSNTVLKEDEKKEHPADVTKLAVATGVKHGPGNGISSKESKDNSSESSSHTRPGGTVSQETEHSAQRSSKKSSDDAGGKDDLVSSDDGSSFSAKTRSNATAKLDFDLNEGIPGDEGHLSEPATSPAVCSSAIHLPRPSPFVSPISSGLPAPIAAPAKGPFVPPENLIRLKSETGWKGSAATSAFRPAEPRKIFEMTLSASGILVSDAAGKNRPALDIDLNVADEQFLEEDVSQSSVQTTGSESGNTRRSNGPVRSVGFELDLNRADEVAENGQIVSNTNHRVEVPLLSRPLPGVFSSSDANSSRDFDLNNGPTLDEAGTEHAPRSLSSKNTSSIPFLPQVASMRMNSAEMSNISPWFASANACAPVAIKSFLPSRGEQPHPVETAAGSGTQRIITSMADGVQHGSDPSRTPVISTSPTMMFHPPAYQYAGFPFTPSVHLQAPGFSIGSTSYANSAPGGIPYFPTIAPTLVGPAGALPAQHTRQ

SEQ ID NO: 50507 - protein, 439 aa, Oryza sativa
MMPPPCEHILSLNMCLLDTIHCFYIRALAVLPLPVSDDSMRRGRLLRAILMSGQCFGPLDPVSNIIINTLWYDAAYPPLYPKDGGGGDCEVELPQDISDTQAMSRIASRSLNGLVALLRAITTTTTGCSLSKHEAVEYLWSRQCDLTDKLQQTVMTNKNPYSAAAKASEHPQHTMLGSFLMSLCGEKLDRLQHLLRSISDGSGCVISNADWEQLNAMIQEQLTTMIGRKRLPPFDTQALAALSRRRSDYVNRQRFVRSKLEELLVTYSRQHPWEPRYKLDLICGVEEPQSHYWRCYHANFLASTHGTVLKLNREATTTPNPKRTLFFAQFWDSQPGRFNESNSKPICCPVQDSTCFGLCTTCEGNASTILHPPSGYLFEDDVDDAIEVYDVNAAIDVFGSASCSLSKDKDKGLLESDFIYFDHGRNANLTKILNDDSIL

SEQ ID NO: 50508 - protein, 731 aa, Oryza sativa
MASSASSSSSPSSRPPLMALPSFYRPPWPSERGGEQRATDCWAGSPAAGGGRARATAMGIDLNNTASGGEEDAPAPGPVCRDLWHACAGPVVSLPRRGSAVVYLPQGHLSAAGAGGGIRGEVAVALPPHVACRVVDVELCADAATDEVYARLALRAEGEVFERNLHGGGIEREDDMEDGDEERKSRMLHMFCKTLTASDTSTHGGFSVPRRAAEDCFPPLDHKQLRPSQELVAKDLHGAKWRFRHIYRGQPRRHLLTTGWSSFVNKKKLVSGDAVLFLRGDDGELRLGVRRATQLKNEAIFKAFSSESSKMRTLSAVADSLKHGSVFHICYNPRATASEYVVPYWKFVKSFNHPVCIGMRFKFHFESEDVNERRSGMIAGVSEVDPIRWPGSKWRSLLVRWEDATDCNSQNRVSPWEIEIVGGSISVAHSLSASSSKRTKLCPQGNLDVPALYGNGRPDSVETEKFPRVLQGQELMGSRTHRATCSPQSIDITKSKSFDAWRFLTDTRSCMLGSSTSRLPVQYSGYTHQSVSFGESIGFPEVLQGQEISQTVPPFQGMLPDACSAKSRYELKNYVCTPATMNGLSSANEGYCLSLSTVPPSPPSSLMLYQTGVPQLELASKNNDKSGNDSQPALRQHKLLSETSWDQFKIGKASTPGNATKPGNGGREVDRTSCRLFGFSLTEKIIPTDKDGEKEVSYETDCQNPRMLDLFGYNCSTPGALHALCAAPLGI

SEQ ID NO: 50509 - protein, 1206 aa, Oryza sativa
MTSLRPLETSLSIGGRPRRGLVLPPPGVGAGVLLRRGAMALPGRRGFACRGRSAASAAERTKEKKRRDSSKQPLVHLQVCLEHQVKFGEHVGIIGSTKELGSWEEQVELEWTTNGWVCQLKLPGETLVEFKFVIFLVGGKDKIWEDGNNRVVELPKDGKFDIVCHWNRTEEPLELLGTPKFELVGEAEKNTGEDASASVTFAPEKVQDISVVENGDPAPEAEPSKFGGQWQGSKTVFMRSNEHLNKEADRMWDTTGLDGIALKLVEGDKASRNWWRKLEVVRGILSESFDDQSRLGALVYSAIYLKWIYTGQISCFEDGGHHRPNKHAEISRQIFRELEMMYYGKTTSAKDVLVIRKIHPFLPSFKSEFTASVPLTRIRDIAHRNDIPHDLKQEIKHTIQNKLHRNAGPEDLIATEVMLARITKTPGEYSETFVEQFTIFYSELKDFFNAGSLFEQLESIKESLNESGLEVLSSFVETKRSLDQVDHAEDLDKNDTIQILMTTLQSLSSLRSVLMKGLESGLRNDAPDNAIAMRQKWRLCEISLEDYSFVLLSRFINTLEALGGSASLAKDVARSTTLWDTTLDALVIGINQVSFSGWKTDECIAIGNEILSWKQKGLSESEGCEDGKYIWSLRLKATLDRARRLTEEYSEALLSIFPEKVMVIGKALGIPDNSVRTYTEAEIRAGIVFQVSKLCTVLQKAIREVLGSTGWDVLVPGVAHGTLMRVERILPGSLPSSVKEPVVLIVDKADGDEEVKAAGDNIVGVILLQELPHLSHLGVRARQENVVFVTCEYDDTVTDVYLLEGKYIRLEASSINVNLSIVSEKNDNAVSTEPNSTGNPFQQKLQNEFSLPSDIEMPLQMSKQKSKSGVNGSFAALELSEASVESAGAKAAACRTLSVLASLSNKVYSDQGVPAAFRVPSGAVIPFGSMEDALKKSGSLESFTSLLEKIETAKVENGEVDSLALELQAIISHLSPPEETIIFLKRIFPQDVRLIVRSSANVEDLAGMSAAGLYDSIPNVSLMDPCAFGAAVGKVWASLYTRRAILSRRAAGVYQRDATMAVLVQEILQPDLSFVLHTVCPADHDPKVVQAEVAPGLGETLASGTRGTPWRLSCNKFDGKVATLAFSNFSEEMVVHNSGPANGEVIRLTVDYSKKPLSVDTTFRKQFGQRLAAIGQYLEQKFGSAQDVEGCLVGKDIFIVQSRPQP

SEQ ID NO: 50510 - protein, 110 aa, Oryza sativa; identical to SEQ ID NO: 45795

SEQ ID NO: 50511 - protein, 75 aa, Oryza sativa
MKFMKNRTASEVWKHKANKQKMTEANLMLSDQCFSCDFIKARLDRRFKLCFISDFVVFHFSGDVDAIRDQTVLSL

SEQ ID NO: 50512 - protein, 1410 aa, Oryza sativa
MGGPLTAAGGRGDGGAKAVEPLRPPPPPDPKTMARWYQLEALERAVRGNTLAFLETGSGKTLIAVMLLRAYAHRVRRPDSRRFAVFLVPTVVLVGQQARVVEQHTDLVVKQFCGEMGVDFWDAATWRSQLEDGEVLVMTPQILLDNLRHSFFRLQDIALLIFDECHHARGNTPYACIFKEFYHPQLNSSASDPLPRIFGMSASLIYSKDLNPHNYSKQISEIENLMNSKVYTVDSESALSEYIPFASTKIVDFDDSNISSELHANILSCLNRLNKKHIEALDRKLHGSSLENAKQRISKLHHTFVYCLYNLGVWLAAKAAEVQSYEENSLSFWGETLDKNVEGFIRNYSEEVHRELSCFLKNGHIGEKFPADSQDGILTPKVHCLIRTLLQYRHMQDLRCIVFVERVITSIVLEHLLSSIHQMSGWNVKHMAGSRPGLLSQSRKNHTEIVESFRKGKVHIIIATQILEEGLDVPSCNLVIRFDPSATVCSFIQSRGRARMENSDYLLLVGRGDVEAQTNAEKFLASGQIMREESLRLGSISCQPLENTLCEDTYYRVESTRAIVTLNSSVPLIHFFCSKLPSDEYFNPLPRFDIDKASGTCTLHLPKSSPVQTVNVEGEGSILKETVCLKACQELHAIGALTDSLLPELDVPCDEEPDIVVENKIEQPSYFPEEFVDNWRSFSRLGIYYCYKISLEGCPKTASPTDILLALKCDLGSDFTSSSFKLPGGQDNASVTMKYVGIIHLNQEQVIIARRFQTTILSFLIGDDHLEVSNGIKYFHEMQVPIGVVYLLLPLVSGRIDWCSMKFSSSPIYEANNKHMTHCHSCKDIDLLQTKDGPFCRCILKNSIVCTPHNNIFYVISGFLDLDANSCLPQHDGTVVTYKDYFKTRHGLTLTFENQPLLAGSKHVKVRNFLHNCYSKKEKEPGDRYSVELPPELCRIIMSPVSANNLHIFSYVPSIMFRIQCMLLSVKLKVQLGPTVQQFDVPVLKILEALTTKKCQEEFSQESLETLGDSFLKYVTTRHLFSEYRLQHEGILTKMKKNLISNAALCQLACSSNLVGYIHAEEFNPRDWIIPCLDYDERDNKKISFLAPNGMYSQRKMSIKSKRIADSVEALIGAYLSTAGEKAAFLLMKSLGMNIEFHTEIPVERKISMKAEEFINVRSLEGMLGYKFNDSLLLLEALTHGSYQTSGPTSCYQRLEFLGDAILDHLFTEYYYSKYPDCTPELLTDLRSASVNNNCYAHAAVKSGLNKHILHSSSELHRKMSYYLEEFGQSFTGPSYGWEAGIGLPKVLGDVIESIAGAIYLDSKCDKEVVWRSMKRLLEPLATPETIEPDPVKGLQEFCDRRSFKITYEKNHVDGVSSVIARVKAGETTYSATKSGPCKLVAKKLASKAVLKDLIAGHKDTEAAAV

SEQ ID NO: 50513 - protein, 241 aa, Oryza sativa
MADGGGGAGDLLSALPDDVLHLILLRLRSAAAAARTSVLARRWRSLWTTLPELRFHAVTDLARVTAALLSHDAPLLHRLELCSHDPAPHEVAAVLHLAARSLAGKLLLDIVMRKKRNPVAAAAAGIGAAFHIPCFRKATEISIRFAYLTIRLPPFGVFAKLSVLRLTRFRLDDSQCDHLGDIVSSERCPSLQALTLCNSQGLSNQPSAPRLSSPLASLSWKNCSSSRFLLPCLEHCIWSIA

SEQ ID NO: 50514 - protein, 573 aa, Oryza sativa
MPPPPPRRALLVPLLRLRAFSSSSSSLAHHPPLPPPPRRHQFVAADAITGQGGGGNPLDPAQLLRDDPVAITASLWVSSFRPQPTAAAPPPPSLSPFLSRLELWVLAYQKAYADETGSYLPRSSIPASTLSSLLALRNAVLDARFRFGNRLTPFLRSPRAAAAAQDPATLSKRKLRALLTTPGPAPFQDRVVQELLLLLLEPVYEARFSPKSFAFRPGRSPHAAIRTIRRSFAPYLWYIKGDLSPLLHSPDPALVVGALIRDVRDKKVVDLVRSALLTPPVTARPGDEDAAKKKKKRKYQKKKVLPEGEPKPDPYWLQTFFGFAPEEALTQPDWGHCGVLSPLLANVCLDELDKWMEEKIKELYRPSKSDVVGGEDGVEQGNTSWPEFVPTSGPDKTRKVDYIRFGGHFLIGVRGPRADAAVLRKQLVEFCDQRFRIKLDNESLPIEHITKGIMFLDHVLCRRVVYPTLRYTATGGKIISEKGVGTLLSVTASLKQCIKQFRKLEFLKGDREPDPQPCFRMFDATQAHTNAQMNKLLLTMAEWYRYADNRKKVVNFCSYIIRGSLAKLYAAKY

SEQ ID NO: 50515 - protein, 461 aa, Oryza sativa
MFGLQKADAVVGDVTITASRMEEVDFTMPFTESGWSMVVAVQKETSTSMWIFLQPLTTSLWLASLAFFCFTGFVVWVIEHRINEEFRGTPWQQFGLIFYFSFSTLVFSHKEKLESNLSRFVVIIWVFVVLILTSSYTASLTSMLTVQKLQPTVTDVRELLRRGDYIGFQEGTFIVPVLEKMGFEGRMRSYSTVDQYADALSKGSANGGVTAIFDEIPYLKLFLSQYCHGYTMVGPIYKTDGFGFVFPRGSPMVADVSRAILTLAEGEKMAQIEKKWFGEPGACQSLGSAVGSSNLSFRSFGGLFLITGVVTSAMLLIYLAVFFYRERDELRAAEAAAAASGSGSGSGSRSLRRLRAWARHYDQKDLKSPTFKRRWSDESVRNGSEYAASRTPRWGDESPCNVAGAADADAGRIPEEVVGGMSPFSISTSSEERNGAVSPAAAEFDNSSDRAAVVAGTSQPR

SEQ ID NO: 50516 - protein, 432 aa, Oryza sativa
MPRPGGAQDEADGGVRRELELLARSFPRFRALVLISCEGFSTDGLAAVASHCKLLRELDLQENEVEDRGPRWLSCFPDSCTSLVSLNFACIKGEVNAGSLERLVSRSPNLRSLRLNRSVSVDTLAKILLRTPNLEDLGTGNLTDDFQTESYFKLTSALEKCKMLRSLSGFWDASPVCLSFIYPLCAQLTGLNLSYAPTLDASDLTKMISRCVKLQRLWVLDCISDKGLQVVASSCKDLQELRVFPSDFYVAGYSAVTEEGLVAVSLGCPKLNSLLYFCHQMTNAALVTVAKNCPNFTRFRLCILEPGKPDVVTSQPLDEGFGAIVRECKGLQRLSISGLLTDKVFMYIGKYAKQLEMLSIAFAGDSDKGMMHVMNGCKNLRKLEIRDSPFGDAALLGNFARLRDNAIPLDVILQCHVKGVPSPCVKDADAQC

SEQ ID NO: 50517 - protein, 334 aa, Oryza sativa
MIYARSVLVIHNIAHQGRGPLDDFSYLDLPVDYMDLFKLYDPFGGDHLNIFAAGIKAADRLLTVSHGYAWELKTAEGGWGLHGIINESDWKFQGIVNGIDTTDWNPRCDIHLKSDGYTNYSLETVQAGKQQCKAALQKELGLPVRGDVPVIAFIGRLDHQKGVDLIAEAMPWIAGQDVQLIMLGTGRQDLEDTLRRLESQHYDRVRGWVGFSIRLAHRMTAGADILLMPSRFEPCGLNQLYAMMYGTVPVVHAVGGLRDTVEHYNPYEESGLGWTFEKAEANRLIDALGHCLNTYRNYRTSWEGLQKRGMMQDLSWDNAAKLYEEVLLAAKYQW

SEQ ID NO: 50518 - protein, 806 aa, Oryza sativa
MAAPPVSGDGAAAAAPVVALGAAGAVGGPRPYEVAVAAAELRPVDCNLAALCDHVQAEGFGSGAFSDVVVEAMGATYRLHRLIISRSAYFRNMLHGPWREAGAPTVVLHIDDPNIDSEAIAIALAYLYGQPPKLNDNNAFRVLAAASFLDLQDLCTICTDFIISELWTSNFLQYQLFAESQDYGSHGERVRNACWGYLCQSATLELREVLPKLSSQTLHALLTSDELWVPNEEKRFELALYALLAKVTLSDVEVSGNENLNLTSSSANSDHSMRKGKSPMNEAGEEQLMGSELQNLKLHDNTETISAHNTSDIPDMNAEASRRKVNDFSTGGPSGESTSYQFNEDIWLSSDQTRNYLSRTSSSNGLVPTEWGKPNAPLWGGRVVGRRQVRCVRGSSSLSADEYNAFMNIFERGSLLYCNMSFDALLSVRKQLEEFGFPCKAVNDGLWLQMLLCHRVQAIVADTCTNCCLTGNSCACKQAHVSSHHHYRQEHDRSSASGTVGNIYLTDAHGEGNAVFGPVRVNVRGAVDGLAGIGRGNSNVPGAAWAPTRYVFSRVPYGLGSRNGQQPFANDESEPRVDYNGDISGDGLTALVNLSQESSASHHQTESIFETGIQVRYSGAASVSTPGGSSLQMQESKEHELGSNLETTENTTISLDMKTPLSHFPPFRFGVEFEDVHRLADSQVKHSTEVFYAGSLWKVSVQAFNDEDPHGRRTLGLFLHRRKAEPLDPLRKANMYVDHREKVTARYQLICPSKREVMIFGSLKQAGTLLPKAPKGWGWRTAILFDELGDLLQGGSLRIAAVVQLV

SEQ ID NO: 50519 - protein, 106 aa, Oryza sativa
MREDSMALFLLGFSGSCSFLQQKLDKLLDTRDTLLILLNGIFCTNIFYMKVVLKYHINPFFKFVIIKTQLITRYYHLVLRETLNLYLHLQEIQTPSCIEICSFGEF

SEQ ID NO: 50520 - protein, 124 aa, Oryza sativa
MGTQQAGEGSKSSAHVLYLLPATNKSQTMDSKKVAYAVFIVILLMTEVAAAAAAGGSARGTGGTGDRANDEEKFIFGHLSKAILIYIASHFPGHIKECVNHVENQCGWAPAPGCLKEALATCAK

SEQ ID NO: 50521 - protein, 290 aa, Oryza sativa
MPTPYVEHQKAITIRNDVNLKKETLRIEPDEECPGRFLVAFTFDATLAGSMTVYFFAKEELNCNLTAVKEDLIKPVTVSFKEGLGQKFRQPSGTGINFSVFEDSELLKQGDMDVYPLAVKAETTMPVDQKLEGEDQKMKTPNSQITQALFEKKESGDYQVRVASQILWVNGTRYELQEIYGIGNSVEGDADANDPGKECVICLSEPRDTTVLPCRHMCMCSECAKVLRYQTTRCPICRQPVERLLEIKVNNKAEEQQQPSPDSPIKVNSKAEEHQQQPSQSLPIPHREEV

SEQ ID NO: 50522 - protein, 349 aa, Oryza sativa
MPSSMFSSYRASSGEAKCSSVTTKLLSYETCSVSDGINPASPINENKKKDDLSYGHVPMHSQSIEHDVVCDALELDNQYSEFWPFDSFLKNSFDISSGKMSLAEEFLYTGDKGAEQVSHANVVCRHSESGSPRLPNSDNDEKSINIKQPWNTNIPYNFSINPIVKNAVSCHTEHDLHGNRKNQALIGFNFESVTNPCEAYCGRSTSSLDEFEVRSAMAVQSNAQASKQFDCSSKLLQSKTTSHAYLTSPGDISAQTNLLENPSGGAFWEKSLEYTAKSMEIAGDTTSSSDMPLDIAIDKCIIQEVLLQYPCGFPTILSWYIAAGILFKSGHYFFLVLIYYSFELYFSLF

SEQ ID NO: 50523 - protein, 1245 aa, Oryza sativa
MANYLAQFQTIKSSCDRIVVAVEDVSDLWLNVKESFEQRLPVKKACLNNKARNPVFVENLPAEFIQTTDSRLRSRFPQDQYLFWFREPYATVVLVSCEDLDEFKTILKPRLKLIVQNDEREWFIVFVSKAHPSNDQASKMAKRVYARLESDFNTKKRERCCKFDLHGPDAEFWDDFDSKMVDCIRNTLDRRVQFYEEEIRRLSEQRFTPIWNFCNFFILKESLAFMFEMTNLHEDSLREYDELELCYSESVNSPGKHREFGGLDTGDDQAALLNPGFKALTQIVQDDVFREFEFRQYIFACQAKLLFKLHRPIEVAARGYAFVVSFSKTLALQENGLPFCFREVWVITACMDLIKATTSHYDGTAVAIDSEREFCRIQGDLYSLCRIKFLRLAYLIGYGVEIEKSPVNSASLSMLPWPKPATWPSIPPDSSAETMAKEKMILQAKSREKIFNIHRKPLPLEPSLLLREANRRRAFLSVGNISELYDSGDGSGLDANSKPSPNKSASNYMARTMSGPATSETSLPVDRPMRLSEIHVAAEHALKQTVSDPNFMTSLSSLEEFEKRYMELTKGAADNYHHSWWKRHGVVLDGEIAALFFKHENYDLAAKSYEKVCALYSAEGWEELLADVLPDLAECQKILNDEAGYLTSCVKLLSLESGLFSSKERQAFQSEVVRLAHSEMKHPVPLDVSSLITFAGNPAPPLELCDGDPGTLSVAVWSAFPDDITLESLSLRLSASSSADEGLKAIKSSDARVLVPGRNIITFDIPPQKPGSYVLGALTGQIGKLSFRSHGFSQDGPVDTDEFMSFEKPTRPVLKVRKPRALVDITPAVSSALLMNELQWIGLIVKPIDYSLKDGILHIDAGAGLKIEESQMIEIETYGSDVEHVGGTDASKTSSSSTDTRKVEKVPIEDGKIKIPDWASDVTTLVWFPVRAIDDTIARGASPASPQKQSIVDGMRMIALKLEFGVFLNQVFERTIAVHFTNPFHVSTRVVDKCYDGTLLLQVILHSEVKATLHVKDIWLDLQSGFEHTGKGDGRPTSNLFPLVIAPSSRAGILFVIRLSALGDMDELEKADSMLNIKYGISGDRTTGAHSPVPVKPDDSEELVFKIAVKMKRPVLDPCVAVGFLPFSSDCLRVGQLVNMRWRVERLKNPEDASLLADEILYQVDANPQNWMVAGRKCGHVSLSNKQGSRIEITVTCVPLVSGYVHPPQLGLPHVGEANISCNPAGPHLVCVLPPTLSTSYCIPA

SEQ ID NO: 50524 - protein, 323 aa, Oryza sativa
MAVESSDERKADEDGAHEELEGQLLYRVPVFDPSLAEFCSPPPIDDAAAASSSCFKEDAADGAVEDAKYPAAAASSPVQQLPDSFVNFEPTDAELREFAADMEALLGQGLDDSNELQDSFYMETLGLITPPVEESGRVKMELDGGVASNSRVSLPSCRAHPKPEDVESADVLDIDFNCTSPDEQKSSASNGAAADSQFFHRSLDLRLNYEAIIESWGNSPWTDGRPPHGQLDDFWPNDHHYSGLWAAGGGGHGAEVGMMTVRPRMDGPGREARVTRYREKRRTRLFSKKIRYEVRKLNAEKRPRMKGRFVKRPSAAAAPCAVT

SEQ ID NO: 50525 - protein, 703 aa, Oryza sativa
MMAAAAGEGEAEVTREVISVSTEKAFEGKALPAWSEQITVRSLVVSAVLGTFLSFIVMKLNLTSGIVPSLNVSAGLLAFFLMKTWTSALERCGVFPKPFTRQENTVVQTCVISCSSIAFSGGFGTYILGMSKKIAEGFDEAEAKTSINVEEPSLGRLIAFLFLVSFVGLFSIVPLRKIMIISYKLTYPSGSATAHLINSFHTPGRDPGEAPGVHPLQVVRRELPLVAVPVVLRRRPRVRVQLVPDVRDGGVQPPILLRFLGDLRRRRHDLPLHYQLLAAHRLRGVVGDHVAVHREQEGELVRRGVTQEQPPWAERVPGVHLHRHDRRRRALQLLLHRAPHRLRPLPEAPRRRQQAAAGDAVRRRHGDGAAGAQLRRPEADAGVPQGPDPDDDRRGGVRAPRRHLGGRHPAHLPAAAAQARGVGVRGGAALRLLQRLRHGPHRLVHLQQLRQARHLHLRREHRRQGRRRRRGPRRLRPHDGHRLHRLRPRPGLQDRIPHAHLTPLHVRQPGAGDGDGMHNKPDGVLDVLQGEQHRDGGRVPGAVRQDLPGDRPPGRERVGPAPPLLPPLLPRLLPPRHRHLRPQGGGQAARVVDPGLHPQRPRHGRPFLPRLLLHHRHVRRQPRPLPLVPRRPRPRPHLRPRRRLRPHLRRRHLVAALLHPLARQRQPAHVHARLLHRHQRQGPALPQDAAHAAMIHPSTSSSS

SEQ ID NO: 50526 - protein, 977 aa, Oryza sativa
MTPLLLLLLALAAGAGAASFPADFANLFAAKAALSDPSSALAAWDPGLSPSLSPCRWPHLLCSNPSSSSSAAIAAVLLSNLSLAGEFPAPLCELRSLALLDLSYNDLTGPLPGCLAAMPSLRHLDLAGNGFSGEVPRSYGAGFPSLLTLSLAGNELSGELPAFLANVSALEELLLAYNQFAPSPLPETFTGIRRLQVLWLAGCNLVGDIPPSIGSLKSLVNLDLSTNNLTGEIPSSIGGLESVVQLELYSNQLTGSLPEGMSALKKLRFFDAAMNQLSGEIPADLFLAPRLESLHLYQNELTGRVPATVADAAALNDLRLFTNRLVGELPPEFGKKSPLEFLDLSDNRISGEIPATLCSAGKLEQLLMLNNELVGPIPAELGQCRTLTRVRLPNNRLSGAVPPDMWGLPHLYLLELAGNALSGAVAPAIATARNLSQLLISDNRFAGALPPELGSLPNLFELSASNNVFSGPLPASLTVVTTLGRLDLRNNSLSGELPRGVRRWQKLTQLDLADNRLTGNIPAELGDLPVLNSLDLSNNELTGGVPVQLENLKLSLLNLSNNRLAGVLPPLFAGEMYKDSFLGNPGLCTGGSCSSGRRARAGRRGLVGSVTVAVAGVILLLGAAWFAHRYRSQRRWSTEDAAGEKSRWVVTSFHKAEFDEEDILSCLDDEDNVVGTGAAGKVYKAVLGNGARGGDDGAVVAVKKLWANGGAAKKAAAMEAGGGGGGGGKDTFEAEVATLGRIRHKNIVKLWCSLSSGDRRLLVYEYMPNGSLGDLLHGGKGGLLDWPARHRIMVDAAEGLSYLHHDCAPPIVHRDVKSNNILLDADLRAKVADFGVARAVSAAPPTAVSAIAGSCGYIAPEYSYTLRITEKSDVYSFGVVMLELLTGKAPAGPELGEKDLVRWVCGCVERDGVDRVLDARLAGAPRDETRRALNVALLCASSLPINRPSMRSVVKLLLELRPESKEKAMAEEKPLLV

SEQ ID NO: 50527 - protein, 228 aa, Oryza sativa
MAMSRLSFRPRPLDIHKKLPILKSAREFEDDDPTAAAVAVARAGVLLRQSAPELTAATTATEGEGNPTPTKKNIQEIPTPQFDAVDTYERDYTRTFAQPTCYIRGRGARAEIGEFVEYDLDNEDEDWLEDFNNERKNLNPEKLEVLLFKLEILDHKARERAGAITPTFIGPVPVLLQLDAAMEALQYLSVRYGVFQAVYSYWKDKRERWQKPILRRLQVSTISSVCLF

SEQ ID NO: 50528 - protein, 469 aa, Oryza sativa
MRLASLPPLWPALQPAHPTLLRHHKPVIPSQPLSGPPLSPRSSTPRRNPQFWLESPPPPPSRSAVPFSADDVSHVSESPDPRSSPTPAMPRSFADAVRLDFNPAKGDGLPVFKSPHGQPPPRPKLKSAITIPAWSTFQRRAYRATPGEEMGVRRIHGTARPGRFNGEWKEVKPRHWWRRSPHSPESQRPASRRQDAHSRRSLAPAASASLRLFRERTAGKCFNCLARDHRAARCRDPVRCFRCFRSGHKANSCSRREPRPRQPRQSPQKALRRQASTPPPPQNTSHRQASTPSPSLPRATRPRQPRQSPQNTSCRQASTPPLQLPLPPKPSCNTRMALLGDPATRPDEDHCFVPTPFATEAERKEWESSAVVSWAMRAPASTTAQDVEAAFREEFRLRRGEVTVTRHHPEAFLIKFEHSSHCYEAMRKGFVKRNGIELHFIKWRSLSAALGIALMFRVRLCLDGIPRHA

SEQ ID NO: 50529 - protein, 90 aa, Oryza sativa
MGGGGRREVAAGGDGAAQRRQRRGEGRQWRHTATASGASPPLDLAGGETVGSCGPCDEVPTGGEAVGSRSWHRAPPRQQRQAPHGGGAFE

SEQ ID NO: 50530 - protein, 911 aa, Oryza sativa
MALYRRLLLLRRLSTLHPHPSLSSSSSSTASPAAAASATHHLLPPHAPLAPHARGFAFSSAEEAAAERRRRKRRLRIEPPLHALRRDPSAPPPPRDPNAPRLPDTTSALVGPRLSLHNRVQSLIRSGDLDGASVAARAAVTSRVRPTVFTCNAVAASMVRAGRHDDAVSLFDFFFRRSNIVPNVVSYNTLILAHCEAARVDSALQVYREMLDKAPFSPSAVTYRHLTKGLVAAGRIQDALDLLREMLNRGQGADSLVYNNLIAGYIEEDNWDKAFELFEELQGRCLVYDGVVHTSFMEGYWKKGMDKEAMENYQSLLDKKFRMTPATCNVLLETLFKHDKDKEANDLWETMIDNHTPPSFIGINSESYNVMVNQCFKKCKFHEAIEVFHRQPRKNVQMDVGCFNNIIGKLCENGMLEGAEKLFEEMETKSVLPDVYTYTYLVDSCFKVGRVDDTIQYFYKMADGREHGPKFNIGFFNRMFEGLTEAGRMGDALKVYGRMPDKEIKPNTTTFETLVNALCKEGDLDKARELVSDMAKGGVTPPPEFRDSVIDIFKNAGRQEEIEKAFEEKPVPLPPQPRPEYRPRNSPQGLPGFASNQTRGSYMPHQGQPTYGSQPLHPGVGGSQAIQPQGMPLRPQQPVFGGPQVDKSEFGGRPLQHGPSAPDPRQPGVVSMTQPPNVSTPNTWQHSGVHATQGTHHGMGSPRPWQQSVGIGQVQQTDYSSGPPMQPGFGHPQPPQPMHSAPQTQQPGYGTSHPWHTGFNAPQVQQPSYGGPQSSQHAVGSTQPPQAQFGAPQAPPPLPGFHYQNRPEYGQAVDQHNRFGSPQGEPRFHTQPRQQGFDAQAPGNHALQGQNSFNARRGQVGFGNQGAPPEYGASPSQPSHGAAWNQRGYGLSEDQEDVNQQVVPHAYARVR

SEQ ID NO: 50531 - protein, 703 aa, Oryza sativa
MAGDYVDVPLGGGGQSTLPPVAPLKKQPSRLASGMKRLASMVPDTMKLKRTHSSAQPALRGLRFLDKTSAGKDGWKNVEKRFDEMSADGRLPQESFAKCIGMADSKEFASEVFVALARRRSIKPEDGITKEQLKEFWEELTDQNFDSRLRIFFDMCDKNGDGQLTEDEVKEVIVLSAAANKLAKLKSHAATYASLIMEELDPDHRGYIEIWQLETLLRGMVTAQGPPEKVKLASASLARTMVPSSHRSPMQRRFNKTVDFIHENWKRIWVLSLWAILNIALFMYKFVQYSRRDAFQVMGYCVCIAKGAAETLKLNMAVILLPVCRNTLTRLRSTALSKVVPFDDNINFHKVIALTIAIGAATHTLAHVTCDFPRLVSCPRDKFEATLGPYFNYVQPTYSSLVASTPGWTGILMILIMSFSFTLATHSFRRSVVKLPSPLHHLAGFNAFWYAHHLLVIAYILLVLHSYFIFLTKQWYNRTTWMFLAVPVLFYSCERTIRRVRESSYGVTVIKAAIYPGNVLSIHMNKPSSFKYKSGMYMFVKCPDVSPFEWHPFSITSAPGDDYLSVHIRTLGDWTTELRNLFGKACEAQVSSKKATLARLETTIIADGLKEETCFPKVFIDGPFGAPAQNYKKYDILLLIGLGIGATPFISILKDLLNNIKSNGDVQSTHDAELGCTFKSNGPGRAYFYWVTREQVPLNGLKA

SEQ ID NO: 50532 - protein, 228 aa, Oryza sativa
MAEYAVGRHAAGVPYSPAQQYLSCPNASHALLHAIAPPPPHSTCNSLGHAAHIVVVSSGNGEVAAAWRAFVRALTAVEVGHAAGGVAGGGGARDGDDGEVVAVDEAHVVEVLAAAPPEGDLEQRRRRRGAGAAALHAPAAVARLAHAGAVGVEHAPRPRPYPPRPPRRRRQLRRLPRVKPEPRRRQLWRAGAGERPRPYRVRTIVRYSERHRHGTARPRSRHCHHKKP

SEQ ID NO: 50533 - protein, 1301 aa, Oryza sativa
MDAPVSFSLGAMGPLLRKLDSLPVAPEIRLPEPLKDGIELLKEDLEEIGAALVEQSMVDSPSHRARYWMDEVRDLSYHIEDCIDTMFSMRCGGDDGKPRSVRRHKVGRVKVDGFSKTQKPCTRLARIAELRALVREASERHERYQLGDGRASSSSSSSHRVFTAHGQVPAPCRNLVGMDEPKTKLTNMLTDEAELHMKVVCILGSAGIGKTTLAEQVYRKLRWQFDCHAFVRASRKPDMRRLLGAILSQVQLRIRISDTSTVQSLIDNLWEYLQKKRYFIVIDELYETATWDIITSAFPEDNNCSRIMTTAGIEGVALECCSYHSVNIFKMIPLGLDDSAKLFFNRVFGSEQQCPYELNEVSYRITAKCGGLPLAVIIIAGLLASLPCKTELWYNIDGCLCSSVTTDIDLDEILKEIISLGYDNLPHYLKTCLLYLSLYSEGFIIWTADLLKQWISEGFIAVIDGEDIEEVAESYFYNLVNRGMIQSVKTKYNNQVLCTVHHTVFDLIIHKSKEEKFISAIDYSQTMPGNSLEARRLSFHFSNTRYATEVAGITLSQVRSFAFLGLLKCMPSIMEFKLLRVLILEFWGDNHGCMSFNVARICRLFQLRYLKISSQIIIELPAQIRGLKYLETLEIDARVTAIPSDIIHLRSLLHLYFQDGIVLPDGIGCIRSLRTLKYFDLGSNSEENIRSLGQLTNLRDLHLTCSAPKSYQQAKRNLVILASYTGKLGNLKSVKFSPGDSGMDISFLFYGIGISVDRSRTASSLPFSVRTLELPSICIFARLPDWIGQLRKLHTLNLAVRELIENDIDSLAGLPDLIVLSMHIMKAPMERIVFNRKAFPVLEYFKFICGTLRMAFQAGAMANLHRLKLGFNAHKGEKYDNILVGIEHLLNLKKIAVRIGGAAEAKESDRMAAEAALKEAIRKHLMFLDDLDIARVECVKEEYKCIKKKHKIKIEDSISEKNGDSKKQHSVEKKAVWGKTMKNIADSGVFPEDYTMSREQRVAEGFVVGIEKCRAEDAAERIIRNVPVDYDGLGQVSTSKIQDHLPELAPRAVQNEKFGSSNDLSIMIQINKYARLPSYEWRDTDISKLNFRLLRAPMLLEAVTARCHLLDLILIGSNNITVLDLGRPTITKLPASIECLPNLRYLRLQGTQLKSLSEVIVKMPTIRGLDIKNTKTEELPQGILRMKKLSHLSMGEKQKNIQVFMEKMQTLAETVQDSDDLSDETEGIADDEGEFSTRANASTPKVDEDEVDRRANNFIARFRKQITIRNSGFAKKESSIDERLWIRDLDECQLSKRGGRF

SEQ ID NO: 50534 - protein, 1081 aa, Oryza sativa
MDGDADAVKSGRHGSGQACQICGDGVGTTAEGDVFAACDVCGFPVCRPCYEYERKDGTQACPQCKTKYKRHKGSPAIRGEEGEDTDADDVSDYNYPASGSADQKQKIADRMRSWRMNAGGGGDVGRPKYDSGEIGLTKYDSGEIPRGYIPSVTNSQISGEIPGASPDHHMMSPTGNIGKRAPFPYVNHSPNPSREFSGSIGNVAWKERVDGWKLKQDKGAIPMTNGTSIAPSEGRGVGDIDASTDYNMEDALLNDETRQPLSRKVPLPSSRINPYRMVIVLRLVVLSIFLHYRITNPVRNAYPLWLLSVICEIWFALSWILDQFPKWFPINRETYLDRLALRYDREGEPSQLAAVDIFVSTVDPMKEPPLVTANTVLSILAVDYPVDKVSCYVSDDGAAMLTFDALAETSEFARKWVPFVKKYNIEPRAPEWYFSQKIDYLKDKVHPSFVKDRRAMKREYEEFKVRINGLVAKAQKVPEEGWIMQDGTPWPGNNTRDHPGMIQVFLGHSGGLDTEGNELPRLVYVSREKRPGFQHHKKAGAMNALVRVSAVLTNGQYMLNLDCDHYINNSKALREAMCFLMDPNLGRSVCYVQFPQRFDGIDRNDRYANRNTVFFDINLRGLDGIQGPVYVGTGCVFNRTALYGYEPPIKQKKKGSFLSSLCGGRKKASKSKKKSSDKKKSNKHVDSAVPVFNLEDIEEGVEGAGFDDEKSLLMSQMSLEKRFGQSAAFVASTLMEYGGVPQSATPESLLKEAIHVISCGYEDKTEWGTEIGWIYGSVTEDILTGFKMHARGWRSIYCMPKRPAFKGSAPINLSDRLNQVLRWALGSVEILFSRHCPIWYGYGGRLKFLERFAYINTTIYPLTSIPLLIYCVLPAICLLTGKFIIPEISNFASIWFISLFISIFATGILEMRWSGVGIDEWWRNEQFWVIGGISAHLFAVFQGLLKVLAGIDTNFTVTSKASDEDGDFAELYMFKWTTLLIPPTTILIINLVGVVAGISYAINSGYQSWGPLFGKLFFAFWVIVHLYPFLKGLMGRQNRTPTIVVVWAILLASIFSLLWVRIDPFTTRVTGPDTQTCGINC

SEQ ID NO: 50535 - protein, 593 aa, Oryza sativa
MALHLTAAPTIAPSAAAACRSLAPMPPLPAVSCSSRWWRGRRRCVAVVAMAAAAAADGERPHGHAAEAGTGRMNLNEYMVAVDRPLGVRFALAVDGRVFVNSLKKGGNAEKSRIIMVGDTLKKAGSREGVGFVDIRDLGDTEMVLKETSGPCDLVLERPFAPFPIHQLHQNEDYHLLFNKGRVPLTSWNGALLSSKLNESSEGNGNPGFAIFSPRLLNSHGWAVLSSEQDGLNQRSTSLANRISEIVGLYSDEDDADTEWAHGSFPLEEYIKALDRAKGELYYNHSLGMQYSKITEQIFVGSCLQTERDVKMLSETMGITAVPNFQSESERTNWGINSEAINNSCRENNILMVNYPIREVDSMDLRKKLSFCVGLLLRLIRKNYRIYVTCTTGYDRSPACVIAYLHWVQDTPLHIAHKFITGLHSCRPDRAAIVWATWDLIALVENGRHDGTPTHSVCFVWNSGREGEDVELVGDFTSNWKDKVKCDHKGGSRYEAEIRLRHGKYYYKFIAGGQWRHSTSLPTETDEHGNVNNVIRVGDIARIRPAPSQLQIRDPTVVKVIERALTEDERFLLAFAARRMAFAICPIRLSPKQ

SEQ ID NO: 50536 - protein, 568 aa, Oryza sativa
MVFFPEEVVEHILGFLASHRDRNAVSLVCREWYRVERLSRRSVLVRNCYAARPERVHARFPGLRSLSVKGRPRFVPAGWGAAARPWVAACVAACPGLEELRLKRMVVTDGCLKLLACSFPNLKSLVLVGCQGFSTDGLATVATNCRFMKELDLQESLVEDRDSRWLGCFPKPSTLLESLNFSCLTGEVNSPALEILVARSPNLRSLRLNRSVPLDVLARILCRRPRLVDLCTGSFVRGNIVGAYAGLFNSFQHCSLLKSLSGFWDATSLFIPVIAPVCKNLTCLNLSSAPMVRSAYLIEFICQCKKLQQLWVLDHIGDEGLKIVASSCIQLQELRVFPANANARASTVTEEGLVAISAGCNKLQSVLYFCQRMTNSALITVAKNCPRFTSFRLCVLDPGSADAVTGQPLDEGYGAIVQSCKGLRRLCLSGLLTDTVFLYIGMYAERLEMLSVAFAGDTDDGMTYVLNGCKNLKKLEIRDSPFGDSALLAGMHQYEAMRSLWLSSCNVTLGGCKSLAASMANLNIEVMNRAASINEADNANDAKKVKKLYIYRTVAGPRGDAPEFISTF

SEQ ID NO: 50537 - protein, 315 aa, Oryza sativa
MCLVWIMHRRKQTLGFIIHHKYTGNESNTEEELKRYQSLSPKRYRYSDLKKITKCFKEKLGEGGFGTAFKGNLKDGRMVAVKLLKGAKGNGEEFLNEVTSIGRTSHVNIVNLLGFCLERSKRALVYEYMANGSLGKYIYSESLRLAIGLESLQKIAIGVARGLEYLHQGCSTRIIHFDIKPHNVLLDEDLCPKIADFGLAKLCHLKDSAISMAEARGTIGFIAPEVFSRGFGVVSTKSDVYSYGMMLLEMVEGRKNVKTNTDNSSAYFPNWIYDHLAKDLQSHEVTCENEEIARKITLVGLWCIQTAPRKSSFNE

SEQ ID NO: 50538 - protein, 153 aa, Oryza sativa; identical to SEQ ID NO: 42734

SEQ ID NO: 50539 - protein, 119 aa, Oryza sativa
MGRPPCCDKVGVKRGAMDAGGGPDAGLLHPGARRRQLARRADQHRADALQQELPAPVDELPPAGDQAGELHRAGGEAHRPPPGSPRQPFSTIIVVHNIAMLSEYFQWIINEALHYKFLQ

SEQ ID NO: 50540 - protein, 127 aa, Oryza sativa
MQSPLRLTLPSGAIYGMPWPSPTVQIPRSAPPQTLWHLLARWSHYQHWQRRILWHGEGSGVSSVSWQVTQWLKGSTSGHESEVAAEQQGDGAGERQPQLALLLQHVLGQRRRKGKIETWSGRSKVQV

SEQ ID NO: 50541 - protein, 66 aa, Oryza sativa
MYAIGRFSSCIVRGTATRRPHVSRAGNRAPHAHARRCCDQAARSQTTRASRTRPTSVYVLISIKSD

SEQ ID NO: 50542 - protein, 486 aa, Oryza sativa
MTKDDAVPVAVAPAKRPPINKYAFGCALLASMNSVLLGYDISVMSGAQIFMKEDLKITDTQIEILAGVINIYSLFGSLAAGMTSDWLGRRYTMVLAAAIFFTGALLMGLAPNYAFLMAGRFVAGIGVGYALMIAPVYTAEVAPTSARGFLTSFPEVFNNSGILLGYVSNFAFARLPVHLSWRAMFLVGAVPPIFLGIAVLAMPESPRWLVMRGRIEDARRVLLKTSDSPDEAEDRLLDIKKAVGIPEDASDGEDVVAIVRANKASQGEGVWKELLLNPTRPVRRMLVAGLGLMFIQQATGVDCVVMYSPRVFERAGIKSKTNSLGASMAVGVCKTFFIPIATLLLDRVGRRPLLLASGGGMAIFLFTLATSLLMMDRRPEGEAKALGAISIAAMLSFVASFASGLGPVAWVYTSEIYPVRLRAQAAAIGTGLNRLMSGATTMSFLSLSNAITIGGASTCTRPSPPQGGCSCTSSCRRPRARAWRTP

SEQ ID NO: 50543 - protein, 248 aa, Oryza sativa
MFSASDMARRFSVSASVFSFSAAAASSSSCRRIAASLEMVSSALSSAAVTASRRDLALSSLAFSCCTCALAAFSCSVRRRISSVTRAVSLRVRSMDAVNRRPSALMDSSSILAELSSASAACSDGSSCSTSCPLDAIAVASVARTTASSLCQDPASELAVAAVPTASSTRTPCSSLAPSASRSTPPPPRGPELTALDVDASASASLLPAVPFAAIAAITSRCSLRSSPLTRSSSCITSPYAVPTPSWR

SEQ ID NO: 50544 - protein, 697 aa, Oryza sativa
MSSSSNALVQHYYSCKPPPPPRLVLVPFFFSGSGSGTNNTASSPAAASSTHTHTHTADANAQLDAHLLSLLRDGHTDAAYHLFASNPSLPLSPVSASRLLAQLSYSSFSRASALLHRLRARQALHLLDANSLSLASSASARSNNPHLAYSLLLSMLRRGLLPDRRAYTAALARLPPSRALRLFDALLHHLRHHHNKTNSLPDTAAFNAALSACANAGDCIRFRHLFDQMPAWNAPPDALTYNVLIKMCARAGRKDLVARVLHRILSSGLTPCATTFHSLVAAYVGFGDIPTAERIVQAMRERRTDICLLFRAVADDHIISHDQQSCVLEDIVKPWEQEEVPLLPKAYPPNSRVYTTLMKGYMNAGRVEDVVAMLRAMRREGETSPASRPDHVTYTTVISTLVAAGDMERARAVLEEMGQAGVAASRVTYNVLIKGYCQQLQAGKAKELLAVDMAEAGIQPDVVTYNTLIDGCVLTDDSAGAVALFNEMRERGIAPSAVSYTTLMKAFAASGQPELAHKVFDEMEKDPRVAVDRAAWNMLVEAYCRLGLLESAKKVVERMKARGVQPDVATYGSLAKGIAVARRPGEALLLWEEIKEKEVDGEVVEALADVCVRAALFRKALEMVARMEEMGVEPNKAKYKRMYVDLHSRMFTSKHASQARQDRRRERKRAAEAFKFWLGLPNSYYATDWRLQDDGLN

SEQ ID NO: 50545 - protein, 166 aa, Oryza sativa
MIDFSYIANQVNERYTMRLRKRIQHEERKCANQRRLLSDAETVRWLNYAVEKIWPVCMERVESEQFLLPIFPWFLEKFKPWTARKAVIQDLYLGRNPPMFTDIRVVRQSTDDDHLVLEIGMNFLSADDMNATMAVQLRKRLGFGITANMHITGMHVEGKNLCLHRS

SEQ ID NO: 50546 - protein, 276 aa, Oryza sativa
MPSSQPTSHEFLNMPSSQPSSHEFSNIKSSQTTSHEFSNVQTSQLASHEFSNPSDLEENPTANAAFMTQPKGSEHIPTPFAQPSMPVSPNEKKHFVPFASPPPFAVPSLVEKNESIPSPSPSPPVKPTDPGMFRTIDEVTPPPTATDYLFSKQPEQLHSTSAENIANIDLDDVLSAAQTAAETAERAASAARAAANLAQLRIADLKKNSKAYENYSDSVRKESHPQSEVTQKPVFDHQDSFSSDTQGYVPSHLPQRSPLMEDDPYFSYPNLFSSKP

SEQ ID NO: 50547 - protein, 536 aa, Oryza sativa
MEQEENHSADHLSAQPGNGNELEESSVKERCFEQREALVGEPRCVICGRYGEYICDQTDDDICSVECKTILLSKLSAETRPVVKAAKRVNLPVGDESFCIRDENFPKIPSMHDGQIASLRSKLDICVKGEDVPDPIMCFSSSGLPEKLVLNLEAAGYVMPTPVQMQVIPSSICNRSLLVSADTGSGKTASFLVPIIAHCSHVRSERCTDKQGPLAIVLAPTRELCLQVEEQAKVLGKGLPFKTALVVGGDPLAQQIYRIENGIELIVGTPGRLIDLLMKHNVDLNKVDVFVLDEVDCLLERGFRDQVMQIFQALSHPQVMMFSATVNSEVEKMSNSLAKNAIHISCGNPSRPNKSVKQVVIWVESKQKKQKIFEIMTSKQHFKPPAVVFVSSRIGADLLSEAITVATGLKVVSIHGDKTMNERRESLRRFLTGEVSVVVCTGVLGRGMDLLKVRQVILFDMPNSIDEYVHQVGRASRMGVEGMAIVFVNEEDRNLFRELVQILKTAGAPIPRELANSKYTTGIPLGGGKKRKLKSR

SEQ ID NO: 50548 - protein, 617 aa, Oryza sativa
MSSAFGDFGPLTERRRAEKARQQRRRIMIALGTVSIIIILIVMGAAAITYSGKKSEEDEGGSKGSSKGKSKGGGGGDDEDGGGGGGKADLRAVSKSIKMMCAQTDFADSCATSIGKAANASVSSPKDIIRTAVDVIGGAVDQAFDRADLIMSNDPRVKAAVADCKELFDDAKDDLNCTLKGIDGKDGLKQGFQLRVWLSAVIANMETCIDGFPDGEFRDKVKESFNNGREFTSNALALIEKASSFLSALKGSQRRLLAGEEDNGGGAADPHLALAEDGIPEWVPDGDRRVLKGGGFKNNLTPNVIVAKDGSGKFKTINEALAAMPKTYSGRYVIYVKEGVYAEYVTITKKMASVTMYGDGSRKSIVTGSKNFADGLTTFKTATFAAQGDGFMAIGMGFQNTAGAAKHQAVALLVQSDKSVFLNCWMDGFQDTLYAHSKAQFYRNCVITGTIDFVFGDAAAVFQNCVLTLRRPMDNQQNIATAQGRADGREATGFVLQKCEFNAEPALTDAKLPPIRNYLGRPWREFSRTVIMESDIPAIIDKAGYMPWNGEFALKTLYYAEYANKGPGADTAGRVAWPGYKKVISKADATKFTVDNFLHAKPWIDPTGTPVKYDFFT

SEQ ID NO: 50549 - protein, 1073 aa, Oryza sativa
MLLTGGCVDTVDAAAPEGDTPTPPHQAVVELVEMKVFAALDDAADHDPGRWIMDSGASNHMTGSRMAFADLDTNITGNVRLGDGSVVRIAGRGTILFACKNEDGIMRVWDEQRRLLARIPRTPGRLYMLDINLARPVCLAAHADEDAWRWHARLGHINFRALCKMGKEELVRGLPCLSQVDQVCEACLARKHRRSPFPRQALCRSDEPLALLHGDLCGPITPATPSGNRYFLLLVDDYSRYMWVALLSTKDAAPAAIKRIQAVAERKSGRKLRALRTDRGGEFTSTQFAEYCAELGMRRELTAPYSPQQNGVVERRNQSVVGTARSMLKVKGLPGMFWGEAINTAVYLLNRSSSKGIGGKTPYALWNGVPPAVHHLRTFGCVAHVKTTTPNLKKLDDRSRPMIFVGYEPGSKAYRAYDPATRRVHISRDIVFDEAAQWDWDAEAAADLDTDFVVEYTTVYHPGSLSGTRQDAGEPPARSSSSPQTPSDSPTAGRTPSVHGDAPAVEFVSPPTGAAANLDADHDDAPLRFRTMDNVLGPAMLPGLANREVQEELMMVSGEEPATFAQAERDEDWRRAMLDEISSIEENKTWRLVDLPSGHRPIGLKWVYKLKKDAQGVVVKHKARLVAKGYVQRAGIDFDEVFAPVARLDSVRLLLALAAQEGWMVHHMDVKSAFLNGELIEEVYVVQPPGFEIDGQENKVYRLDKALYGLRQAPRAWNTKLDCTLKKLGFKQSPLEHGLYARGDGSGRLLVGVYVDDLVIVGGDSGMIKGFKEQMKAEFKMSDLGPLSFYLGIEVHQEAGIITLKQAAYASRIVEKAGLTGCNPCATPMEPRLKLSKESAGSLVDATEYRSLVGSLRYLVNTRPDLAYSVGYVSRFMEKPTDEHLAAVKRIIRYVAGTIHLGCRYVKEVEGGLQGYSDSDMAGDIDTRKSTTGVIFFLGKNPVSWQSQKQRVVALSSCESEYIAAATAACQGIWLARLLGDLRNAATEVVDLRVDNQSALALMKNPVFHDRSKHIQTKFHFIREAVENGEITPSYIGTEGQLADILTKPLSRNQVSGACGKKKRNYIHTCVFS

SEQ ID NO: 50550 - protein, 265 aa, Oryza sativa
MWCCTCLWTSDDYSKSCPGYIEPVLVILHEQEPTWAGRILSKHHTCMISAFSISMTLKQHPVIWSAANLPHDAYQLLAVPPPISGVLVICANSIHYHSQSTSCSLDLNNFSSHPDGSPEISKSNFQVELDAAKATWLSNDIVMFSTKAGEMLLLTVVYDGRVVQRLDLMKSKASVLSSAVTSIGNSFFFLGSRLGDSLLVQFSYCASKSVLQDLTNERSADIEGDLPFSKRLKRIPSDVLQDVTSVEELSFQNIIAPNSLESAQV

SEQ ID NO: 50551 - protein, 173 aa, Oryza sativa
MYWAIADQRATEMEKELVGSRAAIHRSIIIWPGRAQADWSRRGSSDVFRSGLQLRGSDSEFRTRICSSSFLFPSLLFDSTRTRPPPALHQPRSTGFLPLYSIHFSGLSPSAMVSFVCFVLFHFLVEIRSSLPSYNMNLLISFLLRFLTRSFLFCQTFLSQSRFTWIYLMSSRS

SEQ ID NO: 50552 - protein, 90 aa, Oryza sativa
MPPPPCCRRSAASLPELCRSSAGLLLGAAAGAGLGPSSNLNRDLPRSMQSSGLQRSTLDCQMARSSRSAAKATTPRSCGSGCSAAEALQP

SEQ ID NO: 50553 - protein, 312 aa, Oryza sativa
MDFFKIKKLGKARKSGGGGGEVVESEEETKAGNNAASDEQKGKILEDDPAAAAAGAGMDADAGNGAVEGQEEDDDDDDFITNEVKRRLKELRKNSFMVLIPEEECAEVEEDGEEEEEEGSSSREWMESDVGDGFPLCGFDSLYEKYCERMAVFDKMITQLLKDPGSFNISKKSPRSASKLASTLRNLSFKRRDDLQEDCEHLQQQQSEDDPYQTLETAYVGHVSLSWEALHCMYVHLSLILAAQPDNPTTYSCAAQAFQQFQVLLQRFVENEPFEQGSRVEIYARSRSSLSKLLQVPTFQGMIFRFAIFKRT

SEQ ID NO: 50554 - protein, 340 aa, Oryza sativa
MGASPSRPLEQSPSSSEGENHRVKYASYTTQGFRPHMEDALAVELDLDATTSFFGVYDGHGGAEVAMYCAKRFHTMLLEDVDYINNLPNAITSVCFRLDDDLQRSNEWRESLNPCANRNCLTNICANLHHFTEDYVPPSYEGSTACVVIIRGNQIIVGNVGDSRCVLSKNGQAISLSFDHKPHHEAERERIQRAGGHVFLQRILGMLATSRAIGDFAYKQNRNMPPSQQMVTCVPDIRVENITDDTEFLVIASDGVWDGMRNNNVVQFVRQELRPGEENLRETCEKLVGHCLHSNDNATAILVKFKPIEEDPDEVASARDEHQHNPEGGDEKLDINNDND

SEQ ID NO: 50555 - protein, 141 aa, Oryza sativa
MGIPIYLLLSNVYFSAQILMILFSSNLSVHIFVQEYFFWSAYRDKFWQGSMSVDKSWMRMSRATAEWQKGLQEFLNFAFQDDNPGDNAPCPCRRCLNVVHKTRSEVQSDLLRNGFDESYIQWVYHGEDSDDDNVTGRFRRT

SEQ ID NO: 50556 - protein, 630 aa, Oryza sativa
MAMKRVVFLLLLVAASALVKSSRGGGGGEEKLGKFYGWRRHLSSGPAASSLVLSGDLVDKIWSVCLQDIVSPEDTFGFGESFAWDELSSHSTEDELKATLFMELMALLPPEKSSFTYDCIRANCFSLGVPQIFSVALSNYLESQKSLVGSNFYPRRRLVDKLIGDAPSMAPAFAPSMSSGGEVHSPLSVAEAPLTPSNSLNMEPPSPYYPSKSAHKHQGVAPPVSPSEEYHDYMKVVLIAVLPTAALSFLAAFLCFYCCGCNKSKVSVGEQRDDHPLLHLQFSNLPGSSPDVHVPASPLHKDDHGVRPSNAGVSMSKCFPCCFKTSSDATTPTLVTGGTQENNATSDAPKLMPPPPPPPPPPPPPPPPPPPRPPPPPPPIKKGAPPPAPPKATMARFPKLSPTESSRSEESSASELASESSETEVNAPRAKLRPFYWDKVLANPDQSMAWHDIKFGSFHVNEEMIEELFGYGAGNQNNVKDKEISIADPSPQHVSLLDVKKSCNLAVVFKAMNVRAEEIHDALVEGNELPRLLLETILRMKPTDEEEQKLRLYNGDCSQLGLAEQVMKALIDIPFAFERIRALLFMSSLQEDASSLRESFLQLEAACGELKHRPFSETTRSHSQNWKSFE

SEQ ID NO: 50557 - protein, 91 aa, Oryza sativa
MELKNAFSTSTEAFLLRAHRRPSCRGTAVAPQTACHLRCIRCSSPCLPPLLSILQLLVVPPLAEAGNLYLSCSALFVDEVMVFGGHLAMDL

SEQ ID NO: 50558 - protein, 437 aa, Oryza sativa
MTLRPLNTERSFLLSSPKPHSPRDACSPPVRSPSSTRLLACRKLPSSSKPMATGAGVLERSLSFKNWEPTAAEEAAVAAPPPHDEAASRCINGARPGILLLQQSPKAKQGDAATSPAQAALIEFISPKPRSELDQAATKVQKLFKGHRTRRNLADCAIVVEELWWKAYDSACLNIKSISFFDEAKQETAASRWSRAGKRIAKVGKGLSKNEKAQKLALQHWLEAIDPRHRYGHNLHLYYDIWSASSSTEPFFYWLDVGAGRDMHHQKCPRSKLYSQLIMYLGPNEREAFEVVVEGGKLMYRKSGVLVNTTEDSKWIFVLSTTRSLYVGQKKKGKFQHSSFLAGAATTAAGRLVAKDGFFRRYGHTAVTTSQQKRTSESSSASWRRTVLILPMSRDVRSMTMNSRHSRRQRRNQRKLRSLLNPHMMRSWTAHKLSCLR

SEQ ID NO: 50559 - protein, 106 aa, Oryza sativa
MENEIYGILGCCNKIGLLCIIASCSWNSLNRHETCCTLAYEKKNAIVQNQEGRKQGRIKSIKLDKMVLYYLSHANLCNTEVTFMLNGFMCCISEKNDSLVMGRLSS

SEQ ID NO: 50560 - protein, 316 aa, Oryza sativa; identical to SEQ ID NO: 31656

SEQ ID NO: 50561 - protein, 98 aa, Oryza sativa
MHIVFENELGGSLRTLPVSIRFKPNHMTVLTQSIQYFQNAEMKGSKQPRRSMDENTNMISSFHRTYGVYVKLKKNSYMVRGTKMMILVNYNLNMWPIS

SEQ ID NO: 50562 - protein, 591 aa, Oryza sativa
MDQYEVLEQIGKGAFGSALLVRHKLEKKKYVLKKIRLARQTDRTRRSAHQEMQLIATVRNPFIVEYKDSWVEKGCYVCIVIGYCEGGDMAEAIKRANGTYFSEEKLCKWLVQLLMALDYLHANHILHRDVKCSNIFIARDQSIRLGDFGLAKILTSDDLASSVVGTPSYMCPELLADIPYGTKSDIWSLGCCIYEMTALRPAFKAFDMQALINKITKSIVSPLPTKYSGAFRGLIKSMLRKSPEHRPSAAQLLKHPQLQPYVLQVQLKSSPTRNILPIHQSLTDKVKKMTFPSDVVDSARRRMARRNSLGNERTVTFSKPSPERNSVSSTRSIKEYTTTQSVKGLSVDSSEAGDEVTSKAIITKTSSILRTPKSLPAKTYTARNQLEPPKTSYNRTYRSELPSKTTPNKIARPARRASLPLSTYETPTKRSISILEQLDSPDVSVNAPRIDRIAEFPLASSEDPLLPIHNKLSPGHGSCSTPPFINRSITKDKCTIQVLRTDGDNGSDSSGRNATAASSRGSNDSRQQRFDTSSFQQRAEALEGLLEFSAQLLQQERYEELGILLKPFGPEKASPRETAIWLTKSFKETAS

SEQ ID NO: 50563 - protein, 649 aa, Oryza sativa
MGRGAPSSHPPPWRRLLRYALLCALLPPWGTSEANEQLAEFPPRGWNSYDSFSWIVDENTYMQNAEILAEKLLPHGYEFAVIDYLWYRKYVHGAYTDSYGFDNIDEWGRPFPDLQRFPSSRIDKGFSQLANKVHGMGLKFGIHLMEGISLQAVNGNTPILDIKTGKPYVEDGRQWTARDIGLTHRTCAWMPHGFMSVNTDIGAGKAFLRSLYQQYADWGVDFVKVDCIFGTDYSPKEIITISELLAELDRPIILSISPGTEVTPALAKNISQHVNMYRITGDDWDNWKDVSSHFDVSSSFAAANKIGAIGLRGRSWPDLDMLPFGWLTNAGVNQGPHRQCELTSDEQRTQIALWSMAKSPLMYGGDLRHLDNDTLSIITNPTLLKINHYSINNMEFHHVHSERTSKEDKHSSRFISEDLVHVPKIDGVSLGLTACSDDKANGWYMFSQHGKSDHICRDYGMQDDKNISFCLGKTIPLLTSDDIIVHNEEYQTKFHLANMDSDDACLDASGSQRRTSSDSKFPMFSRCRWHAMQMWELNEKGNLISSYSRLCATVESNNKGVVTTGAVARAWIATGSKGEIYLAFFNLDSMSRKITARISDLEKVLGSTFIRKDTCSCTEVWSGRNFGRVEEEISAVVKSHGSMVFEITC

SEQ ID NO: 50564 - protein, 131 aa, Oryza sativa
MSCILVIQTYLMLQSPTNYDQTTVWSYCIWFLPHQWYFCHSWVLYTFWGWEYYLRNCYCIDLAGWLYALLCLILSAAHITFSTLKLLTSVNVYLFIEVLKDSLSKFVVHWTQAYLSVLPEKKMFCQCELFL

SEQ ID NO: 50565 - protein, 205 aa, Oryza sativa
MMASFYNAVQRPREQIADAETLLDIANTLVTSVRSQSSEGITPSDFVTAMLKKFGQSGGLDSEAASLRWGDVGLSVSHVFRAAPGCCTMLGPMNTEVKQRKAVVANRKRTARPTENARPEQLAESLEGVKTDTDRNVSVIFDILRRNKRARLENIVLNRRSFAQTVENVFALSFLVKDGRVAINIDDNGHHIVCKTLFRCPHLFP

SEQ ID NO: 50566 - protein, 397 aa, Oryza sativa
MAPTLPVVPAHGEDKKKKKKKKKPLKPSQEEEEALPLPLPPPDRKRKKASEPVNSPERAKKKKTATPHEPPSAKQQKRPLPFQRTWSPNDEVLILEAMAAHRQEHGKVPTAAELFPVLNGRLDRKRLTYKKLADKLRTFMRRHGRDAKNGPPTQAHDRRLYDLSRNVWVSQTQPPNLSANANSNIAGGQPNQHDAMPTAGKAFDKMRDSYPNLTQALLLLVGTDLEKALTAIDETKAQALDLKVSNLKKELSEAVMESATIQSTESSKIPCFPSTKLQPEFGAEIEKNFQLEHLDEMKGTQVKLARMEQEILELKQNFLAFQSQQMADSKQQHDKSSAKGIICESSESGLRSIVADNNILCNTLQKEMVVQQKLSCGKTKEVTSKHRHPQKLVVFPF

SEQ ID NO: 50567 - protein, 15 aa, Oryza sativa
MFVYLYENMFCSHVQ

SEQ ID NO: 50568 - protein, 88 aa, Oryza sativa
MDLGLPDLKIFKVISISQPRSLFKCAPPLLLPQVSSYASFLLLTFILLFMNNSCLYLTEPQYHPPQSDDGLVINYFLFDFYKFTYPWN

SEQ ID NO: 50569 - protein, 408 aa, Oryza sativa
MVNHFVQEFKRKNKKDITGNPRALRRLRTACERAKRTLSSTAQATIEIDSLYEGIDFYTTITRARFEELNMDLFRKCMEPVEKCLRDAKMDKSTVHDVVLVGGSTRIPRVQQLLQDFFNGKELCKSINPDEAVAYGAAVQAAILTGEGNEKVQDLLLLDVTPLSQGLETAGGVMTVLIPRNTTIPTKKEQVFSTYSDNQPGVLIQVYEGERTRTKDNNLLGKFELSGIPPAPRGVPQITVCFDIDANGILNVSAEDKTTGQKNKITITNDKGRLSKEDIEKMVQEAEKYKAEDEEHKKKVDAKNSLENYAYNMRNTIKDDKIASKLPEADKKKIEDAIDGAISWLDSNQLAEAEEFEDKMKELEGVCNPIIAKMYQGAGADMAGGMDEDAPAAAGGSSGPGPKIEEVD

SEQ ID NO: 50570 - protein, 733 aa, Oryza sativa
MEVYRNLLLLPLLLALVAAAASAAGDERAVLEVSGSPEGVVWVVQLSDLHFSVHHPDRAYDFRRYVGPALAMVNPALVLITGDLTDGKSKDLLTMKQNEMEWIEYRSKLKDVIESSKLPRSIFYDLRGNHDSFGVPSPGGDHDFYQKYSINAILRRHSRVQSITLENSGRKHLFVGFDSTMEIGLRGPTNLFGHPTDKQLIELDQSLSQWDTDFNKAQVTKVAFGHFPMSFSTLTESGKSIKDVFLKHSLAAYLCGHLHTRFGKNLKRYYHRSTEGSPLSEHYYQFNMHQGYEIHSDKESCSKEAVHAEEEFWEWEMGDWRKSRSMRILAIDDGYVSYTDIDFRLGSKSIIVLPTFPLDSRFMQRATASRDFKCQVMGASTFDTVRALVFSRHEIVSVSVKIYDSRSGHLDVVFDSEMKRVNANETRGDMYLVPWNWRAFADPSLNRYWLQIEVMDITGDASVSQLRPFSVNGFASKVSWTWKEFFVMGIQWALVYHPALWCVLALIFSLLLVPRASVLLFKDQFTYKYLRPNGSQWVSLKYLIGGFIWLFVEFSRVTIVWSLLLVYMIYLLVFPWLFGHPITEDSNLASMTFRGWILGKSNSGSEVLHAGTPDVMVIVLPHLCFVVLPTIVILAAMAAERTAYREQYLSQSGKKKDDHYQKSRRQKEHDNFWNSRWTRKFLFLLCLAVLWKHWKHCRALVKAYAMNPVIHSPVHFFFIPVLIAFAIYKTSSL

SEQ ID NO: 50571 - protein, 469 aa, Oryza sativa
MHMMRRLKSIASGRSSVSDPGGDSGTKRPKFDQDGAGDIVIEPHLTDDKPMRVDQESSSSHRDAEASTSTSKNPGRTEEAGADILPKEMNEMTISDDKVDGHNDKESEGVIVNANGTETGQIIVTSIGGQNGKPKQKVSYMAERVVGTGSFGVVFQAKCLETGETVAIKKVLQDKRYKNRELQTMQLLDHPNVVQLKHHFFSTTERGEVYLNLVLVYVSETVYRVAKYYNRMNQRVPILHVKLYAYQMCRALAYIHRVVGVCHRDIKPQNLLVNPHTHQLKLCDFGSAKKLVPGEPNISYICSRYYRAPELIFGATEYTTAIDIWSVGCVLAELLIGQPLFPGESGVDQLVEIIKILGTPTREEIRCMNPNYSEFKFPQIKAHPWHKLFGKRMPPEAVDLVSRLLQYSPNLRCTAVDACAHPFFDELRDPKTCLSNGRSLPPLFDFSAAELEGLPVELVHRIIPEHMRK

SEQ ID NO: 50572 - protein, 258 aa, Oryza sativa
MGFRKVDPDRWEFANEGFLRGQRHLLKTIKRRKPPSNAPPSQQQSLTSCLEVGEFGFEEEIDRLKRDKNILITEVVKLRQEQQATKDHVKAMEDRLRAAEQKQVQMMGFLARAMRNPEFFQQLAQQKEKRKELEDAISKKRRRPIDNVPFYDPGETSQTEQLDSPYLFDSGVLNELSEPGIPELENLAVNIQDLGKGKVDEERQNQTNGQAELGDDFWAELLVEDFTGKEEQSELDGKIDGIDELAQQLGYLSSTSPK

SEQ ID NO: 50573 - protein, 602 aa, Oryza sativa
MEAPANSVAVADGNPKTATETPRVEDYKDAAMYYGTYPAYLYGAYGGWGEYSTYLSHDGAETPTAGAYGDMYYGYSPYGYSTSGHDSQMYGSQHYQYQPTYNKQQNTTGKPSNNGKTENPAALPQGDVSANGVDSLKGQKKTNLLPKASQNTPGSNGSYGRPSGRFGNYQNQTNRTTYPCYSSQIFNGKQQKLPTGNRSLTTSNSKSKGQSRNQNTYPHLMGLQTPTSPLGPPSIYSASGMYGYNGSSYGSGLWYGSHLYGSGLYGGWNALSDGKYNPRGRGNGSYGYIHGNQDGFNELRRGPRSGLFNNQQGVGATVAPVKGQELSASDSSLSVMKDQYNRADFVETYSDAKFFIIKSYSEDDVHKSIKYNVWASTSNGNKRLDAAYQEAKEKSSDSSVFLLFSVNASGQFVGLAEMVGRVDFNKTLEHWQQDKWTGCFPVKWHIVKDVPNSLLKHIILENNENKPVTNCRDTHEVKLEPGLQVLKIFKDHVCKTSLLDDFDFYDNREKMMQERKAKHQQLKKVVDEKLLNAVDTENSLLTVKSKLQETAEVEIDVLNKEPHGKAGRVDGKENGVLAVSVNGVTPEDVQLTNEKLASLSVC

SEQ ID NO: 50574 - protein, 283 aa, Oryza sativa
MYEENSRDAWQLVDEFLMDEQFSSLSQHLLIHLDEQRLLNFLRALGKLIKLNSQCKEMVFPCCWLEVLLSAHSDHISLDELVLLNCVISKGRQLWRLMNDEEQEEEQGQMQELLKSTNQLTDADHFALMKGFVDTELPDALKWIGIQSWLVFCELSKGCKSADSCEHLFTCNRIEFRKADDYPLVQNDGNSIALDSDDEDLIRGSHKRRKRDRKRKRRRYDSDEDDLDQLLELGTSNRRGIESHHGCWYLSTDGFSASWDIADIPDHLSSHYLKTWLKFACFR

SEQ ID NO: 50575 - protein, 547 aa, Oryza sativa
MLWKCLSTALSQSLPKQSLMRATRTTHKGGVSAVLCPSDSVESHMQDTIVAGAYLCDEETVRVVCTEGPERVKELIAMGASFDHGEDGRLHLAREGGHSHNRIVHSADMTGREIERALLQAVDNDDNISLFGHHFAIDLLTCQSNGEIYCYGVDSLDAETQKAIRFISKVTLLASGGVGHIYPSTTNPPVATGDGIAMSHRAQAVISNMEFVQFHPTALSDEGLPIKPATRRENAFLITEAVRGDGGILYNQSMERFMTSYDDRAELAPRDVVARSIDDQLKKRGEKYVLLDISHKPREKVLAHFPNIAAECLRHGLDITQQPIPVVPAAHYMCGGVRAGLQGETNVKGLYVAGEVACTGLHGANRLASNSLLEALVFARRAVQPSIDHMVDADVDPSFAKKWARPVLSVSLRDSILSDIIEKTKQARMELQSIMWEYVGIVRSTNRLKHAEWKISDLESEWEEFLFRRGWKPTMVGVETCEMRNLFCCAKLVVKSALARHESRGLHFTEDFPYLEESKRKPTVIFPTHIQELTWSSKPLQKQLQCK

SEQ ID NO: 50576 - protein, 524 aa, Oryza sativa
MKGGGGGGKEAVTASILRFLLLLLLPLTALYFFYTLHLLLASAASSSSSSCPPDAASSSSSVRLSTNGTSAGAAAVTVAAGKKAPAAASTETTLQHVVFGIAASSRFWDKRKEYIKVWWRPRGAMRGYVWLDREVRESNMSTARTGLPAIRISSDTSGFPYTHRRGHRSAIRISRIVSETFRLGLPGVRWFVMGDDDTVFFPDNLLTVLNKFDHRQPYYIGSLSESHLQNIYFSYGMAYGGGGFAISRPLAEALARMQDGCIRRYPALYGSDDRIQACMAELGVPLTKHPGFHQYDVYGDLLGLLAAHPVAPIVTLHHLDVVQPLFPNAKSRPAAVRRLFDGPIELDPAGIMQQSICYDGGNRWTVSVAWGFAVLVSRGVMSPREMEMPARTFLNWYRRADYTAYAFNTRPLARSPCQKPAVYYLSSARRAAALRGGDTTVTRYERWRRANETRPACRWNIADPDAHLDHIVVLKKPDPGLWDRSPRRNCCRVLSSPKEGKKGGDKTMTIDVGVCRDGEFSQVV

SEQ ID NO: 50577 - protein, 612 aa, Oryza sativa
MLRMDGTDLSSPRCNVQHLQNAEELKDQNSTNKRLPRTTELPCSLIQEVQHLEKRLNDQFAMRRALEKALGYKPCAIHSSNESCIPKPTEELIKEIAVLELEVICLEQHLLALYRKAFDQQICSVSSSCDMEINKQSARSFSGILTGSSELDFSTPRKHQLLQSSGMVMARKSTPTTLTSETRTSHYNDKTGIGRSHSSLLQRSICSARVSPSANNLARALKPCHTLPLSFVEEGKCMDPGIVSLADILGTRIADHVPQTPNKISEDMIKCIASIYIRIRDFNAVQHPFFPSPCSSFSSASGLSSKYTGDIWSPRCRKEGYIEAWQDDALGTGESRYFSQQYDSVIEVSALCKGAQRSADVKDMLHKYKSLVQLLESADLNGMKNEEKIAFWINVHNAMMMHAHIEYGIPQSNSKRILLTKLSYLISGQRVNPELIEYHILCCRVHSPTQWLRLLLYPKWKSKEKEDLQGFAVDRPEPLVHFALSSGSHSDPVVRLYRPERLLQQLEAARDEFVRANVGVRGGRRGRGRRVLLLLPKLLEPYSRDAGLGAHDLLRAVESCLPEPLRPAAQQAARSRGGGGGVEWRPHNPAFRYLLARELVGPPAPTAHLSST

SEQ ID NO: 50578 - protein, 578 aa, Oryza sativa; identical to SEQ ID NO: 31247

SEQ ID NO: 50579 - protein, 524 aa, Oryza sativa
MSMIAATLRRSSRVTGSQNIMEICLGPCVSSGASSRWFSSCTKHSNTSILNQIKAVDRYSPVNGMSVISRVPLSAHMDTNWLSTSNPRFNALPGFLGASSICRAYSSDTGIKAEVPQNTVSNVPSTETVALGTSDGGSSWIDIFDNARKCTLDATTDAGKKVKELTDAITPHVQQFFDANPNLEKVVVPLGGTIFGTMMAWFVMPIVLRRIHKYSIQSPISALLGSSTKNDVSYETSLWSALEDPAKYLITFMAFSEMAGFTAPSISAYLPQAWRGAIVLSFVWFLHRWKTNFITKVAASSIDQTRLSAFDKISSLGLIALGVMALAEACGVAAQSILTIGGVGGVATAFAARDVLGNMLSGFSLQFSSPFRAGEYIKAGSIEGKVIEIGLTSTELMNPEQLPVTVPNSLFSSQVIVNRSRAKWRSNVTKIPIRIEDIEKVPAISEEIKVMLRSNPKVVLDSEAPAPYCYLSRLESSYGELTIGCNLTKMTKDEWLSTTQGILLEAAKIIKLHGVELGSTTQCC

SEQ ID NO: 50580 - protein, 504 aa, Oryza sativa
MFRSPAAAAASALLRRLGPRVSGGGGGASTHRRFAPPVSTSILSRYSSAPTSSPSPPPPPPPPPSDAAADGDNRAESGEPGSSLSITIDRSGLYNPPEHSHEPSSDSELVKHLKSIIKFRSGPISVAEYMEEVLTNPQSGFYINRDVFGTSGDFITSPEVSQMFGEMTGVWAMCLWEQMGQPEKVNLIELGPGRGTLLADLLRGSSKFVNFTKALNINLVECSPTLQKVQYNTLKCEDEPIGDKTRTVSKLCGAPVHWHASLEQVPSGLPTIIIAHEFYDALPIHQFQKASRGWCEKMVDLAEDSSFRFVLSPQPTASLLFLSKRCGWASSEELEKVEHIEVCPKAMEITEQIADRISSDGGGALIIDYGKDGIVSDSLQAIRKHKFVHILDNPGSADLSAYVDFASIRHSAKEASDDISVHGPMTQSQFLGSLGINFRVEALLQNCATDEQAESLRTGYWRLVGDGEAPFWEGPDDQTPIGMGTRYLAMAIVNKKQGTPVPFE

SEQ ID NO: 50581 - protein, 268 aa, Oryza sativa
MEINRLRCRVNYHALKFLPEIEEMAEKLATRMRNRTGNVNPYMALHLRFEKGMVGLSFCDFAGTREEKAMMADYRQKQWPRRFKNGSHLWSLALEKRKEGRCPLEPGEIGIILRAMGYTKETQIYVASGQVYGGSNRMAPLRNMFPNLVTKEDLASKEEIEHFKKHVTSLAALDFLVCLKSDVFVMTHGGNFAKLIIGFRRYMGRHRLKSIKPDKGLMSKFFGDPYMPWATFVEDVMITHQTRTGLPESTFPHYDLWENPLTPCMCRA

SEQ ID NO: 50582 - protein, 270 aa, Oryza sativa; identical to SEQ ID NO: 46103

SEQ ID NO: 50583 - protein, 736 aa, Oryza sativa
MSGGGPPKKRNFKIELFKHRVELDPKYAERTWKVLEHAIHEIYNHNASGLSFEELYRSAYNMVLHKYGEKLYDGLERTMTWRLKEISKSIEAAQGGLFLEELNAKWMDHNKALQMIRDILMYMDRTYVPQSRRTPVHELGLNLWRDHIIHSPMIHSRLLDTLLDLIHRERMGEMINRGLMRSITKMLMDLGAAVYQDDFEKPFLDVTASFYSGESQEFIECCDCGNYLKKSERRLNEEMERVSHYLDSGTEAKITSVVEKEMIANHMHRLVHMENSGLVNMLVDDKYDDLARMYNLFRRVFDGLSTIRDVMTSYLRETGKQLVTDPERLKDPVEFVQRLLNEKDKHDKIINVAFGNDKTFQNALNSSFEYFINLNNRSPEFISLYVDDKLRKGLKGATEEDVEVILDKVMMLFRYLQEKDVFEKYYKQHLAKRLLSGKTVSDDAERSMIVKLKTECGYQFTSKLEGMFTDMKTSQDTMIDFYAKKSEELGDGPTLDVHILTTGSWPTQPCPPCNLPTEILAICDKFRTYYLGTHSGRRLTWQTNMGTADIKATFGKGQKHELNVSTYQMCVLMLFNSTDGLTYKDIEQDTAIPASDLKRCLQSLACVKGKNVLRKEPMSKDISEDDTFYFNDKFTSKLVKVKIGTVVAQKESEPEKQETRQRVEEDRKPQIEAAIVRIMKSRRVLDHNSIVAEVTKQLQARFMPNPVVIKKRIESLIEREFLERDKADRKLYRYLA

SEQ ID NO: 50584 - protein, 124 aa, Oryza sativa
MRYLWMPRLADASQLGDHHGYNSTTAMGDAHGMPVMTSSSSDSFATSESYDGGLYANVQDNEMVNGGDYWMQGANKGFCSNYESEQLHPHEHSQFQDPDLVGWVQGFSEGISENFWSLEDIWKM

SEQ ID NO: 50585 - protein, 555 aa, Oryza sativa; identical to SEQ ID NO: 42051

SEQ ID NO: 50586 - protein, 131 aa, Oryza sativa
MEGAVASNVELDSAVFQVSSAQNRYEAIACSKGNTELIASGPFDQLVLHLEDARKFQSCSTAGTFKLSLSGNAKGSSWFTKSTIARFLNTINSPDASKSANGILHEISQLEETRKFHQSLYSKEVSLVPLA

SEQ ID NO: 50587 - protein, 142 aa, Oryza sativa; identical to SEQ ID NO: 50263

SEQ ID NO: 50588 - protein, 114 aa, Oryza sativa; identical to SEQ ID NO: 38044

SEQ ID NO: 50589 - protein, 623 aa, Oryza sativa
MVSRKRGGGGGVAMAVAMLLAAASASRPSSSLEGFQPLSKIAVHKATVDLHGSAFVSATPALLGDQGEDTEWVTVKYGWANPSADDWIAVFSPADFISGSCPNPSRYPDEPLLCTAPIKYQFANYSANYVYWGKGSIRFQLINQRYDFSFALFTGGLENPKLVAVSEAISFKNPKAPVYPRLAQGKSYDEMTVTWTSGYDISEAYPFVEWGMVVAGAAAPTRTAAGTLTFNRGSMCGEPARTVGWRDPGFIHTAFLRDLWPNKEYYYKIGHELSDGSIVWGKQYTFRAPPFPGQNSLQRIIVFGDMGKAERDGSNEFANYQPGSLNTTDRLVEDLDNYDIVFHIGDLPYANGYISQWDQFTAQVAPITAKKPYMIASGNHERDWPNTGGFFDVKDSGGECGVPAETMYYYPAENRANFWYKVDYGMFRFCIADSEHDWREGTDQYKFIEQCLSTVDRKHQPWLIFAAHRVLGYSSNWWYADQGSFEEPEGRESLQRLWQRHRVDVAFFGHVHNYERTCPMYQSQCVSGERRRYSGTMNGTIFVVAGGGGSHLSDYTSAIPKWSVFRDRDFGFVKLTAFNHSSLLFEYKKSSDGKVYDSFTVERDYRDVLSCVHDSCLPTTLAS

SEQ ID NO: 50590 - protein, 43 aa, Oryza sativa
MMALLFKVDQQFILPIWKLMITKIKMKALKDTTWRMDLPVTTN

SEQ ID NO: 50591 - protein, 117 aa, Oryza sativa
MSRLARALARVLAESLLGHATGERFPEGCDDATCFLRLNRYPPCPFPPDDAFGLVPHTDSDFLTVLCQDHVGGLQLMKGSRWVAVKPIPGALIVNIGDLFQVHPLTPTLYKHLNTNP

SEQ ID NO: 50592 - protein, 174 aa, Oryza sativa
MAQESCDLNKDEAEILKPSSSSSPSPSPTTASPSPPTAQMTEPPPPQSTPPTPPAAAAAASAAAAPQFSAKNCEGILIEVSKKRKLAEATATDANAVVVAAVAEPLSPVLFVNRCNVCRKRVGLTGFRCRCGELFCPRHRHSETHECSFDYKTAGREEIARANPVIRAAKIIKI

SEQ ID NO: 50593 - protein, 567 aa, Oryza sativa
MSSKKNYYKEKMMRRKEEKKEEPETPRYRDRAKERREDQNPDYEPTELGSFHAVAPPGADLRLADAHKISIEKSKYLGGDLEHTHLVKGLDYALLHKVRSEIEKKPEAEDGKDTQSRSTKEDQAVSFRTAAAKSVYQWIIKPQSIIKSNEMFLPGRMAFIYNMEDGLTNDIPTTLHRSKADCSVPEEMVTVSVDGSVLDRIAKIMSYLRLGSSGKVLKKKKKERDTKGKNSLASGDYDEVARPGQTNGSALKHQFEKDMPPPPPPRNNNLSKNEKPSAPVARADEDDIFVGDGVYYSVPNKEMSQSPVSEDMDESPHNHQKQSYFTEEKPIYGPIPPSDPAQAWPQPNAYDAIQAQMVAAGYQGEWSGYQYGEQQMAYPEQYMQQSAQDCDVLADPNITQDPRLMTQADKDRGLGSVFKRDDERLKQLREKDAREKDPNFISDSYSECYPGYQEYNHEIAGSDEEDDLSKMDMGGRAKGRLHRWDFETEEEWATYNDQKEAMPKAAFQFGVKMQDGRKTRKQNKDQKLTNDLHKINKILARKKGDKDGGHDGGHYDDDMPSGKKQRA

SEQ ID NO: 50594 - protein, 553 aa, Oryza sativa
MSLAGSALEAALQAVGRGLDAAGDHRLLYCKGTGRLLMLDESRARDLTINGGVLRGVPPDVVVEEGHGILERIRQVPGPPTDEPVVCSFPKMAECFNRKAGLLETTVPLGSFNSLFSFTGSWKNDEAATKSLAIDGYSVPLFKVKITSGELFLHESVKRAIPHSWDPSALASFIENYGTHIITSVTVGGKDEVYIKQHSSSQLSELEFRNYVKEIGSERFSDGDSKLNATPINYSEKDMTVIFRRRGGCDLVQNFNDWIKTVQSAPDVIGMTFLPIVSLVGDMPGKKHLARAIELYLKYKPQIEELQYFLDFQVQLVWAPVPPGIAGQHRKEPVCPSLQFSLMGPKLFVSTEQISVGRRPVTGLKLCLEGAKQKRLAIHLQHLGSLPKIFVPHWDSHITIGPPKWQGPEEQDSRWFEPIKWRNFAHVSTAPIEYTETSITDLSGVYIVTGAQLGVWDFGAKSVLHLKLLFSRVPGCTIRRSVWDHSPSSSLVHRTDEASSSSSDNAKLVKIVDMTETLKGPQDAPGHWLVTGAKLGVEKGKIVVRAKYSLLNY

SEQ ID NO: 50595 - protein, 278 aa, Oryza sativa
MDQPSNGFAAGGLFLRHIDGQNASPPSVIVIGGGISGIAAARALSNASFKVTLLESRDRLGGRVHTDYSFGCPIDMGASWLHGVCNENSLAPLIRLLGLRLYRTSGDNSVLYDHDLESYALFDKDGRQVPQEIVTKVGETFEKILKETVKVRAEHEDDMPLIQAISIVLDRNPHLKLDGLQYEVLQWCICRLEAWFATDVDNISLKNWDQEHVLTGGHGLMVHGYDPVIKALAQDLDIHLNHRVTKIIQRYNKTIVCVEDGTSFVADAAIITVPLGCT

SEQ ID NO: 50596 - protein, 257 aa, Oryza sativa
MAANFWTSSHCKQLLDQEDVDKVPQADSDRGITLEEFRLVKIHMSFHIWRLAQQVKVRQRVIATAVTYFRRVYTRKSMTEYDPRLVAPTCLYLASKVEESTVQARLLVFYIKKMCASDEKYRFEIKDILEMEMKLLEALDYYLVVYHPYRPLLQLLQDAGITDLTQFAWGIVNDTYKMDLILIHPPYMIALACIYIASVLKDKDITLWFEELRVDMNIVKNISMEILDFYDTYKIDPQRGLPEDKIAPVMNKLPSKA

SEQ ID NO: 50597 - protein, 196 aa, Oryza sativa
MADDPSLDFGEFPQPFCSQQVVSFQPSVTTSGSGGMPVYLDCSSGMDSNTVMLSTTPSVVVSTTSSNTVADPGQNLKYGGPLAADWSRLELDVLKDGLQKYGNEQGIMKYIKIAASLPSKTVRDVAMKCQWLGKRENSRRRKSEDHHTGRKMKERKAKMAEPSLWGTNHPVQTDTRVPSFVSHNAIQNNQILTGGW

SEQ ID NO: 50598 - protein, 522 aa, Oryza sativa; identical to SEQ ID NO: 50369

SEQ ID NO: 50599 - protein, 105 aa, Oryza sativa
MEIEAAKCECCGLREDCTVEYIAGVKADFGGRWLCGLCSEAVRDEVAKKGGGGGGGGRQLEDAVRDHMSFCGKFCRKNPAFRVADGMRQMLRRRSSDISAPSGAS

SEQ ID NO: 50600 - protein, 408 aa, Oryza sativa
MVAAALDARLRDHLIAKPNLFTEAASTAVASFQRPLLCLFDRNFELSVGIQHDWSYRPLVHDVLGLKSNKLKLPEKYDLDDTDPFWVANSWLQFPKVAEEIEAQLAKYKQDVDEVNQRTGGGRDGVEFDGTDLIGNTRHLMNAVNSLPELTERKKMIDKHTNIATALLGHIKGRSLDGYFECENSMLVDGTLDRTKLMNLLRGNGTKEDKLRLAVTYLLSFETPVPSDLEQVEAALRESEVDMSAFQYVKRIKSLNSQFAGASNTASKVNIVDWAEKLYGHSISAMTGVRNLLSDGKQLAATRAVEALMEGKPNPEVDNYLLFDPRAPKSGTAGQFRGPFREAIVFMIGGGNYIEYRSLTELTQRSQTTKQVIYGATEILNGVEFIQQLSELGQKAGLGGVSSSLPPQ

SEQ ID NO: 50601 - protein, 585 aa, Oryza sativa
MMSSDDNLEPQLKAVENYYFVDDNDVPVSFDVLPFQFDAAEGVASFKKDVYLRGFTDGGLQKVYKQVVAWKLVLDGDSPEIAVLSTEGSWIALLKPRPSYEETIRSVLITVEMLHFVRRRPTDSEKDMWDHLYGVFERFVVRPLEDDFANHQNLIKLFAQRDPDLANSQVLQVFIKDKIMEKTNEVGSNNLDNKREPDIKQEPDIKQEPVAAGDEMEEIVEEGIPDAPSNDDDDDEEDEEDGDLFDSVCAICDNGGELLCCEGPCMRSFHAKIRDGEDSYCATLGYTKAEVKALKNFVCKNCDHKQHQCFVCGELEPSDGPNAKVFLCNNATCGHFYHPRCVAQLLHPNSRNEASEMEKKIMAGFSFTCPVHWCFHCKGLEDRTQEPLQFAVCRRCPRSYHRKCLPREISFEDINTQGIITRAWELSKRILIYCLDHEIDLDIGTPPRDHIKFPHVEKSAYSAKKKVKELAEKKRRICDDSYVSEPLQKRAKLNEKFNAKGDKSKKAGVKSEFEEVLESEKKKTRSLKKRTQPEEPLVECAAAAAANNANRPVKEREKELGTSSLDMGKIPLSSFPIVDSETEKR

SEQ ID NO: 50602 - protein, 672 aa, Oryza sativa
MELLKIPFKGVVADIEGRAAWYKHDWLEGFHSGFRILAPTMYIFFASALPVIAFGTQLSRETNGILTTVETLASTAICGIIHSILGGQPLLIVGVAEPTIIMYTYLYNFAKNQQALGERLYLAWAGWVCIWTAIMLFLLAMFNASNVISRFTRVAGELFGMLITVLFLQQAIKGIIEEFKVPGGVDHSSPIYRFQWLYVNGLLGVIFSIGLLYTALRSRRARSWVYGQGWLRGFISDYGVPLMVIVWTALSYALPKDVPSGVPRRLFSPLPWESSSLHHWTIAKDLFSVPPAYIFAAILPALMIAGLYFFDHSVASQLAQQKEFNLKKPSAYHYDILVLGFMVLLCGLIGIPPSNGVLPQSPMHTRSLAVLKGQLLRKKMVQTANEGLMNRASSLEIYGKMQGVFIEMDCEKNTDSVDKELKSLKDAMLQEGDKEGTLAEEFDPIKHIEAHLPVRVNEQRLSNLLQSLLVGACVGAMPVIKMIPTSVLWGYFAYMAIDSLPGNQFWERIRLIFIPSSRRYKVLEGPHASFMESVPSKTITVFTIFQLVYLLICFGITWIPIAGILFPLPFFLMILIRQHVLPKFFEPNDLRELDAAEYEELEGVHHDHTLEDGASDSESCGSRDDAEILDELTTNRGELKHRTFNHREERHPQAHTKAVQPRCGDTENWSEC

SEQ ID NO: 50603 - protein, 559 aa, Oryza sativa
MATGSLGLSTSFLPGHDTLLRRRRRRPPATTAASFRPVTAELGGELGRQLVEAVGVGLPCTVMACGDVIYRSTLPRNDGLTITAPGVALALAAASYLWSTPGVAPGFFDMFVLAFAERVFRPTFRKDEFVLGKKLGEGAFGVVYKASLDDPKAAEKQGAVVVKKATEYGAVEIWMNERVRRACASSCADFIYGFRESKAKGKGADEYWLIWRYEGEDTLFDLMQSKEFPYNVETKILGDVQDLPKGIARENKIIQTVMRQLLFALDGLHSTGIVHRDVKPQNVIFSEGSRTFKIIDLGAAADLRVGINYIPSEFLLDPRYAAPEQYIMSTQTPSAPSAPVATALSPVLWQLNLPDRFDIYSLGLIFLQMAFPSLRTDSSLIQFNRQLKRCNYDLEAWRNLVGPRATPELRRGFDILDLDGGIGWELLTSMVRYKARQRTGAKAALAHPYFNREGLLGLSVMQNLRLQLLRATQKDYSEAARWVVGLMARSGTEAEGGFTEAQLQELREIKPKKGSARRNLLASVLRVQRKVVRTINESMDELSSQSKSIWWSRWIPKEE

SEQ ID NO: 50604 - protein, 132 aa, Oryza sativa
MACFIGIALCCCLPCVIAILYALAGQEGASDADIGFLPRYRYSDPSEDGQKGTDEGVMIPVLNNSGTSTSERILLHEDAECCICLSSYEDGAELSALPCNHHFHWTCITKWLRMHATCPLCKYNILKGSESA

SEQ ID NO: 50605 - protein, 728 aa, Oryza sativa
MRLAGGFVFLLCVHLFLIPPDGALSAPGGGGERCRRQCGGLVVPYPLGFSGSCPILLACVDAGNSTAALILPGGGGGGNATTTTSSYSYTASNFNASRSTFVVALPPSCSRTVSEARRWLSGANYGVSSRTGLFLRGDCHRNSSASNATNCSIPAETMSRMVPTASCGAEGNTTASALTCVTSTSPAPDPAKPESSSGSGIVGLFAEWKKLEEPSCDNLLTSVYGDTREGVFSLEFSVAEMGWWVNGNCTHGGGGGDLAWRCAPNATCLNVQTPTGGWGHQCKCLHGMVGDGFAAGEGCYFAAKKSSTKKILIIVGGVLAGTVAAGVLFLCCARCRRSGGGGGRSGFDRLAAKRLLSEAASSSGVPVYSYHEVARATNSFSHTHRLGTGAYGTVYVGKLPASSPSLVAIKRMRRRHDDGDDDAAVAVLLNEVKLISSLSHPGLVRLLGCCLDRGEQILVYEFVPNGTLAHHLAGGGLPWRARLGVAAETAAAIAYLHAKRPPILHRDVKSSNILLDGDLRPRLADFGLSRAVGRLDQASLSHVSTAPQGTPGYLDPEYHQNFHLSDKSDVYSFGVVLLELITAMKVVDFARPAAEVNLASLALDRIGKGRVDDIVDPALVDRADEWVMRSVRHVSELAFRCLAFQKDVRPAMSEVAAELARIRDAAPASVPGARTGAGSRPPMVIDVGVGFDGVDAAVKKVGSPVSVQDVWVSDQSSPSTNGSMPRFA

SEQ ID NO: 50606 - protein, 241 aa, Oryza sativa
MIADIQAAPDGSFVLLHGCAHNPTGIDPTPEQWEKIADVIQEKKHMPFFDVAYQGFASGSLDEDASSVRLFVQRGLEVFVAQSYSKNLGLYAERIGAINVVCSTPEVANRVKSQLKRLARPMYSNPPIHGARIVANVVGDPTMFGEWKQEMEEMAGRIKNVRQKLYDSLSAKDDSGKDWSFILRQIGMFSYTGLNKTQSDNMTDKWHIYMTKDGRISLAGLSLAKCEYLADAIIDSFHNVS

SEQ ID NO: 50607 - protein, 656 aa, Oryza sativa
MSSWLRSAVSRAGRSGVARAVRGYADAVAHHAGQAVADILQDRTDYKSFKKTVARLEEAAVSCRGGERVELLRRWLGALQDIEAELSGSDLKDPEDRDPSSETDISKAPLALFYDADIEGGPMNFRDVFLYSQALEGITLSMVLEAPSEEEVSLLLEIFGLCLTGGKEVNKKIMDTVQDLAKALSNYKDEVLVKREELLEYTQSVISGLKRNADIMRIDAETLELWKKLDEKEKSRAQITEDQDKSSGNISVENIEGLKEALIEVRLCSRVEELVLKKKSISPGDSLEIHSQKIDKLKILADSLANSSSKAEQRILENRRQKEDALNFRVKKENEVSTVEKEVLDEIAELEKQRDELEAQLKKVNISLNAAAGRLKKTREERDQFDEANNQIIFKLKTKEDDLSKSIASCNVEANVVKTWINFLEDTWQLQSTYNEQKEKKTCDELERCVSSFLKLTKHHLSVFKEVLSPSIESIRTYVDNLVVLNSREETKQDEDDEASEKTNPRISLEEEYLETEKKIIIALSIADHIKKLFYSEQWANSRRDDPEVKNLIAEIEKLRGEFESIERPMLSIEANKSKPLPEERSELSPSPIRAPATPKAAHVDSPKSPMKPEQHLNPDNELANLGAELGSEDRDFSGEEINGWEFDELEEDLKN

SEQ ID NO: 50608 - protein, 96 aa, Oryza sativa
MAARSFQARSPKEESDAAVHEAVTLGLKNAAISGTVVAVPTLVGCRVLPWAKANLNYTAQALIISAACIAGFFITADKAILRNARQNTIGKIDRST

SEQ ID NO: 50609 - protein, 313 aa, Oryza sativa
MAAALECWSGRPSTDEEMVEQVLMKPHVRSDDSLPTCADAAFAAGEPTTAQAAPKKWQRLGRNFAGAIAAFKSSLNLDNGSLPRDPSPRAVGERPPLLVRGFQQLYSRGGATQQLPEKLVADLRRHFDALPNSYAQAGFDMKDVLLHARLVEQAAGEDQPAVSIEEVPGSNGRGGANEGTVFQLTFACSAPLSWQSMSGSLDSPSFCCKRIQIFEKRGLTLGVVMILVQPGNEVFFKNRVDAALKSAIKKQRKNSGGVKLPFGLCGCQEEGSRNFDEESMFDPDDGQVLDNEPTCKPQLPTPLPQSSVFVSID

SEQ ID NO: 50610 - protein, 581 aa, Oryza sativa
MEGGATLADKAEFKECLRLTWSQPYILQLVFSAGIGGLLFGYDTGVISGALLYIRDDFTAVEKSTVLRETIVSMAVAGAIVGAGFGGWMNDKFGRKPSILIADSLFLAGALIMALAPTPFVIIIGRIFVGLGVGMASMTAPLYISEASPARIRGALVSTNGLLITGGQFMAYLINLAFTKVKGTWRWMLGIAGLPAFIQFILMCMLPESPRWLYRQDRKEEAEAILRKIYPAAEVEEEIDSMRRSIEHEKQLEGSIGEQSLVGKLTKALSSKVVRRGLMAGVIAQVAQQFVGINTVMYYSPTIVQLAGFASNNTAMALSLITSDLNAIGSIVSMFFVDRAGRRRLMIISLVGIVLWLAVLGGTFLGAAHHAPPVSDLETRVFANQTCPEYSPSARWNCMNCLKAQSTCGFCAHGGNKLLPGACLAAGEASRRTCHAGNREFYTEGCPNNFGWLALVALGAYIVSYSPGMGTVPWIVNSEIYPLRFRGVCGGIAAVANWVSNLIVTQTFLSLTKALGTSATFFLFCAVSFFALVVVFFTVPETKGLQFEEVEKMLGEKDYKPWKRYRPDVSSKGRDIGLSVP

SEQ ID NO: 50611 - protein, 213 aa, Oryza sativa
MPLRLPCAMETRPPRAAAPAPARVSRFRRLLVRVSAEPERAGGGGGGEVREKEEKAAEMEVGSVGLDRMVLSFMEDSAAAAVERPPRGRCGSCFNGGGDGSDDEEFDFLPSDSSATAAASAAAAAGDALDALKGLVQSASMAERNLLADASRIAERCRKGGKKKADVRCAVADGLAALGYDAAVCKSRWDKTPSYPAGKLNLAPNSMLLNRRR

SEQ ID NO: 50612 - protein, 642 aa, Oryza sativa
MDAILFENAISDAEFSPESMECLPDICWKIPQEELEVRKDLRNVLTFTIDPPTATDLDDAISIEMLSGGIVRIGVHIADVSYFVHPETALDAEAQIRSTSVYTLRRKISMLPLRLSEDLVSLNPGVDRLTFSIIWDIDPHGNIINRWIGRTVISSCCKLSYDLVQDLICSDGTKFKSASSLQVHGIFEQDDVIKSLRCLYEISKNLKEIRFKGGALSLETAKLMIQFDEGGAPCDSFRYERNDACFIVEELMLLANMSAAEVISNAFPNCALLRRHPEPNLRKSREFEAFCARNGFELDGSSSGQLHLSLSRMKEKLKDDPVLFDILMFYASKQMQSAEYFCTADLISKRDDWAHYALSVPLYTHFTSPLRRYPDIIVHRTLNAVIEAEKMYLKHRRSLTGQNGFNTASCEMMHGCFTGLQFSKDAAESKEGSEALSAAAKKFKVPSPDNLGEVAEHCNERKWASRRAEDAGQKLYMWALIKRKEVLVANARVLGLGPKFMSVYVPKLAMERRIHYDEVEGLSIEWLEATGTLVLDSCRNRPPQRRGNQVKYRAFEEVAMMVNPSESIFSEEDEESGATEAGCDTAKSVLLSDEAVKAQVAPAVLPLVIQYLSEIPVVLHAIGGEDSALDIGVRLYMSSYFK

SEQ ID NO: 50613 - protein, 739 aa, Oryza sativa
MADAEDIQPLVCDNGTGMVKAGFAGDDAPRAVFPSIVGRPRHTGVMVGMGQKDAYVGDEAQSKRGILTLKYPIEHGIVSNWDDMEKIWHHTFYNELRVAPEEHPVLLTEAPLNPKANREKMTQIMFETFNTPAMYVAIQAVLSLYASGRTTGIVLDSGDGVSHTVPIYEGYALPHAILRLDLAGRDLTDYLMKILTERGYSFRLQKPAASQERAGREAALQLAFGVDQLLRRTDGKPAPAARVVGSGREGERMATTASVRPPLLRQAAGSEKASLLCKPKQRASVRRRSFTARASSNPVSIPKQWYNLVADLPVKPPPPLHPQTHLPLNPSDLSPLFPDELIRQEVTEERFIDIPEEVAEVYKLWRPTPLIRARRLEKLLGTPAKIYYKYEGTSPAGSHKPNTAVPQAWYNAAAGVRSVVTETGAGQWGSALSFASSLFGLTCEVWQVRASYDQKPYRRLMMETWGATVHPSPSAATESGRRILERDPASPGSLGIAISEAVEVAARDADTKYCLGSVLNHVLLHQTVIGEECLEQLAAAGDVPDVVIGCTGGGSNFGGLVFPFMREKLAGRMSPAFKAVEPAACPTLTKGVYAYDFGDTAGLTPLMKMHTLGHGFVPDPIHAGGLRYHGMAPLISHVYELGFMEAIAIQQTECFDAALKFARTEGIIPAPEPTHAIAAAIREAMECKRTGEKKVILMAMCGHGHFDLASYEKYLRGDMVDLSHSDEKLQEALAAVPKI

SEQ ID NO: 50614 - protein, 123 aa, Oryza sativa
MEVVVHDGVIREKPSTPEEARKFIKGYSESHAATIGSVLVTNVKSGARKEGWDKAEVYFHKIPDEVVESLIEEGDVFYVAGGLLVEHPLTSPLVEAIVGTIDSVMGLPKSLTEKLIKESLEEP

SEQ ID NO: 50615 - protein, 362 aa, Oryza sativa
MAIATESQQAQVQAAATDAVAAAAVGRKVVDEVSGWLRVFDDGTVDRTWTGPPEVLPLMQPVPAYAEPRDGHTLHDLPGEPNLRVYLPEVALAERRLPVVVQLHGGGFCISHPSWLMYHHFYARLACALPAVVVAVELPLAPERRLPAHIDTGVDGLRRLRSIALSDAAALGDPAAELLRTAADFSRVFLIGDSSGGNLVHHVGARVGEDGADSWAPLRVAGGIPLHPGFVHATRSKSELEPRPDSVFFTLDMLDKFLAMALPEGATKDHPYTCPMGSNAPPLESVPLPPLLVAVAEHDLIRDTNLEYCDALRTAGKDVEVLVNRGMSHSFYLNKYAVDMDPATGERTRELVDAIKSFVDRH

SEQ ID NO: 50616 - protein, 252 aa, Oryza sativa
MESPAAGGASPAPEAPPPPPRGWISGLVSGAGRILASVLGPDSPAAASGSATTTSATSPSASSSPASSRHPGYIRDHGNSPLFFPKANKLNKSENEAIMKDYSEASLAIISEIEPKDAIMQLLKQETYSRSECNALVKIIQERVVDSNLNGVDAGGLALPINWKTGRQANIGYSSLSPKGLLPATSIPPVQDHVFDNSAGAGASTTIAHDRGPFATLLIRFNPYSKEVALLQRIPLTLRTPEESGQKLMEIH

SEQ ID NO: 50617 - protein, 90 aa, Oryza sativa
MEGRSLWRRGRRTPDGGGSAVVVIWREERDMLYFPFLSPVLAHALVLNDWMAHLLELVFSLLCANLGMENRIEELLGCSKGFSTCAINFV

SEQ ID NO: 50618 - protein, 675 aa, Oryza sativa; identical to SEQ ID NO: 48447

SEQ ID NO: 50619 - protein, 58 aa, Oryza sativa
MTIIFNETFTACSDMIAHHHLSHYLKLLITVVGGMIFCMPLTSNAMAYVNVCKTTRNL

SEQ ID NO: 50620 - protein, 100 aa, Oryza sativa
MTEYWVSQGNKWCDFCKIYIANNPLSIRTHEIGKRHKDNVTKRLATMQKEGAAKEKGAAASSPGPQANRSCKFVMLFFSPVCWYPNHLMYILLCHKLQSL

SEQ ID NO: 50621 - protein, 101 aa, Oryza sativa
MWRKGNKRFGGGGEPAAKRRAAGDDGPSESADDDIVVAQISKNRRVAVRTWNGKVVVDIREFYEKDGKTLPGRKGIQLPMDQWKILRDNIKAIDEAIKENA

SEQ ID NO: 50622 - protein, 788 aa, Oryza sativa
MTAQPKKRSVIESGDGGLGLGLALFISNGEDLGPIIRHGFDSGKPEALMQNLRSIVKKKEVEIEELCRLHYEDFILAVDELRGVLVDADELKGMLTGENIHLQKVSSATLLNLDELFELYSIKKNIGEAITTLKICVKVISLCMACNGYIAEAKFHPALKTLDTIEKGYLKNIPLKLLKKVVAKHIPLIKMHIEKKVCSEFNDWLVHIRRMAKQIGQVSISQASMARQKDEEMRARKREAEAHSDARSDEHVYTLDVENTDEESTLNFDLTPVYRAHHMHICLGIGEKFRDYYYKNRLMQLNLDMQVSTSQPFLESHQPLLAQVAGFFIVEQRVLRSADGLLSESQVESTWETAIAKITSILEDQFARMSIASHLLLVKDYVTLLGTTVSKYGYQIAQLIQVIAKYKDKYHQLLLIESRKQIDDILANDSYEQMIIKKEYEYNMNVTAFHFEPDDVVPEFPYVAPFSSGVPDICRIVRSFIGDSVSYFSYSARTNIYEIVKGYLDRLLIEVLNDSLLNMVYARSLAMSQMMQLAGNISVLEQSCDMFLLYSAQLCGIPKRIAQRSHSGLTAKAVLKASQNAAYNSLINLANFKIDEFMVLLDDVNWIVEEAPDNPNEYMNEVLIYLETLVSTAQEILPLEALYKMVSGAMSHISDSIMTTLLNEGVKRFTVNAVMGLDIDLKLLEAFAEEKFYRTGLVDLGKETTFADCLVEIRQLVNLLLSSQPENFMNPVIRGRNYGSLDYKKVAIVCDKYKDFADGLFGSLSNRNKQDARKRSMDVLKRRLKDFS

SEQ ID NO: 50623 - protein, 523 aa, Oryza sativa
MSSSEGESANPSPCPAGPAAAAAVAGAAGVGVGAAAWPRRRCRDVFWLVVFLLHLLVFGGALALTGLNRFGQADRFNIDRFTNLTAAPRFAGSPEPAREAPPPPSLEAEEVTPKSELTESYWPYYGAAGAVGTALAWAWLAAAAGKKDGGRVVMRAAVHSLTAYLAVVSVLCFWGKHFFWGVAFAVGGALHFLYVMSVLDRFPFTMLVLQKAVRMVWELPDVMRIAYAFVLVMLCWMALWSFGVSGILAFHIPNGGQWWALLIFSVSLFWTGAVLSNTVHVIVSGMVFLVLIHGGQAAASMPPKPLLKSLQYAVTTSFGSICYGSLFTAAIRTLRWEIRGIRSKIGNNECLLCCVDFLFHIVETLVRFFNKYAYVQIAINGQSFNRSARDAWELFQSTGVEALAAYDCSGAVLLMSTILGGLITGTCTGVWTYFKQSDKAIMVGSTSMLMGMILVGVTVVVVESAVTSIYICYAEDPRLIQRWDPDFFDQMSEALHQRLQYRSARAHQILNSRLDQLPNTSSI

SEQ ID NO: 50624 - protein, 200 aa, Oryza sativa
MKEREKVVRLAKLAEQAERYDDMVEFMKTLARMDVDMSAEERLLFSVGFKKTIGARRASWRILESLEQKVTAGDQPGVTINGYKKKVEDELRAVCNEVLSIIAIHCLPLANSGENVVFFYKMYVQVHQVNYLLLNCVLLHIGLFPNGYIQNLFPNKHLIIIQAYFDDAIFFFVEEYTTLSSCSVLNSIDITHPYEFLTFC

SEQ ID NO: 50625 - protein, 437 aa, Oryza sativa
MKKKSAPTPLPPETANTSPAPIGATAGIRVENCYVFKSRLQEYAQKAGLQTPEYHTSKEGPSHEPVFKSTVVINNTSYGSLPGFSNRKAAEQSAAEVALMEIVKSIPANANIPAVQETGLCKNLLQEYAQKMNYAIPSYICTKPASGLAPFLCTVEIGGIQYIGAAARTKKDAEIKAARTALLAIQGQSEGSANGATKYIVVPGKRVGKEVEKRPIETPKPLKAKKGGFKKKWNKRKFMKKDGQAVDVEKDEARVAGDAHDSDVLMQPTVITQEASCGTLFLQPCEEAKRVEDEPPRDIEMVQPDKENQHSDAALVQPDDEARVEQEPSRDISVVQPNEEAISAKQEPSIDAATLQPKEEAMKTGCVALVLCLNISVDPPDVIKISPCVRKECWIDPFSMAAPKALETIGKTLHSQYERWQPKARYKLQLDPTLEEV

SEQ ID NO: 50626 - protein, 285 aa, Oryza sativa; identical to SEQ ID NO: 46367

SEQ ID NO: 50627 - protein, 74 aa, Oryza sativa
MIIVRILCFSPSNVNLRTCQCTTIFLHCVRYLSYIVRRCPFSVHCGEMRANILAEVTLTLALFAVTRHCLPRLP

SEQ ID NO: 50628 - protein, 272 aa, Oryza sativa
MRKLQLKQSQLALSSHSHMLEKIKLSFGFQKASFKGEKFKTRMQETRDAEILRTLIDFLVSAVIVMSACFGYGTYIYSYQRITDVTSACSATSKGSKSWWMPNSVSNFSSGFLFLRCHVIAVTRMCFGILMILAIAWLAFQRSSTTGSNMPITFNLILLGIICGFAGRFCTNTLGGDGNTWLMYWEVLCSIHLLGNLFPSLLYHVLHGPISVSHREQVVWLPYWVRRCLFYAAVGLILPALTGLLPFASLSDWKDHFVEEIKSIVIGDKIEA

SEQ ID NO: 50629 - protein, 241 aa, Oryza sativa
MEEEAGAEVPLLKIKGDYHQGCPGCAYDRKKEVYRGLPYKEFLYLWMICLTAALPISSLFPFLYFMIRDLHVAKRTEDIGFYAGFVGASFMFGRCLTSTIWGIAADRIGRKPVVVFGIFAVVIFNTLFGLSFTYWMAIATRFLLGALNGLLGPIKAYAIEVCRPEHEALALSLVSTAWGIGLIIGPAIGGYLSQPAEKFPNVFSPDSLFARFPYFLPCLCISVFAAVVLIGCIWMPLWRAI

SEQ ID NO: 50630 - protein, 482 aa, Oryza sativa
MLTEVANRREDDSDQQEVRSHERGIGIGKTGIMSENILGSGSSEVIGAAPSAPKEFPEAPFDPKPETLSSHISNQVQDLKISSENILGGSEPTVATEVKASDTQDTKKSEKKKKQKKKQAGADVAKGATKTVTSQQPRQETLVGSDQGGAKHDLQDDAEELFWGSPIQVESSSKSADPPLGLESSLVLPAKSFSEDYDTNKGEWEPNAAAVNQRGWKPTQGPRPKSLLEIQAEEQLRAQRGLAMENAKPAVSAASVPSIPWNGMLTTSDQQLMAVSKSVDGLGSVGDSRNRRSQLHDLLAEEVLARSSNTDNEDMGNTNDMAFPPLSSAVVQPDAPAFDDTDFIEAKDSKKSKKKATKAKGSAVKAPAPVVSFDSSTVSVPTEKGKPSKQSHQEKEILPAPPIGPSFGDFVPWKSDQASAVPAPAWSSESAKVQRPLSLRDIQREQERRSAVAQQQPPSPTPAKVSINQRNHANVPSWQASG

SEQ ID NO: 50631 - protein, 38 aa, Oryza sativa
MNRIGGGLIIMVQVHGCFDYYDESGRWRFDCYGSWLFD

SEQ ID NO: 50632 - protein, 474 aa, Oryza sativa
MASSSKNFQSSSKPGSDRKYQGALVASPAKAISPKTVKQIVPGKHLILSGESTSHLASFLVKVIALEVVRRFSKARCPFIWNSIQALQVLGYPPFRWIQQWAPLKFIVQGIQKLSTPLLFLSVTTTLCDRSSKRNDELGSNTEAPDVPSESDETASTSGIRDVADGTKDTEPDNWLISLFKELEKQGITLPERFNEDELRRFYIAANGDFSSLLSSVKKTIRWRETFHILTLHELEKWSHLVFWHGFDTMLRPCLIVRLGLACSSLAPSDRPRFGQAVVSQIDNGIVYLTNKEDPRITVLLDCHGISPFRFPMQMMRSFITIVQENYPNRLGVLFIVRLPPVVRVIAQTLIQVLKPSTKQKLRFEGESYKKTLAEFLQIVPTFLGGKCSCPQCEKPRNISVIQAGEGSKSQPRQITIDDGSPVASMNFDEAELPSPYSCENAIRAAIIGVLMLWVFIAFLAGMNDPESISSHAP

SEQ ID NO: 50633 - protein, 88 aa, Oryza sativa
MAVGWRPAMLVVVVAVAAWRGEALSVTVTDTECIHEFVPYEGDTVSGNFVVVDHDIFWSSDHPGIDLTVPAPDPPRLRCAFDFRCKDL

SEQ ID NO: 50634 - protein, 723 aa, Oryza sativa
MKKQGGGGGVAAAAVAAAGMVKAELEDVGIKAAGGAVAALSPLSETLWREKAAAEFLGDVSARLAWRDLTVTVVLGGGGGGGGGGTTQDVLQGLTGHAEPGTITALMGPSGSGKSTLLDALAGRLAANAFLDGTVLLNGRKANLSFGAAAYVTQDDNLIGTLTVRETISYSARLRLPDKMPMEEKRALVEGTIVEMGLQDCADTVVGNWHLRGISGGEKRRVSIALEILMRPRLLFLDEPTSGLDSASAFFVTQTLRGLARDGRTVIASIHQPSSEVFELFDRLYLLSGGKTVYFGLASEACQFFAQAGFPCPPLRNPSDHFLRCINADFDKVKATLKGSMKRRFERSDDPLDRIMTSEAIRRLITYYKNSQYYFAAQQKVNEMARVKGTVLDAGGSQASFWMQAFTLTKRSFINMSRDFGYYWLRLIIYIVVTVCIGTIYLNVGTRYSSILARGACASFVFGFVTFMSIGGFPSFVEDMKVFQRERLNGHYGVLAFVISNTISAMPFLILITFISGTMCYFMVRLHPGFTHYLFFVLCLYASVTVVESLMMAIASVIPNFLMGIIIGAGIQGMFMLVSGYFRLPHDIPKPFWRYPMSYISFHYWALQGQYQNDLKGLVFDNQDDELPKIPGEYILENVFQIDVSRSKWLDLAVLFSMIFIYRLLFFAMIKVSEDVTPWVRGYVARRRVQGKGARGRGADLSAARSPSLRAYVVDAADDLPPA

SEQ ID NO: 50635 - protein, 82 aa, Oryza sativa
MSVLLAIRPAREEGSSLRTKVHRGERSRVVVPSARAVVLKISGGAGGGKVGLPVLDGALAFPQATTASQFLSAGDFVHLNEP

SEQ ID NO: 50636 - protein, 539 aa, Oryza sativa
MAMPCRLHGDILLLLLGAVAVAVAHPAANEFCAAVGGGSGGCGVGGGGGGDGRRILIRGGTVVNAHRVEEADVYVEDGVIVAVRPNIPVGDDHVKVIDATGKYVMPGGIDPHTHLEMEFMGTVTIDDFFSGHAAALAGGTTMHIDFVIPVNGNLTAGLESYKQKAEKSAMDYGFHMAITKWNDDVSREMETMVKEHGINSFKFFMAYKGSLMVTDDLLLQGLQKCKSLGALAMVHAENGDAVAEGQQRMIDLGITGPEGHALSRPPVLEGEATARAIRLAKFVNTPLYVVHVMSIDAMDEIAKAKREGQRVIGEPVVSGLVLDDSWLWDPDFMIASKYVMSPPIREAGHNKALQVALSSGILQLVGTDHCTFNSTQKAFGSDDFRKIPNGVNGIEERMHIIWDSMVETGRISVSDYVRVTSTECAKIFNIYPRKGAILEGSDADIIILNPERSFVMGAHTHHSRSNTNVYEGRKGKGMVEVTISRGRVVWEDGILNVVPGSGRYVRTPPYSYLFDGIEKSDAAYRASLRAPVKRGKAAA

SEQ ID NO: 50637 - protein, 755 aa, Oryza sativa
MAELGELEGKLRDVGEKLQSPPDDVDALLKLIHEAEIYILKVEQAPSESMISAITPAMKALIKKELLDNSSYEVKLSVVSCISEITRITAPDTPYDDDVMKDVFSIMVGSFEKLDDMENPLFRRIVAILETVAKVRLCVVMLDLECEDLILQMFHNFFTTVKPNHPENVTNCMTTIMILVIEEDDEVEIPIAECLLKHAKSELKETSAASFELAEKVIGACSEKLKPVFLQLLKGTSLNEYDNIIATICEDSSDVKEDMDADPSGKDVVDDGKLSERTISDELPQEPAKLEQDVTQTTAIGSGATPVDNGTESAAANPKELSNPDSEKKDGVKQSAKVANGASAETSERVDGSPAMVKSKRGRPPGLKSLEKKAAGKKVLGLKKVEETTDSTGELSKQSSKDDSKSSTRKASGAGSSKKQQKISLKQKDETDSKEDTAKDLSLKEMVSPKSVSKGSAKTKGSQGQDNNGSKRKRSQEDEQETPRSRKNKGLDASLVGARIQVWWPDDKKFYKGIVDSFDTASKRHKIAYDDGDVEVLLLRDEKWEFVSEEQDKTPDVASEISPKPRGRGRKGRGSSVQLKEGNAETPKSGGGDLPKKRGRPKGSSNGTPKSNISATSSKSKGKAARKDENETPKVGSDLKKEAEEGSEDKATKSTEKTKDDLPEDGSNKSASKPKEASSGGKDLKGESKPSEGRAKPGRKPKVAGAAVAGEESKANVSAEKEKQKEAEGEAAAEVEQGGSAGGASTGGKKRRRKA

SEQ ID NO: 50638 - protein, 71 aa, Oryza sativa
MRSQPLIQFMTQKEKDHMNNLTLPSQRSSIFFSIYFVFKKRSCWEMGQYFLSTRVSVEGPFVLSILHDQHQ

SEQ ID NO: 50639 - protein, 347 aa, Oryza sativa
MEGEGIGRRGLPSLLGSSSSESGGIGQEHIASDITQLIGWTPLVELKRIASKDGIDARIVGKVEAYQPLCSVKDRSALRMIEDAEEKGLITPGVTTLVEPTSGNLGLGLVLVALRKGYRFVAVMPGQYSFDKQILLKYMGAELFLSDPTLGFQGLVDKVEQLKKELPNVHVLNQFSNPANQEAHMRLTGPEIWKDTAGKVDIFVTGSGSGGTVSGVGKYLKLQNPAVKIICVEPAESPVISGGEPGKHKIQGIGPGLIPDMLDTSVIDEVVTVNTDEAMVNARRLAMEEGLLMGISSGANLAACLKVASREENKGKMIVTMFPSGGERYMNSDLFAAVREECNAMTF

SEQ ID NO: 50640 - protein, 463 aa, Oryza sativa
MASLVPGVLVKLLQHMNTDVKVAGEHRSSLLQVVSIVPALAGSDLFTNQGFYLKVSDSSHATYVSLPEDQHDLILSDKIQLGQFIHVDRLEAATPVPILRGVRPVPGRHACVGNPEDLVVTSSSNFLGNKKAQPTNGLKTTNGLKTTNGLKDTSSLSLEKEKGKLGKINASHKTIGAENKKPMLTKSNSSLSKQALNGLGDKKEAIKSKAKPAGTRSTPSSPTSVYSLPASFDRFSNDLKQRNKVKGAEKASSSRLSLLEKAASVLKVTTAGRKSSAGISSSILSIGSGPKALRRSWEGKVDTKGKTNSDSKMTKLEKKPENRGTMATIPRRKPPVDEKVQHKDDSKLQNPAKKTTANAPSDDADKAMKKHPPTVKRTSGISNPNVTNLVEVPPNSKKLTDASNSWTTLPPSLAKLGKELLKYRESAQMAAVEAIQEASAAESLLRCLRYLFSIVAGCVINSS

SEQ ID NO: 50641 - protein, 605 aa, Oryza sativa
MRGSRMNPGDRRTRSTMSIVIVMSLCCFFYILGAWQKSGTGRGDSIALRVTKETDCTILPNLHFETHHSLGGVNPLVMTDKVFEPCHIRYSDYTPCQDQNRAMNFPRENMNYRERHCPTETKKLRCLIPAPKGYVTPFPWPKSRDYVPYANAPYKNLTVEKAVQNWVQFEGDVFRFPGGGTMFPNGANAYIDELASVIPFTDGTIRTALDTGCGVASWGAYLMDRNVLTMSFAPRDSHEAQVQFALERGVPAVIGVLGTIKLPYPSGSFDMAHCSRCLISWKSNDAMYMFEVDRVLRPGGYWILSGPPINWKTNHQAWKRSKEDLEAEQNVIEKIAEMLCWGKIHEKGDTVIWRKKADSNECHNKDDHPSKMCKIQDADDVWYKKMEGCITPFPEEAQLRKFPERLFAAPPRILQGRTPGVTEEIFEEDNKLWKKYVSTYKRINKLIGSLRYRNIMDMNAGLGSFAAIIDSPISWVMNVVPTISEKNTLGIIYERGLIGIYHDWCEAFSTYPRTYDLIHANGLFSLYQNKCNMEDILLEMDRILRPEGAVILRDNVEVLNKVRRTVMGMRWKSKLLDHEDGPHIPEKILVSVKKYWVGNEEENSS

SEQ ID NO: 50642 - protein, 461 aa, Oryza sativa
MEKAINRQRVLLAHLEPAASPAAAAPAITASACAAGDSAAYHRGACFADDVVIVAAYRTAICKSKRGGFKDTPAEDLLVPVFKALIDKTKLNPSEVGDIVVGTVLAPGSQRAIECRMAAFYAGFPDTVPLMTVNRQCSSGLQAVANVASNIKAGLYDIGIAAGLESMTVNQVRLDGQVNPKVELFSQARDCLLPMGLTSENVAKRFGITRMEQDQAAVESHRKAAAAAASGKFKEEIVPVHTKIVDPKTGEEKEIVVSADDGIRPGTSLAVLSKLKPAFSKDGTTTAGNASQVSDGAGAVLLMRRDIAMQKGLPIVGVFRSFAAVGVDPAIMGVGPAVAIPAAVKAAGLQIDDVDLFEINEAFASQYVYCCKKLGLDPAKVNVNGGAMALGHPLGATGARSVSTLLNEMKRRGKDCRFGVISMCIGSGMGAAAVFERGDAVDELTNARCIPTHNRLSKDAM

SEQ ID NO: 50643 - protein, 627 aa, Oryza sativa
MGLQLPVWQTDIDEIFHLRKIELERDSGGTISARKAFMAYVAEGFGSLQDWDQVMAYQRKNGSLFNSPSTTAAAAIHTFNDRTLNYLDSLTNKFGGPVPAMYPQNIYSQLCTVDALERTGISQKFAREIRDILDTTYRSWLHNEEEVMLDIPTCAMAFRLLRTHGYDITSDEMAHFSEQSSFDDSIHGYLNDTKTLLELFKTSQIRFSCEDLVLENIGTWSAKLLKQQLLSNKLSTSAQSEVEYVLKFPLHSTLDRLEHRRNIEQFKVEGSKVLKSGYCGSHSNEEILALAVDYFHSSQSVYQQELKYFESWVKQCRLDELKFARVMPLIVHFSSAATIFAPELADARMVLSQTCMLITVYDDFFDCPEISREEKENYIALIEKWDNHAEIGFCSKNVEIVFYAVYNTYKQIGEKAALKQNRSIMDQLVEDLVSSAKAMMVEADWTATKYIPATMEEYMSNAEVSGAFASFVCPPLYFLGLKLSEEDVKSHEYTQLLKLTNVIGRLQNDSQTYRKEILAGKVNSVLLRALTDSGNTSPESIEAAKEIVNRDAESSMVEMRSLVFSEGGPIPRPCKDRFWEMCKIVFYFYSEDDAYRTPKETMSSARAVILDPLRLIPPPSCPETLSS

SEQ ID NO: 50644 - protein, 619 aa, Oryza sativa
MGNPSILTEDLGDTSDFEVDGVENLTENDVSDEEIDAEELARRMWKDKIKLKRIKERQQKLALQQAALEESKTKKMSEQALRKKTARVQDGILRYMLKLMEVCNARGFVYGIIPHKGKPVSGASDNIRAWWKEKVRFDVNGPVAIAKYEVKNSMLVDAKRRGVLNQHSLMDLQDATLGSLLSSLMQHCSPQQRKYPLDKGVPPPWWPSGNEDWWISLGLPMGISPPYRKPHDLKKVWKVGVLTGVIKHMAPNFDKIRNCVRKSKCLQDKMTAKESLIWLGVLRREEIYFRSSDNVGSQITHRSSREGKSDDIYSSSDEYDVDHLEEPPRSSSSKDNVGRRQPTAQIREEHTSSRHNRGRHDQQPNQVLPSNEGTNESRKRKRPSGHLLTAESEVEVTQKDDNQLAIVSNALPNMSRINQTEMMGMANQMTSLSHVNTTETLQHQYVQGNFVSSPAAVVNNYNSNQITNVNPSRIYMGYQPLACQNNGHTNPWSEDTFQVDVGPPPIGFTTNSSSGGNHSFPMKQSLPKSIDDHVPITETGVLADSSSYGYHITATGSRNSTSVAGHGNQLMGDPFDSGTADKFNGNSFDGLPFDFIGSSPIPDIGVLLDDDDIMPYLGT

SEQ ID NO: 50645 - protein, 754 aa, Oryza sativa
MAMATTALSASLPRLLPPRRRRFPTPSSSSPSAASTSTSRVVRLRAAAASAPSEVLDSTNGAIPSGKGGGGQQYGREYFPLAAVVGQDAIKTALLLGAIDREIGGIAISGKRGTAKTVMARGLHAMLPPIEVVVGSIANADPNYPEEWEEGLANQVQYDADGNLKTEIIKTPFVQIPLGITEDRLIGSVDVEASVKSGTTVFQPGLLAEAHRGVLYVDEINLLDEGVSNLLLNVLTEGVNIVEREGISFRHPCKPLLIATYNPEEGSVREHLLDRIAINLSADLPMSFDDRVAAVDIATQFQESSKEVFKMVEEETEVAKTQIILAREYLKDVAISTEQLKYLVMEAIRGGCQGHRAELYAARVAKCLAAMEGREKVYVDDLKKAVELVILPRSILSDNPQEQQDQQPPPPPPPPPPQDQDSQEDQDEDEEEDQEDDDEENEQQDQQIPEEFIFDAEGGIVDEKLLFFAQQAQRRRGKAGRAKNLIFSSDRGRYIGSMLPKGPIRRLAVDATLRAAAPYQKLRREKDRDKTRKVFVEKTDMRAKRMARKAGALVIFVVDASGSMALNRMQNAKGAALKLLAESYTSRDQVSIIPFRGDFAEVLLPPSRSIAMARNRLEKLPCGGGSPLAHGLSTAVRVGLNAEKSGDVGRIMIVAITDGRANVSLKKSTDPEATSDAPRPSSQELKDEILEVAGKIYKAGISLLVIDTENKFVSTGFAKEIARVAQGKYYYLPNASDAVISAATKTALSDLKSS

SEQ ID NO: 50646 - protein, 220 aa, Oryza sativa
MAAVEEQDPAGGGQPLHGSGGGDRPCMDPAAGRPPSPRGIRLPPLLFILSPDPAKGRGVGNGGTRQQRRRGGGGGVGSGGRRPTPARIRQRRPSPHGSGGWPSPHGSDAQLPSPLWDLTPLPSPPFPPQIRMRGGASAAVRPEPGGEHGGRREGRSSGGRHGGHRCRRQGRERCPRPMTTTTRRQQRRRRILGFSFVLKFFFSGFLFLRTDDISICTRKS

SEQ ID NO: 50647 - protein, 439 aa, Oryza sativa
MKLKRLKELQLSRGKDPAGGVVGDPSKPRQSQEQARRKKMSRAQDGILKYMLKMMEVCRAQGFVYGIIPEKGKPVSGASDNLRGWWKEKVRFDRNGPAAIAKYQADNAVPGFESELASGTGSPHSLQELQDTTLGSLLSALMQHCDPPQRRYPLEKGVPPPWWPTGDEEWWPELGIPKDQGPPPYKKPHDLKKAWKVSVLTAVIKHMSPDIEKIRRLVRQSKCLQDKMTAKEISTWLAVVKQEEELYLKLNPGARPPAPTGGITSAISFNASSSEYDVDVVDDCKGDEAGNQKAVVVADPTAFNLGAAMLNDKFLMPASMKEEATDVEFIQKRSASGAEPELMLNNRVYTCHNVQCPHSDYGYGFLDRNARNSHQYTCKYNDPLQQFFIRDDTPFGNQMGDINGASEFRFGSGFNMSGAVEYPGAMQGQQKNDGSNWYY

SEQ ID NO: 50648 - protein, 421 aa, Oryza sativa
MQGQQKQNAGGGGGDNASPCIVLDGPIIVGAGPSGLAVAATLRQHGAPFTVVERSGGVADLWTNRTYDRLRLHLPKVFCELPHVAFPPDFPTYPTKHDFLRYLHSYAARFAIAPLLRRTVTRAWYDHPASLWRVTTTTTSSSATSVITEYASPWLVVASGENAEVVVPKVKGRERFAGEALHSSEYRSGERFRGMRVLVVGCGNSGMEMCLDLCEHGAMPFMSVRSGVHVLPREMFGASTFGIAMKLLRWLPIKMVDRFLLLVARMVLGDTEKYGLKRPKLGPLEIKNITGKSPVLDVGAWSLIKSGNIKIVPEVESFSGNGARFVDGNEMAFDAVIFATGYRSNVPSWLQEDGELFTEEGKLRSSGSSSEWRWRGPNGLYCVGFSGRGLLGAGADALRAAADIAGRWQETQQAAANISSV

SEQ ID NO: 50649 - protein, 346 aa, Oryza sativa
MRETMESLCKLWKLMDSPQEERRQFNRVLSVLISSEEEILSPGVLSQETIEKMGAEVERLTKLKARRLKEIFMKKRSELEEICRSAHIEPDASTAPEQTNEMIDSGMIDPSELLAKLESQILKAKEESLSRKDIMDRINKWISACDEEAWLEEYNQDSKRYSAGRGAHINLRRAEKARILVTKIPAMVDNLINRTFAWENARNKPFLYDGGRLISVLEEYRLNREQKEEEKRRYRDQKKLESILLKEKEAIFGSKGSPKRAVSLNRRTNGYRSSGTTSGLMTPNPRRSSLGGATPELLTPRSCSGHYNRYFSDSRRLSATQLNFGDDSLSTFTSISGSEPESPSLG

SEQ ID NO: 50650 - protein, 201 aa, Oryza sativa
MRRSHPMAQLLAAATTTTTPPCGGLLTARASASSPGCFLRALPRSRAMASASGADAAAAAVAPPSLLVFSGGTAFNGVVEELKKVTTRVAHVLPVSDDGGSTAEIVRVLGGPAVGDIRSRCLRLSDESTSEALSVRTLLGHRLPLDPSEAKLEWYQIVEGEHALWDGVSQPYRETIRAFLVYFHNEILRRSAEMFCFTNGR

SEQ ID NO: 50651 - protein, 150 aa, Oryza sativa
MRPRRRRLLPLSAAPLFAGALRLIALSFTLRYLDQILAVSLASVHYPLDPRPGNLSSLLLRPPLRVPPSHPPPPPPRSLSPLPPSLPLASTTSPSPSPPPRSLLSWRRRVVSNRLRSPRAARCTRGLRRRHVRGVRIGQAVACTLHAVQR

SEQ ID NO: 50652 - protein, 1008 aa, Oryza sativa
MNPFPHAAAALDPSSVLNAQYKHTHTEGEGDAGSPPNHHHHLHHLLSSRDCYCSTHCLALLSPSSNFPLSFYSPPGSNPARCNKPGILNLFFVNQLQAQLRGGKVTLAAQQEGFSDKMNSGAEYEDGSEEEEPHERVFYDDEDDGNDDSICGDPCDDSVPKEEVHRKLMHEAEPYDDLVAGEEESVENSALQAFKKERNEQELKQAQKMGYSIKQKEIPVDMEMGMKPFKKRLVKFADDVSCYTYSTESFAAAKLEKRKAQFDDQDKHLHKKQEHTPPSFPQDGGKLKEVDNTNLYVGNLPASVGSHKLIELFLPFGQIVRSRVVDDCFTGLSQGYGFVKYSDPRCASEAIKRMNGRLVEGRALEVRVAGFPSSEDNSQQPSKETDMAKLYVCNLSLSMNTDRLIHLFLPFGEVTNAKVAKDHTTGLSKGYGFVQYSSPHHAAEAVIHLNGRLVDGRKIEVRVSGIPSTLPNSAVESPSTTRNSAVESPSTTRTVKEIDMSNLYVCNMPSSIDTKKLVELFLPFGKITHARVVADPDTFSAKGYGFIKFTDSESATKAIAAMNGALVGGEMIIVRVAGLSPSASISAVQTTQDINKSRLYITNLPRSMTADKMVNLFAPFGQITKVLMNLEYSLVWYADAPSATKAVQHMDGYMVEGKRLVVKRSELCTTNASQAGGKPIKEIDMANLYVGRVPSSLTEDQFIDLFRPFGRVVQARMFRFQRYGMVRFDNPSCAAAAIDHLDGYQIGGSILAVRVAGLPAESNAAKGALTSQMSSNEQGQIDMTNLYVSHLPSYVNNERLIDLFLPCGQITQAKVVVERYTGVSKGFGFVKFADAYSAAVALTHMNGYPLDGHVLEVRIAGVHPDAMSSYMAHFYSHFTMHDPAKAAVGIPTSYWPHYYDESAYNTTAENLGQVTTTSATDASAAQTSQKERLPGSKSVDLVAEKDCSSASNKVANCSESQPTAWAGPPGFEPHAISKKCTAGSNASQACSKDHFAQSGGGHKRRSIV

SEQ ID NO: 50653 - protein, 790 aa, Oryza sativa
MAAAAARLPLQSSSGHNAAAGGGGGKTIEEMYQKKTQLEHILLRPDTYIGSVEKHTAQLWVYEDGAMVSRSVTYVPGLYKIFDEILVNAADNKQRDPSMDSLRVEIDADEGRISVYNNGDGIPVEIHQEEGVYVPEMIFGHLLTSSNYDDNVKKTTGGRNGYGAKLTNIFSTEFVIETADGRRQKKYKQVFSENMGKKSEPQITKCKQGENWTRVTFKPDLAKFNMTHLENDVVALMRKRVVDMAGTLGKTVKVELDHQKVPVHSFSDYVKLYIKSASKDRDDVNELPSISQKVNDRWEVCVSLSEGQFQQVSFVNRIATIKGGTHVDYVTNQIATHVMNIVNKRNKNAHMKAHNVKSHLWVFVNALIDNPAFDSQTKETLTTRQASFGSKCELSDDFLKKVGSSAIVLNLLSWAEFKLSKELQKTDGSKRSRLTGIPKLEDANGAGGKDSNNCTLILTEGDSAKALAMAGISVVGRDYYGVFPLRGKLLNVREASHKQIMENAEIQNIKQILGLQHGKQYDSTKGLRYGHLMIMTDQDHDGSHIKGLLINFIHSFWPSLIKIPSFLVEFITPIIKATNKRDKKIVLPFYSMPEYEQWKESLGGNASGWSIKYYKGLGTSTSSEGRQYFQDIAKHKKDFVWKNDQDDNDIELAFSKKRITDRKEWLTNFQSGTHLDTEGKYIKYSDFINKELIQFSMADLLRSIPSMVDGLKPGQRKILFCSFKRNLVKEIKVAQFSGYVSEHSAYHHGEQSLASTITGMAQDFVGSNNINLLQPNGQFGTRDQGGQRCC

SEQ ID NO: 50654 - protein, 739 aa, Oryza sativa
MEYHHRPHSPPPSDDDVVVIQMNAAAIAAVDEWSSTNEVDDAAAGKGGGLTRRTFSQAYKMKHRTPLEFTWRQVALLSFQSLGVVYGDLGTSPLYVFSSISLDDPGEADFVGILSIILWTFTMICLVKYVFIVLKADDHGEGGTFALYSLLRQHVNFKGNMPVPVTHLASDINLKFHSKKRILTSKLLKFLEQSTKWQAVITYIVLAGTCMVLGDGALTPAISVLSAVQGIQSRSSSITQAHVVLLSVIILFILFFFQKHGTSKVSFTFSPIMILWFTFVAFIGLYNIIKHYPPILKAVSPHYIIIYFIRNKRAAWETLGAIVLCITGAEAMFADLGHFNKSSIQMAFSVIVYPSMILAYAGQAAFLVKNPSKLSTTFYSSTPEPLFWPMFIIATLAAIVASQALISASFSIIRQSIALGCFPRVTMKHTSGKHEGQVYSPEINYFLMVACILITVGFKGGPEIGQAFGVAVIFVMLFTTNLMTVVMLIIWESNIALASLFFVFFFSIEGIYMTSLMNKILQGGWVPFAITAFFLIITLSWTYGRSKKGEYELANVMEREEFIKTVTTRSRVPGVCIFCTDMMNGIPPIVRHYVQHVASLRELMVFVTIRVLPVRTVLPEERFIIDKLEPVGVYRCIVQYGYMDNHNMEGDDYVASVIASLKEIAENDDEILVLDSALINGSTFVLGRTIIKMGTRHNCLKRFFINNLYRFLQKNFRSNMSSLKINPGKTLQVGMLYEI

SEQ ID NO: 50655 - protein, 781 aa, Oryza sativa
MDEEARAAGCSPAPPRAPAASCGAAAELCLCSPTEGIEQVPGCPCFEDAGAVVVSGEAPEGPGVLCSEDGAELKLAEQGALDVRLGSPAVGIHEQQLLHRGTSGSDEAGAINEISPVEVSPSEASSNLDTAGAIGGSPLMLESLPETSDTRGCEQEVMPGVVVGSSNRDASSEVGVESERGSDADGRNGLGEGELVSSVDGGGAEKSSKVTGVLSEEGVDGMETALEPCVASVGSITQVEEGVDRMETSLDDSEASDGSTTQDFDTDVETESSGSSIEEQDMGYGVHIPHTEQAICEVARGNKSSEVKSSDRMSSVTLPTLILASGAAMLPHPSKVLTGGEDAYFIACDGWFGVADGVGQWSFEGINAGLYARELMDGCKKAVMERQGAPEMRTEEVLAKAADEARSPGSSTVLVAHFDGQVLHACNIGDSGFLVIRNGEIYQKSKPMTYGFNFPLQIEKGDDPFKLVQKYTIDLQEGDAIVTATDGLFDNVYEEEIAAVISKSLEAGLKPSEIAEFLVARAKEVGRSATCRSPFSDAALAVGYLGYSGGKLDDVTVVVSVVRRNPPHGTLLSPPPTTMAMATQASAAKCHLLAAWAPAKPRSSTLSMPTSRAPTSLRAAAEDQPAAAATEEKKPAPAGFVPPQLDPNTPSPIFGGSTGGLLRKAQVEEFYVITWTSPKEQVFEMPTGGAAIMREGPNLLKLARKEQCLALGTRLRSKYKINYQFYRVFPNGEVQYLHPKDGVYPEKVNAGRQGVGQNFRSIGKNVSPIEVKFTGKNVFDI

SEQ ID NO: 50656 - protein, 620 aa, Oryza sativa
MERMRCVGGGDTPLGFRGVVEEELEEEVAAVSASGRPMQRQRRRRRRWGEDADDGYSASSTGGGGSSGCGSFGCDSPLAGFVRADGDPDTDLETDGVATPSSNASAAFAEPHDEEEGDEVLCGVVEGDWAQLQEPTKSPADRTTGECLYQRRRSEAVLLQGRKGLKQRPASLDFGSGSPGFNGAPLSPGFVVGGVGLMNKGLVSSSFIRSDVFPSPRTPNYRRHRSSVFGYQKGWSSERVPLASKGNRRYPGSSMAFPFSNGRTLPSKWEDAERWIFSPNSSDVLEKTSFAPARRPKSKSGPLGPPGKFGGQYSSVSLLDNGRVGHLTANSPFLAGVLIPEHYCGEKDNIGRYMSRTAGEEASIGIGGKSCLANGGSHATQYNRDRRRLDTAIESSPSLPSTQASVQDEQVGITEESASIITPIILRKDAATQTSPNLSRSSSPSVSTPFIHLLTTHQVREKENCFSDVIRDVHMDDRVTLTRWSKKHVTRASSKNSTNVIDVKKKTVESKSSSWELTEAKSISKVEREQEKITAWEHLQKAKAEAAIQKLVMKIEKKRSSSLDKIWNTLRSAQRRAQVMRETAAANQDEQSSGKAKRTSHLNKNGQISSLSGCFTCHAF

SEQ ID NO: 50657 - protein, 146 aa, Oryza sativa
MPVTNDLRKSKYSPPPETLVLSLSTISSFFLSNSLVLLPLHHPYQRLRAATSIPQLPSAAFDCRPPLPPSPIARRRIRPPRGQGIRICLPSTVSSVPMHHRRLRPPRVTASIPRLSGTESTCPNLVRQAPPPHPLSVGHRIRPPQG

SEQ ID NO: 50658 - protein, 45 aa, Oryza sativa
MHNPTLDQRTASVVHVTLHIFASESNHRTDLIVYGFMWIFYSIRG

SEQ ID NO: 50659 - protein, 120 aa, Oryza sativa
MAATQLWALAPLALLLVLQLAGACHAVPQSLEAEQASDSHFQPPMMNWINGMVGLCIASAAVAVAAELSREQACLGLLLCLAFHAGIALVIRAAAAPDAGRSLARTQSRRNRNLLYSYYL

SEQ ID NO: 50660 - protein, 396 aa, Oryza sativa
MDESTENLSCHSGSPSSSHDGTSTSTIEGEPKPSSGDLAKISREHKQEQESMEDLEDLLGMDEDTISNKVSYYFHQLYVQDHLDDDDDDDWLECDGPQQLTELHEQLAFYRIIGYELSNGRKLDELDIAKLKEKYPPSILYEKGYFQYYEDSLEWYFDPERFQPAALDNYQRLVLCDNGLYMDWDQYHSNYSTYESDLAYVKFCEELAHKTKWFQDYLVLIAVEDKITMGQWDKVKNTVYLQAMKIALRIRVVSLMQVMTAFQEYIWSMRFDCCNYKDFDGVYFEVWKRVAKQKMEFTDALSELHREDMFPLRNVDIKDELRSTRGRFRSMKENYDLYVACIDETVPEKEARQLIKDAIIEMIPKPQTYLDYARNKIKIAEDIGLITKSRGPEPRT

SEQ ID NO: 50661 - protein, 314 aa, Oryza sativa
MMAYALRGAALVGVLLLVVASPALVPVASAVPFIVLHGIGDQCENGGMASFTEMLGEWSGSKGYCIEIGRGAWDSWLMPLQEQADTVCKKVKKMKELRKGYSIVGLSQGNLIGRAVIEYCDGGPPVKNFISIGGPHAGTASVPLCGSGIVCVLIDALIKLEIYSNYVQAHLAPSGYLKIPTDMTDYLKGCKFLPKLNNEIPSERNATYKQRFSSLENLVLIMFEDDAVLIPRETAWFGYYPDGAFSPVQPPQKTKLYTEDWIGLKALEEAGRVKFVSVPGGHLSISRSDTKKYIVPYLKPDGSSRFGIRRILSD

SEQ ID NO: 50662 - protein, 697 aa, Oryza sativa
MSFGNLWNLRDIYVDGNQLSGNLEFLAALSNCSNLNTIGMSYNRFEGSLLPCVGNLSTLIEIFVADNNRITGSIPSTLAKLTNLLMLSLRGNQLSGMIPTQITSMNNLQELNLSNNTLSGTIPVEITGLTSLVKLNLANNQLVSPIPSTIGSLNQLQVVVLSQNSLSSTIPISLWHLQKLIELDLSQNSLSGSLPADVGKLTAITKMDLSRNQLSGDIPFSFGELQMMIYMNLSSNLLQGSIPDSVGKLLSIEELDLSSNVLSGVIPKSLANLTYLANLNLSFNRLEGQIPEGGVFSNITVKSLMGNKALCGLPSQGIESCQSKTHSRSIQRLLKFILPAVVAFFILAFCLCMLVRRKMNKPGKMPLPSDADLLNYQLISYHELVRATRNFSDDNLLGSGSFGKVFKGQLDDESIVTIKVLNMQQEVASKSFDTECRVLRMAHHRNLVRIVSTCSNLDFKALVLEYMPNGSLDNWLYSNDGLHLSFIQRLSVMLDVAMAMEYLHHHHFEVVLHFDLKPSNILLDNDMVAHVADFGISKLLFGDDNSITLTSMPGTVGYMAPELGSTGKASRRSDVYSYGIVLLEVFTRKKPTDPMFVNELTFRQWISQAFPYELSNVADCSLQQDGHTGGTEDSSKLSEDSIILNICLASIIELGLLCSRDAPDDRVPMNEVVIKLNKIKSNYYSLWKQWSSPGEIS

SEQ ID NO: 50663 - protein, 577 aa, Oryza sativa
MRASGAASPPPSSATTTTTTTTLLVPSSSVAMPPPRLAHLRRRSSSLLLLHHNHHHHRGGGSAPPHPLLRPPPPPQSHPFQLLTPRAAMASVAQPGVAAGSAEYEEVLGCISSLITQKVRADTGNRGNQWELMAKYLQILELEEPIARLKVVHVAGTKGKGSTCTFAESILRSCGFRTGLFTSPHLMDVRERFRLNGLDISEEKFIRYFWWCWNKLKDKTGGDIPMPAYFRFLALLAFKIFSDEQVKAPVVCGISSLGYDHMEILGNTLGEIAGEKAGILKKGVPAYTVPQPEEAMSVLKHRASELGVPLQVVQPLDPQQLDDQPLGLHGEHQYMNAGLAVALVNTWLQRQGHFNILHKKHSVTLPDQFIEGLSSACLQGRAQIVPDPEVLSKDSSSLIFYLDGAHSPESMEICAKWFSCVTRKDEQQPGPLDQLHIGTDSRKILLFNCMSVRDPQRLLPCLLATCAQNGLQFDHALFVPNQSQYNKLGSHASPPSERVQIDLSWQLSLQRVWEGLLHSNKGLNGSNSSTASSVFESLPLAIKWLRETAQQNQSTSYQVLVTGSLHLVGDVLRLLKE

SEQ ID NO: 50664 - protein, 1128 aa, Oryza sativa
MSSSRPTQCSSSSSRTRQSSRARILAQTTLDAELNAEYEEYGDSFDYSKLVEAQRTTGPEQQARSEKVIAYLHHIQRAKLIQPFGCLLALDEKTFNVIALSENAPEMLTTVSHAVPSVDDPPKLRIGTNVWSLFTDPGATALQKALGFADVSLLNPILVQCKTSGKPFYAIVHRATGCLVVDFEPVKPTEFPATAAGALQSYKLAAKAISKIQSLPGGSMEVLCNTVVKELFDLTGYDRVMAYKFHEDDHGEVFAEITKPGLEPYLGLHYPATDIPQAARFLFMKNKVRMICDCRARSIKIIEDESLHLDISLCGSTLRAPHSCHLQYMENMNSIASLVMAVVVNENEDDDEVGADQPAQQQKRKKLWGLLVCHHESPRYVPFPLRYACEFLAQVFAVHVNKEFELERQVREKSILRMQTMLSDMLLRESSPLSIVSGTPNIMDLVKCDGAALLYGGKVWRLQNAPTESQIRDIAFWLSDVHRDSTGLSTDSLHDAGYPGAAALGDMICGMAVAKINSKDILFWFRSHTAAEIRWGGAKHDPSDKDDSRRMHPRLSFKAFLEVVKMKSLPWNDYEMDAIHSLQLILRGTLNDDIKPTRAASLDNQVGDLKLDGLAELQAVTSEMVRLMETATVPILAVDSNGLVNGWNQKVAELTGLRVDEAIGRHILTVVEESSVPVVQRMLYLALQGKEEKEVKFEVKTHGSKRDDGPVILVVNACASRDLHDHVVGVCFVAQDMTVHKLVMDKFTRVEGDYKAIIHNPSPLIPPIFGADEFGWCSEWNAAMTKLTGWHRDEVINKMLLGEVFDSTNASCLVKNKDAFVSLCILINSALAGDETEKAPFSFFDRNGKYIECLLSVNRKVNADGVITGVFCFIQVPSHELQHALHVQQASQQNALTKLKAYSYMRHAINNPLSGMLYSRKALKNTGLNEEQMKEVNVADSCHRQLNKILSDLDQDSVMNKSSCLDLEMVEFVLQDVFVAAVSQVLITCQGKGIRVSCNLPERYMKQTVYGDGVRLQQILSDFLFVSVKFSPVGGSVEISCSLTKNSIGENLHLIDLELRIKHQGKGVPADLLSQMYEDDNKEQSDEGMSLAVSRNLLRLMNGDVRHMREAGMSTFILSVELASAPAK

SEQ ID NO: 50665 - protein, 102 aa, Oryza sativa
MSWRKGGGGDGGVSRRWAVLLCLGSFCLGLLFTNRMWTLPEANEIARPNGNGDEGNTLVAAECGPKKVQHPDYKDILRVQDTHHGVQYVQALSFLRIFLFAC

SEQ ID NO: 50666 - protein, 374 aa, Oryza sativa; identical to SEQ ID NO: 50236

SEQ ID NO: 50667 - protein, 185 aa, Oryza sativa; identical to SEQ ID NO: 35377

SEQ ID NO: 50668 - protein, 644 aa, Oryza sativa
MRAAPTTMWRSPAAPVCLLVAAVLLSAVAAATAGEEYVKYKDPKKPIGERVDDLLSRMTLAEKIGQMSQIERANATSAVIEKYFVGSVLSGGGSVPSEKATAKEWQQMVAKMQKAALKTRLGIPIIYGIDAVHGHNNVHNATIFPHNVGLGATRDPKLVKRIGQSTAHEARATGIPYTFAPCVAVCRDPRWGRCYESYSEDTKLVQLMTSAMVPGLQGDAPARYPKGTPFVAGGMNVAGCAKHFVGDGGTRDGINENNTVLSFHDLMRIHMPPYDDAVIKGVASVMISYSSWNGVKMHENRFLITDILKNKLKFRGFVITDWQAVDRITTPPHKHYYHSIQETIHAGIDMVMIPYDYPEFVADLTTQVSNGSIKLDRINDAVSRILRVKFAMGLFENPLPDPRLAGELGDKEHRQIAREAVRRSLVLLKNGKHGEKPVLPLSKKADKILVAGSHAHNLGFQCGGWTVSWQGQGGNNVTAGTTILEAIKAAVDESTVIDYTEHPDKSSIAESAKEYDYAVVVVGEEPYAETEGDNLNLTIPSPGPKVIKDVCGLVKCVVVLVSGRPLVVEPYIGAMDAFVAAWLPGTEGHGVADVLFGDHGFTGKLPRTWFKSVDQLPMNFGDKHYNPLFPFGFGLTTKPSHSQS

SEQ ID NO: 50669 - protein, 260 aa, Oryza sativa
MALFLRRGAALAARSIRAAAASSASTSVHRLPSVGSLAGARELAPTKLFLLEARRGFAKGKKSKDDGRGDTVQDAPDIGPTVKSAATQQMEAAVVALSRELSKLRTGRASPGMLDHIMVETTGVKVALNRLAVVSVLDAHTLSVMPYDPSSMKSIEHAIISSPLGINPTPDGNRIIANIPPLTKENIQALCKVVTKSAEDFKQSIRRARQKALDTIKKSASGMPKDDVKRLEKEVEELTKKFIKSADDMCKAKEKEISGN

SEQ ID NO: 50670 - protein, 336 aa, Oryza sativa
MSSSSSPPPNPDALSSPDLPPLAAPAAAAAAAAAAVSSGGAGGSGRRLPPPCWTHEETLALIEAYRDRWEGLRKGNLRASDWDDVAGAVTARCGRFPTATHKSGVQCRHKIEKLRKRYRAERARAAGRSKGPKWPFFPLLHDLAGGGAPDPSPNHIIKIKSKGPAAAAASPSPASPSPVSSPSSEEDEEEEAAADAGRSRSLHGLISNGGSGSGLRFTIPKASRSKPVAQREQPTAIKVEKSEEDAEAEAMAEVASALRAVGDKFLRMEERRLEISLQIEKERMESEMKRTQTLLDAQQLFVEAFLGKQQHHHHHHKKAKVISAAAAAATAAMDED

SEQ ID NO: 50671 - protein, 171 aa, Oryza sativa; identical to SEQ ID NO: 36196

SEQ ID NO: 50672 - protein, 158 aa, Oryza sativa
MAASLWRAVMGAGASSADTDTTGGVEFWRSPERAGWLTKQGEYIKTWRRRWFVLKQGRLFWFKDSGVTRASVPRGVIPVATCLTVKGAEDTLNRQFAFELSTPAETMYFIADSEKEKEEWINSIGRSIVQHSRSVTDAEVVDYDSGRPAASVTADGDK

SEQ ID NO: 50673 - protein, 372 aa, Oryza sativa; identical to SEQ ID NO: 30096

SEQ ID NO: 50674 - protein, 220 aa, Oryza sativa
MAGSGWRRIPAVRRPPMSRPASVCLWIVLVAATLALAQAKKSKADLTEVTHKVYFDVEIDGKPAGRVVMGLFGKTVPKTAENFRALCTGEKGTGKSGKALHFKGSAFHRIIPSFMIQGGDFTLGDGRGGESIYGTKFADENFKIKHTGPGLLSMANAGRDTNGSQFFITTVTTSWLDGKHVVFGKVLSGMDVVYKIEAEGQQSGSPKSKVVIADSGELPM

SEQ ID NO: 50675 - protein, 74 aa, Oryza sativa; identical to SEQ ID NO: 33490

SEQ ID NO: 50676 - protein, 305 aa, Oryza sativa
MSMWRFSRSLLRAAATTTTATAACASASTAGKHAASRRWVTPRELQRCWYASLPAAAAAVPGKDGEAEVTAEEARRLMRLANVEALKRKLGDGEVIPYAELLRACEEAGAARTRAEAAALAGALDEAGVVLLFRDKVYLQPDKIVDLVRKAMPLALTPEDDPRKEELKKLQTQLEDINKLAHKQVRRILWSGLGFLITQVGLFFRLTFWEFSWDVMEPITFFTTTTGLVVGYAYFLITSRDPTYRDFMERLFESRQKKLIQRQNFNLDRYLELQRRCKGPLEKMCGTNQTPNPDMAHLHELSVNK

SEQ ID NO: 50677 - protein, 196 aa, Oryza sativa
MASSPYHAAVGVAVLAILLAAPAAEAGAPTAAPLANYSLEDACKKTGPHYGLCIVTLSADRSAKSSDTVGLARVAVLAAQKNASETATYLSSIYDDDSIEKKTVQLQQCLEDCSERYEAAVEQLTDATVALDTGGYEEAMALVAAGQAEVKMCQRGFKAVPQHRNILTLRNREVDQLCSIAFTITKLIRVSPSAEE

SEQ ID NO: 50678 - protein, 54 aa, Oryza sativa
MVSASPLVDPITGVIGELQIRFGGQRNRWSRPPHWLIRSLESLATIGFLSGESF

SEQ ID NO: 50679 - protein, 555 aa, Oryza sativa
MCEQSTSSRRKLRFRRDSLQEQTTGFWYEDCQDDTGGVGNIHWQSRERARNAGRGCNSLFSANNRTRERYEYNACSCGQQEDYGYFSPTARSSREMKMSRKTMVEKPWLQYRRCYPLDSFIVSKGSRVGSTPNKNAAPKQVWEPMDARKKASLGSSNGSSETVSGVDRSNQVGCSKDIVNCSQILGSEHEELAEASSDRSEEACKSITDQPCESSENNQAACNSEPPVVNKPDSCFTKDGGQTANMTSSDSSSCLSEGDRDSSMSSMTSLSAQNPESSSTSDSEGSSERNNSNPGNPPTKNGSRSLLEMCAGNGFREYQPQNIHPSDGNQFGFGVTPFQEQLLHQQKIHAAPYPSTLMGFHNHHMSVPTNGYLAYPQPGHFYPNAVGYGVAGNQCVDFPMQYSNVHPYAGPEFGYVPAQPVHKTPVNFNAMVPTAALFRNGAPEVINPVIVKPDRQHRHTLPPEPKRVDPDPQNGCSEDNKKPQDGSVPFSLFHFNLPISSPAQASSEDEVSGGCLASRSPTPSAQKAQPCSREETNIKEYNLFSARTGVEFPFF

SEQ ID NO: 50680 - protein, 869 aa, Oryza sativa
MLQRAASNAYSWWWASHIRTTQSKWLDTTLHEMEDRVKAMLNLIGADGDSFGKKAELYFKSRPELINHVEEMFRSYQALADRYDRISSELHKANHTIATAFPDQIQFSMQDADGEGFQKAISGIDLSNFKFPALEGLPMGSRGASRGTSPVPKRTQMHRRITSHMNKENAQEEIDKLQKQILVLQTEKEFLKTSYDSALGRYLDIEKQVVELQDEVCSLQDAFSTGAAIEDNEARALMAARAIVSCEDTLVNLQDQQRRSSEEARTEFKRFIEAKKKLDTFKAECGQPHTQNDEPDNSDKEYIHAMPSGDVDDSVQNEIRFDLQEVCQKVKELIELHPGVSVTDLADKVDRLVEKVIDLELATTSQNAQINRMKTEIDDLHKCLQALEEEKSALVADSSKLVDRLKQVEEVLQAVQHLGNSIQNGTQNIHKEMNAACSELAEFVEKLHEPEPQNSGFMNSSQESSCQEEDSEVTSQYAKKQTSDSIDGSKNEVEKQDKGSEGPLVQQHPDTNGSDGEDKILLEGYASVLQSYKGTEQKLSEIEKTNQEYHSRSMSELKDLKSANAMKDEEIHSLRRMLSSLQRKMNAPAPENVDKSEETSKISTTPVTEDKEIAEIEEYMKQCQVEEQLASSISEEKFRAEIDRVLENNLGFWLRFSTSYHQIRNFQTSFDKLKTEMDKLIDAQAQCGADGVPISYQVAKLESAVLEKKFRDLNTDLQVWIEKNVLLKGELENRFSSLCGIQEEISKIATLDKSDEVHFTPFQAAKLQGEVLNMKQENNKVAKELEAGLDHVRGLQVEVGRVLLKLRENLELSIARSNRAQQNFRNLSTKAGVPLRTFLFGTKPKKPSLFSCMGPGVHKHHSGSRAGRR

SEQ ID NO: 50681 - protein, 164 aa, Oryza sativa
MDFLQQQGIRVEVIPGITSASGIAAELGIPLTHRGVATSVRFLTGHSRNGGPDPLYVAENAADPDTTLVVYMGLSTLPSLAPKLMKHGLPPDTPAVAVERGTTPQQRMVFAMLKDFVNEVKSEDLVSPTLIIIGKVVALSPFWIDSSKQGAQSIENLYAAETKR

SEQ ID NO: 50682 - protein, 309 aa, Oryza sativa
MDRYQRVEKPRPEAAVISENEIRITTQGLIRNYVTYATSLLQEKRVKEIVLKAMGQAISKTVAIAEIIKKRIPGLHQDTSISSVSITDVWEPIEEGLVPLEMTRHVSMISISLSPKELNKSSAGYQAPLHAEPIKPQRYQQTQQYQQQQHQSRPSQVQTDSYGRGRGRGRGRGRGWGGRGGYGGGYGGYDNNQGGYGGYGHQGGYGHQGGYGNQGGYGHNQGGYGGYGYNQGGYGGYENGGWNYNRNRGGGGGGGRGRGNWGYGGPGGYERSGPAYERGGRGGGSPGGRGYARGRGRMGGGRGRGNQNY

SEQ ID NO: 50683 - protein, 584 aa, Oryza sativa
MEPKNAIALDEHVLDSTIRKRKRVGATQCAEANDAPNLSQNGPKQNLALFPDSTGHKKSKMMCSADDILERYNNFRISGMPVRVMSHQHGGWRDFPEDVVNSVQQSFQLKRPITSAVFQNRHILLDFMQMVCLDSVMAISKPIAWIDDHGKCFSPDSCAGVIPSEPLQHGKNEFLKSFHDLSSSYEAHEHDGMSAAESSSSASFDAVLSDVQEVNNVVEDKQKVLNESGEVSGENKKGHLSHMNETADGAMQAPRNNQSVQRADSAVRNLLFQGSGHLFTEKDIIGIYRTPMLDQLGRSRYSLFQKEVQVTKNQRGNANERYAWLACTKGTMEEMMMNGALEIAKPLQGPMYGVGAHLAPANSSNICVGLSDIDENGIIRMMLCRVIMGNVEVVFPGSNQCQPTSESFDSGVDDLQRPKHYIIWDANVHKHIYAEYAVIIKVPYMNNGDTASNISEIRNSGALDNPTKDDSLQTIASSGDEQQACMLGRAPSPRSPSSPWMPFSMLFAAISAKVPRSDMDLVHKYYEEFKRRKISRPDLVKQLRQIVGDKLLVSTVVRLQQKLPPMAATEQVPRAPGRGGGASP

SEQ ID NO: 50684 - protein, 373 aa, Oryza sativa; identical to SEQ ID NO: 31362

SEQ ID NO: 50685 - protein, 322 aa, Oryza sativa
MVSMEVTDEMFKCMEVGLAFRDYNGRISSMDFHSKATNYLVTACDDESIRLYDIQNAVCLKTINSKKYGVELVCFTENPTYVLHSSKNGWDDSLRLLSLVNNCFLRYFKGHLDRVVSISLCSENGNILSGSLDRTVLLWDSRVEKAQGLLRVQGRPAVSYDDQGLVFAIAYGGYIRMFDARNFEEGPFDIFSVGNDDSEANVIKFSSDGRRLLLTTKAGRVHVLDSFHGNNIATYNVKPVVSNSTLEASFSPDGNHIISGSGDGSVYAWNVRSGKVARWGSTDSEPPLIRWAPGSLMFLTASSELSCWVPDLSKLGSFTVSK

SEQ ID NO: 50686 - protein, 447 aa, Oryza sativa
MREILHIQGGQCGNQIGAKFWEVVCDEHGIDPTGRYTGNSDLQLERVNVYYNEASCGRFVPRAVLMDLEPGTMDSVRTGPYGQIFRPDNFVFGQSGAGNNWAKGHYTEGAELIDSVLDVVRKEAENCDCLQGFQVCHSLGGGTGSGMGTLLISKIREEYPDRMMLTFSVFPSPKVSDTVVEPYNATLSVHQLVENADECMVLDNEALYDICFRTLKLTTPSFGDLNHLISATMSGVTCCLRFPGQLNSDLRKLAVNLIPFPRLHFFMVGFAPLTSRGSQQYRALTVPELTQQMWDAKNMMCAADPRHGRYLTASAMFRGKMSTKEVDEQMINVQNKNSSYFVEWIPNNVKSSVCDIPPRGLSMASTFIGNSTSIQEMFRRVSEQFTAMFRRKAFLHWYTGEGMDEMEFTEAESNMNDLVSEYQQYQDATADEEGEYEDEEQQEADDM

SEQ ID NO: 50687 - protein, 303 aa, Oryza sativa; identical to SEQ ID NO: 29397

SEQ ID NO: 50688 - protein, 227 aa, Oryza sativa
MEAEDDERAEAEAEARREKEAGNAAYRKLYLETAVRHYTRGALLDPRDISFLTNRAAAYLLMSKYKECVRDCDEAVEKGRELRADNKLVARALARKASALLKLAACAADYDPAIRALQQSLAEHYSEETLAKLGEAEEARKEIEERERLDQEAADHHRDRGNVFFKQKRYQEAAMHYTEAMKKNPKDPRVFSNRAQCHIYLGALPEGLEDADKCIALDPTFLKGLSA

SEQ ID NO: 50689 - protein, 171 aa, Oryza sativa
MWGELGNAATVAQLVGADLGGLISKIIQAAATARRNKAECEQLAVRASMIYDLLPHLQHPEVVRRPEVLRPLALLEDTLREAHQLVTCCQHKGPTYRFVMAGRLADKIRSVQARIDSYLLFLPLISHIDIIHCLDQIHRMLISTGDGDCRTMASPSADSQSLLQRRLVEES

SEQ ID NO: 50690 - protein, 451 aa, Oryza sativa
MDDENGLELSLGLSLGGTSGKSKARDAPLEPKAEPQVEESSSKGVSQTPEAPFVHYYQTNAENQEHSSKQRHSPAAPPFGNFWGQPGSSSVPVADGSNEQKPVSSKRKLLSEEISFQKKPNTAAEQPDAFSKSSDGGVKNAPISISTDDGSTGENEDVAESEAEGSNSWLVAQREDSAKGSVVNRGSDRKRSSDDAAVGFQGKRQPGFSRSESSSGKLPQGNPLSLQASNVVAVPYQVPSQVSAPPSITNASNFTPVCTVQLRPPTNNGLAVTMGSTSQVAFGYPAVQLPTLETSSSWAFGAPPQAMSSFTAKDKVERAGISQADDGKKTQEAGASSSALVEDDKKSDRALPLMGSAIRPGIAPNVKFGGSGSYPDLPWVSTTGTGPNGRTISGVTYKFGRNEVKIVCACHGTHMTPEEFMRHASADAPGQENSATLPAFPVGNQAASAQN

SEQ ID NO: 50691 - protein, 317 aa, Oryza sativa
MGSGNLMMKKVVRPSSFDFDIQLDKSWTEDVTCPICLDYPHNAVLLRCTSYEKGCRPFVCDTDQTRSNCLERFKGAYELPANMKVSTIAVAPLDSIHIVAPNVNNRPSCPLCRGDVIGWIVIGEARLHLNQKKRCCEEDCCSFVGNFNELQKHTQQKHPDSRPSEIDPARQVDWENFQQSSDIVDVLSTIHAQVPNGIVLGDYVIEYGDDETGEEYEVFRRVRRHWWSFMFFRGFSRSSRRRRRARARERRGSGRRNSNQAHLESFNLEVPTQSVDLREIRFDEIDDEYIVTGAIPSIATPGRMASFHYRSVETVYC

SEQ ID NO: 50692 - protein, 288 aa, Oryza sativa
MDNQVICTIYKLPDSHKHIARPPVGVIIPKKTVEATDLKPPPVLWHEDSGRRPHDNNNRRPYENSNRQNPAGAISGRQLGEAAHRLVVNSLNARSGGQYNTPSMPYQTIMNGMPYPNGIPPRMEQPAPGWHVPGDLPNGQVPPAYASSSGHYQNDRSGPSQYGRDNHGRYPYARDNHHDSRGRVPPYHQSGGNSYQSHSAPSAGPGRYAQPPPYAGGYGRSYQPAPYGGGQQWQQQQQQPYGSYAGSGPYGGGAPPARPNSRPQQSQNRYNTLDRNSNRRPPPGHGRH

SEQ ID NO: 50693 - protein, 709 aa, Oryza sativa
MAWRRVLSQLARSRPASTIYNELITSRPSWLLRGDVNGGGTLKNLNERYQSSFVGSLARRVQNLDVPSEASLLKEIYKSDPERVIQIFESQPWLHSNRLALSEYVKALVKVDRLDDSTLLKTLRRGMAVSGGEGERVGSSSALKSAGQATKDGILGTANAPIHMVTSETGHFKDQIWRTFRSLALTFLVISGIGALIEDRGISKGLGLSQEVQPIMDSKTKFSDVKGVDEAKAELEEIVHYLRDPKRFTHLGGKLPKGVLLVGPPGTGKTMLARAVAGEAGVPFFSCSGSEFEEMFVGVGARRVRDLFAAAKKRSPCIIFMDEIDAIGGSRNPKDQQYMRMTLNQLLVELDGFKQNEGIIVIAATNFPQSLDKALVRPGRFDRHIVVPNPDVEGRRQILESHMLKVLKSDDVDLMIIARGTPGFSGADLANLVNVAALKAAMDGAKAVTMNDLEYAKDRIMMGSERKSAVISDESRKLTAYHEGGHALVAIHTEGARPVHKATIVPRGRTLGMVSQLPEKDETSFSRKQMLAWLDVSMAGRVAEELIFGDSEVTSGASSDFQNATKMARAMVTKYGMSKQLGFVSYNYEDDGKSMSTETRLLIEQEVKSLLENAYNNAKTILTKHSKEHHVLAQALLEHETLTGAQIKKILAQANSTQQQQEHAVEAPRKTPAAPSSPAASAAAATAATAAAAAKQAAAKAKGVAGIGS

SEQ ID NO: 50694 - protein, 84 aa, Oryza sativa
MYLQKCFTFMAFKQNGWASTTVLSMPKNRGEKVRSKTPLSNHQKDRGIELLQFGPRGAQFNLLFLQSSYCIHCGSLIVSYIWFS

SEQ ID NO: 50695 - protein, 175 aa, Oryza sativa
MARPRFATTAPLLALAVLAAVVSVAVATAPAGKDPGGFVVTGRVYCDPCRAGFETNVSKSIPGATVSVECRHYGAGRESLKAEATTDEKGWYKVEIDQDHQEEICEVVLDKSSDPACSETEKTRDRSRVPLTSNNGLKQNGIRYANPIAFFRKEPLADCGSILQKYDLKDAPETP

SEQ ID NO: 50696 - protein, 734 aa, Oryza sativa
MGIVETWMREKPIRTFLAQLSTRRAAAGAAALLASSSAAAASADGEPGDRSIPQLSSIANSVVSRCSRVLALATETLQQNFEVDYPDSCKESNTYAKEFLEYCCHKALHEVTTRPDHLADKNLRRLMFDMMLAWEHPGAVVEDELSENHSALRTTVDIEDDDEGSIFYANSTRLAVQVNDKKTVGLGAFARIAPSCPIIADLVTVHNLFDALTCSSGGRLHFFVFDKYIKSLDKVFRSVKGILQSPLASSFHLDAGECILAMDGDRPIHPVFQHIGISAWPGRLILTTHALYFQSIKVGYGDKIVKYDLATDSDQVIKRDFTGPLGVRLFDKAVMYKSSTLTEPIYFDFPELGGPSRRDYWLAIAREVLQVNKFIRKFNLENVQRAEALSKAILGILRYSAVKEAFHISPSHFKTTLTFSLAEKLPKGDMVLKALYANYFQLLDTSLSHLVTESPVDNRLQNHSLPFSLYALSRMGFILLKRKDEAQSEISFCAVCFGVTKSLEAALEESICYSERIDAARATIDQVKVEGVDANLALMQELLFPFTQVVKLTYSLTKWEDPLKSFLFLAFTLYVIQRGFIAYMLPSFFLAFAVVMLWHKYNGREQLLGVLEVRTPPSKNPVEQILTLQDAISKLEETLQSVNIVLLKFRAVLFAAVPKTTEMVAVAFLAASAFLIFVPWRHLLLIAVLEVYTREMPLRKQNTEKFRRRIREWWARIPAAPVQMIKPNESKKKR

SEQ ID NO: 50697 - protein, 91 aa, Oryza sativa
MGNTPSCQTCAPYRMRYSKDFVPTNCKPLNIVFLILAHTYYHNNKKTYTCTLNYYPGQPVSLSLPLFFFLSIPPLSLSLSLSTARRRALQC

SEQ ID NO: 50698 - protein, 368 aa, Oryza sativa
MEAEKEMSMREWCVALPKVELHAHLNGSVRDSTLLELAKQLGDKGDIVFEDVKDVIMKNGRSLPECFRLFELYHILTTDHDTVTRITKEVVEDFAMENVVYLEIRTTPKNNEAKGMTKRSYMNAVIKGLKTVEAVEVVLFDSNSRADKTPMSELGGDTRKKKIYVRLLLSIDRRETTLAALDTVNLAMEMKDQGVIGIDLSGNPVVGEWETYLPALEHAKELGIPITIHCGEVANRNEIRAVLDFCPQRLGHVCCLNDEEWKKLKSLMIPVEICLTSNVMTGGAPSLELHHFADLYNAKHPLSLCTDDSGLFSTSLSNEYYLVASTFGLSKAELFQLAQDAVEFVFAGDELKRSLRELFERVGKELTT

SEQ ID NO: 50699 - protein, 239 aa, Oryza sativa
MDHAGNTVANVTVAQQPHYGRSVSPPSRVSSCSPPPPPVGTASLLVGNTSSSSSPTTTVVLSPCAACKVLRRRCADGCVLAPYFPPTEPTKFTTAHRVFGASNIIKLLQELPESARADAVSSMVYEAEARLRDPVYGCAGAVCRLQKEANELKVQLARAQADLLNARAQHDNLVALVCVELAHRRRDDDQQLEYQAPAPPLPHPAEYCSGGAGFGATVYQPFYDSDLDSAAWGEPQLWT

SEQ ID NO: 50700 - protein, 242 aa, Oryza sativa
MSTAVARGGMMPAGHGFGKGKAAAVEEEEDEVNGFFVEEEEEEEEEEEAAVSDASSIGAASSDSSSIGENSSSEKEGEEEGEEVESKAKEVAVEVEGGGLGFHGLGTLESLEDALPIKRGLSNFYAGKSKSFTSLAEAAAEAAAKEIAKPENPFNKRRRVLAAWSRRRASCSSLATTYLPPLLAPDHAVVEEEDEEDDSDAEQCSGSGGGNRRREPTFPAEAEPARAEEQLDAEELESGVVV

SEQ ID NO: 50701 - protein, 59 aa, Oryza sativa; identical to SEQ ID NO: 35230

SEQ ID NO: 50702 - protein, 331 aa, Oryza sativa
MAPANKAERKAVLDAGAWMFNVVTSVGIIMVNKALMATHGFSFATTLTGLHFATTTLMTLVMKWLGHIQPSYLPLPELVKFVFFANLSIVGMNVSLMWNSVGFYQIAKLCIIPVLCILEILFDKVRYSRNTKLSIVLVLVGVAVCTVTDVSVNSKGLLAAVIAVWSTALQQHYVHHLQKKYSLGSFNLLGHTAPAQAASLLILGPFVDFWLTNRRVDTFNYTTIVTFFIVLSCTIAVGTNLSQFICIGRFTAVSFQVLGHMKTILVLTLGFLFFGKEGLNFHVVLGMMLAVIGMIWYGNASSKPGGKERQIYSVPSEKTQKSSQSELDQKV

SEQ ID NO: 50703 - protein, 290 aa, Oryza sativa; identical to SEQ ID NO: 28792

SEQ ID NO: 50704 - protein, 224 aa, Oryza sativa
MTFSGTQDKCNACDKTVHFIDLLTADSIPYHKSCFRCSHCKGTLSMCSYSSMDGVLYCKTHFEQLFKETGTFKKNFPSGTKANSEQAKIPSKLSSVFCGTQDKCTACKKTVYPLEKMTMEGECYHRTCFKCAHGGCLLTNASYASHNGILYCQNHFWQLFKKSGSYDNLLKPASAAAENTVESEVAVAEPAKEDPETEEAAKEEEEEASPEQVAEAVVEDQEHS

SEQ ID NO: 50705 - protein, 149 aa, Oryza sativa; identical to SEQ ID NO: 33304

SEQ ID NO: 50706 - protein, 363 aa, Oryza sativa
MSCCGGAEEDSYGPPANQAAPPPNVNAPGNRGGPRGPGAARPGGPPKPVNIDVPAIPFEELKKITSNFSDRALIGEGSYGRVYNGTLSDGRAAVIKKLDPGASQETDSEFSAQIAMVSKLKNEYFLELLGYCLEDGNRMLAYQFATMGSLHNILHGKKGVQGAEPGPVLNWAQRVKIAYGAARGLEYLHEKVQPSIVHRDVRSSNVLIFDEFSSKIADFNLTNQGTDTAARLHSTRVLGTFGYHAPEYAMTGQINQKSDVYSFGVILLELLTGRKPVDHTMPKGQQSLVTWATPRLSEDKVKQCVDPKLNNDYPPKAVAKLAAVAALCVQYEADFRPNMTIVVKAIQPLLNTKPAGPAEPPPA

SEQ ID NO: 50707 - protein, 369 aa, Oryza sativa
MKITAIGLFLLVLIASCPVQIFCSSSYGNETDKLSLLEFKKAISLDPQQALISWNDTNHFCSWEGVLCRKKTPLRVISLDLSNRGLDGQISPSLANLTFLKFLYLDTNSFTGEIPLSLGHLHHLQTLYLSNNTLEGRIPDFTNCSSLEILLLNGNHLAGQLNNSFPSQLQNLILAENNLTGTIPSSLANITGLRGLSFMSNNIKGNIPNEFSKFVMMELLAVSGNMLSGRFPQPILNLSTLTNLYLTLNHLSGEVPSDLLDSLPNLQELLLGHNFFRGHIPLSLGNTSNLRLLDISNNNFTGIVPSSIGKLTKMSLLNTEFNLLQAHKKEDWEFMNSLANCSRLQVLSMGHNRLEGHLPSSLGNLSTHL

SEQ ID NO: 50708 - protein, 373 aa, Oryza sativa; identical to SEQ ID NO: 50403

SEQ ID NO: 50709 - protein, 457 aa, Oryza sativa
MATPPHDASPAPPNPNPVSDDPPPPPPVTETKPEPEPPLPTTSIDPTPSGDEESGDDSSSSVSSASSTSPTAAAAAAAAGGGGGGGGERAAPHPAAKDLLHISFNQDYGCFAAGTKSGFRIYNCDPFREIFRRDLGAAGDNGVGGGGGGIGVVEMLFRCNILALVGGGDAPHYPPNKVMIWDDHQSRCIGELSFRSPVRGVRLRRDRIIVVLENKIFVYNFADLKLVHQIETAPNPKGLCAVSQQPGSIVLVCPGAQKGQVRVEHYGARKTKFINAHTSGVACFALSQDGRLIATASTKGTLVRIYNAAEGNLLQEVRRGADRAEIYSLAFSNNLQYLAVSSDKGTIHVFNLKINVGLTTNDKPLPAPDPDVPHISPSLSFIKGVLPKYFHSEWSVAQFRLHEGEQYIVAFGHEKNTVAVVGMDGSFYRCQFDPVNGGEMLQLECYNFLKPSSDQPQ

SEQ ID NO: 50710 - protein, 404 aa, Oryza sativa
MASGRGGIPGPSRALLVLLLPALLMLLAFSTSSSAAASSPGAMHNNNWAVLVCTSRFWFNYRHMANTLSLYRTVKRLGIPDERIILMLADDMACNPRNNYPAQVFNNENHQLNLYGDNVEVDYRGYEVTVENFLRVLTGRHESAVPRSKRLLSDEGSHILLYMTGHGGDEFLKFQDSEELQSHDLADAVKQMKEKHRFKELLIMVDTCQAATLFSQLQSPGVLTIGSSMKGENSYSHHLDSDIGVSVVDRFTFYTLAFFEKLNMYSNASLNSLFNSYNPSMLLSTAYYRMDLYERPLNEVPVTNFFGSVMNTIHTDSAYSGFLAADDIGTIPSTGDNLLNHAVLQNKASQRRSNIEEVKEAQVRSHGWTDVLLEQLDVKNADTIVMYGLGTMGILLAISTWLSM

SEQ ID NO: 50711 - protein, 63 aa, Oryza sativa
MAGGRIAHATLKGPSVVKEICIGLTLGLVAGGLWKMHHWNGQRKTRSFYDMLEKGQISVVVEE

SEQ ID NO: 50712 - protein, 1076 aa, Oryza sativa
MAANAGMVAGSRNRNEFVMIRPDGDAPPPAKPGKSVNGQVCQICGDTVGVSATGDVFVACNECAFPVCRPCYEYERKEGNQCCPQCKTRYKRHKGSPRVQGDEEEEDVDDLDNEFNYKHGNGKGPEWQIQRQGEDVDLSSSSRHEQHRIPRLTSGQQISGEIPDASPDRHSIRSGTSSYVDPSVPVPVRIVDPSKDLNSYGINSVDWQERVASWRNKQDKNMMQVANKYPEARGGDMEGTGSNGEDMQMVDDARLPLSRIVPIPSNQLNLYRIVIILRLIILMFFFQYRVTHPVRDAYGLWLVSVICEIWFALSWLLDQFPKWYPINRETYLDRLALRYDREGEPSQLAPIDVFVSTVDPLKEPPLITANTVLSILAVDYPVDKVSCYVSDDGSAMLTFEALSETAEFARKWVPFCKKHNIEPRAPEFYFAQKIDYLKDKIQPSFVKERRAMKREYEEFKVRINALVAKAQKVPEEGWTMADGTAWPGNNPRDHPGMIQVFLGHSGGLDTDGNELPRLVYVSREKRPGFQHHKKAGAMNALIRVSAVLTNGAYLLNVDCDHYFNSSKALREAMCFMMDPALGRKTCYVQFPQRFDGIDLHDRYANRNIVFFDINMKGLDGIQGPVYVGTGCCFNRQALYGYDPVLTEADLEPNIVVKSCCGGRKKKSKSYMDSKNRMMKRTESSAPIFNMEDIEEGIEGYEDERSVLMSQKRLEKRFGQSPIFIASTFMTQGGIPPSTNPASLLKEAIHVISCGYEDKTEWGKEIGWIYGSVTEDILTGFKMHARGWISIYCMPPRPCFKGSAPINLSDRLNQVLRWALGSVEILLSRHCPIWYGYNGRLKLLERLAYINTIVYPITSIPLIAYCVLPAICLLTNKFIIPEISNYAGMFFILLFASIFATGILELRWSGVGIEDWWRNEQFWVIGGTSAHLFAVFQGLLKVLAGIDTNFTVTSKAPDEDGDFAELYVFKWTSLLIPPTTVLVINLVGMVAGISYAINSGYQSWGPLFGKLFFSIWVILHLYPFLKGLMGRQNRTPTIVIVWSILLASIFSLLWVKIDPFISPTQKAVALGQCGVNC

SEQ ID NO: 50713 - protein, 442 aa, Oryza sativa
MAITVRRSTMVRPAWETPRVRLWNSNLDLVVPRFHTPSVYFYRRGPEGGGTPEGFFDGERMRRALAEALVPFYPMAGRLARDEDGRVEIDCNGEGVLFVEADAPDASVDDYGDFAPTMELKRLIPAVDYTDDISSFSLLVLQVTYFKCGGVSLGVGMQHHVADGMSGLHFINSWSDLCRGTQIAIMPFIDRTLLRARDPPTPSYPHVEYQPAPAMLSSVPQSVTANKTTPPPTAVDIFKLTRSDLGRLRSQLPSGEGAPRFSTYAVLAAHVWRCVSLARGLPSEQPTKLYCATDGRQRLQPPLPEGYFGNVIFTATPLAEAGKVTSGLADGAAVIQEALDRMNDSYCRSALDYLELQPDLSALVRGAHTFRCPNLGLTSWVRLPIHDADFGWGRPVFMGPGGIAYEGLAFVLPSANKDGSLSIAISLQAEHMEKFRKLIFEV

SEQ ID NO: 50714 - protein, 223 aa, Oryza sativa; identical to SEQ ID NO: 33029

SEQ ID NO: 50715 - protein, 346 aa, Oryza sativa
MKTPSLLVQCFPGLLPSKATSCVPIVSERDLQLPSPAVEIIPSKSAHPYKYAGEKVDVQGLDIFKGKVSVADMIAFSPSEVVASKYDGSLKYWESSITLVNIIKNEIRDGQLSFRGKRVLELGCGSGLAGIFACLKGASTVHFQDTNAETIRCRAIPNVLANLEQARDRQNRPSESPVTPSRQLLAPNVHFYAGDWEELPTILSVVHPPAAPTNLSFSEDDFMDGCSSHDGSSIVGVDNCPRRSRKLSGSRAWERASETDQADGGYDVILISEVPYAVNSLKKLYALITKCLRPPYGVLYVVSKKNLVGSNGGARQLRALMEEEGVLGGHFLTELADREIWKFFFK

SEQ ID NO: 50716 - protein, 251 aa, Oryza sativa
MAKEVDPCDHGEVVDAGCVRAVLAELVLTFVFVFTGVAATMAAGVPEVAGAAMPMAALAGVAIATALAAGVLVTAGFHVSGGHLNPAVTVALLARGHITAFRSALYVAAQLLASSLACILLRYLTGGMATPVHTLGSGIGPMQGLVMEIILTFSLLFVVYATILDPRSSVPGFGPLLTGLIVGANTIAGGNFSGASMNPARSFGPALATGVWTHHWIYWLGPLIGGPLAGLVYESLFLVKRTHEPLLDNSF

SEQ ID NO: 50717 - protein, 567 aa, Oryza sativa
MSVRRRSESMEGLFSFDERKDRRSDVENSEDERRRLSIGSLKKKALNASNKLTHSLKKRGKRKVENRPSFTIEDVRDEEEERAVFSFQQELFSRNLLPDKHNDYHMLLRFLKARKFDTEKAIQMWAEMLQWRKEFGADTILEDFNFEELDEVLVYYPQGYHGVDRQGRPVYIERLGKVEPNKLMHITTVDRYMKYHVQEFERAFHEKFPACSIAAKRHIDSTTTILDVDGVGLKNFSKTARDMLGRMQKIDSDYYPETLHQMFVVNAGNGFKLLWNTVKGFLDPKTASKIHVLGTKFHGKLLEVIDASQLPEFLGGACTCAAEGGCLKSNKGPWNDPNIMKLAHNKEAKFTRHTRRLSEIEQRRGSFARLHLLKGRSSDTSTVESGSDVDDLSSPMMRRPVECSRLAPVREEMQIRARDSAAYYSCDDHFVVVDKTVDYGRGGAMPDKTSAPEVRAQARPFGGSTTSYATGSSSNRGGISSSNRSRTVVPKENTDEGFFRRFFRLLLALIIKVFAFFHIAYGQQEMRVDNPLPPAEPEPTSDDHPAVETFSVDRISPVIERLQRARG

SEQ ID NO: 50718 - protein, 224 aa, Oryza sativa
MGGILGRHDTMKRSSHGSKLETKMVESMQQRASHGTSLKSFDSIIMKFPKIDESLRKCKIIFEQFDEDSNGEIDKQELKHCFQKLEISFTEEEINDLFEACDINEDMGMKFNEFIVFLCLIYLLNEPAVSEAKIKMGLGNLEATFETLVDAFVFLDKNKDGYVSKEEMVQSMNETATGERSSGRIAMKRFEEMDWDKNGMVTFKEFLFAFTRWVGIDENEDDNE

SEQ ID NO: 50719 - protein, 282 aa, Oryza sativa
MGYLSSVIPTDGSPVSGGGLSQNGKFSYGYASSPGKRASMEDFYETRIDSVDGQIIGLFGVFDGHGGAKVAEYVKQNLFSHLLRHPKFISDTKVAIDDAYKSTDSEFLESDSSQNQCGSTASTAVLVGDRLFVANVGDSRAIICRGGNAIAVSKDHKPDQTDERQRIEDAGGFVMWAGTWRVGGVLAVSRAFGDKLLKQYVVVDPEIREEVIDHSLEFLILASDGLWDVVTNEEAVDMTRSIHDPEEAAKKLLQEAYKRESSDNITCVVVRFLHGQGSSGYA

SEQ ID NO: 50720 - protein, 471 aa, Oryza sativa
MAAAVGNPNAAAAASISASRVGAGALRAGGLRVAAGRRGAGAVVAAAMRPAKAVASPAKEAAGEVNGAASGGFARPDAFGRFGKFGGKYVPETLMHALTELEAAFHALAGDEDFQKELDGILKDYVGRETPLYFAERLTEHYKRADGTGPMIYLKREDLNHTGAHKINNAVAQVLLAKRLGKERIIAETGAGQHGVATATVCARFGLQCIIYMGAQDMERQALNVFRMKLLGAEVRAVHSGTATLKDATSEAIRDWVTNVENTHYILGSVAGPHPYPMMVREFHKVIGKETRRQAMEKWGGKPDVLVACVGGGSNAMGLFHEFVDDQDIRMIGVEAAGYGVDTDKHAATLTKGEVGVLHGSLSYVLQDDDGQVIEPHSISAGLDYPGVGPEHSFLKDIGRAEYDSVTDQEALDAFKRVSRLEGIIPALETSHALAYLEKLCPTLPDGVRVVVNCSGRGDKDVHTASKYLDV

SEQ ID NO: 50721 - protein, 133 aa, Oryza sativa; identical to SEQ ID NO: 35064

SEQ ID NO: 50722 - protein, 388 aa, Oryza sativa
MLLDLLREAFPKGSTVPKSFYEARKIVKCLSLGYDTIHACENDCVLFRKQYANADVCPKCNTSHRKTSKKSLDGKRVHKVPRKVLRYFPIEERLQKMFMSPKLANDVRWHDEGRTKDGLLRHPADSPDWKHFDNTYPEFAADSRNLRLTLATDGFNPFRLMNCSYSIWPVVIIPMNLPPWQCMKQPNFILSLLIPGPNSPGKNMDVYFEPLVDDMHDMFEEGVRTYDSSKDEYFQLHAALQKTITDFPGLGYVSACVTSGKVACPHCHSYTCSIHLKNGGKCCYMGHRRFLDANHKFRFDAASFDGNVELGTAPKPLTREEIFKQTEDLPADFGKDPKKKKTKPNSKGKETEEKIIWNRRSIWFRLRYWKDVMLPHNFDVMHIEKKCM

SEQ ID NO: 50723 - protein, 855 aa, Oryza sativa
MEQRNLFVSALSVGVGVGLGLASARWAAPGSGEGGGGAGIGVAELEAELRRLVVDGREGDVTFDEFRYYLSERTKEVLISAAFVHLKQADLSKHIRNLCAASRAILLSGPTEPYLQSLARALSHYYKAQLLILDVTDFSLRIQSKYGSSSKGLAQSQSISETTFGRMSDLIGSFTIFPKSAEPRESLQRQTSSADVRSRGSEASSNAPPLRKNASMSSDISDVSSQCSAHSVSARRTSSWCFDEKVLIQSLYKVMVSVAENNPVILYIRDVDQLLHRSQRTYSLFQKMLAKLTGQVLILGSRLLDSDSDHTDVDERVSSLFPFHVDIKPPEEETHLDSWKTQMEEDTKKIQIQDNRNHIIEVLSANDLDCDDLSSICQADTMVLSNYIEEIIVSAVSYHMIHNKDPEYKNGKLVLSSKSLSHGLSIFQESGFGGKETLKLEDDLKGATGPKKSETEKSATVPLKDGDGPLPPPKPEIPDNEFEKRIRPEVIPASEIGVTFDDIGALADIKESLQELVMLPLRRPDLFKGGLLKPCRGILLFGPPGTGKTMLAKAIANDAGASFINVSMSTITSKWFGEDEKNVRALFSLAAKVAPTIIFVDEVDSMLGQRARCGEHEAMRKIKNEFMSHWDGLMSKSGERILVLAATNRPFDLDEAIIRRFERRIMVGLPTLDSRELILRTLLSKEKVAEDIDYKELATMTEGYSGSDLKNLCVTAAYRPVRELLKREREKEMERRANEAKEKAATAENSESPESKKEKENSENPESKEKEKERKENSENKEEKTENKQDNSKAEGGTEGTIDLRPLTMEDLRQAKNQVAASFATEGAVMNELKQWNDLYGEGGSRKKQQLTYFL

SEQ ID NO: 50724 - protein, 204 aa, Oryza sativa
MDTGNKGTATPVLLNVYDLTPANDYLYWLGFGVFHSGIEVHGMEYGFGAHDFPSSGVFEVESKSCPGFIYRKTVWLGTTDMSHGEYRSFIEKLAGKYHGNSYHLVSKNCNHFTDDVCKNLTGKPIPSWVNRLARVGSFFDCLLPESVQVSPVGRVPTLRPVADDDLDSISTVSDNNEEDKHLLPAPSNDLHSVDVPLKLAKDVL

SEQ ID NO: 50725 - protein, 379 aa, Oryza sativa
MRRKTEMIQTTPCVALLLLVGVAFAARSASAITDGLLPNGNFEEAPDKSQMNGTRVTGRYAIPQWEISGFVEYIGSGQKQGDMLLPVPEGAYAVRLGNEASIQQRLTLTRGMHYSITFSAARTCAQSELLNITITPESGEIPIQTVYTSSGWDSYSWAFKAKHSVVLFIVHNPGVSDDEACGPLIDSFAIKTLNPPQRTKGNMLKNGGFEEGPYIFPNTSWGVLVPPMDEDDYSPLSPWTILSTTKSVKYIDAAHYAVPGGARAVELVSGMETAMLQEVSTVPGRSYRLEFSVGDAGDGCSGSLTVQAYASRGSVKVTYQSQGTGGYKRGLLEFTATEKRTRVVFVSMAYTTKSDGTLCGPVIDDASLVSVHSHRRFLL

SEQ ID NO: 50726 - protein, 289 aa, Oryza sativa
MEGQQFAWGREEGGWRKGPWTAQEDKLLVEYVRQHGEGRWNSVAKITGLKRSGKSCRLRWVNYLRPDLKRGKITPQEESVILELHALWGNRWSTIARSLPGRTDNEIKNYWRTHFKKGKPSKNIERARARFLKQRREMQQQSQLMQTGQQQQLGQDDDATSAVVDDNLAEVAPPAATSLTHDGELQIMQEMAPDMDDLLYYHPGDMSPYSYDDLLGSGGGECGAVAASAGAAASTSEGSSEELDGGAATWGSLWNLDDVVHDMMIDCAAGAGCCRGSFPPLQDKGLAFY

SEQ ID NO: 50727 - protein, 463 aa, Oryza sativa
MLNPIMSSDRSSKKVCVVGAGMAGLAAARELRREGLDVTVLEQLAGVGGQWLYDAATDAGDPLGMAGVHSSVFASLRINGPRESIGFSDFPFRPTNDAGGDARRYPVHGELLRYIRDFCDAFGLMDAVRLNTTVTRVAMAPPRRDGSLRWAVRSKRHGEAETEEVFDAVVVAIGHYSQPRLPTIDGMDRWRRKQLHSHSYRVPDSFAGEVVVIVGCSVSGAELALELRRVAKEVHLSTKSTEETITSAMSKSVARYENLHLRPQVEHLREDGTVVFDDGSFVVADAVIYCTGYNYSFPFLDTNGKVTVDDNRVGPLYEHVFPPELAPSLSFVGIPGKVVLPVFIEVQARWVAQVLSGRRTLPSPEEMQRAVEEHTRGMEAAGLPKRWTHDMFLNLERCDDYGERICGFPRMEQWKKEIFVSSLSDMVDDIENFRDGYHDSDLVRDALRRHGWTPAEEDDDAHK

SEQ ID NO: 50728 - protein, 84 aa, Oryza sativa
MRLRVLIILLQKCKPQIMSLAQAVNEIARESLMLHWGFMSVCARLCGDLTFWCFADLSSLDLPVMEGLDKLLLVSLQTTALVLF

SEQ ID NO: 50729 - protein, 297 aa, Oryza sativa
MSGSVHLASPAINKYDRPSLDFVPPRLKIPAGTIEESVIGGGTIDHVTNKKDVERQTTKPIGVMAPQDTWCRMDPKSLQQSEVDGHEGCSQNMLGYLHLASPAINKYDSRSLDFVPPHLKIPAGPIEESVRGRGTIDHVTNKKDVERQTTKPIGVMAPQDTWCRVDPKSLQQSEVDGHEGRSPKDSIYTNCTIPHRYSLPSKDDKDQCEYPWTKSSNQYPRTSRYYHGYYPPSSYNEGGFTPSIYIERGPSPWRHHKGDSSSSRYDGEGSSPPSHYEDSYRPSNVSWNRVFSALWRW

SEQ ID NO: 50730 - protein, 54 aa, Oryza sativa
MIQIELVELAHTSLTQTCPKTDHLLDEAEGEKLISCHITIKDHTTTVELICQQI

SEQ ID NO: 50731 - protein, 329 aa, Oryza sativa
MGENAQGSGRRPFGDLTNVLGKRPAPSNLEKSAGGIKIVRVEKAVEPRKEFDETAKASGGATRNTLPLFDSIAKENLMRPSIFRETKMQHMAAEAAVLLSKESDDMRSCAMSLGSSGLHDKEQESSLESEGGCEEDDDDDMDSEYLAYTRDSTKTATNDGECLTQEEMAGSSGNQKPLSSLDFTTGCDDMPCSDVHHHSLGNSELENDDTTKSCACSFCLKAAFMWTDLHYQDTRGRLAALKKSIKFARLLGKRSQGDEYSVNAGRYNLKRVAEMEFELYQQQRSLFLHTENVLIRESAQLHSSLVKLKEFRENCKTDLETASSSLLGK

SEQ ID NO: 50732 - protein, 652 aa, Oryza sativa
MQRQGRHLERSGSKRALDAGGGGGDDDDRAPKRPRVPALASVIVEALKVDSLQKLCSSLEPILRRVVSEEVERALAKLGPAATPARIQGRSSPKRIEGPSGINLQLQFRSRLSLPLFTGEKVEGEQGAAIHVVLLDANTGRVVTSGPESFAKLDVLVLEGDFNKEQDEDWTEEEFENHIVKEREGKRPLLTGDLQVTLKEGVGTIGELIFTDNSSWIRSRKFRLGLRVSSGFCEGVRVKEAKTEAFTVKDHRGELYKKHYPPALKDDVWRLEKIGKDGAFHKKLNSNGIYTVEHFLQLLVRDQQKLRTILGSNMSNKMWESLVEHAKTCVLSGKHYIYYSSDARSVGAIFNNIYEFTGLIADDQYISAENLSENQRLFADTLVKQAYDDWINVVEYDGKELLRFKQKKKSVTTRSDTAKASTSYPSSYGSTHSHKQLTGGPVNIEQSSMSSMSEDGTRNMSNGSQAARYAANPQDISQSITMPYDMSSLRPEEQFAGSSIQTQASRSSNMLALGPTQQQNFEFSALGQSMQPSPLNPFDDWSRLQENRGGVDDYLMEEIRVRSHEILENEEDMQQMLRILSMGGSSANMNHGDGFSPFMPSPAPAFNYEDDRARPSGKAVVGWLKIKAAMRWGIFVRKKAAERRAQLVELED

SEQ ID NO: 50733 - protein, 135 aa, Oryza sativa
MAMGARLCSSSIIVVVVVLIVATAAEAMRCPGTTSVYRRPKKKAADMVDMPLDADVFAEPAGRNAPQQVHITLGDQTGTAMTVSWVTMEEAGNSTVLYGLAMDKLDMAADATVTTYTYYNYTSGFIHHCTPLLGK

SEQ ID NO: 50734 - protein, 203 aa, Oryza sativa; identical to SEQ ID NO: 35395

SEQ ID NO: 50735 - protein, 291 aa, Oryza sativa
MDASSVALYGQLKAAQPFFLLAGPNVIESEEHVLKMAKHIKGITTKLGLPLVFKSSFDKANRTSSKSFRGPGLEEGLKILEKVKATYDIPVVTDVHESHQCEAVGRVADIIQIPAFLCRQTDLLVAAAKTGKIINIKKGQFCAPSVMANSAEKIRLAGNQNVMVCERGTMFGYNDLIVDPRNFEWLREANCPVVADVTHALQQPAGKKLDGGGVASGGLRELIPCIARTSVAVGVDGIFMEVHDDPLNAPCDGPTQWPLRNLEELLEELIAIARVTKGKKPLKIDLTLFKE

SEQ ID NO: 50736 - protein, 329 aa, Oryza sativa; identical to SEQ ID NO: 37132

SEQ ID NO: 50737 - protein, 300 aa, Oryza sativa
MGGGVMRTAAAKVGIAGGAAVAAAAAGGGRFRHVAPAFATAASAEAAAPTLVSAAGGGGGDEVPAVAASGAQRASSWEVDDWEFAGWRDGAAAEPEVTTAGKPRLVFAPPSREEAEEATTELRDAIDRVYFSEAPIEVVKEQDKDLSKLGADAIIPAMPGHVMQAFTLLKSSPEARGVVASLASDKNVWDAVLKNEKVMEFYKTHQQSLVYTFPEGTASVVSPEKLADASSENSSSGEKPESSPFADFMDNARKTVIDIVNDITNFFQDMFRKPNEAEILGGSFMALAIAVILLIMFKKA

SEQ ID NO: 50738 - protein, 175 aa, Oryza sativa; identical to SEQ ID NO: 33102

SEQ ID NO: 50739 - protein, 455 aa, Oryza sativa
MKSLSLPISTASLHPLLSALPSAPTFALFADMFRLRLPLCTTTFNIMLRHLCSGGKPARALELLRQMPRPNAVTYNTVIAGFCSRGRVQAALDIMREMRERGGIAPHQYTYGTVISGWCKVGRVDEAVKVFDEMLTKGEVKPEAVMYNALIGGYCDQGKLDTALLYRDRMVERGVAMTVATYNLLVHALFMDGRGTEAYELVEEMGGKGLAPDVFTYNILINGHCKEGNVKKALEIFENMSRRGVRATVVTYTALIYALSKKGQVQGTDKLFDEAVRRGIRPDLVLYNALINSHSTSGNIDRAFEIMGEMEKKRIAPDDVTYNTLMRGLCLLGRVDEARKLIDEMTERGIQPDLVTYNTLISGYSMKGDVKDALRIRNEMMNKGFNPTLLTYNALIQGLCKNGQGDDAENMVKEMVENGITPDDSTYISLIEGLTTEDERAIDDERLAAADAAKV

SEQ ID NO: 50740 - protein, 147 aa, Oryza sativa; identical to SEQ ID NO: 35146

SEQ ID NO: 50741 - protein, 308 aa, Oryza sativa
MALHATSSRDSVRAAAEGEPEWAGDASRRPAAFYSAVFAQIEEVGWERLVSGKGDGGVSCLVFRILDDQGRNHLLEITLPMNYPSSPPCLVADVPYLPELQWSKGSRLKDVVCQFQEHLKILQDYWSIMDDIDKVLWVVDPTKPTFAMSHRRIALGDDCYLLLHVNVRKPRSLPEVRFLGTDGKLDRLITNWRKYCKKWSADKKFHENLSTVLDFALPPPPSVNIEDDEQVDCGICYAKHLPIDDELGTHSGGTTDYTCENPSCSRAFHSVCLRDWLRAITTTRQSFDVLFGNCPYCSDPVAVKITDR

SEQ ID NO: 50742 - protein, 484 aa, Oryza sativa
MANIRALLIGLVRARGSLVDIGRCVSSSRPSYLASLGRHYKVPMEIRWLSSTGFPPHLVVGMPALSPTMNQGNIAKWRKQEGEKIEVGDVICEIETDKATLEFESLEEGYLAKILAPEGSKDVQVGQPIAVTVEDLEDIKNIPADASFGGEQKEQSIASEAQKVETDAAKESSIITRISPAAKLLIKEHRLDQSVLNASGPRGTLLKGDVLAALKLGASSSSTKQKNAPAAPSSQPTHDFQAQSVTIPQQNDAYEDIPNSQIRKVIAKRLLESKQTTPHLYLSQDVILDPLLAFRNELKEQHGVKVSVNDIVIKAVALALRNVPEANAYWNNDKEQAQKCVSVDISIAVATEKGLMTPIIRNADQKTISAISSEVKQLAEKARAGKLAPNEFQGGTFSISNLGMYPVDHFCAIINPPQSGILAVGRGNKIIEPVVDSDGTEKATVVTKMSLTLSADHRVFDGQVGGKFFTELSQNFGDIRRLLL

SEQ ID NO: 50743 - protein, 188 aa, Oryza sativa
MPASPRALAATVGLELDKVAVGSSTEKKAAVVTAWLSLPSRRPTPLPEPFLHRRRREGHHRGEPRLTDGQIRRSRFSLVVGTGSAPRRLATGVMDVELRLVANVGSGLLASCRRRIQPYCRIRDATPRWRRGGREKGGDSTGGSSSNSSSEEDERDVAAHRMSDMNQCACHRKVRTLMRCPSSVPSIR

SEQ ID NO: 50744 - protein, 162 aa, Oryza sativa
MGADDVDLDKVPDDAFVVYQGHHGDKAVYRANVILPSSAFSEKEGTYENTEGCTQWTIPAVPTVGDARDDWKILRALSEVAGAQLPYDSLSGVRDRISMVAPNLVHVDEREPCTISSEVKPPVKQQVSSTPFKTVVENFYMTDAITRASKIMAQCSATLLKK

SEQ ID NO: 50745 - protein, 443 aa, Oryza sativa
MEQLWVPSLPILGGRILPMLRHYCGFGSHHPLTWRSLQITGRKQKHNGCWIAYCLPSHNGTSISDTNGVRKDLALPDNLLRDAHILYCTSPAMGHNKEAHPETNKRVPAIVDALEKLELTSKHRGSQVLEIQDFQPASLDDIALVHSRSYITGLEKAMSRASDEGLIFIEGTGPTYATQTTFQECLLSAGAGITLVDSVVAASKLGPKPPLGFALVRPPGHHAVPEGPMGFCVFGNIAVAARYAQNQHGLKRVMIIDFDVHHGNGTCDAFYEDPDIFFLSTHQLGSYPGTGKIHQVGQGNGEGTTLNLPLPGGSGDYAMRCAFDEVIAPAAQRFKPDIILVSAGYDAHALDPLAGLQFTTGTFYMLAARIREVAAELCGGRCVFFLEGGYNLESLSSSVADTFRAFLGEPSLAARFDDPAMLYEEPTRKIREAIDKAKHLHSL

SEQ ID NO: 50746 - protein, 174 aa, Oryza sativa; identical to SEQ ID NO: 35152

SEQ ID NO: 50747 - protein, 317 aa, Oryza sativa
MATLTVPSAVPPVADDCDQLRKAFQGWGTNEALIISILAHRDAAQRRAIRRAYADTYGEELLRSITDEISGDFERAVILWTLDPAERDAVLANEVARKWYPGSGSRVLVEIACARGPAQLFAVRQAYHERFKRSLEEDVAAHATGDFRKLLVPLISAYRYEGPEVNTKLAHSEAKILHEKIQHKAYGDDEIIRILTTRSKAQLIATFNRYNDEYGHPINKDLKADPKDEFLSTLRAIIRCFCCPDRYFEKVIRLAIAGMGTDENSLTRIITTRAEVDLKLITEAYQKRNSVPLERAVAGDTSGDYERMLLALLGQEQ

SEQ ID NO: 50748 - protein, 282 aa, Oryza sativa
MDGLHGTDGCFSPGRAMSPQVRPPVPPDAASGGQYLAELLQEHQKLGPFMQVLPICSRLLNQEIMRVSGMFRQPGVGDFERSQPASPNQMHPSHIVPNFCGNAFGPWNGMRPERVSFSQGPGWQGAPQSPSSYIVKKILRLEIPTDAYPNFNFIGRLLGPRGNSLKRIEASTGCRVFIRGKGSIKDPNKEEQLKGRAGYEHLDDPLHILIEAELPANVIDARLAKAQEILEELLKPVDESQDYYKRQQLRELALLNSPLREESPHPGSASPFSNGGMKRMKQ

SEQ ID NO: 50749 - protein, 531 aa, Oryza sativa
MGSVDLIAACLDSIRQIGDEIADALVYLDAGTLEAFQFIGAFPLLLELGARAICSLENASPLDAAAEWHSSFAHPARKIVVITSRLLSDAHRYILRCLGNHGTISHCTVLTAISEVGHSAYVDSPFGPDAFREYETLLTQDHEELLKKYEKSDEHKDTTFYTGKDFTSDGGRYSNWESGVHYGSNSESSPTKKDLFADESSQLETKGKRLSVTVTHFPMIFSPISSRTFVLPSEGTMAESCLSNHHEDSLSPGLPPISTGRSFDGDETPPGVTLTAQFLYHLASKMDLKLDIFSLGDTSKVIGKLMMDMSSLYDVGRNKRSAGLLIVDRTLDLLTPCFHGDSFLDRMLSSLTRKEGTSSYFVSKNPQTPSKHSEATVKRIPLDIKVPFEKVFSKEEPKSRASMLPESIMSFVSGWNSAEVESEVTWLPDYADKAHDDKLSSQHGSLNGSFLSNYAGVCYLESLLDRGAKDGLMLIKKWLMEALQHEKLSFPSKGRQGAASVSELHSMVQMLSRDQLSLVRNRGVIQLALGC

SEQ ID NO: 50750 - protein, 228 aa, Oryza sativa
MGNIFVKKPKVTDVDRAILTLKTQRRKLAQFQQQLEKVIEAEKEAARQLVQQRKKDRALIALKKKKAQEELLKQVDTWQMNVEQQLSDIELASKQKAVFDSLKAGNAALKSIQNEINIDDVQKLMDDTAEAKAYQDEINAALGEQLSAEDEEAVMAEFENLEAQLAVESLPDAPVTEVRPEEKSETPAVTEAAEDIDEVIELPDVPTKAPERPEAAEKTKVLEEPLPA

SEQ ID NO: 50751 - protein, 45 aa, Oryza sativa
MSILCKSMIYAQYIFNVICAGNWESWMTFSVYLHPKPTVNSCIFL

SEQ ID NO: 50752 - protein, 318 aa, Oryza sativa
MLLLSTPNLLVAKQLPFCSNANTITHMPEGTYKTNLLQLAKNLITNVNQTQLHSANGTAGAAGPDTVYGAVLCRGDSSAESCATRLQRVLDTASINGTSGDDSGYFQNQKNVTLYDHDFQALLSFSDKDFISSFSNAPECTVSAYLNPPPDADRAQFSQLFSELMEKIAAAVVSRRPVNYLTGRGWFDLKSQTVYALAQCTDGMPPENCRSCLDGIIDEGKKMVGGGLTGGAVLGMRCSLWYQTDVKFFAGDPEVSLHMPTPSKFWIWVVIGSFSLMVSISWLLVHIWIKRERKRDKRSYTKLLKGKQTWARWFWSCL

SEQ ID NO: 50753 - protein, 190 aa, Oryza sativa; identical to SEQ ID NO: 30317

SEQ ID NO: 50754 - protein, 796 aa, Oryza sativa
MDSVSLSLLDSISNFRVLSSSNASKTELVKKYCQTMDGILDHLEVALNRAFPQITPDGELSKVLEELGATINEATELVGGWNQMMSKIYFVIQADSIIAKMQIYVFELCQIVNSLMQIESMHLEDLEHDSCGKISDVIREASRALAGEVMPNSEEFGKIQTTLSLSTNQELLMEYVALVKVKTKGNHEDNKEMDDINDIVELVNHMLDKHVEEKQTRSINGVTIPADFCCPLSLELMSDPVIVASGQTYEHVFIRKWFDLGYNICPKTRQILGHTKLIPNFTVKQLIENWCEVHGIMLPDPVKLLSLCFPVSLNITDGSASADKSGSPEHCQLVAALHPKAQCASDDSHHYNLIHENSDSDDRVSSFGDTDDSEPDSLRLSTETTAANKSLLDEKTDRSDGLKQLRDNGFQVSDEEQYLERNGKSHISSHHQLEVDGENVRVQASSDINASEVMQDDPVTTCSKVSDNPPRLGGVRSRNQPNWWRQSNKTIPRIGLSSSTDSKPDFSGNDAKVRNLIEELKSDSAEVQRSATGELRILSRHSLENRIAIANCGAIPFLVSLLHSTDPSTQENAVTILLNLSLDDNNKIAIASAEAIEPLIFVLQVGNPEAKANSAATLFSLSVIEENKIKIGRSGAIEPLVDLLGEGTPQGKKDAATALFNLSIFHEHKTRIVQAGAVNHLVELMDPAAGMVDKAVAVLANLATVHDGRNAIAQAGGIRVLVEVVELGSARSKENAAAALLQLCTNSNRFCTLVLQEGVVPPLVALSQSGTARAREKAQVLLSYFRNQRHVRVGRG

SEQ ID NO: 50755 - protein, 271 aa, Oryza sativa
MAAMATAPCFPATPGLPARGAVAARSRMAAGGSRSQRRRSSSGVFLCRSSTTGSSRMEDYNTAMKRMMRNPYEYHHDLGMNYAIISDSLIVGSQPQKPEDIDHLKDEEKVAFILCLQQDKDIEYWGIDFQTVVNRCKELGIKHIRRPAVDFDPDSLRTQLPKAVSSLEWAISEGKGRVYVHCTAGLGRAPAVAIAYMFWFENMDLRTAYEKLTSKRPCGPNKRAIRAATYDLAKNDPHKESFDSLPEHAFEGIAGSERSLIQERVRALREA

SEQ ID NO: 50756 - protein, 215 aa, Oryza sativa
MWSSDSEADLTAAAAAMTTTTTTSSSSSSSSSPSSSPPPPRRRHRHHRRAARRTHPVEAEAEEVWRGAQWEAAWPRRTKPVVVAEDEPPSGGVIVGACTAGGGEEGGGVGRARSLTDDDLEELKGCVDLGFGFSYDEIPELCGTLPALELCYSMSQRFLDDHPQSHHSPPPPPPPMPSPSIPNWKISSPGDSPDEVKARLKYWAQAVACTVRLCS

SEQ ID NO: 50757 - protein, 218 aa, Oryza sativa; identical to SEQ ID NO: 32057

SEQ ID NO: 50758 - protein, 34 aa, Oryza sativa
MLLLMILLREKSPHWMSYIELEPRYRQKSLLIVS

SEQ ID NO: 50759 - protein, 410 aa, Oryza sativa
MGSKKRSPQHPAAAAPPPAVGGGGGGEVSGDGGASTANGPVVPKPSEVAPFLTKVYDMVSDPATDNVISWAEGGGSFVIWDSHAFERDLHRHFKHSNFTSFIRQLNTYGFRKVHPDRWEWANEGFIMGQKHLLKTIKRRKKSSQESPSEIQKAPVKTAPGTENIEIGKYGGLEKEVETLKRDKALLMQQLVDLRHYQQTSNLEVQNLIERLQVMEQNQQQMMALLAIVVQNPSFLNQLVQQQQQQRRSNWWSPDGSKKRRFHALEQGPVTDQETSGRGAHIVEYLPPVPETSGQVNPVEGAICSANSQPVPSPAVATPMDMQTSNVADTLGSSEEPFADNSTLHEWDDNDMQLLFDDNLDPILPPFENDGQMGPPLSVQDYDFPQLEQDCLMEAQYNSNNPQYADVITEA

SEQ ID NO: 50760 - protein, 649 aa, Oryza sativa
MGLSISYPPDDYLPAMEDNMGRLFIRSLSFDDDMEAAADDSPSTSPMPSPSATLLPAFGSGGKLIIEGSLSFKRREADPVQMETMISIRSPKSDKESCSSKPNATAGASRFALAGDQTPEDSPVIAGVASPKHQAAAVRLQKVYKSFRTRRQLADCAVLVEQSWWKLLDFALLKRNSVSFFDIEKPETAISRWSRARMRAAKVGKGLSKDEKAQKLALQHWLEAIDPRHRYGHNLHYYYHRWLHCEINQPFFYWLDVGEGKDVNLEEHCPRWKLHKQCIKYLGPKERESYEVIVEDSRLIYKLSRQIVNTTKSRKGSKWIFVLSTCKTLYIGQKQKGTFQHSSFLAGGATSAAGRLIVEDGILKAVWPHSGHYRPTEQNFQEFMNFLKERNVDLTDVMLNPSEGEDDAEFSLKSSHSRQDLTELCEPDMQEHEEQVTQHHGADETKTSSDAPTMTSTETMASTPAIRKSTSANKLQGKRPPRLLISSNNTELPATHCNGRPSPVHKDIDEDSTMFGECLAFCKKNLFAEEGNEEDELVEVPEEMIMNRINCKKATKSYQLGKQLSFQWSTGAGPRIGCVRDYPSELQFRALEEVSLSPRGTRSTRFSSPRRKPLTPNSIPVARFGCSPTAQGDNMGLKPRQRCATWTAF

SEQ ID NO: 50761 - protein, 355 aa, Oryza sativa; identical to SEQ ID NO: 40884

SEQ ID NO: 50762 - protein, 438 aa, Oryza sativa
MATTAKAPATASAAAPAATAPAATATATATTATASATAATGNATATAPPPPYVPVSQWYADRSVFVTGGTGFMGKVLVEKLLRSCPGISNIYLLMRPKRGQDVSARLAEPAELAAVRDPEAGAAARVQQDHPHPGRRDGAGAGHLGLGPKASYGQRVGGVPLGGHRQIRRGPQAVRHHQHAGHQAAGGAVPEDDEAGRAGARVDGLLQLRPHRGVGGDLPAALRAQAHHPVHGVDGRRPDPGRDAAPAGRPPQHVHLHQGHGREDAAGRGGRPAGGHRAALHRAVVTPGACRGLGGQLERAHGHHRRRGQGLLPVHAVPREQGGGPGARGHRHQPDDHGGLAHGHHAPLHKRHRRVQLRHRPAEPHHVEGVCRQLAAVRAEAPAVQHAVVPGRADAHELAAEPRLDDGAAHGPGAGAGRVCAPRGPQALHHARAGQAG

SEQ ID NO: 50763 - protein, 652 aa, Oryza sativa
MAEYATAKTSVWWDIENCQVPRACDPNLIAQNMSSALAAAGYTGPVSISAYGDIGRIGNAVTHALSSTGISLNHVPAGIKDASDKKILVDMLFWAIDNPPPANYLLISGDRDFSNALHKLTMRRYNILLAQPPNVSQALTAAAKSVWLWKSLVAGEPPLAESPYVSSTASGNMVELDKSKNINSDSSDTTTDTNPQNGLQSDHQKGGNGKADKQSKVKQPRRNQSDNVSKPASNEENSVEVADNSKECTTDHPTQSSMPSSSSSSSSESQDGAKVNQSSKPKVQPFSLPKKPAKSAHCHQKTAPHDFNSKKSGASAESAAKNGTPDSGNGGGYNPKHHKPHTSQSPRPQNSITHPHSGSEIFHHTLSSQRTNSCSPSAGHNGAPTAPLQSWPSAPPYHSPPVNYPDLNRINISGYPRGIHDNQGVNMNYHPNHSGSPHNVQPAYNSYRPPTPPSMPSNMQNAGQWGVNPGYPQPSSDPQGLIRNILGALEVLKTEKIPPIEQHISDCIRYGEANLPNFDVKKALELAIQHQAIVLKMLGPMSFYLGKNQNLWKCVNIMDINAKYPKDTFDAVHRFISSTSGSSAIKNSRSKYQAAIVLKNQCLKHLALGEVLQILYIIINTKKWFVPHSSGWQPLSFNIIVVDATTGAGGKA

SEQ ID NO: 50764 - protein, 440 aa, Oryza sativa
MGSREPFLSAIFFFFFLLLFCLGCKCIASELHLHTTQTAVLKVDASLQHARQIPDTLFGIFFEEINHAGAGGIWAELVSNRGFEAGGPHTPSNIDPWSIIGDDSSIFVATDRTSCFSRNTVALRMEVLCDNCPAGGVGIYNPGFWGMNIEDGKTYNLVMYVKSPETVELTVSLTSSDGSQNLASSTIPVSGASNWTKLEQKLVAKGTNRTSRLQITTTKKGVVWFDQVSLMSADTYKGHGFRTELISMMLDLKPRFLRFPGGCFVEGEWLRNAFRWRESIGPWEERPGHFGDVWHYWTDDGLGYYEFLQLSEDLGAAPIWVFNNGISHNDEVDAAAIAPFVKDVLDSLEFARGSADSTWGSVRAAMGHPEPFPVKYVAIGNEDCGKKFYRGNYLKFYNAIREAYPDIQMISIVMLHQDHLTILLIYMTSTSILILRLCFR

SEQ ID NO: 50765 - protein, 433 aa, Oryza sativa
MVVGAVLNNLTALTELHLAGNEITTTGWISNLTSLQVIDMSSNKVHELNGICGLHQLKYLSLGFNMIQGVINPCLGKLQYLVYLDMGSNFLTGEIGQYLLSNLTQVEEVHLGDNNLTGTFDFSSLANNSELHSIVLSNNCKLEIETELVRWTPLFQLEYLNLSNSIVNKRSNGIIPTFLSAQVSLSGIDLSICSLQGRIPSWMLLYNVSLGFLLLRGNSMDFLDTGNLGANVTSSMEVLDLSDNRISMKMPYNFGSLFPYLKYLDMSSNMLNGGVPSLAEAASSLQFLDLSFNMLNGEISPELIGNACILTSLLLSHNDLTGPMPPFHWSLGQLTHLSVENNQLSGRLPPLLTNCTNLENLNVRNNRLSGVIPVGLLSFEKLGALLLGGNQFHGVIPWDICLNNHIHFIDLSNNWFSGEIQVAYTVFSGQSCQ

SEQ ID NO: 50766 - protein, 811 aa, Oryza sativa
MDHDSLQNTMEHPVPGEEHEEDNSMKVDVAFDGVHSPFRYRHKKRSKVWEEYKPIFLNGKVQFAECLYCHNRLSCKDSNGTSHLWRHQKICPGKEEAAQRRQKDSYFPCVLVNENDPVSPHDPVNDVITETLSDINSVTPSGNRFTSKVWKEFTPVYIEGKLQAADCIHCQKRLSANKFGGRSHLSRHLITCAGRRGRGGGQIHQKGLFYPSSVPSLKSRVQDELSPALTNGKVQIAEYSSKLLRASSSGDSTPKPIRVVPAEHSVPTPDYTSLMKQRTSFVTTPAGQETSDPDLVGMIALHGYPLSIVEHEEMMRFVKKLNPVVNLVSRNAMEEHCLTLFQKEKENIKGKIAHFSRRVSLSASIWTPDGPETTVNYLCLTAHYIDEDWKVHRIIIKFGMFWSAPADLERMIHCMEACVPESESGSYNVILDAIRDWNLDQKLLSLTSVGEVRGDTNTSLLKEMLIEKKCLPIGGTLFNVACVDYVLNSIVFKVQADILRLVGDIVMDFLVSLTQQQLLEVISQTGLKCPQEDAKWWHKLYFRLEVLLHFKKSFPSEERVSPEDTKTAESVCKILRTIYRVIEVISSPSSPTANIYFNEIWKVRTVLQEEALNDHREIATVAMVMQEAFNEYWQNSYLWLAIPVVLDPRFKFSFIEFRLKRAFGTDSASYLSVIRETVRELFNEYCHSLNQASDVVSNSEALCADDNDSLEDWDQHLHEQASRQLSSELDDYLEDGLVPRKDDFDILNWWMTHSTKYPTLATIARDILAMPASAVQSEAAFSSSGPVIPKHQSTLNIRTIEALVCTRDWMR

SEQ ID NO: 50767 - protein, 66 aa, Oryza sativa
MALNAEKKLFFHAMDWLALAAGYNELFICLISSDDMKGIPLPMSIKQTDMEFTSATTITSAICCRR

SEQ ID NO: 50768 - protein, 421 aa, Oryza sativa
MACCCLRASTAPRFLLFRAAARRAPLPVAVSRKGFSEQSVLPITDMIENFQGPSMENIPRIPLYDDSLPSSLLTTSPNPSDSVAHADPSKSRIMLVDGTSVMYRSYYKILAQLQHGQLEHADGNGDWVLTIFKALSLVLDMLEFIPSHAAVVFDHDGVPYGHYTAMPSKECHMAKGMTFRHMLYPSYKSNRIPTPDTIVQGMQYLKASIKAMSIKVIEVPGVEADDVIGTLAVSSVSAGYKVRIVSPDKDFFQILSPSLRLLRIAPRGSGMVSFGVEDFVKRYGALKPSQFVDVVALSGDKADNIPGVEGIGDINAVKLITKFGSLENLLKSVDEVEEERIKQALISQSEQAMLCKSLATLRSDLPSYMVPFKTSDLVFQKPKDDGAKFIKLLRALEAYAEGSSADLIIRRAAYLWNKLNS

SEQ ID NO: 50769 - protein, 156 aa, Oryza sativa
MLRFWRTQRSVTSSDALSVSKTYRGDERPHGLRGLREAREEGHVPARRREHGGDRHGHAEGDGDGVRGPAGGAPGGAADGEGGGVLAVAVRRRVLPVRDPVPGGRHLHGDAQVLRPRLQRPGDRLLPQPRLHPHRRRPRPRLLPRRQRPRLLHHVT

SEQ ID NO: 50770 - protein, 241 aa, Oryza sativa
MDQGVDKNVIDNSLVSNCDFPVVKKLDKCVNEEASVQSPFENKDTRSLGMVCDHENNKSGVAEVITPPENEAIESYISKSVADEDPSYGCQTPRESIFDPFAPGPEELACAPKKKVTKAPELPSRRQLSFDSGDYPVKRLSFEFDDAEEEDQFLERICMMFIDLIISNQALETTGKDLIGSNSPRSCETPSSEPLLTGIADTCPDAPLRRPLKAVQLSPSICRKLDFDSVSPRCLFVKENK

SEQ ID NO: 50771 - protein, 186 aa, Oryza sativa
MAAVGLLVLVGLQVVVGSMAAQEAGDAPASITGPCSRTGDKKACVELLSGIPEARKATTVGPLAELYLQAIANHTTEAKAMATKLLATMKGKGVPPVCLQQCTASVDTLSSALAAFFSASADVNKKYRDLDGFLVGFLKQPPICMSACPIRSCDMEEVTIADKFHQAWKMLGVAHDLITQILGTKS

SEQ ID NO: 50772 - protein, 448 aa, Oryza sativa
MEVLIRWSKLPAAGSLVLYAVFLLLSAAATSEANIGEYDEYWQKRKLMADAAAEATYKRDPFEVTNSFNRAVHRSEEESGRRELAMTKRKKFAGPCKATNPIDRCWRCRADWVTDRKRLARCAQGFGRNTTGGLAGKFYLVTDGTDDDVENPRPGTLRWGVIQDEPLWIIFAKDMIINLKEEMMINSDKTIDGRGAQVRITNGAQVTVQNSNNVIIHNIHIHDILQGKGGMIRDSPEHFGFRTQSDGDGISIFGSTNVWLDHLSLSNCQDGLIDVIAKSTGVTISNCHLTNHNDVMLFGSSDSFSEDQIMQITVAFNHFGRGLVQRMPRCRWGFFHVVNNDYTHWLMYAIGGSKNPTIISQGNRYIAPPNLAAKRITKQLGATEEEWKNWVWHSEEDLFMEGAYFTTSGGPIQKQFSNKDLIKPKPGSYVTRLTRFAGSIPCVAGKPC

SEQ ID NO: 50773 - protein, 654 aa, Oryza sativa
MASEIEVLEDTTAAAAAPAATIGGGEVAGAGAGEEGEAAADAEALKDDVYTGAAYGDLEKLHRLVEREGRPVTEPDALGYHALQWAALNNRVAAAQYILEHGADVNAIDHTGQTALHWSAVRGHIQVAELLLKEGAKVDAADLYGYQTTHVAAQYGQTSYLYHIVAKWNADPDVPDNDGRSPLHWAAYKGFADSVRLLLFLGAYRGRQDKEGCTPLHWAAIRGNLESCTVLVQAGKKEDLMVQDNTGLTPAQLAADKNHRQVAFFLGNARRVHERGCGGNSYFGKLSKLGLAPLLWCIIIGLIYIYVYSVISGQYSSNMTLLFGLFSWLGIFLATAGLVMFYKCSRKDPGYIDKNTRDAQNQRDDEPLLKRGLDNPELLAGNWSQLCITCKIVRPVRSKHCSTCDRCVEQFDHHCPWVSNCIGKKNKWEFFMFLILEVSAMIITGVTAVIRVVGDPDSPASFGGWLNYSATNHPWVVSFVVMDLFLFFGVITLTVVQASQISRNLTTNEMANAMRYSYLRGPGGRFRNPFDHGVRKNCSDFLLKGYNEDIERVEQTLQPDEELGMIQMTRSAVSQNGESMSLHANGTDHGCADPQGNSKSHRHSHGSSQCCSHSKRPDKTPLGLGLGLGRNNPSSRYTRSLPSIHSESSAYLPL

SEQ ID NO: 50774 - protein, 90 aa, Oryza sativa; identical to SEQ ID NO: 50552

SEQ ID NO: 50775 - protein, 208 aa, Oryza sativa
MASGYPAGGEQPSGRLVVLRPLRLLRRRRRLLPDLLLPVRRLREDRGDRRPGSHIVLRERDAVYVAGDGDGVRVRLLLLLPLQAAPAVRAPGEALRRLLRPLVLRALRPLPGVPRAQEPRLRHVPRMAGEHGEDGEGRRDCPAADAPGDDSLVRVCVRGHVGLRCADQASACVGSVASSRQGMPTCKVDVKLVFSFCYISSCRESHEL

SEQ ID NO: 50776 - protein, 1049 aa, Oryza sativa
MQGQHLNSQTVDLARNLRENQLGGVIFGCKHNTIEECFEKQLFGLPSVHYSYVRNVKPGLPLFLFNYSDRKLHGIFEAASPGQMCIDPYAWSHDGSLRTSFPAQVRICTKTRYPPLMESQFRTVLGDNYYNHHHFYFELDHAQTKALIAVFKSLAPANFTQVPAVSSKRTIAPLPSTKRQAPVIPDQKKGSASPKDINPFSVLSQSGGAVKDNWADSDVENGSISRSSDEKESRELVSDWEDLDDNVLHGQLGLCSNPDEISQNSSYNSVAKGAEFVECSHLVVNPVNGGIQSSDGDMLVISDDVHSGAVGVDGIESGGQNEPDDVSIQPERLSILQKLKELFVLRQQAVLSDQNLAYSNSDEYAPEETQANVSLSCPEQCAPEEPQANTTPSCPELHVLEETQANVSLLCPEQYVPEEPQANASLSCPEQHVPEEPQANASLSCPEQHVLEETQPNVSLPCPGQYVPEEPQANASLSCPEQHIPEEIQANASLPCPDQHVPEEPQDDASFSCPEQHVPEETQTNASLPCPDQHVPEETQDDASFSCPEQHVPEETQANASLPCPGQHVPDNASLPCPEQHVPEETQINAGLSCPDQHLPEETKFNVSLAYPDQHVPEETQVTAGISCPDQHVPEETQVNASLPSPNQHVPEETKATAAISCPDQHVTQANASLSQHEFGAKVEDNTSLEQNQGNAELIKIVLGLIKKTDSLDMRQNKSHEEILSLKEVVKDSGTKVKQLEYRIDELQFKLDSSLSLVGDACDTLDKPSIFLIGGYNGVSWLSSLDAFSPEKDILVPLAPLSSARSYASVATLEGCIFVCGGGVGDSFGNTVECYNTMCNEWMACPCLNNKKGSLAAVSLDGKVYAIGGGDGIVTYSDVEMFDPFLGKWICSPSMMNSRFALGAAEMNSVIYATGGFDGFSYLQSAERYGPREGFWARLPSMNVRRGCHTVAALGGVLYAIGGYNGDRMVSSVEIFGPRRNSWRVGDPMNFPRGYASTVTLGDNVFVIGGLQSSEKFMDSVEVYNVKCGWSVPGFSSIGVRCFASAAVV

SEQ ID NO: 50777 - protein, 269 aa, Oryza sativa
MAASAMRVAIATGASLAVHLFVKSFVQAQHPALTLLLPVAVFVGIAVGAKGGSGGDGKAPPGPAAVPVFGNWLQVGNDLNHRFLAAMSARYGPVFRLRLGVRNLVVVSDPKLATEVLHTQGVEFGSRPRNVVFDIFTANGADMVFTEYGDHWRRMRRVMTLPFFTARVVQQYKAMWEAEMDAVVDDVRGDAVAQGTGFVVRRRLQLMLYNIMYRMMFDARFESVDDPMFIEATRFNSERSRLAQSFEYNYGDFIPILRPFLRGLPQQVP

SEQ ID NO: 50778 - protein, 44 aa, Oryza sativa
MKVVKMWKELKEVTHLLPQCMDCQQGQLLRLFLHGPRLRLQTMS

SEQ ID NO: 50779 - protein, 487 aa, Oryza sativa
MDDGDEPVPYVMDEGVLLPLLFPPPLPADDDATAGVSPSWVYLEDRAYVSPDAVSNSTTAFSTTTTGVSIHVSFCLARPPRLSYLCVHCPRPGDGEGAYRFTVDPRVLGTHTDVALLRVPHPNDGLHRGIKSYDYFVYTARPGPGASLLRLLPNPRVSPFRNEEVAIVRCSGGARYVIACLMPTIRRPMEFKVMRFDSDVGRWKSTAVSISEPVERDRVLPIPDTASQMVFHCTTKVITLGGTIGWVDLWRGILLCDDVLDQHLVLRDVPLPKPARSNRKSFCRGPPHHYRDITVVVQDSVPTCIKYVEMVTRPGDRPPPRQRQPPQHSDDSDSDEEEDVAYYWKANIWSMPIPVGSWEDWQMECTVDVTDIAVDNVRFSELLPKIGNDPEETLRRLVTGFPTLGMDGDVISFLSKINRLDDKGWVISVDLRSKTLQGVAELDERKNFLFKRYYNTSEISKYLIKATGEAGTLVKTGVNSRVSKKKK

SEQ ID NO: 50780 - protein, 654 aa, Oryza sativa
MEDEEMEKKVQQYLQRKGFRLTELALQEERNRISTSSVSDVALARSENDPARYYDGYSKLRTWAYSSLDQYKHELLRVLYPVFIHSFMDLVAEGHTQEARSFFHTFHEDHELMHSRDLQKLEGILSPSHLEEMELARSLRKNQFRIKLCEYSYELLLQYLQKTQALVVLGIINERTTFDVSPGQPSLISDDTDVVALVGTKKDLAKQINLKEVHWGLLEDSVEERMEKTLLESDKTEAESKDADAEDNNKRKSSEGGKQGGSVKKVKKDKIAGATGRTNKSETSIVSVAPRVKPELTLPVIPVEVEQSILEDLRNRAQLNSLALPSVSFYTFLNTHNGLNCSSISHDGSLVVGGFSDSSVKVWDMSKIGQPPKTSSPQGENGLSQGERTSASDYGKRPYTLFQGHSGPVYSAAFSPFGDFLLSSSSDSTIRLWSTKLNANLVCYKGHNYPVWDVQFSPVGHYFASASHDRTARIWSMDKIQPLRIMAGHLSDVDCVQWHVNCNYIATGSSDKTVRLWDVQTGECIRMFIGHRSMVLSLAMSPDGRYMASGDEDGTIMMWDLSSGRCVSPLGGHSSCVWSLAYSCEGALLASGSADCTVKLWDVASSTKVLKTDDTSTNRLRMLKTLRTKSTPVYTLRFSRRNLLFAAGALSLGS

SEQ ID NO: 50781 - protein, 373 aa, Oryza sativa
MAAIFIFIWLFASVLSISSASSPLLINGSTADAAPDCGTGNPIDDCWRCDPGWADNRQRLADCAVGFGRRAVGGKGGRVYVVNDTGDDAARPAPGTLRYGLVQDEPLWIVFAGDMTISPAHELVVSSRKTVDGRGARVVVGDGGACFAVRGASDVVIHGLTIRRCRPAPKLEAGMSDGDGVHNSSDVWVDHCTVEACADGLIDVVVGSTRVTLSNNLLRNHDKAILLGHNDDYTDDKAMQVTVAFNRFGPGLVQRMPRCRFGLFHVINNDYIAWQKYAIGGSASPTIISHGNRFYADMAKEVTKRDDDVPESVWHHWNWVSDGDLMLNGAFFRASGEARTDNLKAPSFARSAPSVPSMTSSAGALSCKEGSHC

SEQ ID NO: 50782 - protein, 544 aa, Oryza sativa
MEIGQHPASGYSKEHQKTYQEWFAFADSDGDGRITGPDAIKFFAMSKLPRADLKQVWAIADSKRQGYLGFSEFVTAMQLVSLAQAGDEITQDSLKRDDLGSLNPPTMDGLDALLVKSKHHAKRVDPDIDGFPQAQSPATSQWFSSKSSKKIPLNAVTSVIDGLKKLYIEKLKPLEVTYKFNDFVSPLLTNSDFDAKPMVMLLGQYSTGKTTFIKHLLRTSYPGAHIGPEPTTDRFVVVMSGPDERTIPGNTIAVQADMPFSGLTTFGTAFLSKFECSQMPHPLLEHITFVDTPGVLSGEKQRTQRSYDFTGVTSWFAAKCDLILLLFDPHKLDISDEFKRVIGSLRGHDDKIRVVLNKADQVDTQQLMRVYGALMWSLGKVLNTPEVARVYIGSFNDKPVNESAVGPIGKELFEREQDDLLSDLKDIPKKACDRRINEFVKRARAAKIHAHIIGHLKKEMPAMMGKAKAQQRLIDNLENEFAKVQREQHLPAGDFPYVEHFRDVLGGYSIDKFEKIKPKMVQAVDDMLGYDIPELLKNFRNPYE

SEQ ID NO: 50783 - protein, 54 aa, Oryza sativa
MGRFSLRSVSTAIIASAAKIPTAQAIYGGIRKSALARRKRRRGDRRIPTSHAFW

SEQ ID NO: 50784 - protein, 316 aa, Oryza sativa
MAFTVKASSPSSPAASSSSSSAPAKLGAAPGRVAVRKLTAAATSLRLDRAPAAPATERGLSSVSRTMSRLMEKGKTAFIPYITAGDPDMGTTAEALRLLDACGADVIELGVPFSDPYNDGPVIQASAARALSAGATMDGIMSMLAEVTPELSCPVVLFSYLGPIVRRGPANFTAAAKEAGVQGLIVPDLPYLEACSFRSEVIKNNLELVLLTTPTTPPDRMKAITAASGGFVYLVSVNGVTGSRQDVNPRVEHLLQEIKQVTDKAVCVGYGISTPDHVRQIAEWGADGVIIGSAMVRQLGEAASPKQGAEKAGEVC

SEQ ID NO: 50785 - protein, 374 aa, Oryza sativa
MAREAEKDAAAAAEIPLLTPYKMGRFELSHRVVLAPLTRNRSYGNVLYYTQRATSGGLLVTEATGVSDTAQGYPDTPGIWTQQQVEAWKPIVDAVHRKGALFICQLWHVGRVSTNEYQPDGQAPISSTDRQITPDDSGIVYSKPRRLRTEEIPQIIDDFRRAARNAIEAGFDGVEIHGAHGYLLEQFMKDSANDRSDEYGGSLENRCRFVVEVIDAIVAEVGAHRVGIRLSPFIDYMDCVDSDPVALGSYMVQQLNKHPGFLYCHMVEPRMAIVEGRRKITHGLLPFRKLFNGTFIAAGGYDREEGNKVIADGYADLVAYGRHFLANPDLPKRFAINAPLNKYNRSTFYIQDPVVGYTDYPFLDEKDEGAATYA

SEQ ID NO: 50786 - protein, 567 aa, Oryza sativa
MGRSRGVPNSGDDETNHRSKRRRVASSGDAPDSLSAACGGAGEGGGKKALYHCNYCNKDISGKIRIKCSKCPDFDLCVECFSVGAEVTPHRSNHPYRVMDNLSFPLICPDWNADEEILLLEGIEMYGLGNWAEVAEHVGTKTKAQCIDHYTTAYMNSPCYPLPDMSHVNGKNRKELLAMAKVQGESKKVLPGDLTPKDESPFSPPRVKVEDALGEGLAGRSPSHIAGGANKKASNVGQFKDGANVAKVEDGHVDRSIGVKKPRYSADEGPSLTELSGYNSKRHEFDPEYDNDAEQALAEMEFKETDSETDRELKLRVLRIYLSRLDERKRRKEFILERNLLFPNPLEKDLTNEDKEVYHRYKVFMRFLSKEEHEALVRSVLEERKIRRRIQELQECRSAGCRTLAEAKIHIEQKRKKEHEVNAQKAKESGQLLSNTKVVHKTNRPMKIESDGNLDQKKGGASLDSTGRDSPKTTGHAGTKHWDDWDIVGFPGAELLSTSEKNLCCQNRLLPNHYLKMQEVLMQEIFKGSVAKKEDAHVLFKVDPAKVDNVYDMVTKKLGTNEEAPTV

SEQ ID NO: 50787 - protein, 517 aa, Oryza sativa
MRGFSMAVSSMQAGEKAVFTIPPELAGTKSRCPVDIPGNIAPNEALRFDIELISLVTITDILDDEGILKKIIKRGLGSDKPCDLDEALVNYNACLEDGMSVSMSEGIEFNLAEGFFCPAFARAVETMTEGEEAVLIVKPEYGFGERGRPSIGDEAGVPPDATLYVYLQLMSWKTVRHIGENGTILKKTLCRGNLEGQQTENEAVVGVRLIGKLQDGAVFDQRGHEGDEPFKFMVDEEQVSEGLEEAVLTMREGEVSLFTIPPHRVQDQLLVVPVGSSVTYEIELVSVVNDKPPRLMSQAETIEAAAEKEKEGDKLFSSSKFLRAYRRYYKARQIILLRFGRGETDEEIKQMLISLTFKAAECANQLQRYEQAYHRYREILEYDPGNVKAREMTGRAFPEASLGIDTAAMHRGLDQPFRPKEEFRVCGGYMTPEFSEMRLKQGHKYHGSINIFVPPIPRPETNANQAVPAAPTGHRLTHSPTTPPGPNNEKRNRSSRVPVAARKGLASCFRCISSDCN

SEQ ID NO: 50788 - protein, 77 aa, Oryza sativa; identical to SEQ ID NO: 34455

SEQ ID NO: 50789 - protein, 796 aa, Oryza sativa
MAAMVGARRALLAARYSPRGALASPVRRVDSPPSLPADRGCLWPLVPHRGAGNFASEQIDGDYHREWGARNDGNYREPHRTDSLSHQVQANLPSTDSSVGADRIRGVSGDGSVNANYRRNPGQPEFPNRHEPYSSARVNNGASGYNDRQPYGSANAQYRSNSAQPSQTGGPYGFANRNEPYTSARVNYEAPGYNDKQPYGGGTTYNQQIANGDLPNSQYSRRQGNNSGVSGYGTGHHYHGSDTYRSGYNTQNNQQAYDSRQYGYGPSGQSYQESTGNDQQVFQQQEVDQRSAGNYANRPGSTSEYPNPSRFNKEHAANFQQGYNGGIGHNVSHAPQSPYVSSKIDAQGNFPGQPMNVNRSVQHNTHAPALYQDGIYRNPLTDSPSIDGLPSGASDVTSGESKVTVEEMDKLCEDGKVKEAVELLALLQEEGTVVHAPQYFKLMQACGDATSLAEARKIHNQISQSALAVDTDINNKILEMYAKCGSMEDAKKLFNTIAQRNLASWNTIISGFVYNGLGDEATDFFDQFKQTGNKPDSTMFTHVFLACGILGSVDEGMLHFESMQKDFGVTPTMEHYVSIVNMLGQSGYIDEACEFVEQMPVEPSIDVWESLMNMCRLNGFLELGNRCAQIVERLDSSRLNDQSKIGLFPVDASELAKEKERKKANAVEARSKVHEYRAGDRSHPEHLKIYEELRYLAAHMKEAGYIADTRFVLHDVDQETKEDALLAHSERLAVSYGLITSAARSPIRVIKNLRSCGDCHTALKIISKLVGRLIIARDAKRFHHFENGVCSCKDYW

SEQ ID NO: 50790 - protein, 158 aa, Oryza sativa
MIYFVQRMQEAGFPVSLEAYNCMLDAYGKAGQLEEFAAVLQKMERAGCEFDHYTYNIMINIYGRKGWIEGVANVLAELKSRGGEPDLYSYNTLIKAYGIAGMPEDAVKLMQEMRIKGIAADRVTYTNLIAALQRNENFLEAVKWSLWMKQTGVAATRT

SEQ ID NO: 50791 - protein, 271 aa, Oryza sativa
MDATRSAQSIHGQDEQKLYDELKSAVWVIHVESDESSGTGTGFCIDQRGLIMTCAHCVSGKTCFVARQNDKKFQKAYVLHKIESWDIAILCFVPNGSDAYPAVSLANDGTLVPGQDVYAISNQHSLMYSFCSGKVSYPCSDTVRTFDRTPRSFGKEPTDHIPSETSEYRTQKETSFTLPFNEDLPIIEMRNIHLGHGGSGGPIFLHIGKVVGMMSSGDFSKSYAVHVSALRIAFEEAKKLYSKLVNHLAASEKQSRDKNEGKNESNKSNEK

SEQ ID NO: 50792 - protein, 262 aa, Oryza sativa
MEGSSSSSKHFILVHGLCHGAWCWYKVVTMLRSEGHRVTALDLAASGVHPARVDEVHSFEEYSQPLLDAVAEAPAGERLILVGHSFGGLSIALAMERFPEKIAVAVFVAAAVPCVGKRIIPELIREKAPKDMLLDSKMIPINNKQGPGTAILLGPNFLAEKGYPLSPAEDLTLAKLLVRPTSQFVDDPTMKDDRLLTSANYGSVKRVCLMAMEDDLKEVHRYMITLSPGVEVEEIAGADHAVMCSRPRELSDLLAKIGSKYD

SEQ ID NO: 50793 - protein, 241 aa, Oryza sativa
MLEHKNIFQERIVQRREAEFSRLKKERDERTSQLISSRKRERDTVRKLMYYLNLEEQRLQRLREEEEARKREEEERRKREETERKAKLDAIAAKQLQRERELEEKKEKQRMEALMGRGAGAAEPARTPDAAPVAQPAQPVAAPAAAAAAAAPAAGKYVPKFKRGGDGGSSAGGQRPAVAPEQDRWGSRDDRPRPDMRPLRQEAPPARDAAPPARQDGPPGTWRPSRYSSSSSSSTWSSRRN

SEQ ID NO: 50794 - protein, 258 aa, Oryza sativa
MSCSFRFHSSALPAAAARLHLSRGLRPPPSRRRLHNTFSPTLSISPPSRHAAIAAAAASPLGASQEASAMAVSASEGVGQYDLLIVGPGVLGRIVAERWQQEHPGCKIFGHTATTDHHSELTQLGIIPSLKGPAVQKVPYVIFCAPPYRADDYPGDLRVAASNWNGQGFFLFTSSTAVYDCSDNGLCSEDSPCVPIGRSPRTGVLLKAENAVLEAGGSVLRLVGLYISLLRGDFVSKLNAKILLNIPVPPYTSVIEWT

SEQ ID NO: 50795 - protein, 223 aa, Oryza sativa
MAAAAVACRRGLLLQQLQQQLWQAHRWVGPARSISQLVKTNGRRAFLVDTLALVRKLESQGVPTKQAEAITSAITEVLNDSLESISESFVSKAEMQKAEMLQESNISKFKSQVQSSQENHFSLLQRETEKLRGDIDKMRSELKYEIDKVTAGQRLDLNLERGRIRDELAKQNEETTELTTKLDKEIHSLKAQLEAAKYDVIKYCIGTIVSISAVGLAVLRIVM

SEQ ID NO: 50796 - protein, 76 aa, Oryza sativa
MHDGVSKVDGHRVFLCVGVALLFYFFNHEANISGFNINMHCMFPISLLMRPSTIFQTVKKIGSESSITVSKSFELL

SEQ ID NO: 50797 - protein, 398 aa, Oryza sativa
MEEEVNDHPIEEVRNTVPVTDDPSEPCLTFRVWVLGLSSCVFLAFVNEFFMYRTTQLSIGTVVVQIITLPIGRLMASTLPARRLRVGGWSFSLNPGPFSLKEHCLIIIFAGAGASGVYAMNIIAIVKVFYKRQISPYAAMLLAQTTQLLGYGWAGLFRKYLVDSAYMWWPSNLVQVTLFRAMHEEEKRNKGQLTRLQFFIMVMTCSFAYYIVPSYLFPAISTISVLCWLYRDSVTAQQIGSGASGLGVGSFGLDWNTVVGFLGNPLASPAFAIFNVMAGFALSTYVAVPILYWTDTYNAKRFPLVSSHVFNAAGGRYDTARILDPATFTLNLREYDAYGRINLSILFAINYGIGFAGLMSTLSHVALYHGTFGACGGRQRRSRRTAAARSAKTCTRES

SEQ ID NO: 50798 - protein, 57 aa, Oryza sativa
MCSAPSRKAFFLPLLLPRKLNLCRDGNYGRGYLSMVWFMKFRDRLSYYGVVYKVRDP

SEQ ID NO: 50799 - protein, 204 aa, Oryza sativa
MSSPDKVVARTGRLRQRYDNEYRLVAGCVPYRVKKDEANPRILGDVPGQVEVLMVSTPNRADMVFPKGGWEDDEEVYEAASREAMEEAGVKGIVNRTTLGHWVFKSKSSQNSSSPRGACKGYIFAMEVTEELESWPEQATHGRRWVSPGEAYQLCRYEWMREALTALLERLSMIEPVPSAQELSDQTSMYMMLQASSDSAVALC

SEQ ID NO: 50800 - protein, 365 aa, Oryza sativa; identical to SEQ ID NO: 35298

SEQ ID NO: 50801 - protein, 531 aa, Oryza sativa
MARTSMTTTSRALALVLLSSCCLLVAVDAAYAKKPNLSKNDFLSCLAAGIPARQLYAKGSPSYGSVLTSTIRNLRYLSSKTCNPLYIVTPTDVKHIQVAVSCGRRHNVRIRVRSGGHDYEGLSYRSEIPEPFAIVDLVNMRNVTVDGKARTAWVESGAQIGELYYGISKASPTLAFPAGVCPTIGVGGHFSGGGFGMLLRKFGLASDNVLDVKVVDANGKVQDRKSMGEDYLWAVRGGGGSSFGIVVSWKLRLLPVPATVTVIQMPKMVNEGAVDLLTKWQSLAPTFPEDLMIRVMAQAQKAVFEGLYLGTCDALLPLVTSRFPELGVNRSHCNEMSWVQSIAFIHLGKNATVKDILNRTSSIRAFGKYKSDYVTQPLSKATWDTIYKDWFSKPGSGIMIMDPYGATISKPGEADTPFPHRKGMLYNIQYITFWFGEGAPAEAPIKWIRDFYAFMEPYVTKNPRQAYVNYRDLDLGVNAVEAGANVSCYQVGKVWGEKYFKGNFERLARTKAKVDPTDFFRNEQSIPPLLA

SEQ ID NO: 50802 - protein, 225 aa, Oryza sativa
MPEEAAGMASVLRRLYLSVYNWIVFIGWVQVSWSMILALLEKRYEAVYAAVEQHLLFAQTAAIMEILHSIVGLVRSPVSSTLPQITARLFMIWGILRSFPEIHTHIFVTSLLISWCITEVTRYSFNGMKESFGFTPSWLLWLRYSTFIVCFPIGMVSEVGLVYIVVPFMKASEKYCLRMPNKWNFSIKYFYASVFFMALYAPVYPHLFHYLIVQRKKALAKSKTT

SEQ ID NO: 50803 - protein, 302 aa, Oryza sativa
MSRKEVVVAAAGGGAGAESGAEGSSSAGSSGGGGELAEALARRRLYREVTLALRTGLRDAKADFSFLRARGLRSLLGFLRSTASATDDSQLLLFRHSQSIPDLQVIPVLFQNSLHQPKEDPVVTLDHIFGVEPMKITSPPTDNEIALALRVLEGCCLLYSRCTALAHKYKAVKVILNILANRGPAEQGVCLDALISLMLDSPPNQMDFEEFSGLEKVAELLKDVQVEEHIRLKCGEFLLLLIGHVYAKENSPIHEQMRILFGEQCASLIWAASRFGSTLDVEQRQMALQIQARRVVESLEPY

SEQ ID NO: 50804 - protein, 394 aa, Oryza sativa; identical to SEQ ID NO: 36964

SEQ ID NO: 50805 - protein, 818 aa, Oryza sativa
MAEGSLVVAICQYGGEFTSGPNGNLIYKGGEAHAVDVTREMSLDNFKDEVSKVFHVEVSDVSLKYFLPNNNRTLITISCDRDLQRMVDFTASSAQVDVFLISRVENRSITQTGASTAKPGSNARGDKRKTPTSKNKASKNKKKTPSATGTAVQANANNVKQPRQVVTENDDNRVFPLEFGSDIAFANTAGAGSTAPDILNQQKLALVDNTARESVGLFDDSVNPYVGSEITTEPTQGLNNPIVFWDDIIKGVGQEFDNVKDFRAQLCKYAIGKGFVYRFIKNETTRVTVKCVGEGCTWRLHASESSRNKKFVIKKMTDEHTCGGGSGEGQRRATRQWLTTVIKEKLHENPLFKPKDLVKEIYEEYGVMLTYSQVWRGREVAQKELYHAIRETYSHLPWYCERLLETNPGSIALLSPMVDTKFRRFFVAFHASLHGFTNGCRPLIFLDKVPLKATNEYKLLVAAGVDADDGVFPVAFNVVEEENYESWVWFLMQLRYALQNHNYPYNAMTFLSSGQKGLDAAVPQVFEESHHAFCLHHIMEEFKGELRKGPWSQQIRDGMVEDFTRAAQACSIEDFNASIESIRNISTEAADWIIASKPEHWSDAIFRGCRYDHFSSNIVDAFNNWIPTKKEGSIVLMIDSLRMKIMEVIEARRESCKSWSGPLTPSMEFKVQDEMSKAGKLTVLCSSETVFEVRGSAIYVVNLANWECTCRRWQLSGLPCMHAVAVFNRVGRSFYDYCSKFFRIESYHLAYSGAIFPIPDMDTVDFSAGANLIPPPKPRTSDKPRRKRFNPNKIPTVVRLCSRCKQAGHNKATCEAIL

SEQ ID NO: 50806 - protein, 287 aa, Oryza sativa
MAAPDMPNRFSHIAHQLVHAEKRESIFFVKMVRVPHCHAKIVEHLQNKFHMKPSEAEGTIKEPFFATGSMIYQDENFGYILTCAHILEDFYSANIVLSKEQANRWFKFLILCKHNEDHMKTIHPDLYESERDKRNYTVATVLKIDQRKDLMLLQFNLSTLYATQYAQRCRLPHQSLKLAENPSSAPNDVVMISWPPNRPDTVVIGQVSNQCRLFNQLTTERDKGYNMQFIELKINVEKGASGSPILNHAGDILAVYHGRIEGKGYAISHDDIYEFLYTRKILSQNLR

SEQ ID NO: 50807 - protein, 689 aa, Oryza sativa
MASSHHQEVQEQGHGDGEEEEQDNSQITSPLLRSSMRLGSPEENSPVEQVALTVPVGDDPATPVLTFRIWVLGTASCVVLSFLNTFFWYRKEPLTVTAISAQIAVVPLGRLMAAALPERVFFRGRPWEFTLNPGPFNVKEHVLITIFANAGAGSVFAINVITAVRVFYGKRISFFVSLLVVLTSQVLGFGWAGIFRRYLVEPAAMWWPSNLVQVSLFRALHEKERRSKGGMTRTQFFLVAFVCSFAYYIFPGYLFQMLTSLSWICWIFPKSVLAQQLGSGLHGLGIGAIGLDWSSISSYLGSPLASPWFATANIAAGFFIYIYVITPIAYWINLYKAQNFPIFSDGLFTVTGQKYNISTIIDSQFHFDTKAYEKNGPLYISTFFSISYGLGFACLTATVVHVLLFHGSEIWQLSRSAFQDKKMDIHTKLMKRYKQVPEWWFISILIASVAITMFTCEYYIEQLQLPWWGVLLACALAIFFTLPIGIVTATTNQTPGLNIITEYIMGYLYPGRPVANMCFKVYGYIGPQQALAFLQDFKLGHYMKIPPRTMFMAQVVGTLIAAFVYLGTAWWLMDTIPNICHTELLPPGSPWTCPYDHLFYDASVIWGLMGPRRIFGDLGTYSGVNGFFLGGAHGSPPRLVCTQGIPKSEMDPTCQHACADRRNQPDASCHFSQLHGMDICSIFVRLCGL

SEQ ID NO: 50808 - protein, 72 aa, Oryza sativa
MSSAARHHCSGLRERLGCVQCSFCATVLLVSVPCSSVLRVVAVQCGHCSGILSAVNLPPSPVSASIELTPQV

SEQ ID NO: 50809 - protein, 187 aa, Oryza sativa; identical to SEQ ID NO: 35109

SEQ ID NO: 50810 - protein, 535 aa, Oryza sativa
MQCTLFTGYQFSAGGIVKLPKFEMTMTKSEANNKPVLAADDVHTVTVYGRIYCLQLDRVSMTLNLYRFYRDAVVQQGTLPTYSSRIAVSAVDNIIMVHQIDAKVVILYDVFMDSYAPISAPLPLLVRGLPSNNKQSAQPPDSQSSAYGGTLYGEGWSFLIPDLVCDVENGLLWKLHLDLEAIAASTSDAPLILEFLQRRKSDPSMVKTLSLAIVRTIILERRPITMVAKAMDVVLDSYSRLMKMGGGLPAVRRTSEQNQQPGVQPGVNPDSASGDGNRPVQSNSEVEHGIANLAEHVDRTLLNTSSDSDDIIDASGASDAPDRKPQVLGQDSRPLASGTSTQHGSHVASVAVSPSEMFESVFVLVEDEMMADPAYLISIIMEFLRSVSRAGLKAPPNLFVMMTTLLARSNRYPEIALFVSNKILEPSKELAMQLMELGQQHSPTRKLGVDMLRERGLHHDYVTALLQDGYHLEALRYARKYKVITVQPVLFLEKAVAINSAQNLAAMLSFFSEFTPTFKTTSDYGRYRHILSEMI

SEQ ID NO: 50811 - protein, 226 aa, Oryza sativa; identical to SEQ ID NO: 47049

SEQ ID NO: 50812 - protein, 451 aa, Oryza sativa
MVIDSLDRLITAWEDRKESVVVEGVHLSLNFVMGLMRKHPSIIPFMIYISDEGKHTERFAVRAKYMTLDPTKNKYVKYISNIRTIQEYLCSRADKYLVPKVNNTNVDRSVASIHATVFSCLRRRAAGDQLYDPATNTVAVVNEEYKNQCVANSMSSKGMFKLIQRLGSSRKLMAIVNVDGSVSKAWPVESSSGDGKGGSENGSKKYVGDPIYGPLNIGRAESVNLQFGAFGISAWPTDAGCTSQAGSVNESWDNANEGTGSHVPSSSGSPKKLDGHCKEIKESAAASGSDDDEEEEEEAADVPPNSGSEEDLSEEDIRAIHEEMEGSVDEDCNRSDEEYDDLAMRDCMENGFLTDDGVVHTVFDGNGQKHSTLRKRQVNLRTLSKIDLDSPDTARSSSALPISASSKRNGTRRWKRSLSESFRSRPRSAPSLVELTPKHKGSAVPEVAPDK

SEQ ID NO: 50813 - protein, 65 aa, Oryza sativa
MALIPSLAAARYALLALPPLMVAAYVYNGGGRGNGDRPRARSINKFTDGGPATAGPAARKDSSAL

SEQ ID NO: 50814 - protein, 313 aa, Oryza sativa
MAGRSRYDNPFEEGGGDEVNPFADKASKGGSAGQSSYSGGAFYTTQSRPSAPPATHLSPLPPEPADFYNDFSTPVDVPMDTSKDMKTREKELLAKEAELNRREKEIKRREEAAARAGIVLEDKNWPPFFPIIHNDIGNEIPVHLQRTQYVAFASLLGLVLCLFWNIICVTAAWIKGEGPKIWFLAVIYFILGCPGAYYLWYRPLYRAMRNESALKFGWFFLFYLVHIAFCVYAAVSPSILFVGKSLTGIFPAISLIGNTVIVGVFYFLGFAMFCLESLLSMWVIQRVYLYFRGSGKEAEMKREAARSAARAAF

SEQ ID NO: 50815 - protein, 270 aa, Oryza sativa
MRGRSSRGHAAASTSSRREAEDEDPATASDESGDDEEVSSSSGSESESDSDAERELERALADVPFGELQRARADGSLGGRGFSAAAAAQKKARRASKKRPMEISTKVRPPRFREIIQVPKKVVRDPRFEPVYGPVDKEGFRKRYNFLFDDELPAEKEKLQKSIKKSKDPNAIEEMKSRITWIDKQLRSHPKKNVESEILREHIKKEREATKTGKRPYYLKKSEIRERKLMNKYNELKEAGKLDAFMEKRRRKNASKDHRYMPYRRNGDGA

SEQ ID NO: 50816 - protein, 426 aa, Oryza sativa; identical to SEQ ID NO: 28902

SEQ ID NO: 50817 - protein, 101 aa, Oryza sativa
MMTSVSGRRISWLLVLRLRKGGQRMQRRPSITIFSGLRETRACSFPTIRNHFFIMSIALSSLQDSRRYFLPSSLDEMSSREMASIEIIFTCQTGNIRTISI

SEQ ID NO: 50818 - protein, 431 aa, Oryza sativa
MHSKPEGDAASAAAAAEGGSPRSGYFRQRSMYAADPDGVGAATPRKAFDVENPPGGAGGLRPSESVTKLESLERAERAALAPAVVLKTGFYILVWYAFSTCLTLYNKTLLGDKLGKFPAPLLMNTVHFALQAGLSKIIMLFQTKGVENAVEMGWKDYFMRVVPTALGTALDINLSNASLVFISVTFATMCKSASPIFLLMFAFAFRLESPSIKLLGIIVVISTGVLLTVSKETEFDFWGFIFVTLAAVMSGFRWSMTQILLQKDSYGLKNPITLMSHVTPVMAIATMVLSLLMDPWSDFQKNTYFDSPWHVMRSFLLMLVGGTLAFFMVLTEYVLVSATSAITVTIAGVVKEAVTILVAVFYFHDEFTWLKGLGLATIMVGVSLFNWYKYEKYKKGHINEDEVNSPSFDGDAKYIILDDLEDQDEFQDEDT

SEQ ID NO: 50819 - protein, 370 aa, Oryza sativa; identical to SEQ ID NO: 35234

SEQ ID NO: 50820 - protein, 198 aa, Oryza sativa
MTQIGVYLKDILREMKELPIGDSNGTAEKSSNGAVDTTSCSDRDGSSSDLELDEDFTEEEVAVAKLVVTVASDALVVVKETIRFITCLLKISGNRSGANEEKVETMEQLLSCCRQAADQINDLGASVYPPQDLSEMKSSVKRLYGGANAMRREIRSLGGSPEGAFVALERFEKSLGALEVEIADDVANEMENLTISSS

SEQ ID NO: 50821 - protein, 512 aa, Oryza sativa
MSPHRGAAVASICAAFYDSIWLLVLLLSTALAAETLDGAQAASSQCQNATKCGGVDIVYPFGLSSSGCAMSPSFEVDCNNTGNGVQKPFLGYVELLSIDVQLSQARVRTRISSSCYNISTREMNFDDLWYVDLKDTPYRFSDSANKFTIIGCRTLAYIADQDDVGKYMSGCVSVCRRGELTSLINGTCSGKGCCQTAIPKGLDYYQVWFEQSMNTSGIYNRTPCSYAVLMEASNFSFSTTYLTSPFEFNNTYGGEAPVVLDWAINTANTCEEAMGNLTSYACKSDNAKCINSSDTTGYICRCQEGYQGNPYLKGPNGCQDINECQHGENYPCYGDCYNKPGSFDCVCHAGSSGNAAIQGGCRKDLLSPKTRLAIGVVASVLAVLFGFLGWEVIRHKQKIKRQALLRQTDEFFQQHGGQILLEMMKADGNDGFTLYKRGEIETATNNFSKAHVIGEGGQGTVYKAVIDGVAVAIKKCKEIDESRKMEFVQELVILCRVSHPNIVKLLGLLPPI

SEQ ID NO: 50822 - protein, 84 aa, Oryza sativa
MKFLGVIVALWILSEIGSLCDFLTLFYVAVLMLHTVPILYHKYQDKVDHFAGKAHVELSRQYSVLDAKVLSKIPRGPAKDKKQN

SEQ ID NO: 50823 - protein, 213 aa, Oryza sativa
MVATNLKAETVGLMDRRAAVEAEMDAIIAALSVPVGPGITGGLVDAEGFPRSDIDIPAVLAQRRKLAELRNDHKDITNKIEKNLEVLHSTKLSRNEASIPASSGTPASLHSGLSQNDPMEEDAVTRLPFAIIDELTDGSPAAVDGLQLWDEIVKFGNVEAGDRLQERLVSEALSNEDCQVSLVIIRQGSSMNLTVTPREWHGRGLLGCHFRIL

SEQ ID NO: 50824 - protein, 347 aa, Oryza sativa
MPRCGAGGPCVWIRALSQPQRHGRKPWRGVRVVVLLLHALFIGAVFLLDPTLQRQIHEAKWYIILYGLLVLLTLVQYLYTATSSPGYLPDMLTAGSRMHATFINTTTLSKQANSKSGSLNSAMSRSKIDQQNPQSTTALLLQQTMDLYPPGTSTSCMPPFYFRDFTCSYCRLIQPPRTKHCHDCDKCVLQFDHHCVWLGTCIAKRNYCRFWWYIFEQTVLTVWTVAFYIQFFYLGIVVSWWKFAIGIVLLVALILILVVLLPLLIFHAYLALTNQTTYEIARRKRISYLREVPSRVHPFSKGICRNLYDLCISKQRGFFLEAVPPLEVLQARARPYTCRDVISCRCC

SEQ ID NO: 50825 - protein, 153 aa, Oryza sativa
MDPEAVRRSLEPTALSKEVVGPASASLRYDAFALTGVRIDAAEHGRLLCSFVVTPRIASPAGYLLSGVTATLADQLGSGVFLSSGIGTSGVSLELNLSYVDVASIGEEIEVEGKLLRAGKSVGVVSVDFRKKKTGKLIAQARHTKYLAVSSKL

SEQ ID NO: 50826 - protein, 286 aa, Oryza sativa
MGKEVDVSTLEAGGARDYIDPPPAPLVDVDELGKWSLYRALIAEFVATLLFLYVTVATVIGYKHQTDAAVNGADAACGGVGVLGIAWAFGGMIFILVYCTAGVSGGHINPAVTLGLFLARKVSLVRALLYMAAQCLGAICGVALVKGFQSSLYDRYGGGANELAAGYSTGTGLAAEIIGTFVLVYTVFSATDPKRNARDSHVPVLAPLPIGFAVFMVHLATIPITGTGINPARSLGVAVVYNNNKAWSDQWIFWVGPFIGAAIAALYHQVILRASARGYGSFRSNA

SEQ ID NO: 50827 - protein, 862 aa, Oryza sativa
MAGEERPERIVVSVRLRPVNAREAERGDGSDWECAGPTTLTFRGAVPERAMFPASYSYDRVFSHECGTRQVYDEGARQVAMSVLSGINASIFAYGQTSSGKTYTMVGITEYSMSDIYDYIEKHPEREFILKFSAMEIYNEAVRDLLSSDATPLRLLDDPEKGTVVEKLTEETLRDKGHLLELLAVCEAQRQIGETAMNEASSRSHQILRMTVESSAKQFLGKGNSSTLIACVNFVDLAGSERASQTASAGMRLKEGSHINRSLLTLGKVIRQLSKGRNGHIPYRDSKLTRILQSSLGGNARTAIICTMSPAHCHIEQSRNTLLFANCAKDVVTNAQVNVVMSDKALVKHLQREIARLENELKFPASASCTSHAEILREKDELIKNLEEQLKELMEQKDTVQSQLDNFRKVASDGDINNHLARRWSRSSDSIPRIVSEGAFSSSDTQDIDYQDQTMDELSVPHSFPPSSQISDITEEHEAQRVAHRAESEPPEEHCKEVQCIETNKLRSRRSQEFFQTPEKKTHTDDQKHSESMSNSAENAIKLYACDFEPSFDLEKPETEESLALKRCVVSSRDSALTRSRSCRASFMVIPNSWFDDSASTTPSSETFRYSTRRPEKVRKSLSPDEIADKSTGNAEEDKSTCNAEEETAVNDIGCVTEVKQKTEMNHAPQSSEQHQPKIAKEVATVSLSKWHIDFERKQQEIIELWHDCNVSIVHRTYFFLLFKGDQTDSIYMEVEHRRLSFIKNSLIADGELHATTASSLRNLRHERDMLYRQMVRKLHLAEKERLYGKWGIDMSTKQRRLQLSRRIWTQTGMDHVRESAALVAKLVEHLEKGQAIREMFGLSFSFKPRRSFSWVGVYSRD

SEQ ID NO: 50828 - protein, 181 aa, Oryza sativa
MAAAAAYPTAATLPPRRAPPPSLRPSPPLSWSASIAHLALSPPPVPSNRASLVVRAAWTRRSRKEAEERPNRKSWKQRTDMYMRPFLLNVFFSKRFVHAKVVHRGTSKVISVASTNAKDLRTTLPSLVDDNACRTIGRLIAERSMDADVFAMSYEPKKNERIEGKLGIVIDTIKEHGIIFV

SEQ ID NO: 50829 - protein, 292 aa, Oryza sativa
MASPAAAESWLQLHVVPHLRAGARITCITVGNEVFKGNDTALQASLLPALRSVHQALGALGLQGRVNVTTAHSLDIMGVSYPPSAGAFHPSAAPHLQPFLAFLSAARAPFLINCYPYFAYKDDPARVPLEYVLFQPNAGVVDPRTRLVYDNMLYAQVDAVYAAIQAMGHTDIDVKVSETGWPSRGDPDEAGATPENAGTYIGNLLRRIEMKQGTPLRPQAPIDVYVFALFNENLKPGPASERNYGLFYPDGTPVYNVGLRGYLPPMASHEAATQVIHWFLLIATASVVFALS

SEQ ID NO: 50830 - protein, 81 aa, Oryza sativa
MVLTLQAIVIEQPKPKAPVYQLTEGTNTLFQDKPHDMLPKTWSCQGQILTPGRCLLHMSLLSFLLYCNCQEKLSFGISVVI

SEQ ID NO: 50831 - protein, 904 aa, Oryza sativa
MGTHTGAIGRIKSMMAWLGSGVLPRPPGYGGQVASKDRGNTYQPNRTSERYQPPRPKAAPFPRKDIDAMNDETFGSSEFSNEDRAEEERKRRASFEMMRKEQHKALQEKKNGPEIEKENSGHDIISLLQTPSERTATTAKSEKPDGSAISSAYQEDTTKTSSVLSASTARPLVPPGFSNAFVEKKLQPQSSNISLEPKVIDATSEGNILATAQFGGLVEGNQSASEITASKNKEKGIPDNIASVGKQHTLPSGGVTYSAEFASSILKGSGDWEGDAMDKYSIENEGKSKNIGSVRKDHSISILEQFFGSALSKGGTDLPPYVENQQMKNDDDVIVSSLPESSKFAHWFHDEDSKPAEDLSSNGLLSMIVKNEKPGQESIAHGPPLSDGAVQNLLPISPTHKLDVASTHPLFTPAAPAVGMLEQHNHADIDPAPIMMTCEDLEQAMLAQVATSSNSNQKNVVQEHQLVVDEPIATQKVAVDNHASQHLLSLLTKSTDNKGSSSFGLHIGSSDRSHNSDVTSNGGVSGIAPVNKAETAPTSEKNLTLEALFGAAFMNELQSKDAPVSIRGSATSGPNYEFAETGKTSIASSHEGYYPGEQVLPFGTIKDGVAPKESGTGNRNLALSGPSQGSASLDKKSLEIQLPEEDNLFTVNDSLDGQKPDIFPSVRSSRVEGLLPEKAVDDLNYRLQSLVPGDSEHVQVLGPDALGSHSHERRYQAESQNLYHLLQGRPPALAPRPMMDHIGNRNQQTPFDMTQAIQHDPHRSFSSNMNPMQQSLHAPRAPHVDPAAHHLMMQHISTPGNFPPEGLQRGVPPSQPVHHMPGYRPEMSNVNNFHMHPRQPNYGEFGLMMAGPSGPELRGNHPDAFERFLQMELTARSKQMHPAMAGHVPGGMYGPELDMNLRYR

SEQ ID NO: 50832 - protein, 130 aa, Oryza sativa
MHCPPAHIPYSPHTVGKAQSSGYFLITSDTMVHFSSDHSYSLKCPSYSNLMYWMDFASGSAIMASGFPACVDCRKMLRLPFVKVTLVGSFCSCLCPPNMYSIAVVVWIQHSHINHLGEQSYTTYSQSNLW

SEQ ID NO: 50833 - protein, 961 aa, Oryza sativa
MVGATASALIGVMNPLLTKLSGLLEREYGKLKGVGREVALLRDELSSMNTALEAVSDSEEEPSSQVKEWMRQLRELSYDVEDCIDVFVHRLGHHDPGDGLFRRTKRRLKALRSRHCIAGQIAELKDRAVLVNDRRKRYELDAAASSSAAIAIDSRLPALFEEMDRLVGIEGPRDELVEFLTGGINLAPQRRVVSIVGFGGLGKTTLANQVYQHIKSQFDRTAFVSVSRNPNVNKILANILIGILETRKLSSVHQKQHSDTIEDLKHKTFEDCKLISLIRENLQNSRYFIVIDDIWDKAAWRDHLRFAFPENNSASRIITTTRINDVAIACHFSHEDFVYAMKPLSSENSEALFFRRIFSSKEKCPPELEEVADDILKKCDGLPLAIVSIASLLSCKPVTKQEWVWVLNSFGSTVMKDQGSHELAVVKRILFLSYSDLPHHLKSCLLYLSIFPEDHTITRDFLISRWIAEGFITEQRGESLEEVGEKYFNELINRNMVQSFEIDPFSRREAYRMHDIMLDLMISLSTEENFATILDGQHCAPSSNKIHRFSLQCKSVERITWLRTTSFSHARSLSVFGDFNKIPPLVDLEVLRVLDLLNCSSLKDDHIENIGSLFQLRYVRLGNISRIPRQIGKLKLLQTLDLSGTAVKKLPQSIVQLLQLVRLFLPWRVELPNGIGNMEALQVLSVFDGTENTSAIIQELGNLTKLKDLDVYWNCNDTESGHEVYINHLVRSLCKLGGFNLQSLCIRNIYPCSLDILAESWSPPPRHLQTFQTDMGCYFSSLPTWMSSLSELTCLRIHMKKVGEEDLQVLKCLPALLRLDLYPGYPKHTLKVSCSGFSCLKEFTYGPSYVDLALILRHQSTIKNGLGMGVMFEAGAMPKLQQLEFGFNAHDMVSAYGAGLDFGIQHFASLRHVRVFIDCRDASDCEMEAALAATANSVSLRGSYHVEIRRILKNVENDEQS

SEQ ID NO: 50834 - protein, 206 aa, Oryza sativa; identical to SEQ ID NO: 47403

SEQ ID NO: 50835 - protein, 232 aa, Oryza sativa
MASSSDPWMKEYNEASRLADDINSMIADRGSLPQSGPEIIRHTSAIRRKITILCTRLDSLEALLSKIPPKSLSDKELHKRQDTLSNLKSKTKQMATSFNMSNFANREDLLGQNKKAADDMSRVAGLDNQGIVGLQRQIMKEQDEGLEKLEETVLSTKHIALAVNEELTLHTRLIDDLEDHVDVTNSRLQRVQKRLAILNKRTKGGCSCMCLLLSVVAIVILAVIVWLLIKYM

SEQ ID NO: 50836 - protein, 250 aa, Oryza sativa
MDGGRVGGDYISSLLSSSPRLDFGVPVLDAIVAPGGGGGGGDCGLDKLCGDPVFAERAARLSSFNNGGGGVGQRYGGAGAGLFGMPPPAPGDFAGGGSREASSVSDPASSAMKDAAANAKKRKSTAAAAAAAKGKGKEPPVGEEKESDGKRCKTGNGEKESSVKPKAEQAGSDSSVEDGGGGGQKQGKGKNAKPVEPPKDYVHVRARRGQATDSHSLAERVRRERISQRMKVSPGPGSRMQQGNWQGTHA

SEQ ID NO: 50837 - protein, 35 aa, Oryza sativa
MLCSSHLTTYIRYTSTSLIHHAKITTRDCFICHCQ

SEQ ID NO: 50838 - protein, 413 aa, Oryza sativa
MFTVIFDTGSSNLWVPSSKCHLSIACYFHSRYKAGQSSTYKKNGKPASIHYGTGAISGYFSQDSVKVGDVAVKNQDFIEATREPSITFMVAKFDGILGLGFKEISVGNAVPIWYNMVRQGLVVDPVFSFWFNRHADEGQGGEIVFGGIDPNHYKGNHTYVPVTRKGYWQFNMGDVLIGGNSTGFCAAGCAAIADSGTSLLTGPTAIITQINEKIGATGVVSQECKAVVSQYGQQILDQLRAETKPAKVCSSVGLCTFDGTHGVSAGIRSVVDDEVGKSSGPFSSAMCNACETAVVWMHTQLAQNQTQDLVLQYIDQLCDRLPSPMGESSVDCSSLASMPDIAFTIGGNKFVLKPEQYILKVGEGTATQCISGFTAMDIPPPRGPLWILGDVFMGAYHTVFDYGNLKVGFAEAA

SEQ ID NO: 50839 - protein, 448 aa, Oryza sativa
MSTRAPPSSTSPVLGTKNFNKAARDLIGRLQKVDGDNYPETLCRMFIINAGQGFRLLWNTVKSFLDPKTTAKIHVLGNKYQSKLLEVIDPSELPEFLGGTCTCEGGCMRSDKGPWKDPEIIKMVQCGMGRCGFNSSGHTEADEKMITEDDIVAIPKKQESIRRDSVDSPKIPREKIEHPQMSPLHEMSTSESKAPPGQEGSSSRYDDLFPMPDKNMDFNWNGEVSAEKLALATRHVRVAAGRVQARRRRGPAGGDGVHGVRDGGGGDVPGGEDRAEARHGRGDGHRDDGGDGQEPEADAAAAAAAGAAPWPGHGDGVDGAVRSADQAARRPRGEGGGAHLPPSRDARRQGGLAQSRRHPRRGPRDRARIHQEAFGDFVGAAGGGAGLHREEEEEEGDAESIPLVMDGFKARSGDGARSCVSCVVLCASSSLYLTPFEMRKKFCYFCGS

SEQ ID NO: 50840 - protein, 319 aa, Oryza sativa
MEYRDKLVLAPMVRVGTLPFRLLAAEYGADITYGEEIIDHKFLKCERVTNESLGTTDFLERGTDTVVFRTCPQERDRVVFQMGTSDAVRALKAAQLVCNDVAAIDINMGCPKSFSLSGGMGAALLSKPELIHDILTTLRRNLDTTVTCKIRLLNTRQDTVELARRVEKIGVPALAVHGRKVKDRPRDPAKWDEIADVVSALSIPVIANGDVFEYEDFKRIKDATGAASVMVARGAMWNASIFCPKGKTPWEDVKREYVRKSILWDNDLKSTKQTIKEMIMHYSCLEFPEGKGVNRCDTIADLAKLYGEEYYNFVLSNRN

SEQ ID NO: 50841 - protein, 447 aa, Oryza sativa; identical to SEQ ID NO: 32409

SEQ ID NO: 50842 - protein, 480 aa, Oryza sativa
MVSSEISSVTTTHAQGPKLFRGKILLPMGPPDVVPSENVEFDFSDVFGPTAVQTPTDLSILTPDSPAPLTESSEGIYNDPLVIVKRSHSLVGPSSLVSQSLPLSKLTLHESDSALDLLECTKEKKSNQEALSDEELDDTKNENGVVGLDDFEVLKLVGQGAFGKVFQVRKKGTSEIYAMKVMRKDKILEKNHAEYMKAERDILTKVDHPFVVQLRYSFQTKYRLYLVLDFINGGHLFFQLYQQGLFREELARIYTAEIVSAVAHLHANGIMHRDLKPENILLDADGHAMLTDFGLAKEFDENTRSNSMCGTVEYMAPEIVQGRGHDKAADWWSVGILLFEMLTGKPPFVGGNRDKVQQKIVKEKIKLPAYLSSEVHSLLKGLLHKEAGRRLGCGPGGSNEIKNHKWFKSVNWKKLDSRQIQPSFRPNVAGKTCIANFDECWTSMPVLDSPVASPVAADSNFVGFSYVRPAPFLQRPSPLG

SEQ ID NO: 50843 - protein, 434 aa, Oryza sativa
MGCSHVTMRALLSRIHPPGPGSISTTSFLQCPSSTAASASKTLAPTLTFRRFAAMAAAAAEEFVKGRVTPNGVAVITLDRPKALNAMNLEMDLRYKAFLDEWETNPSVKCVLVESSSPRAFSAGMDIKGVAAEIQKDKSTPLVQKVFTAEYSLICKIHEYTKPYICLMDGVTMGFGIGLSGHGRYRIITERTLLAMPENGIGLFPDVGFAYIGAKAPGGGAVGSYLGMTGKRISSPADALFFGLGTHYVPSANLGPLRESLLSANFTDDPHRDVESLLTKFKNEPESGPQLDKFLPYIISSFGPDKSVAESVEELKKCSQSDDAAVAEWANEALAGLKKGAPFSLCLTQKHFSQVASAYRNNEHYLSKLAGVMKVEYRIALRSSVRNDFVEGVRAVLVDKDQNPKWKPATLEDVDKGEVESVFEPLAAEAELNV

SEQ ID NO: 50844 - protein, 353 aa, Oryza sativa; identical to SEQ ID NO: 31443

SEQ ID NO: 50845 - protein, 72 aa, Oryza sativa
MGTCCLAPTERRTYADQCERHNACMSCSSPIAGRRAANELAAEDAVAGLMALSNEQIQGAGVDNDSTAWFAG

SEQ ID NO: 50846 - protein, 193 aa, Oryza sativa
MGDGRVGGGTNRPAWLQQYELVGKIGEGTYGLVFLARLKQSHPHAAAGVGRRGSPIAIKKFKQSKEGDGVSPTAIREIMLLREINHENVVKLVNVHINHADMSLYLAFDYAEHDLYEIIRHHRERGSIHHLQHLRFLSQLNSHQVNHVFGDGDGVRWAACRRRRVARRALRRAAGEVAGHGEHRPAAAAAEGR

SEQ ID NO: 50847 - protein, 346 aa, Oryza sativa
MSSEVERKTVCVTGGNGYVASLLVKMLLEKGYAVQTSVRDPNNPEKVSHFKDMEKLGPLKVFRANLEDEGSFDEAVAGCHYAFLVAAPVYDKSHKSDDLEKEIVQGGVEGTLNVMRSCARAGTVKRVILTSSTAAVSSLRPLEGAGHVLDESSWSDIEYLRSMEKLSPTQAYSISKVLSEKEATKFAEENGLSLVTLCPVVAVGASPAVRVDTSVPACLSLITGDEEMMNILKGIEKASGWSMPMVHIEDVCRAEIFVAEEESASGRYICGSLNTTVTEIAGFLAAKYPQYNVRCDCIEEHHPEKPTISLSSAKLIGEGFEFKYKNLDEMYDDLVAYGKALGLIPN

SEQ ID NO: 50848 - protein, 832 aa, Oryza sativa
MAAAPPPPPPPQLQSSDPSTPPQETSQVRKGKKSRGAKKPRRAAAAAAASTSSAGTMVEDPFLVLAGGKEGGFLELEEIDEADFGIFGGAVEDLGEIDRKAGKDQKKKKRKKRKRGDDDYALPGDGDLVVGCEEEGEKGEKRVKKKRRSRKKRKVKEMEEKMESKEDVSDDNVEDMQDGDDMEQDNHDGLILGEDEVYAWRELKLHPLLITPVRRLGFKEPTPIQKACFPAAAHQGKDVIGAAETGSGKTLALGLPILQRLLEEPEKAMRLSREDESTQDENSRESPLRALILTPTRELAKQVCDHLKEAAKFLRIQVVPIVGGLSMEKQERLLKRKPEIVVGTPGRLWELMSTGNPHLIKLHSLSFFVLDEADRMIERGHFHELPSIIEMLPVTNGSDEPTVGTTPSGETVPILEIKKRQTFVFSATLALSANFRKKLKRGLVTAKASASTDLSSIEALSKQARMKPNAEIVDLTKASILPEKLEESFIECSDDDKYAYLYYILSVHGQGRTIIFCTSIAALRHLSSILRVLGINVLTNHAQMQQRARMKAVDRFRESENSILVATDGFARGMDFDDVRTVIHYQLPHSTDVYIHRSGRTARKSMAGCSIALISPADKAKFYSLCKSLSKENLQQFPVDHAYMPAVMNRLTLARQIDKITRKNSQENANKSWLQRNAESMGLLLETSDSEEERVQGHKQRKATSANLQKLQQDLSELLQRPLQPKTSSRRYLAGAGVSPLLQKQLEELSKRNVKGSASVNANKGSRFVVIGQDQIEPLQALQNSGQEVCVSIDKQREKRRLAENWRRKKQKEKKSTREQKRKEKRIAKERD

SEQ ID NO: 50849 - protein, 541 aa, Oryza sativa
MTETPRRSYRKLLTSVIGEKLRDECEQDNRSIFRAVTMPPSSPAPTREVSLALVPMKVHRRESPEVATGWSFLRKKFLPDRKPASHDRSKMSVVQWAMRLPSRYSSASPVCSEYRTTTPDGITSASRILRDRVAVPSRSNSGKSSVVIEELDNSSDKEIPEELIALREKFPSVYSTFSHSELAKITSDFSPECIVGQGGTSQVYKGCLENGKELAVKILKYSDEVLKEFVSEIEIVSSLSHKNIISLAGFCFKDTDLLLVYEYLRRGSLEEILHGEKGCDNLFGWTERFNVALGVAHALDYLHGSGNNRPVIHRDVKSSNILISQDFEPKLSDFGLALWDTDATSQITCNDVAGTFGYLAPEYFMHGKVNDKIDVYAFGVVLLELISGKKPLCTGCPKGQESLVMWANSIIQGGKLTQLVDPNLPTEDHANKVERMTLAASLCIRPTPQRRPHIAVVLKLLNGDNGILKWARSEVGLSYESDGDEPVVTLPENNRNIQSYINLAFDVDDDSASVSSNDFIAANTSLEEYLRGRWSRSSSFD

SEQ ID NO: 50850 - protein, 306 aa, Oryza sativa
MSSQVSTSRGLPSPSKLGTFESPHTWQMSGPTGQAEAGSSDDQDIRLLSVSWNQDFGCFAAGTSNGFRIFNCDPFKETFRRDLKSGGFGIVEMLFRCNILALVGGGSNAHYPPNKVMIWDDHRSHCIGEFAFRSDVRAVKLGKDYIVIVLERKIYVYNFTDLKLLHQIETQSNPKGLCCLSHHSNTSVLACPGVHQGHVRVEHFGLKVTRMISAHDSHISCMALTMDGLLLATASMKGTLIRIFNTMDGTRLQEVRRGLDKADIYSIALSPNVQWLAVSSDKGTVHIFSLRVRVAGEDASNEQRSS

SEQ ID NO: 50851 - protein, 446 aa, Oryza sativa
MAATIVSVKARQIFDSRGNPTVEVDVCCSDGTFARAAVPSGASTGVYEALELRDGGSDYLGKGVSKAVDNVNSVIAPALIGKDPTSQAELDNFMVQQLDGTKNEWGWCKQKLGANAILAVSLAICKAGAIIKKIPLYQHIANLAGNKQLVLPVPAFNVINGGSHAGNKLAMQEFMILPTGAASFKEAMKMGVEVYHNLKSVIKKKYGQDATNVGDEGGFAPNIQENKEGLELLKTAIEKAGYTGKVVIGMDVAASEFYNDKDKTYDLNFKEENNDGSQKISGDSLKNVYKSFVSEYPIVSIEDPFDQDDWEHYAKMTAEIGEQVQIVGDDLLVTNPTRVAKAIQEKSCNALLLKVNQIGSVTESIEAVKMSKRAGWGVMTSHRSGETEDTFIADLAVGLATGQIKTGAPCRSERLAKYNQLLRIEEELGAAAVYAGAKFRAPVEPY

SEQ ID NO: 50852 - protein, 235 aa, Oryza sativa
MGAADDANHRHEEASPLLPPGGGGGGGKKLHQSPPPSPPEAAKCCADGVPVVMGEPLGAPAPPRESWNSGVLSCLGRNDEFCSSDVEVCLLGSIAPCVLYGSNVERFAARPGTFANSCLPYTGLYMLGNALFGWNCIAPWFSHHTRTAIRRRYNLEGSFEAFTKQCGCCHGLVEDEGNREHLEVACDLATHYFCHPCALCQEGRELRRRVPHPGFNGRSVLVMTPPKEQTMGRGM

SEQ ID NO: 50853 - protein, 240 aa, Oryza sativa
MFSRSWFQPEDASDLRQRIRELLLEEFESARLDEALSEADTSDRSDNEEDATKSAESEQAAAAAAPGNGSSEMIVEGGDTGISNEDIKGVAASKEASSSICRSADNLAGCVLLEEATLSDSVMKDEEDTTKADPVSSQDEQEVAVLSPGAWKNSEENTHKQPQPDICCDSSDSEMDDVKIIEDPYQRTNKQNCRIFWHEGLMRHTICSISRMINKIWQMLVHAKILEMPVATCQMDDVTT

SEQ ID NO: 50854 - protein, 382 aa, Oryza sativa
MSNPCRVSLCITEEEDEVQPYSSKAATSSTHEVPIQNSPVKSWQWWLMVGVNMFFLIAGQTASTLLGRFYYNQGGNSKWMSTFVQTAGFPILFIALFLFHSKTSSTQTVTSSPAPTISIPKITLIYVVLGLIIAADDLMYSYGLLYLPVSTYSLICASQLAFNAVFSYFLNAQKFTPLIFNSVVLLTFSASLLGVDEDSQGTTSISHGKYILGFLLTLGASATYSLILSLMQVTFEKVIKRETFSVVLNMQIYTALVATLASLVGLFASGEWMTLQGEMHAFQSGKLSYVMTLLWTAISWQVASVGVVGLIFVVSSLFSNVISTLALPIIPVFAVIFFHDKMDGVKIIAMLMAIWGFMSYGHQLYVDGKKGRKTTVSVEETS

SEQ ID NO: 50855 - protein, 85 aa, Oryza sativa
MDRSMETVEEEVEEYSWREVLLPRLVPVVSDAAPELERETGERRRGRELLVAVDFGPNSKHAFDWALVHFARMADTLHLVHAVSS

SEQ ID NO: 50856 - protein, 139 aa, Oryza sativa
MANSASGLAVNDECKFKFQELKTRRGFRFIVFKIDDKAMEIKVERLGQTAEGYEDFAATLPADECRYAVYDLDFVTDENCQKSKIFFFSWSPDTARTRSKMLYASSKDRFRRELDGIQCEIQATDPSEMSLDIIRARAH

SEQ ID NO: 50857 - protein, 258 aa, Oryza sativa
MYANFHYHHHYEKEHMFEKPLTPSDVGKLNRLVIPKQHAERYFPLGAGDAADKGLILSFEDEAGAPWRFRYSYWTSSQSYVLTKGWSRYVKEKRLDAGDVVHFERVRGSFGVGHRLFIGCRRRGDAAAAQTPAPPPAVRVAPAAQNAGEQQPWSPMCYSTSGGGSYPTSPANSYAYRRAADHDHGDMHHADESPRDTDSPSFSAGSAPSRRLRMFGVNLDCGPEPEADTTAAATMYGYMHQQSSYAAMSAVPSYWGNS

SEQ ID NO: 50858 - protein, 112 aa, Oryza sativa
MLNFEQAIEKHPKDFARWDTHMQQLKGSCSSMGASRVKNECTSFRNFCGEENPEGSLLLWLCSCPRSFQKVKREHAVLRQKWESYFQLLRQAGPAGTATRPGGQVSYKQPGY

SEQ ID NO: 50859 - protein, 296 aa, Oryza sativa
MAGVISARAGLSHSLSVTQTVPNRPLQASQLATRCTSPSFLSAKLCKTRPLVVVAAMEVSKEAPSADFANRQPSKGVLETWCNADAVCFDVDSTVCLDEGIDELADFCGAGKAVAEWTAKAMTGTVPFEEALAARLSLIKPYLSQVDDCLVKRPPRISPGIADLIKKLKANNTDVFLVSGGFRQMIKPVASELGIPPENIIANQLLFGTSGEYAGFDPTEPTSRSGGKALAVQQIRQNHGYKTLVMIGDGATDLEARQPGGADLFICYAGVQMREAVAAKADWVVIDFQELISELP

SEQ ID NO: 50860 - protein, 110 aa, Oryza sativa
MVRGTWLSRLRGPPTYGLPHRLVSHLHAILGCNQNESAPEADNKENDRMVLETLLSIFTPMLEGLGEPDDFDRENACWDVNLALDYKDLQRRIVLSIVTSCTSGLAMLDS

SEQ ID NO: 50861 - protein, 626 aa, Oryza sativa
MTMMGCAVLLVVVASMAGEAAGRFVVEKNSLRVTSPAGLRGVYECAIGNFGMPQYGGTMHGVVVYPKANKKACRSFDDFDLSFKPKPGGLPIFLLVDRGDCYFTTKGWNAQTAGAAAVLVADDRLEPLITMDSPESSGTDYIEKITVPSALVTKKFGDDLKKALENGDMVNVLLDWRESLPHPDERVEYEFWTNSNDECGAKCDMQMNFVRNFRGTAQVLEKRGYTQFTPHYITWYCPEAFVLSKQCRSQCINHGRYCAPDPEQDFNIGYDGKDVVLQNLIQICLFKVGNETHKPWVWWDYVHDFSIRCPMKEKKYTRECANGVIKSLGLDLERINKCVGDPEADEENPVLKAEQDAQIGQGSRGDVTILPTLVVNNKQYRGKLEKSAVLKAVCSGFEETTEPDVCLSQEIQTNECLESNGGCWQDKTNNFTACKDTFRGRVCECPIARGVKFVGDGYTHCEASGVGRCQINNGGCWKETKNGKTVSACSNEESKGCKCPPGFKGDGIKSCEDIDECKDKLFCQCKDCSCENTWGSYECSCGGSNMLYMREHDTCISKVASSSVGWGFLWVIFFGLALAGIGAYAVYKYRLRSYMDSEIRAIMAQYMPLENQETPNQHRPVEHADI

SEQ ID NO: 50862 - protein, 202 aa, Oryza sativa
MSAQRPLFFWRVNTKTTKLREVIEKIIKSKLGMNLPLVMIGSTLVFEDGEGLEEDEAANYALNLEKVLAELPAPVVNDTKLTVEDFQQELSCSINIKHRDEFDEEKEPDGMVLSGWSAPVEKQVTSNGGNQSVASSSGADYADGIVEDISTKPGMKRKLDEVLELKENCDASSSAQVVEDDDDDDLVMLDENPKLAKKKRLQ

SEQ ID NO: 50863 - protein, 333 aa, Oryza sativa
MAAAAAVRHRTVEANGISMHVAEAGPGSGTAPAVLFVHGFPELWYSWRHQMGHLAARGYRCVAPDLRGYGGTTAPPEHTSYTIFHLVGDLVALLDALELPQVFVVGHDWGAIVSWNLCLLRPDRVRALVNLSVAFMPRRPAEKPLDYFRGAYGDDYYVCRFQEPGVEKELASLDLKRFFKLALIVQTTGSSAMSIKKMRANNREVTLPPWLSEEDISYVASVYAKTGFAGGINYYRCFDLNWELMAPWTGAKVLVPTKFIVGDGDLAYHLPGVKSYIHKGRLKKDVPMLEEVVVIKGAGHFIRQERAQEISDHIYNYIKKFNTGVSSPKSSRL

SEQ ID NO: 50864 - protein, 754 aa, Oryza sativa
MKPHLTSVLDFVREDGGGAPGVLGVWGMGGAGKTTLLKLARDPRVQTLDHIVLAEAGKCCDIAKLQDSIAQGTSLVLPPSLSVTNRATVLCNHLRNKKFLLLLDDLWNYIDLEAVGIPLPLGRGNQRKVVLTSRSEAVCVSMARQGVTIRMGCLDQQDAFKLFEDKVGSATINADTRIPELARQVAEMCGGLPLVLCVIGRSMCTKKNYKLWVDAVNRLEKSKVHNNLVGDDDIFNILRYSFDGLHDDEARGCFLACTLFPPFYIEKKRLIRWCMGLGFLDPANGFEGGESVIDSLQGASLLESAGSYSVDMHDIIRDMALWIVRGPGGEKWSVLNRAWVQDATIRKMNNGYWTREEWPPKDTWPELEMLAMESNRSYLDPWKVSSIGQMTNISFLELVSLDTFPMEICELHKLEYLCIKAGSMSRLPIELGKLSKLKQLHLRQSCSLGEIPTGLISQLVNLQVLDLFCSSIDYPYRPKSAAGGLYNFLGELAEARASEKLKILGICLDATRDNRAFLKQLMQKQVRIRSLCLSFINPISPGHDQPQPATSRYMIAELQPFSNDLGELAISSSDILQELVATSDGKELIQNLEHLCLENLNVLERVIWLNAARNLRRVDIKKCAKLTHATWVLQLGYLEELGIHDCPQFKRLIDHKELAENPPDHVIFPRLTYLDLSDLPELSDICVLPCEFKSSLALLVENCDKLMNISFHYPPGHDQKNIRVFCDNEWFNRLECKPNIMKSYLSQNMRFSAI

SEQ ID NO: 50865 - protein, 195 aa, Oryza sativa; identical to SEQ ID NO: 30208

SEQ ID NO: 50866 - protein, 204 aa, Oryza sativa
MAEEKKTPCLNERILSSLSKRSVAAHSWHDLEIGPGAPQVFNVVVEITKGSKVKYELDKKTGMIKVDRVLYSSVVYPHNYGFIPRTLCEDGDPMDVLVLMQEPVIPGCYLRAKAIGLMPMIDQGEKDDKIIAVCVDDPEFRHFNDLKELSPHRLAEIRRFFEDYKKNENKEVAVNDFLPPATAQEAIKYSMDLYAEYILHSLRR

SEQ ID NO: 50867 - protein, 202 aa, Oryza sativa; identical to SEQ ID NO: 30738

SEQ ID NO: 50868 - protein, 317 aa, Oryza sativa
MAFLRKVGNLVRQSAGSGSPLFQAVRCMSSSKLFIGGISYGTDDQSLKEAFANYGEVIEARVIVDRTTGRSRGFGFVTYTSTDEAAAAITGMDGKDLQGRIVRVSYAHDRGSRAGGYGGGGYSGQGTYGGGGGYGGGGYGGQDAYGGRGVGGYSEGGRGYVGGGYGDGNNYGGYNTSGGYNSEGGRGGYSVFEGGHGYGSGGTGYTGGSGGYNSAPGNYSSDNFNQGGAAPGAYEGANYGGGNNYMNNATSDDSTGKLDELLNDLKVDGDGKEDGEGKADGAGLVNEDLEGDDGQDELLQNDFKDEDVSDDYANKRR

SEQ ID NO: 50869 - protein, 100 aa, Oryza sativa
MADEEQVERKEEVSEVKSLPFSFFFSFFHLPCTSDSVRFFGGEGKKRRSDGLGAVPCCAVCVWCMRDLVGCFGRESATMGLFRMFDLCAWIESVKSVRAD

SEQ ID NO: 50870 - protein, 164 aa, Oryza sativa
MWGSADGGTPEVTLETSMGAFTIEMYYKHAPKTCRNFLELSRRGYYDNVIFHRIIKDFIVQGGDPTGTGRGGESIYGAKFEDEIRPELKHTGAGILSMANAGPNTNGSQFFITLAPCQSLDGKHTIFGRVSKGMEIVKRLGSVQTDKSDRPIHEVKILRTVVED

SEQ ID NO: 50871 - protein, 307 aa, Oryza sativa
MPSSHGDLDRQIAQLRECKHLAEGEVRALCEQAKAILMEEWNVQPVRCPVTVCGDIHGQFYDLIELFRIGGEAPDTNYLFMGDYVDRGYYSVETVSLLVALKVRYRDRITILRGNHESRQITQVYGFYDECLRKYGNANVWKYFTDLFDYLPLTALIENQVFCLHGGLSPSLDTLDNIRALDRIQEVPHEGPMCDLLWSDPDDRCGWGISPRGAGYTFGQDIAQQFNHTNGLSLISRAHQLVMEGFNWCQDKNVVTVFSAPNYCYRCGNMAAILEIGENMDQNFLQFDPAPRQIEPDTTRKTPDYFL

SEQ ID NO: 50872 - protein, 392 aa, Oryza sativa
MATSKKDPPSRDRAARMSPNLKRSSGIEASSAAGYGPRRARSVPSSPDRKFGAAAAAPAAASGSPDVYRPSLSAAGRSTSARSVSGSSRTQPFPKPTLARVKSERATTAAAASPRPPALAPPASNSLKDMARTAPSASSKAPSTLQKSKLSPRPSPDKAVASLKPITQRSPASVTARGGRTTVVSSSRVPGNIAAKKRAESANGGSASSKARSGAPQRAMAASATSKEEKEDEPSMQFEESESISTPSIEDHLHEQLPDPVDLKPLDMSASDSALYGQQAPSSDIPEQQSKNEEVKESFSEDKDVVVGNELHNGGQGADDIAKNITGIVKADDQSQLAEKEEARAKVDKVWRKDEPKSNDVIEETKSKLLEERKSRVKALVGAFETVMSFKE

SEQ ID NO: 50873 - protein, 279 aa, Oryza sativa
MLDSSSLLLPDEGGTSSLLRLLLPPYVITQAAAAQQEEYRSRVILLRGLGTERWQCDAAQIADWLEHRVELRHQVEAVVIHRAMGVVVVVLGSPEDVELLLQEPPETWLHAPGMRWGDDDDDDEMRWGLSPHCLMMTWLHVSRFLTPPPQQPPQQLSFSTRDWAGPVAYCQAKNWLSDELMSPGPGYHVNRVVEARRIVHKLIALCALANPATVWSSSFPDRSLILSGIPMYTDRADLEARLPTTFGAMDDLVHARLKGGRSGRVQVLAWGSKAGTEAG

SEQ ID NO: 50874 - protein, 354 aa, Oryza sativa
MLTVYRMYSELVSSTIAEGGPFASRTSFVKLLRSVKRETLKLIETFVDKAEDLPHIGKQFVPPMMDPILADYARNDPDARESEVLSLFATIINKYKGEMLEDVPRIFEAVFQCTLEMITKNFEDYPEHRLKFFSLLRAIGTHCFQALIQLSSQQLKLVIDSINWAFRHTERNIAETGLSLLLEILKNFQASGFQNQFYKTYFLNIEQEIFAVLTDTFHKPGFKLHVLVLQHLFCVVDGLTEPLWDASSVPYQYTDNAMFVRDYTIKLLGSSFPNMTPTEVTKFVDGLLSSKHDLPSFKNHIRDFLVQSKEFSAQDNKDLYAEEAAAQRERERQRMLAIPGLIAPSELQDEMVDS

SEQ ID NO: 50875 - protein, 375 aa, Oryza sativa
MAEDANAGRKSSTHLAQSPELHASLESHELYNIPITRGEGTLITELRKVMEELRVSYYADTDEETREQLKQFWDDEFNAISSGETTIERDLKWMRKEVIEAFETYSEANVVDYELEDLSRQCLIFDDCGQPYHHYNFTMKSKRPDSDLESSTNCPDSDLESSTNLESCISRHYFAEVKLMDGKKHYFCCPLESFDNGHCHGCRNSGIDLKHPSNGGYEEGNAYSGLSFDDDEFDAISEETTKEKGIEWMREEVIEAFETYSNANVVDYELEDLSRQCLIFDDCGQPYHHYNFTMKSKCPNSDLESSTNVESCISRHYFAEVKLMDGEKHYFCCPLESFDNGHCHGCRNSGIDLKHPSNGGYEEGNADSGFSFDPI

SEQ ID NO: 50876 - protein, 284 aa, Oryza sativa; identical to SEQ ID NO: 49954

SEQ ID NO: 50877 - protein, 186 aa, Oryza sativa
MAASLRASSSSLRSRLLSSSSAAWSPWSHVLSSSVHSEASNQTETLAFDEIQLSPEKPSTATAFVLHGLLGSGRNWRSFSRALASELRDRSPSDEWRMVLVDLRNHGRSAGIKGLRPPHDMSTAARDLADLVKARGWAWPDVVVGHSMGGKVALDFAESCSRGDYGESADLPKQNSFGCLILFLVK

SEQ ID NO: 50878 - protein, 76 aa, Oryza sativa; identical to SEQ ID NO: 40572

SEQ ID NO: 50879 - protein, 393 aa, Oryza sativa
MSSKVPGLALLNTSISKFWSDEELVRFLAERKEAHSLPENVFVGMNISLIDPRNSEDIWYMNFSDDPQSPKNGENAIIKSKTGYWKVVGTVRIPTSTVIVGMKVSLDHYEGEAPSGKRTGWVMDEYLIEQNDEANLPQDYKNLCTIFFQGDDILNAGDKQICLNANVPNERKEFYLQYLAELEEQNAAWSNQAVSVNEQDVSSSKGLDGQKTSAADDQSVNHAPSREGYIELNDFLNSDSSASTSEYSSQRTMISEEYFDSDAFLREIRNDHNAADEEHTDSKFSVAAASKSDCVVISPPEQGFVNNLDNHATIAGDSPQKSVKNDKVDEHSSEEHPQHSPTTSCFPSHVKRSLSSSSSSSQGTSNSKSPQRQRERSTKKIGKLGKYWCCGSL

SEQ ID NO: 50880 - protein, 155 aa, Oryza sativa
MGEDLESLNLKELQQLEQQLESSLKHIISRKSHLMLESISELQKKERSLQEENKALQKELVERQKNVRGQQQVGQWDQTQVQAQAQAQPQAQTSSSSSSMLRDQQALLPPQNICYPPVMMGERNDAAAAAAVAAQGQVQLRIGGLPPWMLSHLNA

SEQ ID NO: 50881 - protein, 173 aa, Oryza sativa
MDYYYPMEEEEEVHERPRFRRPVHPWQWHHWQNLLGLLSSSSPSPATAAAAQRCSHVSWEETAAAHLYSASLPGVRKEEIRVEVEDAMYLVIRTELDDGGDGDGGGGGGRRSFARKFRLPAMVDADGISAEYTHGVLRVTVPRLHTRARPVVNLAGGGGGGGGPACDPVARAA

SEQ ID NO: 50882 - protein, 233 aa, Oryza sativa
MALLRAHHLLLMRPRAAFSSRPPPLSSSPCRRALPTTAIASRLLCSHHASSPPEDASASASPSIVADLLDYLNESWTQFHATAEAKRQLLDAGFTLLSENDDWDLQPGGRYFFTRNMSCLIAFAVGEKYKLGNGFNIIAAHTDSPCLKLKPRSASFKSGHQMVNVQTYGGGLWHTWFDRDLTLAGRVILKDADGSFKHELVKVSRPLIRVPPLAIHLDRLFLIPSFTDLFSEN

SEQ ID NO: 50883 - protein, 290 aa, Oryza sativa
MGMRCKKHPYQAGGGVCATCLNDRLLALAAAQNGASSSPPPPAAPPAAAAPAFPRSVSPYVSRRKSDSSGGGALKHHPSLLFFRTPQVGPAYGSSGGLEEGDIGYEKRRAGKFSVIATLFGHHHHHHRSEEKDKGGDNRESRNRSWLAGFMPRRRKKQPPAPAAAAAASSPPPRRSCRVVSNRGLSPERDCDGSDEESSSPTDPPWQPSPSPMRRTPCRRRQTSTMPSGFAVCLSPLVRPSPGRRHRHAHPPDPGTFSCELRPSPLHNLSSAASITRCRSRKLADGGRFR

SEQ ID NO: 50884 - protein, 799 aa, Oryza sativa
MWREMPRVSFYLQQGQDHGNKHQQPNELCADKSNFQKEQAKSQKQKPVKVQSGVTEESIDPYSVRVIQRRLVYIVGMPSEFASDKVLRQHNFLGQYGKIESIIIDNIGANQQIPDSGRVYVTFSREEEAFRCIEAVNGFILDGRPLKATFGVTRYCHVWLSNKVCRKPICSYVHQKAPPEDICTKDDVAVYCARLQHLLGMDTKGLRSGNTLPPPGDCVSRTTVCNGNSKDKTCSDDYGVLHNHGNKNLGTLPATTLQEEKKRNSTPNNQQGLSASVSQELPPLGPKVHHLNDQLASCGDKPQASVQSANGNLNSKQVTAAGNGTVGTLSAKQYVNVVSQGSSGSGRRFTVLTRQTASSDTRSKATGQVGNASSDSQKLTSANNEHSDRIKISRSDNVKLVSQRPEEPSQMLANHLTGAIDKTHVDTDEKNARSDINEKTVCGIQMQLKESTAAHRSTVLQSLRDNPMSNNLPTLDVKSQISVVPDKPSDSQSASKTQLQPSNHKKTAVCSSDTANASDACGIANNQVLFPGGKHQTSSQGEDHSLYKRDKSQSGDQLSSQHPGNVFSPRLLTSLSSIDITAKENKGIKRHVCPPGFEELHRPSDSDKITSVSSPTSSIMCSGPDTLVQDSCSAKDQPDFISWVSECLEDGGETTQSNRSIPSTLSSTDATWRYMQYPPPVFLVHQITFLVSPYPRGLSQHTVGRIENTMNCCCSHPSVSGIANHKPEYWSGSDHSYMSTGGYDVFSQSATLGMIAGMVGTSPQQPSPPVHYNDWTTGSADSDLKSPQVDHTYPMYSLF

SEQ ID NO: 50885 - protein, 875 aa, Oryza sativa
MAQQQQQQSAWEAEKMLDVYIHDYLLKRNLQSTAKAFQAEGSVSSDPVAIDAPGGFLLEWWSVFWDIFIARTNEKHSDVAASYIESIKAREQQPSQLQQQEAHSQQSSQQIQMQQLLLQRHAQQQQQQQSQQQPQQQRRQQKQQQRSESSHLPTSAHNGWVSADPPTRQSTSAASSLSAKMYEERVKNSVQRDTLDEAPAKQRFTENIGQLLESNSSFMLKSVAITAQASGQIFHGSTGGVSGTLQQVQARNQQLQASTQEIKVDTNAAVHMRAAGADGSLIGVPGANPAGNNLTLKGWPLTGLDQLRSGFLQQKSFMQSPQPLHHLQFLTPQQQQLLLQAQQNMTSSPGEMDSRRLRMLLSSRNIVPGRDGQSNAYTEVIPSVGPSLQNMCSPVQRMETDMLMKKIAAIQQHQQSSNQQQLLQHSLLSQQPPISNHLPGQQEKMGAGSVTIDGSLSNSFRGSEQVSKNQNGRKRKQPISSSGPANSSGTGNTAVPSSEPSTPSSQSPGDTISMPSLHHNASLSKALVVYGTSTAGTMGSPSNQLADMDRFVEDGCLEDHVDSFLSHDDADRRDGSRMESTKGFIFREVSSVQASTNKVVCCHFSSDGKLLATGGHDKKVVLWHAETLKQKSVLEEHSLLITDVRFSPSIPRLATSSFDKTVRVWDADNQGYSIRTFTGHSASVMSLDFHPNKDDLICSCDGDNEIRFWSINNGNIVRIFKGGSSQLRFQPRHGGYLAVASENAVSILDVETQACLRRFEGHTKHVDSVCWDPSGEYVVSVSEDTVKVWSVNAGSDDRCVQELSCTGSKFHSCAFHPSYSSMLIIGCYQSLELWDMSENRTMTLAAHDSLITALASSSSGLVASTSHDKFVKLWK

SEQ ID NO: 50886 - protein, 110 aa, Oryza sativa
MPGGSLLNSGGMADYGGGGGSGGGLTFPVVVTCLMAASGGLIFGYDIGISGALEMDRIRSIAYFAIACGLGVLFSENFSECLIPWFSFFLLLLKSLHTYRVGFDLIYHSF

SEQ ID NO: 50887 - protein, 759 aa, Oryza sativa
MQVQGFFDRLTGRNKEAWKEGRIRGTAVLVKKDVLGLGDFHASLLDGVHNILGHKEGVAFRLVSATARDPSNGGRGKLGKPAHLEELVVTMKSTAAGESVFRVAFEWDESQGIPGAVVVTNSNRSEFFLKTLTLDGVPGKGTVVFVANSWIYPADNYQYERVFFANDTYLPSKMPAPLIPYRQEELNILRGDGKIGPYKEHDRIYRYDYYNDLGQPDKGSKLVRPVPGGSQELPYPRRGRTGRAPTKTDPNTESRLPLLDLNIYVPRDERFGHLKMSDFLGYSLKAIVEGVLPIIRTYVDTTPKEFDSFQDIMELYEGGLKVANASALAEIKKRVPFELIKSLLPVAGDQVLKLPLPHVIKEDKFAWRTDEEFAREMLAGVNPVMIKRLTNFPAKSTLDPNVYGDHTSKITEAHIKHNMEGLTVQNALKGNRLFILDHHDHFMPFLDKINKLDGNFIYASRTILLLKDDGTLKPLAIELSLPHPDGQQHGAVSKVYTPANTGVESQIWQLAKAYASVNDSAWHQLISHWLNTHAVIEPFVIATNRQLSVVHPVHKLLSPHYRDTMNINALARQTLINADGIFEKTVFPGKYALEMSSVVYKNWKFTEQALPVDLVKRGVAVPDPTSPYNVRLLIKDYPYAVDGLVIWWAIERWVGEYLAIYYPNDGVLRGDEELQAWWKEVREVGPWRPQGPGLVAQDGHRPGAHPGVHHHHLDRVGAARGGQLRPVPVRGVPPEPADGEPAADAGAGHRGVREAGARR

SEQ ID NO: 50888 - protein, 603 aa, Oryza sativa
MAVEEAAESCGSHAAASAAGRRGGGGGGGGGATSSSSSASAGAAAAAAARKQQQQQRHKLEVYTEVLRRLHDSGVPEARREGFDDELWNHFNRLPARYAMDVNVERAEDVLTHKRLLEQAKDPAQRPAFAVRAVQVSPILDGNQTDADSNTAGEEVASRLLNRQQSIHPPPAFGSSTNLEALALEASKSQGQDHDSTSDNVNYRPMHEITFSTIDKPKLLSELTSLLGELGLNIQEAHAFSTNDGYSLDVFVVVGWHDEETEDLIESVRKEIGKIDETQGWSTTHSWSSPVENMQIGENSAADHVEIPRDGASEWEIDVKLLKFGNKVASGSYGDLYRGTYCSQDVAIKVLKPERINADMQREFAQEVYIMRKVRHKNVVQFIGACTKPPNLCIVTEYMSGGSVYDYLHKHKGVFKLPALLGVVMDVSKGMSYLHQNNIIHRDLKTANLLMDENGTVKVADFGVARVKAQSGVMTAETGTYRWMAPEVIEHKPYDHKADVFSFGILMWELLTGKIPYEYLTPLQAAVGVVQKGLRPTIPKNAHAKLSELLQKCWQQEPAERPDFSEILETLQRIAEEVGDEHDGKHKEKILGGLFSALRGRGH

SEQ ID NO: 50889 - protein, 593 aa, Oryza sativa
MAEVTVVRAEREEESTLEQGLLAIPEESNQLTYTGDGSVDFSGNPVVKERTGRWRACPFILGNECCERLAYYGISTNLVTYLTKKLHDGNASAASNVTAWQGTCYLTPLIGAVLADAYWGRYWTIATFSTIYFIGMAVLTLSASVPTFMPPPCEGSFCPPANPLQYTVFFLGLYLIALGTGGIKPCVSSFGADQFDDTDPVERIQKGSFFNWFYFSINIGALISSSFLVWVQDNIGWGIGFGIPTIFMGLAIISFFSGTSLYRFQKPGGSPITRVCQVVVASFRKWNVHVPEDSSRLYELPDGASAIEGSRQLEHTDELRCLDKAATITDLDVKADSFTNPWRICTVTQVEELKILVRMFPVWATTIVFSAVYAQMSTMFVEQGMMLDTSVGPFKIPPASLSTFDVVSVIIWVPLYDSILVPIARRFTGNPRGFTELQRMGIGLVISIFSMAAAAVLEIKRLDIARAEHLVDQNVPVPLNICWQIPQYFLVGASEVFTFVGSLEFFYDQSPDAMRSLCSALQLVTTALGNYLSAFILTLVAYFTTRGGNPGWIPDNLNQGHLDYFFWLLAGLSFLNFVIYVICANKYKSKKAA

SEQ ID NO: 50890 - protein, 451 aa, Oryza sativa
MAADHLVVAMLLLLALSPPAVADDTAVLGRKGGVVEGQAAGPGRYAVILDAGSTGTRVHVFRFDNKLDLLKVGDNIELFAKVDPGLSSYAGRPQDAANSILPLLDKANTVVPARLMNKTPLKLGATAGLRLIGDEKANQILEAVRDVVHTKSKYQYNPNWINVLEGSQEGSYIWVALNYLLDKLGGDYSKTVGVVDLGGGSVQMAYAISSNTAATAPKVPEGKDSYVVKEYLKGKDYNIYVHSYLHYGGFASRAHILERKDGPFSNCMLRGFSGNFTYNGKQYDATAAPQGADYHKCREEVVKLLKVNAPCETKNCSFNGVWNGGGGAGQDDLYVASAFYYIASHVGFINSDAPSAKSTPATFKAVAEKVCKLSVKEAKVEYPNVRDHAYLCMDLIYEYSLLVDGFGLHPSKEITLVDKVKHGEYYIDAAWPLGTAIEAVSPKKRLREIYK

SEQ ID NO: 50891 - protein, 241 aa, Oryza sativa
MELESEQHGCEHYTRGCRIRAPCCGEVFGCRHCHNEAKNSLEIHLNDRHEIPRHEIKKVICSLCDKEQDVQQYCSGCGACMGKYFCEKCNFFDDDVSKNQYHCDGCGICRTGGVDKFFHCDKCGCCYSNVLRDSHHCVEGAMHHNCPVCFEYLFDSTKDISVLHCGHTIHLECLNVMRAHHHFACPVCSRSACDMSDAWKKLDEEVAATPMPEFYQKKMVSKTPNISPKSRVPFFSEHFFR

SEQ ID NO: 50892 - protein, 324 aa, Oryza sativa
MAMAALRRDGRRVLLSSTPSPAAAMAARSPAAAHQEIAPLGARSVSTQVVRTRMKSVRNIQKITKAMKMVAASKLRAVQIRTENSRGLWQPFTALLGDVPSVDVKKNVIVAITSDKGLCGGINSTSVKVSKALHKLTSGPEKESKYVILGEKGKVQLIRDSKDNIEMTVSELQKNPINYTQIAVLADDILKNVEYDALRVVFNKFHSVISFKPTMTTILSPEVMEKESESGKVGDLDSYEIEGGETKSEILQNLTEFQFSCVMYNAALENACSELGARMSAMDSSSRNAGEMLDRLTLTYNRTRQASITTELIEIISGASALEG

SEQ ID NO: 50893 - protein, 375 aa, Oryza sativa
MEQISLEHRYKECRPRRNNSCPTKTLVGKDQLKELEHRRPSPSVIAKLMGLDVLPPAYVAHNQHQEFKDVFEVSEEPQEAVTKERSHNFPKGLPSLKRSALKLRKLMPSKSPYGDETFDNNVVNQDGFDRLNSLEINNPLFEKHPYDVNCSPNYRYEKDSTSSTFRKYPVGLGNSSLKEIVVLELGLGEVQHSGNAFSTPEPSDVNKNFRRKMKQAEFSTTNRGSQNLLGTKDINVPRIKGERHLTSNAVDSLLKRQDSSLDQYNTVDTDNTGSSQKCVSSEVNSRKSNRSSSNSSPWKIRRKYEEGAIGSKTLAEMFALSDSERLKRDSDSHVQIQDNKLNRGNNNDKEGCFIVLPKACTSIASSQFVGQEFFL

SEQ ID NO: 50894 - protein, 236 aa, Oryza sativa
MDRESVRFMAREIHILRRLDHPNVIKLEGLVTSRMSSSLYLVFEYMEHDLAGLAATPGIKFTEPQVKCYMQQLLSGLEHCHNRGVLHRDIKGANLLIDNNGVLKIADFGLATFFNPNQKQHLTSRVVTLWYRPPELLLGATNYGAAVDLWSAGCILAELLSGKPIMPGRTEVEQLHKIFKLCGSQSEDFWANLKLSRATIFKPQHPYRRCVNDVYKDFPPPALALLDCLLAVEPSE

SEQ ID NO: 50895 - protein, 331 aa, Oryza sativa
MAEVQSVQALASSLAALPPEFVRSEHERPGATTFRGGDAPEIPVIDMAAPESAARVAEAAAEWGLFQVVNHGVPAAAVAELQRVGREFFALPQEEKARYAMDASSGKMEGYGSKLQKDLEGKKAWADFFFHNVAPPAMVNHDIWPSHPAGYREANEEYWQHMQRLARKLFEHLSTALGLDGGAMWEAFGGDELVFLHKINFYPPCPEPELTLGVAPHTDMSTFTVLVPNDVQGLQVFKDGHWYDVKYVPDALIIHIGDQIEILSNGRYKAVLHRTTVDKDRTRMSWPVFVEPPPEHVVGPHPQLVTDGSPAKYKAKKFKDYRHCKINKLPM

SEQ ID NO: 50896 - protein, 55 aa, Oryza sativa; identical to SEQ ID NO: 32213

SEQ ID NO: 50897 - protein, 211 aa, Oryza sativa
MSRAGIFGPFVIFGLFGFLWVLVWISAISGTPGENAQISAHELNYITRGQKLVKTQSGGERLRKVPPFTKLLSKWPTWALISANAMHSWGYFVILSWMPVYFKTIYHVNLREAAWFSALPWVMMAVLGYVAGVVSDRLIQNGTSITLTRKIMQTIGFVGPGVALLGLNAAKSPVIASAWLTIAVGLKSFGHSGFLVNLQECQIQLEHLLPF

SEQ ID NO: 50898 - protein, 375 aa, Oryza sativa
MRPTSRILAAGHLLRGSRSRYDPSPVAAAAPIFRRPPTVPRPLPSPLLGGFGPNCWVYPGDGKYAPFGRLSCFMSDSTYPPPPRDVRGHAFSTSANAVAVGKSSDDKVKKDISKKDVDDQIADTQILKNLGKYLLLNDSPDFRFRLILSLGLLVGAKVINVQVPFLFKLAVDWLAALAGAETSLASFTEANATLLALFASPAAVLIGYGIARSGVSACTELRNAVFSKVTLRAIRSVSSTVFSHLHELDLRYHLSRQTGALNRIIDRGSRAINYILTVMVFNVVPTILEIGMVSSILAYKFGSTFAWITSVSVATYIAFTLAVTQWRTKFRTAMNKADNASSTVAVDSLLNYETVKYFNNEQFEVEKYDKYFKEV

SEQ ID NO: 50899 - protein, 553 aa, Oryza sativa
MGRGHLPKEDKVVLSERQLGLLGLKMTGSEAGGTSEKTKRPPKAKPSTPSEPIVPIRRSSFSYTPSRSLGQSRIGSSNLSPGGERLTTSVQISPSTPLQKPISSPSTPWSRKSSGSAKGIQTEAMLEQFLAGLDENIDTITDSASKIATPPATITSFGAASPVSVITSTTPSGAARSTPLRAVRMSPGSHQKYSTPPKKGEGELPPPMSLEQAVNAFENLGVYPEIEQWRDNLRQWFSSVLMNPLVQKIKTSHIQVKQTTATVGASVTVSQVGSDLPSTTAPVGLSPLGGTKDWQPTITVDEDGILNQLRTALLHSRDTPVAQTFGSPQQPQQNPLLPSIQACIDAITEHQRLNTLMKGELIKGLLPQSSVHADYTVKRVQELAEGTCLKNYDYMGHGDGCGKLEKKWISELPTDSLLLLYLFAAFLEHPKWMLHVDPTSYSGAQSSKNPLFLGVLPPKERFPEKYVALISGVPAVIHPGALILAVGKQSPPIFALYWDKKLQFSLQGRTALWDAILLLCHQINVGYGGVVRGIHIGSSALNILSVLDSDMES

SEQ ID NO: 50900 - protein, 432 aa, Oryza sativa; identical to SEQ ID NO: 36909

SEQ ID NO: 50901 - protein, 756 aa, Oryza sativa
MWKLKFGEGASNPLLRSSNGFLGRETWEFDPNGGSPEEHAVVERLRRDFTRNRFTQRECSDLLMRMQFAKENQVYSKHEVSNLKDSSEVTEEVLLTSLRRVLDQYSSLQAPDGYWPGGYSGILFILPLMIFALHVTKSLNDVLSSEHIREICRYIYNIQNEDGGWSTHTLGPSSMFGSCVNYATLRLLGEVLDEHNDGLSKGRAWILSHGSATVAPQWAKIYLSVIGVYDWSGNNPIIPELWLLPHFLPIHPGRFWCFCRMVYMPMSYIYAKRFIGPITPTILALREELYDVPYNKINWNNARISCCKDDIIYPPSWFQNIAMASLHKFMEPLFNMWPMNKLRKRALTNLMDHIHYEDENSNYVGLCPINKVLNMICCWIENPNSNAFRRHVPRIHDFLWLAEDGMKSKVYVGSRCWDTALIVQAYCSTGLTQEFSETIKKAHDFIKNAQVTKNCPNYKRYYRERSKGSWTLSNGENGWPIADTLAECLKAVLLLSKIPPTQVGDPIQEQRLYDAIDCLLSYVNKDGTLSSAESKRTTPWVEFINPSESFRNIIVDYPYVECTSSLIQALILFKGVHPGYRREEIDRIIKNGVLFIEKKQKNDGSWYGSWAVCFTYATFFAIKGLVAAGRTFQNSLSIRKACNFLLSKQLSTGGWGEDYLGCQVEEYIDSGRPHVVHTAWGMLGLIYAGQVELDPAPLYRAAKELINMQLETGEFPQQEILGSFNSSLFFNYTNYRNLFPIWALGEFHRRLLAKRA

SEQ ID NO: 50902 - protein, 37 aa, Oryza sativa
MLLSRYWCVTSNLCVVISAWTRFQVIQCLHDLQILCL

SEQ ID NO: 50903 - protein, 395 aa, Oryza sativa
MHRQDVRTKEAEEERMEENNLLHFLDSPNAHYRRKCEEYVSAHDDEAHCDASDVDLANARERLEHLLKQPANKFCADCGTPDPKWAALPFGALICIKCSGTHRSLGVHISKVISVNLDEWTDEEVNCLAGSGGNATVNTRYEAFLPENFKKPRHDCTTEERCNFIRKKYEFQQFVTDPQFSCPLRLNTKHAPDKNQQQQNCSARHGFGHAFRNSWKRKDTDNKGLKKMTDVGMVEFVGLIKVDIRRGTNLAVRDVMSSDPYVMLNLGHQTMKTKVIKNTLNPVWNERLMLSIPHPVPPLKLQVFDKDTFSSDDRMGDVEVDIQPLIAAAREHESSAAIAGSVEVTKLLASDDGTLARDSVISVVDGKVKQDIALRLQNVEHGELEIELECVPLSQ

SEQ ID NO: 50904 - protein, 432 aa, Oryza sativa
MKPPLERNPTKKRHSWWWDSHISPKNSKWLAENLEEMDKQVKEMLQLIEEDGDSFAKKAQMYYQRRPMLITHVENFYRMYRALAERYDNVTGELRKNIPTRLQYQGSLAGSDSELQRSPSPSPEPQKSWTREQSPRAAGFDVFLSNKSNGSPSPASRKEPEDLASQSESDAKSEDGEDDGIAYTLHQRVLELEDELNTVNQKLHDANEKLEVLEEKRLRCHRDSKENGNGADQSAINEKLQSSQEEINNIKNSLEVLSEEHSRLLGQNKKLEAEIVNLKEEIASDRQQYEEKLSRSDAEIDKCRQELADASEKLLQEKLSNSSVAAELQETIESIRIKLEEVSEEKLLVENKFKQLEEANSEAEKYNQELSHATEKLSEEKFRHEAEILALNQAIENLKSKLESIAKEKSLLKSWFADLEQVVERGRRIFPE

SEQ ID NO: 50905 - protein, 360 aa, Oryza sativa
MVGGFDKLKVEFIDQDESVQVVADTIRSSGEIPERYARPEMEADPVIIDTDGYNLPVIDMSRLINPEFSEEEIAKLGSACEDWGFFQLVNHGVDGELLQRIKDDITEFFRLPLQEKMSVAIPPNGLQGFGHHFVFSKEQKLDWVDLLFLTTRPVEDRTTEFWPTKPPTFRDSLDKYSLEIANVSAKLFKFMAINLGVDEEALLAAFKPEQPQSVRINHYPPCSQANKVLGLSPHTDGVGMTLLLQVNDVQGLQIRKDGRWFAVKNLPGALVVNVGDVLEILTNGKYKSIEHRAVINPDKERITLAAFQSVPLSSTVGPLQELLMKGEARYKTVDGAEFTKGYFAAKLEGRRYLESLKLGV

SEQ ID NO: 50906 - protein, 328 aa, Oryza sativa; identical to SEQ ID NO: 30285

SEQ ID NO: 50907 - protein, 425 aa, Oryza sativa
MAFRNHDAAMVLFFFLLMVTTYANAHGHSKKPEEITQGVYGAAAAVAAGPGGTFDITKLGAVGNGRADSTGAVMAAWRSACAGAGKQTILIPKGDFMTGAMELRGPCNGAVTIQLDGNLLGSNDLSKYPGKKMPNWVEVRHVDNFVISGKGKLDGQGPGVWSKNSCAKNYNCKLLPNTLVLNTVNDGVVSGITLLNAKFFHMNIYRCKDIKISGVTINAPGDSPNTDGIHMGDSSKITIAATTIGTGDDCISIGPGTDGVNITGVTCGPGHGISIGSLGRYKDERDVRDVSVTRCVLRKTTNGLRIKSYEDSVSPVTVSKVSYDGVVMDHVDNPIIIDQKYCPNSICTSKGDSKVSVRDVTFRNITGSSNTPAVVQLLCSGKLPCSGVAMQDVRVLYGGSDKKTTAVCDHALGKSTGCLKELACL

SEQ ID NO: 50908 - protein, 403 aa, Oryza sativa
MAAAAGEEVEAARWAEAEDERKEGLRRRRRYGLVEYRALPGYMRDNEYILRHYRCEWPLPQVLLSAFSIHNETLNVWTHLIGFFIFLVLTIYTATQVPNVVDLQSLQHLPDVLRNADLHKIQTELVACLPSLPHLSDLQKLKDELKSSWNSIEVLPSLSRWHLLELLSSCLPHRFTHSNETSLSVLQSMKEDIANMIAPQLIRPIPRWPFYAFLGGAMFCLLASSTCHLLSCHSRRLAYIMLRLDYAGIAALIATSFYPPVYYSFMCYPFFCNLYLSCITILGVATIAFSLLPVFQNPEFRTIRACLFFGMGASGVIPVIHKLILFWHQPEALHTTAYEVLMGLFYGIGALVYATRVPERWMPGKFDIAGHSHQLFHVLVVAGAYTHYHSGLVYLKWRDVQGC

SEQ ID NO: 50909 - protein, 357 aa, Oryza sativa
MRWTAFMWEGASRAFNHRPTFTNLVLVLGAASSGGLVAYADSNSDDVVGKPQGPPKKKIVVLGTGWGGTTFLRNLDSRLYDVQVISPRNYFAFTPLLPSVTCGTVEPRSVVEPIRRILEKKGGDIKFWEAECFKIDSSNKKIHCRSNIGTNLDGNGEFLVDYDYLVIAVGARSNTFNTPGVEENCFFLKEVEDAQKIRRNVMDCFERASLPYLDEEERKKNLHFVVVGGGPTGVEFAAELHDFVTEDLSKLYPSIQHLVKISLIEAADHILTMFDKRITEFAEDKFGRDGIDVKTGYKVVKVAKDAITMQNPATGDIAVPYGMAVWSTGIGTRPFISEFMKQIGQVPSKKLSSTLCS

SEQ ID NO: 50910 - protein, 283 aa, Oryza sativa
MFQDLPFSYSSCSSFPSLSSSNSSNPNSNTFQSISQSTLFFSQHESKSLINQSLSFQNNSAPIRERPFKLQTNRTFLISSPDREESQGISLPGSPLLTTSRDSCSYKSIVNYMQKHFNTPSLYKLEHKTCGLKRLHRDTQALKEDRSKVEFEREIQGASIRIKKLKLTSPVVASHKNSSCDEDVMDTPIKLTRDKGLGQTRRQGENGGLRMLVLREDREDVDWKKVEYEGSNSNSMIMPFNLDVYKGQCYERYLEENRQRVFPNTNIFDHIEMNNENTIEMEI

SEQ ID NO: 50911 - protein, 248 aa, Oryza sativa
MLMQNQKWGHHWLLLLSEDMIALSRSFWSTMLIPTRLQTKALGAPLDLALTSSSVSCVKLLVQAGAEVKVEGPNNHLVRAAEKGLTEAIKCMLEAGANPNVPDRLGRMPIELAAEYGTREDVEILFPFSSAIPTVANWSVDGIINHVQSEIKQLEDDNFIQKRRSDMKQQGDAAFKKQDYLNASVFYTQALKVDPFDGTLFSNRSLCWLRMGDGERALDDAHACEKLRPKVGKVLLSARSSSNVSEGV

SEQ ID NO: 50912 - protein, 268 aa, Oryza sativa
MVMPRLQEMKEIFDVARGKVNPVILDLEESLLAKGNMTLEEEVTIRVSKMTASVFKVFATAAFGASSYYALGLGPKIGEPPIPRFPRIGVSTGIAWFGGKFVYYTALRAGAEFILKRGEERMKMELANIILNKHSDEKTLVEAVKENFFAEHLFSDQYQDRQLFRWHLRNTYVDSAFMERVKEIEVKNSDDGSGSISGHRTTNTRSFGDLMEDPLACILGSSDSNIQSNKSAEHTGTTVKRREVRAHRRSHRHHHHHHHRHADKFSAL

SEQ ID NO: 50913 - protein, 344 aa, Oryza sativa
MKPRPSPAAASSGGVPARLRPHLTRLTVFLIVFSAGYSVGIMSSSIRPPASKPSQTVIRPRAAHLSGTASSTDVPASNGSAAAAANYPRSPPHDLFRFREECGEAIPSDAVVRTLLDKLFDGESPYESFPPPHTAALLHPAAARPRGWGSTGAVFAELIEEVRPDVIVELGAFLGASALHMAAVSKNLSLSPAILCVDDFRGWPAFRDRFRRDVPPPRHGDALLLPQFMSNVAAAGADATARVLPLPFSTASALAALCHWGVYADLIEVDAGHDFHSAWADINLAWAVLRPGGVMFGHDYFTAADDRGVRRAVTLFARVKGLTVRPHGQHWVLSPKPPLRRDGR

SEQ ID NO: 50914 - protein, 409 aa, Oryza sativa
MLDAGDAVSFGGAQNIVGNPLGPMWRLLRRVCVQEMMSPAGLASVHGLRRREFRSTLRYLHSKPGEPVDVGAQMFLNTMNVITGTMWGGTIGSESERSAVGSEFRGLVAEVTELLGTPNVSDLFPVLKPFDLQGIRRKMERLRSRFDLLFTKIIQQRMRSQQDGGEMTTDFLECLLKMEKEGSDGKTTFTMDNVKGFLLEMVVGGTDTTSNSVEWIMAELLQNPQVLNKVQQELDSIVGRDAVVEESHLPQLHYLRMVIKETLRLHPPVPLLVPHSPSAAATVGGYHVPEGCRVLINVWAIQRNPLVWNKPLDFNPDRFARDGGHKGDFTGSQLDYLPFGSGRRMCAGMAMGEKVMVYSVAMLLQAFDWKLPQGVQLDLSEKFGIVMKKATPLVAIPTPRLSKPELYYS

SEQ ID NO: 50915 - protein, 431 aa, Oryza sativa; identical to SEQ ID NO: 32216

SEQ ID NO: 50916 - protein, 72 aa, Oryza sativa
MLRLLASLPCAPNSFMLNTTLRALASSPDPASALSFFSLSAATAAAAAAAARTRLTPSRARAYGKGEEERRS

SEQ ID NO: 50917 - protein, 159 aa, Oryza sativa
MGTREVYEEKLRSGAHLHRDPTMNPGLGSARCPRCLSLLTPNSSGEGDWAITSVLHDATAVAGSGAGAMLSAVHGFNTGIPFVQKHVKGPKWLQLLVGVPPLLLFSGTSALFGAYALPTFAQLTVTSYYAASSASHYAVSQITRQIERSHLSDTNGNSR

SEQ ID NO: 50918 - protein, 222 aa, Oryza sativa
MATDSSSSAAADKNTVFRKLRAKSDNKMCFDCNAKNPTWASVTYGVFLCIDCSAVHRSLGVHVSFVRSTNLDSWTPEQLKMMVYGGNNRAQAFFKQHGWTDGGKIEAKYTSELLTYTGSCSLRMLLKIPLKMGTTVGRPPQLQLHNLQIKLMQFQILSWQRHLKKLQMRRLSLRLFVHQGLQLILSRSQLLRRSLEIRPVDLVHGNLRQSQMKVSMSRSLKS

SEQ ID NO: 50919 - protein, 347 aa, Oryza sativa
MLARIYLTNLQNRIMQVWWKQDSCIPTFKHHPGVQGIVVDVPVRCVPVEAVKSEANIPLHRDGQNAAVDVTDKSAPLPKSEDVSLSQPTDGNKEHASAEVRTVQESYASLEAMVPEMLMKAEVANGTNVAAASNSLKDEGQRADQPSLKKMVPGANVNHSSGEATNSAFPDIAYSTPKKKKKKIAEHFGNPAALLLDFAKGVVLPSKEELLSAFGKFGLVIESETDIVKDTHSARVVFGKSAEAEAAYNSAETLGMFGPPFATPRLHYLPPIKLSVPSPASKPPLTDIRKNLERMISSLAGHSSVKKATPSDGSKQMPENLLGEMQGLLAKVDKMLTGPSATASNPH

SEQ ID NO: 50920 - protein, 570 aa, Oryza sativa
MAAVNSLYVAAASTAASAAALQWWAGSLLDGDADAAGGGGGGGGGDWLGTVLGSHVTVALLANLAAHVFLVLILSLKTLFFVQLTSSETRKVLEHIINYVLYKGTFLPLVVPPNSQQIILWSSWLGLLCSLKMFQSLARERLEQLNASPSATPSKYFRVYSALLLVLSADVLWIKLCVGFCKSCNSQLFWLMFFEPLSIGFETLQSIMVHGFQLFDIWQRHQMDSGVDYLDFQKTYKQAAGSFSEWRGRLVRNFGFVIDLISLLMSLGHYSMIFWLRGMAFHLVDAVLLLNLRALIASFWKRIKTYAKLRKALSSLDGALPDATYDEICAYDDECAICRGPMARAKKLSCNHLFHLACLRSWLDQGLMDGYSCPTCRRPLFLSSQGHTRSTAEVGNVQLIAEQLNAGLNQQRVPGHEHPIEHQNPADAVWRGAGLDSSWAPPWSSPGMDNPSSSSAVTSVGLSGVQMMMRQLTSVTDNYGHPDATWSLWPEPVAGSSVVPSSSSRPDGASAAGLRFRGTARPANGSMSEVLSMVDRVREVLPHIPDELIIEDLMRTNNINATVNNLLLMQ

SEQ ID NO: 50921 - protein, 244 aa, Oryza sativa
MLRPQLNPSSSHHHTTTTSSSSSTQLYFASSSCIASLRRPSPPSLIAGAGCRTTRRRQQGRQRVVVRCASSSAASSASEAARRGTGSSDMAPAAVVKVKAVATIKVTVEGLLNSLRPSKAIDNIRDLIGRSLFLELVSSELEAKTGKKKATVHSYAHKVDDDDHGVVTYEADFDVPTGFGPIGAVVVTNELGQEMFLEDLNLTAGDGAGNSTVLPIRCNSWVQPKSSIDEGTPGKRIFFAKVYS

SEQ ID NO: 50922 - protein, 509 aa, Oryza sativa
MEGNARGGGHSEALKNYNLGRTLGIGSFGKVKIAEHKLTGHRVAIKILNRRQMRNMEMEEKAKREIKILRLFIHPHIIRLYEVIYTPTDIYVVMEYCKFGELFDYIVEKGRLQEDEARRIFQQIISGVEYCHRNMVVHRDLKPENLLLDSKYNVKLADFGLSNVMHDGHFLKTSCGSPNYAAPEVISGKLYAGPEVDVWSCGVILYALLCGTLPFDDENIPNLFKKIKGGIYTLPSHLSALARDLIPRMLVVDPMKRITIREIREHQWFQIRLPRYLAVPPPDTAQQAKMIDEDTLQDVVNLGYEKDHVCESLRNRLQNEATVAYYLLLDNRFRATSGYLGADYQESLERNLNRFASSESASSNTRHYLPGSSDPHASGLRPHYPVERKWALGLQSRAQPREIMIEVLKALEDLNVCWKKNGQYNMKCRWSVGYPQATDMLDVNHSFVDDSIIMDNGDVNGRLPAVIKFEIQLYKSRDEKYLLDMQRVTGPQLLFLDFCAAFLTKLRVL

SEQ ID NO: 50923 - protein, 145 aa, Oryza sativa; identical to SEQ ID NO: 29849

SEQ ID NO: 50924 - protein, 180 aa, Oryza sativa
MDDDAASEISDWEVLSAASAHGGGGEDDGEDFVVLVPGEGGGGGDVLHDHFALVAPSDVDGFPGEEGSWSGLLSDPGDKGKGEGFDSVPEGRLDPLVEEAAQREIEQGKEADGTGEDLDPDVIVVAELSRLESPENSDVQLEVEDGGSSLPEASEIGDALGFVQEALVQWKSGDVTIRLR

SEQ ID NO: 50925 - protein, 527 aa, Oryza sativa
MDRQEEEDDDAALREAGGGASFPGGWLRRLSRELHWSFVLAVVAVYGACQGVGDAVGGVAAGYYWKDVQRVQPSAAQFYQGFVSAPWIVKPIWGLLTDVVPVAGYRRRPYFLLAGVIGASSMLTLSLHRKLGIMPAILALTAQSAGAAVADVTVDALVAQNSITHQPLAADMQSLCGFSSSVGALLGFSISGLLVHSMGSQGALGLLSIPSALVFLAGVLLKERRVTGFDYKQVHRKFYKAIQSMGATLKRAEVWRPCVYMYVSLSLSLDIQAGMFYWYTDPIVGPGFSEEFIGLVYSVGSIGSLLGVLLYQISLKDCPFRGVLFWGQVLSSLAGMLDLIMVTRLNTRIGIPDYVFAVIDNSVSQMVGRLKWLPLLVLCSKLCPPGIEGTFYALLMSIQNAGLLMSGWWGGLMLQLLNVTRTEFSNLWVAVLIRNLSRLLPLMLLFLVPQSDQNSMLLPAEMLQDNESTEARKGGQDTAEFSVLVADDSSCHALNVAVEDERIKVVDAGTGTVELIPLMNELQDRGS

SEQ ID NO: 50926 - protein, 211 aa, Oryza sativa
MSEPATTTPTPTPAGDHDAAATACKPAETTTALITCRSSSCSAQQQQQQQQQQEEPLGDDQLGELREIFRSFDRNGDGSLTQLELGSLLRSLGLKPSTDELDSLIQRADTNSNGLIEFSEFVALVAPELLYDRAPYSEDQIRRLFNIFDRDGNGFITAAELAHSMAKLGHALTVKELTGMIKEADTDGDGRISFQEFSRAITAAAFDNIFS

SEQ ID NO: 50927 - protein, 217 aa, Oryza sativa
MALQAEALVKLSRHDEADAVLGGAPRFGVDESTKFFGTVAHAYVLMIRAQVDMAAGRFEDAVATAQTACQLDPSNREIANVHRRAKVVASARLRGNDLFKASRFAEACAAYCEGLDRETGNAVLLCNRAACHARLARYEKAVEDCNGALAMRPAYSKARLRRADCNVKLERWEASLRDYQVLIQELPENEDMKKALSEVEAKLRSQRNGGIASRSQQ

SEQ ID NO: 50928 - protein, 163 aa, Oryza sativa
MDGLVGLLKIRVVRGINLAYRDTRGSDPYVVLRLGKQKVKTSVKKKSVNPIWHEELTLSIMNPIAPIKLGVFDKDTFSRDDPMGDAEIDLEPFMEVLNMDPENIRNGSIIKTIRPSNQNCLADESHLFWRNGKFVQDIILRLRNVESGELQVQLQWVKIPGRH

SEQ ID NO: 50929 - protein, 374 aa, Oryza sativa
MDDNGDVHFCHRATAVVALLLLHLVVVANAAAHSCDWCTPRHSTVSILPTPTHAAHLTGGACGFGAAPMELNVAAVTADLFRHGHACGACYQLRCRDRRLCGEDGVEVVVADMAKQPEQEGEMNRTAGGSLQFRITEDAFAAMAKQGVSAHELTRQRTLEVDFRRIPCEYRESRRLAVRVEEASRNPTHLAIRFLYQGGQTDIAAVEIAQANATPPSSSYYSSWRYMTRRDGAPGVWTTSRAPVGPLRLRVVVTAGSGGKWLRSDGEVLPADWRPGEVYDTGLRVTDVAVRSCSLSCAIQDMDSDDDRRKSSDDNSIDVMKKKASLCRGVEDGISRRRRRREAWYATAPATRMGGGREGGSQYALEVTKPGAFM

SEQ ID NO: 50930 - protein, 427 aa, Oryza sativa
MAGSLAASAFFPVPGSSPAASARSSKNTTGELPENLSVRGIVAKPNPSPGAMQVKAQAQALPKVNGTKVNLKTTSPDKEDIIPYTAPKTFYNQLPDWSMLLAAVTTIFLAAEKQWTLLDWKPKKPDMLADTFGFGRIIQDGLVFRQNFLIRSYEIGADRTASIETLMNHLQETALNHVKTAGLLGDGFGATPEMSKRNLIWVVSKIQLLVERYPSWGDMVQVDTWVAAAGKNGMRRDWHVRDYNSGQTILRATSVWVMMNKNTRRLSKMPDEVRAEIGPYFNGRSAISEEQGEKLPKPGTTFDGAATKQFTRKGLTPKWSDLDVNQHVNNVKYIGWILESAPISILEKHELASMTLDYRKECGRDSVLQSLTAVSGECDDGNTESSIQCDHLLQLESGADIVKAHTEWRPKRAQGEGNMGFFPAESA

SEQ ID NO: 50931 - protein, 514 aa, Oryza sativa
MMSSSSSWSTPSFGLARESSSLLFTPGLVQHMGPNPSSSWSTPAHPVSDSPTFSFPTPFFCEPAKGSRVYAYTKTADDLPHKHTLSISAMPAYISKSHEELRHEDYQRGDKGGDGLQKIMVNSAPVPPMPMLSSVGAPVNMINSSQPAFSLKSKTNFSTPFSPAATADQQSAQLQFSTQNHYYTSNPFWPAPIGLVRPCSSTGLQSSTPGLNCTGITSFPFLPTKQPSVGTQSSTLFPTTFVHPSVELQKNASTHCASSQTAPCTTHGGILFGTAANTVSLTTSSTEPTTSSLGPTSCPATRHGDAPSTGFACQENVFSNSAAYTSTINADVPTNTIDLLLPNNIRLVRLRFSSTNDGNGSVASEVHCHHDAKTSETRISLCIYPGENQELIIKSMVQPAKSHTGKQSSPTGGHPDDQSGRSKVCNSAAGLPSSGPGENQKGNSSAGHKTPKSPLAAPSLRSDSGVCTASPVQRRLLHRAIYCGARRGREGRARLLLTCEGLHGRQAWLWQRKV

SEQ ID NO: 50932 - protein, 221 aa, Oryza sativa
MALPNQQTVDYPSFKLVIVGDGGTGKTTFVKRHLTGEFEKKYEPTIGVEVHPLDFFTNCGKIRFYCWDTAGQEKFGGLRDGYYIHGQCAIIMFDVTSRLTYKNVPTWHRDLCRVCENIPIVLCGNKVDVKNRQVKAKQVTFHRKKNLQYYEVSAKSNYNFEKPFLYLARKLAGDGNLHFVETPALAPPDVTIDLAAQQQHEAELAAAAAQPLPDDDDDLIE

SEQ ID NO: 50933 - protein, 711 aa, Oryza sativa
MDESNIPSFTLGDFDPNYVSRSFPTGEYDATGSAPTPPVMEPPAGSEASGTMSGSASTNTGSKRSRTSGVWQHFDEVAMTGPDGRQVTFARCRICKNKLSAKSSGGTGHLKRHAEACAKKQGIQLRQQQLLLNPDGTVRTWEYDPMVARENLARLIARQDLPLNFGESPAFENYIKNSHNPRFQAVSRQTTTRDLKNVYDKGYESLKELFSTCTFSVSVTSDIWSSRAKEDYLSVVVHFIDDDWQMQKRVLGLRLIDVSHTGENIAERIREVIDEFNLADKIFAVTMDNASANSRAMEILQPLFCIYAQSFLLHQRCACHIINLIVKCGFKRVNVHIDAVRQAITWLTASNPRIAQWKRYCCASGEPPRKFLTDAVHRWNATYFMLKVVLPYKDLLTVFLQTRNGPKNSDGQPILTDHTWHIVERFNQFLETFHDCTLLLSQVYYPTANLILHNILEIATLLKEYENDDLLMPVVFNMKQKYLKYWKDIPMLYSFAFILDPRGKLRGFLNILSLIGDIINVDYSTYYADVKTKFYEVFRKYELKFQGDRLQRPPPVPAAGKKKLQWSRIWGSSSSSHGGGTSSSAASGDARSHGPAEELSNYLDSDAIRHETSDFNVLGWWNDHKMSYPVLSKLARDVLTVPVSSVSSESAFSLCGRIIEDRRTSLSSDHVEILLSVKDWELAAEHAQYTADNQELAAQFENLYLDDEQLG

SEQ ID NO: 50934 - protein, 257 aa, Oryza sativa
MRLGFIQTHCRANPKFDFHRYMVRALEADFKKVVGISWYLWIFVMIFLLLNVNGWHTYFWISFVPLLLLLAVGTKLEHVITQLAHEVAEKHSAIEGDLVVNPSDEHFWFGRPKVILYLIHFILFQNAFEIAFFFWILTTYGFNSCIMDHVPFILTRLIIGAIVQILCSYSTLPIYAIVTQMGSFFKKEIFDEHVQQGLVGWAQKAKKRKGLKESNGAMAGAGSTNGSSQPSSILQMVRRAAASEEGSSNGGDMRTNQ

SEQ ID NO: 50935 - protein, 352 aa, Oryza sativa; identical to SEQ ID NO: 30289

SEQ ID NO: 50936 - protein, 122 aa, Oryza sativa
MERPRFSDHLEAIKFICKDFWSELFKKQIDNLKTNHRGTFVLQDNHFRWLTRVSVDPSVESMDATENDSTTLGDSAAQTTSMLLYFPCGIIRGALTNLGISCSVTADMSNLPACSFVVRIKT

SEQ ID NO: 50937 - protein, 231 aa, Oryza sativa; identical to SEQ ID NO: 36924

SEQ ID NO: 50938 - protein, 400 aa, Oryza sativa
MEVGERAAMALGAGFDLTSDFRLKFAKEGRLVELDEAGARDVPVPGGGVGGGAAAVLRGVPRDVGVDKGDRIRFRSDVLEFNQMSELLNQKSSVQGKVPSGYFNTLFDLSGAWMTDAKETKHLAFDGYFISLYKLHLKTSPLVLRDEVRSAVPPKWDPAALSRFIKTYGTHIIVEMAVGGQDVICVKQSPSSTISSADLKLHLEDLGDFLFSDGRNHSPIHRKTRDGKSKVPDVFVRMEQQPNNLHLSSYSESSTKDGLTITCSKRGGDASIASHSKWLQTVPRVPDAIMFKFVPITSLLTGIPGSGYLSHAINLYLRYKPDPEDLQHFLEFQVPLQWAPLFNELILGPQKRKGSYPSLQFRFLGPKLQVSTSQVLDCYIAQSFFLKKNFFFQFTIHRNF

SEQ ID NO: 50939 - protein, 466 aa, Oryza sativa
MKFTLTLEQRLQYFSFLGMYTRWLFFPAVFGLATQLIDFGSLQWLVLPAFFFFVISWAVFFLQFWKRKNSAVLARWGINYSFSEYKTMGNELDPLSFSMADDNVQQRKFGAPKEKSIVQRNEWFGVLLRIRNNAIIVLAIICLQLPFELAYAHLYAITKTEALRYVLTAVYLAAIQYYTRIGGKVSVTLIKYENNQGEQSSADSLVYKVFGLYFMQSYIGLFYHASLHRNIMALRQVLIKRLIVSQVLENLIENSIPYLNYSYKKYRAVHKKKHEKESPAGKSVRLSTRVEKEYLKPSYTASIGEELEDGLFDDFLELTLQFGMIMMFACAFPSIFCFAALNNVTEIRADALKLLVMLKRPAPRDAATIGAWLNIFQFLVVMAICTNCLLLVCLYDEEGKWKIEPGLAAILIMEHALFLIKFGFSHFVPEEPAWVKANRGRYVAQAQNVCSKQLLRSIAKLDAKLE

SEQ ID NO: 50940 - protein, 221 aa, Oryza sativa
MVSEQTAPVATAEAELESSAAPPVKPDEAAAKAQPEDDAPVVEDAKDDDDDEEDDDDDEDEDEDGEQGAIGNEGSKQSRSEKKSRKAMMKLGMKPVTGVSRITIKRAKNILFVVSKPDVFKSPTSETYVIFGEAKIEDLSSQLQAQAAQQFRMQDLSKVMSKPDAAAAAPADEEEEVDETGIEPRDIDLVMTQASVSRAKAVKALKAHDGDIVSAIMELTA

SEQ ID NO: 50941 - protein, 177 aa, Oryza sativa
MFFHIVLERNMQLHPRHFGPHLRDKLVSKLIKDVEGTCSGRHGFVVAITGVEDVGKGLIREGTGYVTFPVKYQCVVFRPFKGEILEAVVTMVNKMGFFAEAGPVQIFVSNHLIPDDMEFQSGDVPNYTTSDGSVKIQKDSEVRLKIIGTRVDATEIFCIGTIKDDFLGVISDPGAAV

SEQ ID NO: 50942 - protein, 364 aa, Oryza sativa
MAQNVQENEQVMSTEDLLQAQIELYHHCLAFIKSMALRAATDLRIPDAIHCNGGAATLTDLAAHVGLHPTKLSHLRRLMRVLTLSGIFTVHDGDGEATYTLTRVSRLLLSDGVERTHGLSQMVRVFVNPVAVASQFSLHEWFTVEKAAAVSLFEVAHGCTRWEMIANDSKDGSMFNAGMVEDSSVAMDIILRKSSNVFRGINSLVDVGGGYGAVAAAVVRAFPDIKCTVLDLPHIVAKAPSNNNIQFVGGDLFEFIPAADVVLLKCILHCWQHDDCVKIMRRCKEAISARDAGGKVILIEVVVGIGSNETVPKEMQLLFDVFMMYTDGIEREEHEWKKIFLEAGFSDYKIIPVLGVRSIIEVYP

SEQ ID NO: 50943 - protein, 713 aa, Oryza sativa
MGFMSAKLFPSCESMCVCCPALRPSSRRPVKRYKKLLAEIFPKTPDGLPNERKIMKLCEYAAKNPLRIPKIAKFLEQRSHKELRSAHVNFIKIITEAYSKLLFICKEQMAYFAISLVNVLTELLESKQENIHILGCQTLAKFIYSQVDNTYARNIESLVRKVCVLSRQQGVEHSLLRAASLQCLSAMIWFMKEHSYIFVDFDEIVQSVLENYRVEESAAGDEERHAPQHNWVDEIVRREGRAGLGGGNDVNCNSTAIRLRSARDSSALTREERESPEVWAHICVQKLAELAKESTTMRRILDPMLSYFDKKKQWAPRQGLALLVLSDMSYLEKSSGNEQLILTSVIRHLDHKNVLYDPQIKSDMIQTATLLARQLRSRGIAAELVVAGDLCRHLRKTLEAMESASIEELNLNESLQNFLQDCLLEVVTGINDVRPLYDMMAITLENLPSMPVVARASIGSLLILSHIISLTSMSLNAPMLFPEALLQQILKSMVHPDVDTRVGAHHMFSAVIVQGPSRQRSESDFLYETKKWQSRTTSVFASATALLEKLRREKESLGSDKTGNMDDEKEKSISEEENKHVWARKNSAYFSKLVFSFTDRYAALTSSAEEANIVMLTEDQKNQLLSAFWVQAIQTDNTPFNYEAIGHSYSLTVISSRLKDSRNRNNIQFFQLPLSLRSVSLTSNGSPFPFLPAVYFYLGNKHASFCWESLSHY

SEQ ID NO: 50944 - protein, 121 aa, Oryza sativa
MEAADVAKEHHKEEKKDKEHAKEAKPEKEKKEKKEKNGEEAAKPAKEKKEKKEKKEKGKEKKEKVEETTDVAKLRAKLEKLDAKIDDLKAKKQEIVARLVQLEEGATANAAAADAAPPASG

SEQ ID NO: 50945 - protein, 458 aa, Oryza sativa
MALASSSRLLHRFSSSSLPRPCRRRVPRPRGHSRFAVRWEHRAAAVVLLLPRALLGGGFQDADAAESDDEEEEDAHGVLRPLDADDVNLDLHAPPSGPERWDVLGLGQAMVDFSGMVDDEFLHRLGIQKGTRKVVNHEERGRVLRAMDGCSYKAAAGGSLSNSLVALSRLGSSRSTNYPELRIAMAGSVGSDPLGSFYRAKLRRANLHFLSKPVKDGTTGTVIVLTTPDAQRTMLAYQGTSSTLSYDSDLASLVSKSNVVIVEGYLFELPHTIEAIKQACEDAHKNGSLIAVTASDVSCIKRCYNDFWDIVTNYADILFANANEARAFCELSSTDSPMSAARYLSHSVPLVSVTDGVHGSYIGVKGEAIYIPPPPCVPIDTCGAGDAYASGILYGILRGSSDLKSIGLLASRVAAIVVAQQGTRLRVQDADRLAESFTLHLDNLEFCSDIETDHVSNF

SEQ ID NO: 50946 - protein, 207 aa, Oryza sativa
MVLMAAVDDHDRHRAGNSSSPSEDSPAPAPAPAPAPAPPQPSRTRLHSFSFPTLSWGTHRLLRCSKNPASSPPPAAPDTPSPDKEKAAHRSTDGVGGGCSPQRGPQRPWNLRTRRSATAAPRPEGSDDAADAAPDRAPSPLAATKKRVFSIVLSKEEIGQDFKAIRGTRPPRRPKKRPRTVQRQLDLLYPGLCLADLTPETYKIEER

SEQ ID NO: 50947 - protein, 271 aa, Oryza sativa
MMPPAISLARSPTSSASASPLYPVRRSAAVAVRHHRCPSFATKPAAGVCCASPAVELLPSLSPDILVRDARLEDCWEVADTHCSSFFPDYTFPLDLVLRIDRYIALLSGFSVPPGCMRTCLVAVNSNSLSRSISIECGDLRDADFQEKHGLSKASIAGILTVDTVADYLPRRGPLKQRRTGIAYIANVAVRKEERRKGIAKMLVAEAEERAKSWGCRSMALHCDVNNIAALRLYKNLGYKCIHVPEDAKWPEPKIAKGVRYNFMMKLVPKM

SEQ ID NO: 50948 - protein, 125 aa, Oryza sativa
MSEVFEGYERQYCEVSASLFRKCTTASALDGEKKKQKLSEIQSGVEEAESLIRKMDLEARSLQPSVKAGLLAKLREYKSDLNNLKSELKRISAPNARQATREELLESGLADTLAVSSMICITSSI

SEQ ID NO: 50949 - protein, 392 aa, Oryza sativa
MSMQEMLRIGDDDGRSDALERELKEKLRLRGDASPAKCTRQEQRWRSDHGIVDARERFVQAYGRLRDDLVGDDSCELTDEARRWLAQMIDYNVPGGKLNRGLSVIDSYLLLKQGSEVTEDDFFLACVLGWCVEWFQACALLLDDIMDDSHTRRDQICWYRRPEVGLRGINDGIILKCHILIMIKKYFREKPYFLDILEIWSEIALQTSLGQMLDLISTHTGADDLAKYSIEGYRRIVKYKTAYYSFYLPVANALLLSGAKLEDFSGLKDILIEMGIYFQIQDDYLDCFADPNTIGKIGTDIEDHKCSWLIVQALGHADNNQIEVLHRNYGKKDSSSVSEVKRTYAALDLKDIFSEFERRCYNHLVTSIEAQKDHAAREILISFLKKIHQRKK

SEQ ID NO: 50950 - protein, 412 aa, Oryza sativa
MGFVRALFLLAMVCVAAHAKDYPKEEGAKAEGPAAASGGGGGSTHDVVKLGGKGDGKTDSTKAVNEAWTAACAGTGKQTIVVPKGDFLTGPLNFTGPCKGDIVIQLDGNLLGSTDLALFKSNWIEIMRLESLEISGKGKLDGQGAAVWSKNSCAKKYDCKILPNTLVLDFVNNGLISGISLVNPKFFHMNVFKSKNITIKDVTITAPGDSPNTDGIHMGDSSKISIIDTVIGTGDDCISIGPGTEGVNISGVTCGPGHGISVGSLGRYKDEKDVTDVTVKNCVLKKSTNGVRIKSYEDAASVLTASKFTYENIKMEDVANPIIIDMKYCPNKICTANGNSKVTIKDITFKNITGTSSTPEAVSLLCSDKLPCTGVTLNDIKVEYSGTNNKTMAVCKNAKGTATGCLKELSCF

SEQ ID NO: 50951 - protein, 61 aa, Oryza sativa; identical to SEQ ID NO: 34254

SEQ ID NO: 50952 - protein, 232 aa, Oryza sativa
MRRRVSSSSSSSSSSSPARHHKARRSRRKLAVDEDWEAAFREFLSRDHDDDDDDHDGQHVVVAPLIRGSDKCVHGHEVVASTVGGGASGGRRRADDDDGERRRRRRREKRSYPYRGIRQRPWGRWASEIRDPVKGIRVWLGTFDTAEGAARAYDDEVRRIYGGNAKTNFPPSPPTPPPPEKPAAERSPSTTPTTTTEDSGDSRILIECCSDDLMGSLLAAFDMTTGDMRFWS

SEQ ID NO: 50953 - protein, 410 aa, Oryza sativa; identical to SEQ ID NO: 37328

SEQ ID NO: 50954 - protein, 151 aa, Oryza sativa
MALEQTFIMIKPDGVQRGLIGEVIGRFEKKGFYLKAMKLINVEKSFAEKHYADLSSKPFFGGLVEYIVSGPVVAMVWEGKQVVSTGRKLVGATNPLAAEPGTIRGDFAVDIGRNVIHGSDSVENARKEIALWFPEGIAEWRSNQHPWIYEV

SEQ ID NO: 50955 - protein, 289 aa, Oryza sativa
MRSAVRYVAATWPYWNRTDGADHFFLAPHDFGACFHYQEERAIERGILPVLRRATLVQTFGQRHHPCLQPGSITVPPYADPRKMEAHRINPATPRSIFVYFRGLFYDMGNDPEGGYYARGARASVWENFKDNPLFDISTEHPATYYEDMQRAIFCLCPLGWAPWSPRLVEAVVFGCIPVIIADDIVLPFADAIPWGEISVFVAEEDVPRLDTILASVPLDEVIRKQRLLASPAMKQAVLFHQPARPGDAFHQILNGLARKLPHPKGVFLEPGEKGIDWDQGLENDLKPW

SEQ ID NO: 50956 - protein, 182 aa, Oryza sativa
MADHQRMRIHPVDLEAGGRHRPTAPLVPGGSFRSDKGDPAALYLVFDPKAPRYSVTATNPNARIGIYYEAGSSLSVWYDAHRLARGALPAFYQGHRNTTVLAVVMAGQAQLGGAVMSALQDAQRTGAVPLVFRADVPVRVELGSLRLWKVTSRVRCDLVVDSLGVNNPVNIKASNCKFSLKL

SEQ ID NO: 50957 - protein, 95 aa, Oryza sativa
MSVKFNTNFLLRLMCLQYYLKAQFGYSKDEFANLLLIAGAAGMLSQLTVMPVLARFVGEDILLIIGLLGGCTHVFLYGIAWSYWVLPLDLAIILL

SEQ ID NO: 50958 - protein, 510 aa, Oryza sativa
MNSEENLKKPGESKGSVPTCPRGNASALSHRPYLMAVVAPPSLALPQPPQNPTPKPRRRPPRDVASWTSAIARPAKQGDLPAAAAALSAMLSSPAAPVPNDVTLLTVLSACADSPSSPLARRLALSVHARVLKLFPSHLLLSTCLVRFYFASRLPHLALQLFDAMPVRSAVTYNTVISGLMRNGLVAAAFEVFDGMPAPDKVSWTALIDGCVKNGRHDEAIDCFRAMLLDGVEPDYVTLIAVISACAEVGALGLGMWVHRLVVRQGLERNVRIANSLIDMYARCGQVELARQVFSGMRKRTVVSWNSMIVGFAANGRCADAVEHFEAMRREGFKPDAVTFTGVLTACSHGGLTDEGLRYYDLMRAEYGIAARMEHYGCVVDLLGRSGQLEEGDAGGDHHADAAKRGGARRPPRRLPDARGRRHGRAADAAPARAGPRRRRQLRAAVEHLRRRRQVGRRREGPEPDEGAGAEEEAGLQRRGDRRRRARVRLRRSVASTGGGDISDAWVAHA

SEQ ID NO: 50959 - protein, 409 aa, Oryza sativa
MEYGAATRGALLAAAPLSGARRSWLPLSSPPSPPSIQIQNRLYSISSLPLKARGVRRCEASLASDYTKASEVADLDWENLGFGIVQTDYMYITKCGQDGNFSEGEMIPFGPIALNPSSGVLNYGQGLFEGLKAYRTTDDSILLFRPEENALRMRTGAERMCMPAPSVEQFVDAVKQTVLANKRWVPPTGKGSLYIRPLLMGSGAVLGLAPAPEYTFIIFVSPVGNYFKEGLAPINLIVEDKFHRATPGGTGSVKTIGNYASVLMAQKIAKEKGYSDVLYLDAVHKKYLEEVSSCNIFVVKGNVISTPAVKGTILPGITRKSIIDVALSKGFQVEERLVSVDELLEAAEVFCTGTAVVVSPVGSITYQGKRVEYAGNKGVGVVSQQLYTSLTSLQMGQAEDWLGWTVQLS

SEQ ID NO: 50960 - protein, 98 aa, Oryza sativa
MATAAEPKEEEEEEEELPESTMADEGAGGGGGGGRRPRPTRQRRSLLSRRIRRRLRRRPKPRRRRRRRLQLRQLTLGNRKSRTPWRPNLPSTTTASTR

SEQ ID NO: 50961 - protein, 204 aa, Oryza sativa
MKLSIQSFARKLSLPSPKRTWSSGGGSSKRDGGMSKNGSGVKRAISRSEASSFASASSESESSSDDALMARSTPRSVLPAEISRRELEAVLRRLGHGEPDDEELDAVAAIAAEAEAGGGEDELMEAFKVFDADGDGRITAEELRGVMVAILGGDGDGCSLDDCRRMIGGVDADGDGFVGFQDFARMMMAATATATATADGPRSW

SEQ ID NO: 50962 - protein, 193 aa, Oryza sativa; identical to SEQ ID NO: 35494

SEQ ID NO: 50963 - protein, 233 aa, Oryza sativa; identical to SEQ ID NO: 30364

SEQ ID NO: 50964 - protein, 334 aa, Oryza sativa; identical to SEQ ID NO: 31929

SEQ ID NO: 50965 - protein, 414 aa, Oryza sativa
MAFEKIVVANPVVEMDGDEMTRVIWKWIKDKLIFPFLDLDIKYYDLGLPNRDATGDKVTIESAEATLKYNVAIKCATITPDEGRVKEFNLSAMWKSPNGTIRNILNGTVFREPIICKNIPRLVPGWIKPICIGRHAFGDQYRATDTVIKGPGKLKLVFDGREEQIELDVFNFTGAGGVALSMYNTDESIWAFAEASMNMAYQKRWPLYLSTKNTILKKYDGRFKDIFQENYETKWRAKFDDAGIWYEHRLIDDMVAYALKSEGGYVWACKNYDGDVQSDLIAQGFGSLGLMTSVLVCPDGRTIEAEAAHGTVTRHYRVHQKGGETSTNSIASIFAWTTGLGHRAKLDDNKRLLDFVQKLEAACVGTVESGKMTKDLALLVHGPNVSRDKYLNTVEFIDAVAEDLRTRLSVTSKL

SEQ ID NO: 50966 - protein, 269 aa, Oryza sativa
MAAAAAARRDTVHERHEHRAEVEAEGVGAVGERREEGLHAGAARLLVEELDEPHGGEHLRHAEHEELRHDPQHGHRPRRRAAGGQGQVAAPVLDGGGGDHGERHGAEAHADPLERGDPGPRPCGAPHERDEEELVRRDERQQHGVGDGLQRRRRDAERGAGAAERGVHGAPLLHRERLQLRQHGVEDDGAREDGRHGEERLGLPHLGRRAQPPRALRLRVRPLLRRPDARLVQEPAHVSVTDQSHADAATCMARGTAAAGAGCWDEELT

SEQ ID NO: 50967 - protein, 58 aa, Oryza sativa
MGNCGSGEPVTVGNYGSGSSAGRGGCYCCSYTSSPGTLGRSLSRSERGARFISRGDSK

SEQ ID NO: 50968 - protein, 541 aa, Oryza sativa
MEVRLLLLVFICLHALLWAASAQQPEEATVIVKGSTKIAETNKNYICATIDWWPPEKCNYNQCPWGQSSILNLDLDHPFLAQAIQAFDNLRIRLGGSLQDRVVYDVGTNSPCAPFTNMSNGLFGFSDGCLSMDRWDKLNALFQKTGAIITFGLNALYGRYNVRRSFWASKWNSTNAYNFVKYTISKGYPVDSWEYGNELSGHGIGARVDATLYGKDAIELKSIFQQLYKAPLSQPSLLAPGGFFDQQWYTQLLQTSGHGVVSALTHHIYNLGGGNDAHLIRKILDPKYLDRSEDTYRDMQLALQRHGTWASAWVSESGGVFNNGGELVSNTFINSIWYLDQLGMASKYNTKIFCRQTLIGGHYGLLDTQTFLPNPDYYSALLWHRLMGREVLSVDINAPRKLRAYAHCRKQQQGITLLLINLSNTTGYNVTLQNDINVNLDKTASLHKHNSFSHSLRRAVSWLGRKPSSDVARREEYHLTAKDGDLQSKTMLLNGAPLELSDDGGVPAMSPALVAVNSPVYLAPTSIAFVVLPMFEAKACS

SEQ ID NO: 50969 - protein, 292 aa, Oryza sativa
MAAPPSPLGLARRVSGAGAATPAAAWSSSCRSRRLRPRLLPSKRWSGVVRMGAAVGGEQEGEDEEVKLAKEMAAARRRWETLIREQKIKTLTPREAGYTFKLTDKVLLDVRPSNERQKAWVKGSTWIPVFDVDTSFDLGGAGKKFTNYVMGGWWSGSSTMTVNKNFVQQVEEKFSKDTDIIVVCQKGLRSLAACEQLYGAGFQNLFWVQGGLEAAEEEDFEREGPQPFKLAGIGGVSEFFGWTDQQRAQAVKEGLGYRLIFTGRLVGALVLVDALFLGAQRIGPLLQELQSR

SEQ ID NO: 50970 - protein, 349 aa, Oryza sativa
MAKPSLLLLLPLLIFSIGAALARADLMLDRFEQWMIRHGRAYTDAGEKQRRFEVYRRNVELVETFNSMSNGYKLADNKFADLTNEEFRAKMLGFRPHVTIPQISNTCSADIAMPGESSDDILPKSVDWRKKGAVVEVKNQGDCGSCWAFSAVAAIEGINQIKNGELVSLSEQELVDCDDEAVGCGGGYMSWAFEFVVGNHGLTTEASYPYHAANGACQAAKLNQSAVAIAGYRNVTPSSEPDLARAAAAQPVSVAVDGGSFMFQLYGSGVYTGPCTADVNHGVTVVGYGESEPKTDGGGAAKGGEKYWIVKNSWGAEWGDAGYILMQRDVAGLASGLCGIALLPSYPVM

SEQ ID NO: 50971 - protein, 166 aa, Oryza sativa
MNKIFSMSVQQASKSKVAVKPLELDNAKEPPLNLYKPKEPYTATIVSVERLVGPKAPGETCHIVIDHGGNVPYWEGQSYGVIPPGENPKKPGSPNTVRLYSIASTRYGDSFDGKTASLCVRRAVYYDPETGKEDPTKKGICSNFLCDSKPGDKVQITGIVLLSDGI

SEQ ID NO: 50972 - protein, 591 aa, Oryza sativa
MAAMNEKVLDKCGRNISSLKRKRDNPAARCADAGNTSKLHKHPADNSVVRFYVDEGHKAKIKCHFKMQIIQSYQNFMTSALPKRILLRQGGEWKDFPKQIVKLAHSDFRTKKTITEGEHQTHLFLLDFVHMTFIDSKTGLQRPIAWIDENGKQYFPEFFIEDKTLYRKKELGNGNNVYIIVEPNGTQEMNDHFGTSESSAESSNFESSTDDVSSPKRAKAERSVAGNKTGGVKETIGENEPHALLPIPCRSLPQDKLGDHSRVQLAISAVQKLLLQGLGTVLGSKDIVGIYRTPAVDNHKEFRYNLFKKQAEHTKCKRGNANVRYAWLACSKDAVDEMMLNGVMHFEKTVKCPDYGIGTILAPANCSNTCVNYSDVDENGIVHMMLCRVVMGNVEIVHHGSKQHRPSNEYFDSGVDDIKNPQHYIVWDMNVNSHIYSEFVVTIKLPSRVKDSPATEEDCHNLSEVSSLILSSGSPDSVSQDMNLQASPALGGHYEAPMLGDKVERAPSTPWMPFSMLFAAISTKVSAENMDMVNSCYEEFKSKKISRVDLVKKLRHIVGDRMLISTIMRLQDKLPPMSRHEAPKHVGQDDG

SEQ ID NO: 50973 - protein, 334 aa, Oryza sativa
MNEIRKLKRGISTKRGDHPVQNGQNPVDEWEEQQRYWPSPRAPPVSPMGSPRTPNGSQKKPVLGKVKSKAKKWMHLLHHKKKPQEDMMWTPRAGPSADDSKEHNDADYGSPSTARHPHSSCESACAPEVFLEASSRQNSPLQSPTAHKEQPYFKVSSRFESEMKEANEMLRESKQLRVNTTKPKTVTFAPILEQGPEPVKNDWHSKELSETATEIFSHAYAIVCEAVLRMVSIIQGAMSSYNIDRRQMLEKIVSFKRYMMLKLAPGEGDKVLSEVITEAVLDMFDACVRMLRGLWYRGQRKCILGFCQKGEKSYLLFHCPPILVCMKMQKNFTH

SEQ ID NO: 50974 - protein, 76 aa, Oryza sativa
MVFFCFLVDQRRKVRSSKPAAGICSRCGGCASVADMETATRFCYLLTVHRATWRAIICTFCGAMLKSYRHYRLYAG

SEQ ID NO: 50975 - protein, 358 aa, Oryza sativa
MMGGWFGCVCRFMERWRCVSVLALVLLLSNASHGRDISVQHSQQTLNYSHTLAMTLVEYASAVYMTDLTALYTWTCSRCNDLTQGFEMKSLIVDVENCLQAFVGVDYNLNSIIVAIRGTQKNSMQNWIKDLIWKQLDLSYPNMPNAKVHSGFFSSYNNTILRLAITSAVHKARQSYGDINVIVTGHSMGGAMASFCALDLAINLGSNSVQLMTFGQPRVGNAAFASYFAKYVPNTIRVTHGHDIVPHLPPYFSFLPHLTYHHFPREVWVNDSEGDITEQICDDSGEDPNCCRCISTWSLSVQDHFTYLGVDMEADDWSTCRIITAENVRQLQKDLASNIIVSKHSVDVTIVEPSSQTY

SEQ ID NO: 50976 - protein, 220 aa, Oryza sativa
MARWPPPSPPDGEHSFGHEAIALSFFVACVAATVVMASSMCSACGRKPKADDPAPDAAAAADVNAESHGDGGEEGEEEEKAPVVTLSPELATHGPIAGVAPPPSAAAKRRMSMTMSLSKNLSMNIPDKMRLSRRERRDKVEPEDTLWKKAIILGEKCKIPGEREGEADADADDLAAGSFRRSSYSRPMSRSISLAVHQSHVDAPPATTAATAGASSAGSS

SEQ ID NO: 50977 - protein, 667 aa, Oryza sativa
MWRFNPFGGKVQNGLEGRTIDVGNIKITVRNAIAQGGFSCVYLASDAMHPSKQYAMKHIICNDSELLDLVMEEIQVMNLLKGHPNVVTLVAHDVFDMGRTKEALLVMEFCEKSLVSAMESRGTGYYEEKKALLILRDVCNAVFAMHGQSPPIAHRDLKAENVLLGLDGAWKLCDFGSTSTNHKCFDRPEEMGIEEDIIRKHTTPAYRAPEMWDLYRREVISEKVDIWALGCLLYRICYFKSAFDGESKLQILNGNYRIPEQPKYSAAVTKLIKDMLEASPNDRPDVTQVWFRVNELLPLELQKNLPDGASSGISMSLQDEGAYKRTHVMPRRNPPPPPIEQSNSSLSHGSSKAGDAPLGAFWATQHAQGSQVADNRNSLFDEEPIKPSPSSKHNQSRGDISISAPGDRHGRSGQAVRGTPSNSVSNNGLASGANTNLFMESQSSLKTKESQPKSEKDPFNSFVADFEANNLHSGTNVASKESELEAEVSNLKEQLKKTSSEKAEMTAKFEKLSAICRSQRQEIQELKRTLAETTPPSSKVSSRLPDSGPQRKEKIEGTVWELEQGMLANSLPSSEAKTWQAFPDPKSQPAQVRPKVDHSTNGAQNLARNANSRQSPDGWGFGPDSFRTSPGSTAAQINRPTAQGSSSQRFSSGAAKKVEQPSGWAGF

SEQ ID NO: 50978 - protein, 47 aa, Oryza sativa
MLWFRAMVNCNLLKFQYVNIVQLVCFHYKQLSKNILFVIRTFINQRN

SEQ ID NO: 50979 - protein, 63 aa, Oryza sativa
MLVVELGVWLIPLTLFFVPCRRIVLLLKQLQGFHRSMTRPRRRASADMLSRFSGLNDNMVFVL

SEQ ID NO: 50980 - protein, 219 aa, Oryza sativa
MAPTSKLSQGIKRASRSHTYHRRGLWAIKAKNGGTFPKAGKPAAAAEPKFYPADDVKPRAPSTRKANPTKLRSTITPGTVLILLAGRYMGKRVVFLKQLKSGLLLITGPFKINGVPIRRVNQAYVIATSTKVDISGVKVDKFDDKYFARDKKAKAKKTEGELFETEKEATKNLPDFKKDDQKAVDAELIKAIEVVPDLKSYLGARFSLRDGDKPHEMTF

SEQ ID NO: 50981 - protein, 231 aa, Oryza sativa
MMNDGDVARQLKQMTDFIRQEAVEKAAEIEAAAAEEFQIEKLQLVEAEKKRIRLEFERNEKQGDIKKKIEYSKQLNASRLEVLQAQDDLAMSMLEAAGKELLYITRDHHVYKNLLRIFIVQSLLRLKEPAVILRCRKEDRELVESVLESAKNEYADKANIYPPEIMVDRNVYLPPAPSHYEAHGPSCSGGVVLASRDGKIVCENTLDARLEVVFRKKLPEIRRSLLGQVAA

SEQ ID NO: 50982 - protein, 664 aa, Oryza sativa
MSTTFSDFDPITERRHVERQRQERRRVMVAAGAASVILIIIVMGGAAVAYNASFGDGGSSSSSGSASGGGAQPSLHGVSKIIKAMCAQTDYKDTCEKSLAKAAANASASSSSSSPKDVVRASVAVIGDAIEKAFDKSSVIVSDDPRVKAAVADCKEIYENAKDDLDRTLAGIDAGGVDGLTKGGYQLRVWLSAVIAHQETCIDGFPDGDLKDKMRDAMESGKELTSNALALIGKASSFLAALHLPASSAASHRRLLSFAFDEDVTKQPEVNRSSGNSLRRLLSFAFDEDATKQPEVNRSSGNSLRRLLSFAFDENAPKQPKGNDDDVLVWVNRQERRLLKAKFQNKLKPNVVVAKDGSGKFKTINDALAAMPKKYTGRYVIYVKEGVYEEYVTITKKMANVTMYGDGAKKTIITGNRNFVDGLTTYKTATFNAQGDGFMGVALGFRNTARAAKHQAVALLVQSDKSIFLNCRMEGHQDTLYAHSKAQFYRNCVISGTVDFIFGDAAAVFQNCVIVLRRPLDNQQNIATAQGRADRREATGFVLQHYRFAAESALGDASRPAVRSYLARPWREYSRTLIMNSDIPAFVDKAGYLPWSGDFGLKTLWYAEYGNKGAGAATAGRVSWPGYKKVISKKEATKFTVQNFLHAEPWIKPTGTPVKYGMWA

SEQ ID NO: 50983 - protein, 244 aa, Oryza sativa
MPSFVDGPTLRSLLRPSTNGRRTKASDGGGGGGGGGIFKMFKLMPMLTSGCKMVALLGRHNRALLADHATTVTLFGHRRGRVSLAIHEDTRAPPVFLIELPMLTSALHKEISSGVVKLALESDTRSARRRLVEEYVWAVYCNGRKAGYSIRRKEASDDERHVLRLLRGVSMGAGVLPAAPEKEGGVPAGPDGELTYVRARVERVVGSKDSEAFYMINPNEGGVGGDSAGDGSAPELSIFLVRMK

SEQ ID NO: 50984 - protein, 70 aa, Oryza sativa
MVRGYEHGYVLKITSVGDVADISILENGIKCGHPVLLIAGNIDQDTVSIQSLWPIRLEVYRSMETARKPG

SEQ ID NO: 50985 - protein, 839 aa, Oryza sativa
MAAHTVTDPLEELWNHTMSMDKTHLMCFYPSKITMGGVWTGDNPLDFSIPLLLFQILLITSTTRAATLLLSPLRLPTYISQILAGFLLGPSVLGHLPHFSNLVFPVRSLFVLESMALLGLVYYTFIVGVEIEVSAITRAGIRSFGFAIGCTLPPFLVGALTGYVALSTDDKHKGDTFLNKLSFPIFLGSTFSSTAFAVLARNIAELKLAGTDVGQLTLSASLINDTFAWTGLTVATVLGHSRCTITQTTWTLTSGVVIFGASYLLLRPMLLRLARRAAEGEAVGEDRECWILIGVMVAALVADAGGTHAIFGAFVFGLAVPNGPVGVALVEKVEDFVVGALLPLFFALSGLRTDTAKITNMHSAVLLMVAAMVAAVLKVVAAIGVAGVFGMPLGDGTSIGLLLNNKGIIELVILNIARNKGIMSDQSFTVLVFVSALITAMVSPFLGMVVKPARRLVFYKRRTVAWAHPESELRVLACVHVPRDVPALLTLLDVVTPSSRSPVGVLALHLIEFVGRSSALLLINASAPSSSSYDASVHGRSHTEMQFKHISHAFMAYEEQSVGVSARTMAAVSPYASMHEDITSAAENQHSALILLPFHKYRSVDGGLEVSHPAIQPLNCSVQSFSPCTVGILVDRGLAAVPGGGYRVVALFFGGSDDREVAALATRMVRNPTIDLTLLRFVQKGGSFTASEFDALKERKADEGCLRDFLERANEGGGATVEYRERGVFNASEMVGEIQSVEAMGNKDLFVVGKVPGGSGLTAGMAEWSESPELGPIGDLLASKDFQTTASVLVLQAYGRPAAVVGAGAGAMSVDFGGDSVAMAERTASGRRPWARPGV

SEQ ID NO: 50986 - protein, 773 aa, Oryza sativa
MESSSEEELEEDFPGHEWITPQSSIRAAYQSQTEKGIRKICSELLELKDAIENLCGNMQSKYHAFLRISEEVVEAEQELIELQKHVSAQGILVQDLMSGVCRELEMWQKHCKDEHVEEKDLQTELDEILSYDTQDSKVSFLDKLDTLLAEHKIEEALLALETEEKKCMATDDPGKELDAEISTYKTALSKRKSILEDQLVRYSEQPSLSITELRKSLSGLIKIGKGSLAHQVLLKAYGSRLQKNVEAFLPTCSIYTETYSATLSKIVFSAISKVSKESSSLFGDSPMNLNRIIQWAEYEIETFARLVKENSPLPESVSALRSACICIQTSLTHCSYLESYGLKFSNLLMVLLHPYVEEVLELNFRRLRRKIVDSAKNDDILLPSPQEGSRLSSSVAPNIMLTSSGKKFMSIVNDVLDQITPMTIVHFGGTILNKFVQLFDKYVEALIEVLPGASEDDHLVKSKEPIEFKAESDAQQIQLIGTAYTVADELLPAAVSKFFDIQTEKKRIGGTGEGLGSGSIYSIEYKEWKRSLQHSLDKLRDHFCLQYVLSFIYLEGKSRLDARMYLELKTDDLLWECDPSPSLPFQALFVKLRQLASVAGDVLLGKEKIQKVLLSRLTETVVMWLSNEQEFWDVFEDQSIQLRPSGLQQLILDMHFVVEIAVCGRYPHRPVQQLVSVIITRAIAAFSVRNVDPQSSLPEDEWFLDMAKVAINKQLGTSGSESELEEPVVVHDEISDSEESSISSPSTIGSEDSFASANNDDLETPVYFTDPEA

SEQ ID NO: 50987 - protein, 748 aa, Oryza sativa
MTMGVVSREVLPACERLCFLCPSLRTRSRHPVKRYKKLLSEIFPKSQDEEPNDRKIGKLCEYISRNPLRVPKITVYLEQKFYKELRVEHFGSVKVVMAIYRKVICSCQEQLPLFANSLLNIVEALLEQNRQDDLRTIACRTLFYFVNNQVDSTYMFNLESQIPKLCQLAQEMGEKEKISIVHAAGLQALSSMVWFMGEHSHISAELDNVVSAVLENYESPYANSDNDAAIEDRRTQWVSEVLKAEDHEPSGITILTRVPSWKAIRAPRGELSLTTEESESPNFWSGICLHNLARISREATTVRRVLEAIFRYFDNNNLWSPSKGLALCVLLDMQIVIEKSGQNSHILLSMLVKHLEHKNVLKQTDKILDIIEVTTRLAEHSKAQSSTALMAAISDMVRHLSKNMQLLVSDVGPGDGMVMNDRYGKATDECLVQLSRKVGDAGPILDALAVVLENISSTTPVARSTIAATYRTAQIIASLPNLLYQSKAFPEALFHQLLLAMVYPDCETHLGAHRIFSVVLVPSSVSPCSFSGSSQTSKIGIKRTLSRTTSVFSSSAALFGKLKRDVFSFRENSRLDGTNLIPISENSDQINGNDPKLFKSQTIQRMYSAKDSFVTSSSEISNLSGTTQETDPVTLMLSGRQAILLLSSLWTQALSPENVPRNYEAISHTYCLMLLFSEDKKSCLEVLVGSFQLAFSLQSISLQAGFLPPSRRRSLFTMATSMLVFFSKAFGHSISHSSSERFVDYKHS

SEQ ID NO: 50988 - protein, 633 aa, Oryza sativa
MAVAVPDHTFNNGYSSKNQIEGRSLSWKRVFVQTDKGSVLGIELERGENAHTVKKKLQLALNIPTEESSLTCGDQLLNNDLSYICNDSPLLLTRNHMHRSCSTPCLSPNGKDVQHCDDSRVIEIVGCTSPSARMKQLVDDIVRGIEKGIEPVAISSGMGGAYYFRDMWGEHAAIVKPTDEEPFGPNNPKGFVGKSLGLPGLKKSVRVGETGSREVAAYLLDHKNFANVPPTMLVKITHSVFHMNEGVDYKTKSSDNKTQAFSKLASLQEFIPHDYDASDHGTSSFPVSAVHRIGILDIRIFNTDRHAGNILVRKLYNDASRFETQTELIPIDHGLCLPESLEDPYFEWIHWPQASIPFSEEDLEYITNLDPIKDAEMLRMELHTIHEASLRVLVLSTTFLKEAAACGFCLSEIGEMMSRQFTRKEEEPSDLEVLCMEARNWVEEREWLLPQADFEGEDDNESTQFDLDSEDDSTTFEASFSNNIRPIKGNSRDPPSKLAEVNEYVDEDDNNEFNKDDVGTCTSPITTWTPSTSNLSISSNELSFSGRRKSHSGVAKNKVTSKINSNSYSGNHSAKEKLPHNSSFAKLSDLSANKWSPFLEKFQDLLQSMFQDRKQTAGRNPWLSQRLGTSCQF

SEQ ID NO: 50989 - protein, 172 aa, Oryza sativa
MAAPTSKNLLLVLVVAATAVGIVAPHGSEAAAGRAVTGLVTGVVPCSAGSSINAASVPAFPDAGVQMVCGGRVVGGATADGTGAFTINMGALNATMLMAMAGNQYKVVVTTPLAACDASLAAVAGTLTAPVQLLGGTGGLGGLGGLITLIAQILSGLLGEILNIIPLPFSLV

SEQ ID NO: 50990 - protein, 278 aa, Oryza sativa
MPKILRFNKMAIVEHSASRSMREGIVSLPYPVLTSTNYSTWAIKMEANMEAQGIWDAIEPAADEAVDIKKDKQARACLFGAVPEDVLQQIAKKKTAKEVWESLKTRFLGVERVKKARVQTLKSDFKALHMKDTESIDEFAGKISGLANKLSDLGVTMDDDEQVKKLLDSVPDKFLHVIAAIEQFSDLDSMPFDEAIGRLKAYEGRIRKRDDKNGEHLLFTSGDTSGGRSRVKKPDRSKTMCYYCQELGHFAYECPEKKKKKEIALLAAASSDEEPTLL

SEQ ID NO: 50991 - protein, 394 aa, Oryza sativa
MPPEMDEMPLSDDVLREILLRVPPLPTQLIRAGAVCRRWRRIAAEPGFLRRYRAHHGEPPLLGFFVNPRGREPLFRATLDAPDRVPPERFSIRLHDDTELGGNWYYHGCRHGRLLLLNWKSGLGCRQILIWDPVSGDLIHLSPPPQLDALKGVFFQATVICAATTAAGDHVHGDNCKSNPFKVVLVGTDRSTAFAFVYSSETGDWGDHAAETPVGNCISLGCRCIQIGDFLYWMLFGYDNNILEFNLVNHSLSVVYVPTHIHEDHDGLYPITLQEGTELGLIVMSRSCMQIWQWMIDFDGLPGWLPLEPIYLDNLLHLSAGECVNPTKVLGFSQDYNELFVASSTRIFMVNLESLRFKELCKMDEFLDSPDSRPIYAVYPIASFYDADSSSSSA

SEQ ID NO: 50992 - protein, 728 aa, Oryza sativa
MLPPAPTRNPGACRFIPLLPPKPLLSPAAAAASSRGGLCVAAASRRDFLLLVPSIAAASTVLQSLPLSASAADDEKQAASPAPGPAAAPAPTSAGEPEAEALSRVYDATVIGEPQAVGKDARRRVWEKLMAARVVYLGEAELVPDRDDRVLELEVVRKLAARCAEAGRSISLALEAFPCNLQEQLNQFMDRRIDGNNLRLYTSHWAPERWQEYEPLLNYCRDNGVKLVACGTPLEVSRTVQAEGIRGLSKAQRKLYAPPAGSGFISGFTSISGRSLIDKISAIHGSPFGPSSYLSAQARVVDDYTMSQKIMKEITNGYPSGMLVVVTGSSHVIYGSRGIGVPARISKKMQKKKQVVVLLNPERQGIRREGEIPVADFLWYSAAKPCSRNCFDRAEIARVMNAAGRRREALPQDLQKGIDLGVVSPEILQNFFDLEKYPVMAELIHRFQGFRERLLADPKFLHRLAIEEGISITTTLIAQYEKRKGRFLEEIDYVLTDTIRGSVVDFFTVWLPAPTISLLSLGDNGSGESLELLKGLLGSLPDNAFQKGIMGQSWNTNQRFASVLMGGIKLAGVGFISSIGAGVASDVLYAARRVLRPSTSVETARRRTPIWKSATVYSCFLGTSANLRYQVIAGLVEHRLGEYLMAYYNQPLLANLLSFVSRTINSYWGTQQWIDLARATGLQTSKKELPSPEISNLPDMPLLECGTTEVQNMDEQQATANEVTVHSQ

SEQ ID NO: 50993 - protein, 899 aa, Oryza sativa
MPTKGQFSRERNVKATLGRDGRQRGNSQDQSVQVPKEKIAVVGGNIDGKFEDRIRVVKNEKFRRQREPRSADAGGSLKGSKPWPGRKATTVDELVKHMSNVPSYLQRKETSGHLQDKALNVGVLEWGLLARWSHQQKHEFSSSHGASPSNTSRSLIFSSPSQSSASPSSKSLESNQSPTLNDHQHCSMEFQQSDLEDKYHGKARYSPSPNSAVLNLLPVHGKHFPENTGKYGDLNLRNISPLSDPLLTATGSSMRHEMVDDEETTRNIEEAVHHCSRRLFTDDDNIGQSFFTSHNNDSACGDFQQSSGVTGEVFETLVSSAVMEMERNASLSPVGFSKDIGQHHEFPRIPYSCPLPIMDSSEELGTSRTGTQGDSVGAAVTIGENRNQKQISRGASERTPRISAKFSDMDASPHRHLVSGLNRVNRCSSLKDGPCPRQPEASTSVDKINGDKSSGNKGSRRSPLRRMLDPILKPRQSSTSGPIQPSFVPKCHLPGHIDKQSLSLGGSALQNVQRRSVDSVVNSNCRTETNTNQPPQVLNSERYLQQDIDSTTTRHALLQLAWKNGLPFFMLSCGSDILVATVRRKGISDNNDLESTYTLFGVEEPKKRGGAWIKAGNKNKKDQLVYNIVGEMRVSHRKSRCYQAEKNHLHREFVLVGSEQLPSSEESGDSHVSREFAAFISAVSQQEPETSRHSSSQHSSRSMSTPTDCSCPLGNFHPNTRDDSCASSSVLAVLPNGFHGTSTSGQPLPLIERWKSGGACDCGGWDEGCMLSVLSDDARENKGDKSTQANQTTDGSQRFDLFVQGRSREDKHAFSMVSFREGLYTVEFRSSIALLQAFAMCIVMLHGRRPTRTQAGVHASQEHASLADHKLNKIMAASQGRAQASYVPHRPPLSPVGRA

SEQ ID NO: 50994 - protein, 32 aa, Oryza sativa
MHHSAANPSCCKLTASRSRFLPVPSGIRCRTG

SEQ ID NO: 50995 - protein, 267 aa, Oryza sativa
MASSSLLLACVVVAAMVSAVSCGPPKVPPGPNITTSYGDKWLEAKATWYGAPKGAGPKDNGGACGYKDVDKAPFLGMNSCGNDPIFKDGKGCGSCFEIKCSKPEACSDKPALIHVTDMNDEPIAAYHFDLSGLAFGAMAKDGKDEELRKAGIIDTQFRRVKCKYPADTKITFHIEKASNPNYLALLVKYVAGDGDVVEVEIKEKGSEEWKALKESWGAIWRIDTPKPLKGPFSVRVTTEGGEKIIAEDAIPDGWKADSVYKSNVQAK

SEQ ID NO: 50996 - protein, 265 aa, Oryza sativa
MAMLLRRPLRALTLPLLRPHLSTAAAAEVSPADHHPDLLSPPFGYLPGHPRPDAKHDELILAVPRASPGRHVAAKERKAGRVPAIVFEQENGQEGGNKRLVSVQSKQIRKLVDHLGRSFFLSRLFRLQVWSEHAGQGVLIESVRVLPRKVHLHAGTDEPLNVTFMRAPSSALLKIDVPLMFIGDDASPGLRKGAYFNTIKRTVKYLCPADIVPPYIEVDLSELDVGQKLLMRDLKVHPALKLLQSPEQPICSIIGSRAPEQKKSK

SEQ ID NO: 50997 - protein, 152 aa, Oryza sativa
MDQHHVQQQQYVDPYRTMVLSPQPDHLNALQYNHQQQPQPPPQATPPQPQHHHASLASHFHLLHLTTRLADAIGKGTRDQNSDALVEDLTSQFARCQQLLNSISGTLSSKSITVEGQRKSLEETQQLLDQRKDLITKYRSSVEDLLKGDTRR

SEQ ID NO: 50998 - protein, 203 aa, Oryza sativa
MAAQRRRRRQRHGRGVGDFDDDRDDGGPRRHRRRAVDGDELIRHHLLHPPRHLHLRPQPPRRPSPPRSPSQGRDGGARICRLPASGATAAHESSGLRPRERPGVSGSAGSTQIRNDGDGGCNDDDSGDGSCDDDDGDDSGCDENDNAVMQVAAVLSSSVLRHQQHQYTLIIRAVVLWLILHLLVIQSYTGCLISMRGMVVIIV

SEQ ID NO: 50999 - protein, 377 aa, Oryza sativa
MADGEDIQPLVCDNGTGMVKAGFAGDDAPRAVFPSIVGRPRHTGVMVGMGQKDAYVGDEAQSKRGILTLKYPIEHGVVSNWDDMEKIWHHTFYNELRVAPEEHPVLLTEAPLNPKANREKMTQIMFETFNVPAMYVAIQAVLSLYASGRTTGIVLDSGDGVSHTVPIYEGYALPHAILRLDLAGRDLTDSLMKILTERGYSFTTSAEREIVRDIKEKLAYVALDYEQELETAKNSSSVEKSYELPDGQVITIGAERFRCPEVLFQPSMIGMEAAGIHETTYNSIMKCDVDIRKDLYGNIVLSGGTTMFPGIADRMSKEITALAPSSMKIKVVAPPERKYSVWIGGSILASLSTFQQMWISKDEYDESGPAIVHRKCF

SEQ ID NO: 51000 - protein, 363 aa, Oryza sativa
MSSLCPFAKLASAGATCPVKSSSDNKTTINHTDDDDDDNEKTGNANTDPRVVPPKCPFGYDSNTFKLGPLSCMVCHALLHQSSKCTPCSHKFCKACILRFKDCPLCGADIQGIEPDDELQGLVDRFIDGHARIKRSHAAGDGEAASDNKTKVIYEDVSMERGAFLVQQAMRAFRAQNIESAKSRLSMCAQDIREELKSKQDNQELCSQLGAVLGMLGDCCRTLGDAPSAITYYEESAEFLSKLPKKDLELVHTLSVSLNKIGDLRYYDGDLHSARSYYARSLDVLRSAAKEHSAVASQVIDVATSLAKVADVDRNLGNESMAVEGFEEAIKCLENLKLESGEASLEQRRLSVLDFLQKQLDDK

SEQ ID NO: 51001 - protein, 286 aa, Oryza sativa
MVGNGVCDTVFDGNALVPFAHGMALISDDIYQEAQTACHGNYWNTTTDKCENALYKVDTSINDLNIYDILEPCYHSKTIKKVTPANTKLPKSFQHLGTTTKPLAVRTRMHGRAWPLRAPVRAGRVPSWQEFARGSRPSGVPCMSDEVATAWLNNDDVRAAIHAQPVSSIGSWLICTNVLDFIHDAGSMISYHKNLTGQGYRAFIYSGDHDMCVPYTGTEAWTRSLGYGVIDSWRPWHLNGQVSGYTQGYEHGLTFATIKGAGHTVPEYKPQESLAFYSRWLAGSKL

SEQ ID NO: 51002 - protein, 504 aa, Oryza sativa
MVQLEELISCLPPPPATTITHRKMLARRKTMEMAVVSDPAPAAVTNLNYAGATRSSPVAANIRGTPVMRDVLSHLPVKMVRELGPLFASEFWLSTVMEIDDEQLLPQNGEQVDLIERVGSVLSTQDGPFPTVRLTNLCFQPFGVQELHCIDDDESAFIILMSWFNLFNSKKVTKFIFLNRAQPTAKLLFVPEDILKWWRLETLYLCQIRFKDPSGTIDFHLPNLAELGIVNCEFHHDTLMKMVAQCPKLERLSLAFLEFSTKIHFESNSLKRMVLWNYSARDSVRIVAPKLCRLILHNVGTSEPQPHDEHPDPGDHRTMVLSMNSEIDMDLEVLGYIDLNSHVPLLSEGQSCKSVRTLGVQLGFGHDNEFHTMRRLLKYFPSVENLYIQSTKLDNVTIDLTEDRIIDLFEPVEDRKIMMVVYEAFKGSDHELCLASVLLQRLPSLQKMTIFYDREISDLVINKSHSSLQAAMLGATVELNFCACPESSWTLQEALNADHLASKP

SEQ ID NO: 51003 - protein, 1068 aa, Oryza sativa
MAGLAPPPLLLLPLSSSLSPAAASHHPTSPPSRTRRRRRLLSAVASADGDAPSPVSVSASAATKGPSSSSVLTFQQAIQRLQDYWASVGCAVMQCSNTEVGAGTMNPLTFLRVLGPEPWNVAYVEPSIRPDDSRYGDNPNRLQRHTQFQVILKPDPGNSQDLFLHSLSALGINVREHDIRFVEDNWESPVLGAWGLGWEVWMDGMEITQFTYFQQSGSLPLLPVSVEITYGLERILMSLQGVDHFKNIQYTKGITYGELFLENEKEMSAYYLEHANVDNIQKHFDDFEEEARSLLSLWLPIPAYDHVLKASHAFNILDSRGFVGVTERARYFGRMRSLARQCAQLWVKTRENLGYPLGTYQESNLIYPHVSEKPSRKGVVGQPRAFVLEIGTEELPPHDVIEATKQLEKSLIQILEKRRLSHGKVRSYGTPRRLAVVVENLNMKQMEEEIELRGPPVAKAFDQEGRPTKAAEGFCRKNNVLIDSLYRRTDGKTEYIYARVKESARFADEVLTEDLPTIISGISFPKSMRWNSNIVFSRPIRWIFALHGDLIVPFCFAGISSGNQSCGLRNSSLANFKVEAAELYLHTLEKAGILIDMQERKQRILHDSSILAEGVGGDIIAPDSLVQEVINLVEAPMPIIGRYDVSFLALPKDVLITVMQKHQKYFPVTSKTMGNLLPCFITVANGAIKEEVVRKGNEAVLRARYEDAKFFYKMDTQKKLSEFRDQLSSILFHERLGTMLDKMKRVENTVAEVALLLGINEKMIPAIKDAAALAMSDLATNIVTEFTSLAGIMARHYALRDGLSEQIAEALFEITLPRFSGDVFPKTDPGIVLAVTDRLDSLVGLFGAGCQPSSTNDPSGLRRISYGLVQILVENKKNFDLTKALTLVAEEQPITIDSGVIDEVVQFVTRRLEQLLVDEGINCEIVRSVLIERANCPYLASQTAIEMEAFSRTEDFPKIVEAYSRPARIIRGKEIGSALEVDASVFEKDEERALWSAYLEVADKIHPGVDIKAFADASLELLQPLEDFFTNVFVMAEDERVRNNRLALLTKVASLPKGIADLSVLPGF

SEQ ID NO: 51004 - protein, 189 aa, Oryza sativa
MLSPHAAEPRDQSSPAAPGRNHSVSMLSTMTGGQMILSCRTAFSGNWEYFHYFILDPYKPQRAFFQPPPPPPNSAAAVPYAILCKWGYMGNFLQDVVVFNSSAAYALRCRVEEGGCHYLFEDGKMFLVTGRRATRAAPARRREKRLVGDVVLRECAHVLGVFPTVCRYKPHEHNYVGKIIGRWRWWFNY

SEQ ID NO: 51005 - protein, 198 aa, Oryza sativa; identical to SEQ ID NO: 29072

SEQ ID NO: 51006 - protein, 175 aa, Oryza sativa
MSDPGRDSNMQQLIPIAPPPKASSGTTGKELVVVDGTGKASGGVKLREDEEDLEVKLRRIMENVPVRVSNTSGSSAGSGSGDFHQYRQMRRREQDRLARMDADYQKRKQMAEFELRREERLKEAEERTAKKRLKRQKKKQRKKEKKRSKTNNGGEQPNGGESSGGDEDSDDEDKP

SEQ ID NO: 51007 - protein, 390 aa, Oryza sativa
MLAYRRQEGVRGVVVGHPGGPEGDDGGPPRGAVPAGNRQPHDGGQGDGYQAASHHEGEGLWIGDLQYWMDENYISACFAPTGELQSVKLIRDKQTGQLQGYGFIEFTSHAGAERVLQTYNGAMMPNVEQTYRLNWASAGEKRDDTPDYTIFVGDLAADVTDYILQETFRVHYPSVKGAKVVTDKMTMRSKGYGFVKFGDPSEQARAMTEMNGMVCSSRPMRIGPAANKKATGVQEKVPSAQGVQSDSDPSNTTIFVGGLDPSVTDDMLKQVFTPYGDVVHVKIPVGKRCGFVQFANRASADEALVLLQGTLIGGQNVRLSWGRSPSNRQAQPQQDSNQWGGANAGYYGYGQGYEGYGYAQPQDPNMYGYGAYAGYPNYQQPLAQQPQQQQ

SEQ ID NO: 51008 - protein, 332 aa, Oryza sativa
MPMAAGTWVKLEQKGDGPGARSSHAITLVGGTAYAFGGEFTPRVPVDNAMYAFDLKSQCWSALDASGDVPPPRVGVTMASVGATVYMFGGRDQEHKELNELYSFDTATNRWTLLSSGAGDGPPHRSYHSMVADAAGGGKVYVFGGCGDAGRLNDLWAYDVAAGRWEALPSPGEACKPRGGPGLAVAGGKVWVVYGFSGEELDDVHCYDPGTGAWSTVETTGGGGGGDKPSPRSVFCAAGIGKHVVVFGGEVDPSDLGHLGAGKFSAEAFALDTETGAWARLDDAGEHHPGPRGWCAFSAGEVDGRRGLLVYGGNSPTNDRLGDIYFFTPPLA

SEQ ID NO: 51009 - protein, 390 aa, Oryza sativa
MACCFACLGAGGGKMKKKKKSPPQIPPASERDNPPNLASSTVMKQDQDSFQLAANEDILVSNGSSENRRIAARTFTFRELAAATSNFRVDCLLGEGGFGRVYKGYLETVDQVVAIKQLDRNGLQGNREFLVEVLMLSMLHHPNLVNLIGYCADGDQRLLVYEYMPLGSLEDHLHDPPPGKSRLDWNTRMKIAAGAAKGLEYLHDKANPPVIYRDLKCSNILLGEGYHPKLSDFGLAKLGPIGDKSHVSTRVMGTYGYCAPEYAMTGQLTLKSDVYSFGVVLLEIITGRRAIDNTRAAGEQNLVAWARPLFKDRRKFPQMADPALHGQYPSRGLYQALAVAAMCVQEQPTMRPLIGDVVTALAYLASQTYDPEAHGVHHTSRLMSPGTQGV

SEQ ID NO: 51010 - protein, 585 aa, Oryza sativa
MEPPSGIRASAWSFFKFLPFFLGLLLLGIIKGALLFPWAWLIMMIGISALVLGLWPMHVIWTYYCIIRSKLVGPVVKLLLLVAASVILVLWLIVGIVGSVLIGVVYGFLAPVMATFDAVGEGKERPLYHCFVDGTWSTITGSCTVVRDLKDLLLHSYFSIMDDLRFHAPPGGEPYEIRVLDIPGALFAAACGFLVDGIMFTLIAFYKFPVMLFKGWKRLIEDLVGREGPFLETACVPFAGLAILLWPFAVFGAFLASIISSIPLGAFAAVVVYQESSLIMGLNYVISSVAIFDEYTNDVLDMAPGSCFPRFKYRKNEASTEGGSLSRPASFKDKQDGKKAPSRVTSFKGSFDEFNPFKLLDHLFEECKHRGEVLVAEGVITPKDIEETKSGKIGIGVLNVGLPAYVILHALIRSAKANSDGLILSDGSEITSDNRPKNTIFDWFFDPLMVIKEQIKAQNFTEEEEAYLKKRVLLTSDPKRLKEVVPHLPSSLNERKQAEIDALSRRLQGITRSISRYPTAKRRFDDLVRSLSEELERTMGGSQSGSVSQMQKLRSGISRMLSQRSMGKRTSNRGDDREAQLTIDP

SEQ ID NO: 51011 - protein, 373 aa, Oryza sativa
MERRLLEAAMVGSATSMKEMAAQDPSLLLGTTPQGNTCLHISSIHGHEGFCKDVLTLNNSLLTVANMDGETPLLTAVTNGHMSLASILLECCCTLGFSEAILQQDRNGCNALHHAIHCGHKDLALELILKEPALSKAVNKYSESPMFIAVMRDFTDVSEKLLGIPGSNHVGTYGHNALHATVRNGNAVMAKKILEGRPWLGKERTRERKTPILMTVIWDKIDVLRVLLEHDVLLGYECYDDGGNLSPLLVAAAYRGHVDVAQELLNHCPDAPYCDRNGWTCLHEAVKEGQTEFVEFILRTPQLRKLINMRNNKDGQTALHQAVRMCNPKIVASLLSHKDTDFTLNDHKTGQSVIWQLCLGSERAKTLNWVCCN

SEQ ID NO: 51012 - protein, 661 aa, Oryza sativa
MVGMRGAYGYNDNGNEGGVVVGGGEAEAEIAAMAVLHKVAAPPAQSTASKLKARVKETFFPDDPFRGFKGKPLTTKWVMAVQYLFPILDWVPSYYFSLFKSDLVAGLTIASLAIPQGISYAKLASLPPIIGLYSSFVPPMVYAVLGSSRDLAVGPVSIASLIMGSMLRQAVSPAAEPLLFLQLAFTSTFFAGLVQASLGILRLGFIIDFLSKATLVGFMAGAAIIVSLQQLKALLGIVHFTTEMGLVPVMASVIHHTKEWSWQTILMAVCFLVLLLTARHVSMKWPKLFWVSACAPLACVIVSTLLVFLFKAQKHGISIIGQLKCGLNRPSWDKLLFDPQYLGLTVKTGLVTGIISLTEGVAVGRTFASLKDYQVDGNKEMMAIGLMNIVGSCTSCYVTTGAFSRSAVNHNAGCKTAMSNVIMALTVMVTLLFLMPLFVYTPNVVLGAIIIAAVIGLIDLPAVYNIWKMDKMDFLVCLCAFAGVIFISVQQGLAIAVGISIFRVLLQITRPKMMIQGNIKGTDIYRNLHQYKDAQRVPGFLILTVEAPINFANTNYLNERIKRWIEEESSAGTKQSELHFVILDLSAVPAIDTSGISFLIDLKKSTEKHGLELILVNPTGEVMEKIQRANDAHGHFKSDSLYLTTGEAVASLSTFSKMTAP

SEQ ID NO: 51013 - protein, 713 aa, Oryza sativa
MEAKLSFSQDSPPISIISAAKVAGVSLSIDPSLAAGSAPVLCFSSGESLRGINPILEYIAQSSPSLHGRDAIESGHVVEWLEYAPTFLLGSEFEVACSFVDGYLMSRTFLVGHVLTIADITVWSNLAGIGQRWESLRKSKKYQNLVRWFNGIDSDYKDTLNEVIAAYVGKRGIGKSPAPNLKEKVNDSKDPSAPEVDLPGAKFGEVCVRFAPEPSGYLHIGHAKAALLNKYFAERYQGRLIVRFDDTNPSKESNEFVENLLKDIETLGIKYDAVTYTSDYFPKLMEMAEKLIKQGKAYVDDTPKEQMRSERMDGVESKCRNNTVEENLSLWKEMINGSERGMQCCVRGKLDMQDPNKSLRDPVYYRCNTDPHHRIGSKYKVYPTYDFACPFVDALEGVTHALRSSEYHDRNAQYYRILQDMGMRRVEIYEFSRLNMVYTLLSKRKLLWFVQNKKVEDWTDPRFPTIQGIVRRGLKVEALIQFILQQGASKNLNLMEWDKLWTINKKIIDPVCARHTAVLKDQRVIFRLTNGPEKSFVQILPRHKKFDGAGKKATTFTNRIWLDYADASAISKGEEVTLMDWGNAIIKEIKMENGVITELIGELHLEGSVKTTKLKVTWLPDIDDLVPLSLVEFDYLISKKKLEEDENFLDNLNPCTRKETLALGDANMRNLLRGEVIQLERKGYYRCDAPFVRSSKPVVLFAIPDGRQQASLN

SEQ ID NO: 51014 - protein, 74 aa, Oryza sativa
MNCAFGDVIGLIDGGIEVMGSDSIRANASRKFPNHAASWCWLRNPVPIWEFQLAPKYVYIVHYSQENFVFITHK

SEQ ID NO: 51015 - protein, 772 aa, Oryza sativa
MFYSQFILAKKGPLGTIWIAAHLERKLRKNQVADTDIGVSVDSIIFPEVPIALRLSSHLMLGVVRIYSRKVNYLFHDCSEALLKIKQAFRSTAVDLPPEESTAPYHSITLPETFHLDDFELPEAAFQGDIDHHVSTKEQITLQDNPEKTGYSTSQFGLDERFGDGNSSHIGLDLEEELMLNKDQSIQLEADDGIIIQGRSAVHPTDMEVDDNQNKDESAEGYNMEDGPSSHNKLNPLSADGLVGNSLPNWHTYNVQTPDLNDMLLNNDGNAGPSASYYQPSPFPCDEPASPEFVSAQAPATPGLMEETVPSRVHESPVLSPQRKASPSSNDETAKTAENANDLVGAETTELALTKPVQIESSGAVQETDSLSQQCATEELPPQAETSNLEATMDKSMINTDGVAASGEATAAKETTEVSLVENSLELCADGPTEPVIENQTQFNDGSVDVQGGGQHAPHAILATADSQVNVEASTQEMASNDIPSDLPTLEFPEREKMLSAPDVELYQANDLGQVTAEKGTTESDGSNKVGSLTSRKRHLEDSLPALESATTEKLSSRPRGKRTIDGIPDDDDLLASILVGRRTPGLRLDSTPIPPKTSSLKRPRLTSKSTTPKRKVQMDDAMVIHADTIRQQLISTEDIRRIRKKAPCTRSEIWMIEKGSLEDDIFHEPIFSCMCKELNDLQYRTYEIVAHPTIHNMEIHVRLDMSQTMADGSNDVGTSGAKDSGNHQDHVCYQMELSQMRCILKQLMQQILELILIHTCHLTNRLTMLKE

SEQ ID NO: 51016 - protein, 157 aa, Oryza sativa; identical to SEQ ID NO: 37161

SEQ ID NO: 51017 - protein, 161 aa, Oryza sativa
MELLLRPSPPPPWAIPRRSSGERTKPCRSRSRSRTGTSKQTFPVPLLVGKVGRRPFPVQCSIVRCCLSSTDAIHSTSDDIHEDNGHGHFLMKSTSDLQKVISSCFGKACLLSSVMLVLPPSCFAEPCEPEYSLPNMPLLFAIAMIGATVGGLLARQRRGGA

SEQ ID NO: 51018 - protein, 121 aa, Oryza sativa
MYCALECPSTQETWENCLKTKFRKPTGNTVLRNKAPRWHEHLQCWCLNFHGRVTVASVKNFQLVAAADPNDPASSKDEETVLLQFGKVDDNIFTMDYRQPLSAFQAFAISLSSFGTKLACE

SEQ ID NO: 51019 - protein, 439 aa, Oryza sativa
MAESGSSGLEEKLAGLSAGCGEEPQQLSKNAKKREEKRKKQEEERRLKEEEKKKKAAATAAASGEPPKESAADDEEMDPTQYYENRLKALDSLKATGVNPYPHKFLANITVADYIEKYKSMNVGDKLVDVTECLAGRIMTKRAQSSKLLFYDLYGGGEKVQVFADARTSELEDNEFIKFHSTLKRGDIVGVCGYPGKSKRGELSIFPKKIVVLSPCLHMMPRQKSEGSAVPTPWAPGMGRNIEKYVLRDQETRYRQRYLDLMVNHEVRHIFKTRSKVVSFIRKFLDGLDFLEVETPMMNMIAGGAAARPFVTHHNELNMRLYMRIAPELYLKELVVGGLDRVYEIGKQFRNEGIDLTHNPEFTTCEFYMAYADYNDLIELTETMLSGMVKELTGGYKIKYHANGVEKPPIEIDSTPPFRKIDVIEELEAMAKLNIPKDL

SEQ ID NO: 51020 - protein, 570 aa, Oryza sativa
MMSWLEWILSQTLLRIAESNPQGMDDFWLQQGADMLLSLVKSSQEDVQERAATTLATFVVIDDESANVDAARSEAVMRVGGIPMLLDLARCSRESAQSEAAKAIANLSVNAKVAKAVADEGGITILTNLARSMNRLVAEEAAGGLWNLSVGEEHKAAIAAAGGIKALVDLILRWPAGTDGVLERAAGALANLAADDKCSMEVAKAGGVHALVMLARSCKLEGVLEQAARALANLAAHGDNNNNNAAVGQEAGALEALVQLTSSQNEGVRQEAAGALWNLSFDDRNREGIAAAGGVEALVSLAQECLNASEGLQERAAGALWGLSVSEANSMAIGQEGGVAPLLTLAQSDVEDVHETAAGALWNLAFYSGNALCIVEEGGVPILVRLCSSSGSKMARFMSALALAYMFDGRMDEVALVGTSSEGSSKSVNVEGARRMALKHIQTFVLTFSDPQVFTTASTSSASAALSQIADAVFIQEAGHLRCSGAEIARFVAMLRNPASILRACAAFALLQFTIPGGRHAVHHAGLLQKAGAARVLRAAAAATTASIEAKVFARIVLRNLEHHQTGTST

SEQ ID NO: 51021 - protein, 183 aa, Oryza sativa; identical to SEQ ID NO: 30401

SEQ ID NO: 51022 - protein, 360 aa, Oryza sativa
METLRPVATATATLPSGVPPPAAAAAARGYPGWVMLMPYATAEREVDDSEYSTSNSGGAKITGAASRSSSGHLVRVSLRLESPPAASGLSFHCSPCGGSGYGAHHYRPSMYVVAAHGDSVLLEMHYQKEGYQQYGIDYFFYNAGDGDEDPPRRPPSLSLSRLIRVPIPSRPGCVEVAPASSCAAAATTTTTSSWWRRSSPRSTAGATRWRAPSSSCSAPASGAPRRSRRSSTTTARARSSPTGRPTWPSPSATGCCATSTCTAASSSAATTCSTKFPRGCSTCRSPWRPPPARSTRSTSTARATTIGVVCSTLEPSSAPSTAAAPRSNSSTSPPAAAAAAWASTPPATVRAAPSSSEPGH

SEQ ID NO: 51023 - protein, 71 aa, Oryza sativa
MLSCKKTRCISSDLVILEACITSQRAAKEMRHSCVIHNFARRSLYLSTQTAMALLNICSVSLKCISAGIRW

SEQ ID NO: 51024 - protein, 265 aa, Oryza sativa
MVMQQVQVLKEVSALLRGKETPVILDLEESLRAKGDMTQGEEVKIYASKVTAVLCKAFATATSALVGYHVLGVGAKLLGNPPLPRIPRIGMAAGSAWIVGKFAYYTALQASPIFILEGGEERMKMELANIILTKHNDEKTLVEAVKQHFFAEHLFSDQYQDMPLFRWRLRHTYVDSTFMERVKEIEVKNSSNGSGSISGHRTTNTRSFGDLMEDPLACILGSPDGDIENKKSAENTGTIVKRREVRAHRRSHRHHHRHTDKVSAQ

SEQ ID NO: 51025 - protein, 311 aa, Oryza sativa
MAPPLAAAAAAAAAVSSSSPLFSSSSSRPLPRRHLPPSSVSLRPRRRSIAAASAAVESAGRPLLEARDLVACVKENGQEILSGVNLTIREGEIHALMGQNGSGKSTLMKVLAGHPEYEVTGGTVLFKGENLIDMEPEERSLAGLFMSFQAPVEIPGVNNYDFLLMALNARREKKGLPALEPLQVYPIIEEKVNALNMNAEILNRAVNEGFSGGERKRNEILQLSVLGADLALLDEIDSGLDVDALEYVAKAVNGILTPNSSLMMITHYQRLLDLIKPSYVHIMEKGKIVKTGDRALANYIDESGYKAIATA

SEQ ID NO: 51026 - protein, 133 aa, Oryza sativa; identical to SEQ ID NO: 28932

SEQ ID NO: 51027 - protein, 417 aa, Oryza sativa
MGRKRALLVGINYPGTKAELKGCHNDVDRMHRCLVDRFGFDEDDIRVLLDRDSSGTQPTGANIRRALAQLVGDARPGDFLFFHYSGHGTRLPAETGQNDDTGYDECIVPSDMNLITDQDFRELVQKVPNGCLFTIVSDSCHSGGLLDSAKEQIGNSTRQNQTQSREREEPSDSGSGFRSFLKETVRDVFESEGIHLPRSRHSQSHYGGEDQYETYAQPTDGHTKNRSLPLSTLIEMLKEKTGKDDIDVGSIRMTLFNIFGDDASPKVKKFMKVMLGKFQQGQSGEQGGLMGMVGSLAQEFLKVKLEGNEEEAFKPAIEQEVHSVDEVYAGTKTWAPNNGILISGCQSNQTSADATTPQGSSYGALSNAIQTILADKRGNVSNKDLVMKARSLLAKQGYTQQPGLYCSDDHVHVSFIC

SEQ ID NO: 51028 - protein, 586 aa, Oryza sativa
MTTTAAGGATLCAAREEQELLATRLNVIGIRPPHCAAESILIYLTAPGLSMMPMRVMASDSIASVKLRVQTSKGFVVRKQKLVFDGRELARNDSRIMDYGVSHGNVLHLVIRISDLRLITVQTVHGNKFRFRVEPGRTVGYVKQQIAKNSTHDDDHHSLVLQGEVLDDAHLIHDVCRTDGAVIHLLVHRSAKLAARPVDRDFEVSIVARNRNAAADAAQPTLHLQRDFAIEPVIVNPKAALPPVIENLVGAVLAGMEKGNAPIMSSEGTGGAYFMQDASGQEHVAVFKPVDEEPMAANNPRGLPPSPTGEGLKKGTRVGEGAIREVAAYILDHPPGGRRSFAGHHGSATVGFAGVAPTALVRCMHRSFKQPAASEQGPPLFKVGSLQAFVKNSGSCEDMGPRAFPVHEVHKICVLDIRLANADRHAGNILTCRDEQGHGLTLVPIDHGYCLPESFEDCTFEWLYWPQCREPFSEETVEYIRSLDAEEDIAILRFHGWEMPAKCERVLRVTTMLLKKGVDSGLAAFDMGSILCRETLTKESVIEEIIREVEDDVGDEAAFLQSVSQSMDRRLGELSKKKKSNVSIQD

SEQ ID NO: 51029 - protein, 245 aa, Oryza sativa; identical to SEQ ID NO: 30247

SEQ ID NO: 51030 - protein, 278 aa, Oryza sativa
MAEADAQTQSRAHSSTAAPVAGETAGEPVGFPQNGAINGAPLMFPVMYPMLMTGMHPQQSLDDQAQGPGIYAIQQNQFMGSTLMPLTYRIPTESVGAVAGEEQAQDARQQHGPQRQVVVRRFHFAFQLDLALIIKLAAVVFLFSQEGSKQRLFLLILFASVIYLYQTGAITPLLRWLQRAGGAAARPPQAPARPENRAPLAAQNDGNVQPPGGNLADPANNDQAAENQEPGAAAANENQQEVDGEGNRRNWLGGVFKEVQLIVVGFVASLLPGFQHND

SEQ ID NO: 51031 - protein, 339 aa, Oryza sativa
MEKPCTLLVHFDKGSPSMANEIKADLEGSDVAAKVDAMKRAIMLLLNGETLPHLFITVVRYVLPSEDHTIQKLLLLYLEIVDKRDVASGKVLPEMILICQNLRNNLQHPNEYIRGVTLRFLCRLNEPELLEPLIPSILANLDHRHHFIRRHALSAISAIYRLPHGDQLLPDAPEVVERALTGEQDASARRNGFLMLCACAQERAVAYLLTNAERVAEWPDLLQMAAVDLIRKVCRSPNRADKGRYIKIIISLLSAPNSAVVYESAGALVSLSSAPTAVRAAANTYCQLLSSQSDNNVKLIVLDRLHELRASHRDVMVDVVMDVLRALSSPQCGCQEEGA

SEQ ID NO: 51032 - protein, 212 aa, Oryza sativa
MNPFAKKPTPREAIRSSKRELTNATRGIERDIGTLQLEEMRLVAEIKRTAKTGNEAATRILARQLVRLRQQISNLQGSRAQIRGIATHTQAMHANTSVAAGMQSASKAMGALNKQMDPAKQMKVMQEFQKQSAQMDMTNEMMSDSIDNILDDDQAEEETEDLANQVLDEIGVDIASQLSSAPKGRITGKKVQADESSELDELEKRLAALKNP

SEQ ID NO: 51033 - protein, 304 aa, Oryza sativa
MVLPFVPLSITFEDIRYSVDTPEAFKAKGMTEGRLELLKDISGSFRQGVLTALMGVSGAGKTTLLDVLAGRKTSGYVQGSITISGYPKKQETFARISGYCEQNDVHSPNVTVYESLMFSAWLRLPVEIDSATRKMFVYEVMELVEILSLKDALVGLPGVSGLSSERRKRLTIAVELVANPSIIFMDEPTSGLDARAAAIVMRAIRNTVDTGRTVVCTIHPPSIEIFESFDELFLMKQGGEEIYVGPIGRQSCELIKYFEAIQGVSKIKDGYNPSTWMLEVTSTTQEQRTCVDFSQIYKNSELYR

SEQ ID NO: 51034 - protein, 50 aa, Oryza sativa
MERYVIGNGWSIQKVLTKCFAFVVSCSILATARVHWGMMGLEIGGMLVRD

SEQ ID NO: 51035 - protein, 238 aa, Oryza sativa
MRASARASSSSSASMAAAAQRDDVESRRDGGENEKRPLLEKRSAGDGGGGSGGNGMSPVQRAISQTYQSTAHLAKLLPTGTVLAFQLLSPIVTNQGHCDVEANRAMAGALIALCALSCFVLSFTDSFRDAATGGAVRYGFATPAGLWVIDGGAPLDPQAAAAYRLRLLDLVHAVVSVMVFAAVALFDQNVVSCFYPVPSEGTRQVLTALPIAIGVVGSMLFVSFPTTRHGIGFPLSPR

SEQ ID NO: 51036 - protein, 650 aa, Oryza sativa
MAGKGDGPAIGIDLGTTYSCVGVWQHDRVEIIANDQGNRTTPSYVAFTDSERLIGDAAKNQVAMNPINTVFDAKRLIGRRFSDTSVQSDAKLWPFKVLPGPGDKPMIGVQYKGEEKQFSAEEISSMVLNKMKETAEAYLGSTVKNAVVTVPAYFNDSQRQATKDAGVISGLNVMRIINEPTAAAIAYGLDKKSSSVGEKNVLIFDLGGGTFDVSLLTIEEGIFEVKATAGDTHLGGEDFDNRMVNHFVQEFKRKNKKDITGNPRALRRLRTACERAKRTLSSTAQTTIEIDSLYEGIDFYTTITRARFEELNMDLFRKCMEPVEKCLRDAKMDKSTVHDVVLVGGSTRIPRVQQLLQDFFNGKELCKSINPDEAVAYGAAVQAAILTGEGNEKVQDLLLLDVTPLSQGLETAGGVMTVLIPRNTTIPTKKEQVFSTYSDNQPGVLIQVYEGERTRTKDNNLLGKFELSGIPPAPRGVPQITVCFDIDANGILNVSAEDKTTGQKNKITITNDKGRLSKEDIEKMVQEAEKYKAEDEEHKKKVDAKNSLENYAYNMRNTIKDDKIASKLPEADKKKIEDAIDGAISWLDSNQLAEAEEFEDKMKELEGVCNPIIAKMYQGAGADMAGGMDEDAPAAAGGSSGPGPKIEEVD

SEQ ID NO: 51037 - protein, 394 aa, Oryza sativa
METLRKQASKLREHVAKQQQAVRKQFSARYNQDPSLVDEAELECHQNLQRLYNSTRAAKHFQRSIVRGVEGFIAVSTKQMEIVKKLAEDCCRYGNDNQNFGFILARASVEFGNSHSQMEKERENLLKFLGEQVFEPLREMIMSAPLEDARLLTYRYQRIRQDMESQIADVMRKQLKSKESSGNADNSVKLQHAESKLSELRTTLSALGREATAAMEAVEVQQQQVTFDRLLAMVDAERAYHQNAADILNKLHDEMVQAKHHDEPENHYDETSSDPKTAATHEHSRSTSEDHIFTNTSEPTRTETSEPTRTETSEPTRNGQEVHYVGEVIHPFDAQADGELSISVGDYVVVRQVAPNGWSEGECKGKAGWFPSAYVEQRDKAPASKVIEPGLLTT

SEQ ID NO: 51038 - protein, 259 aa, Oryza sativa; identical to SEQ ID NO: 49649

SEQ ID NO: 51039 - protein, 317 aa, Oryza sativa
MVKEEEIITEAAGARGYMEMLGLGEEAADYLMCLSPSSYLSSPAASTTTAVASPTCASYLAPHPYHHLLSFSGQDQYHGDDVFGLQYYGGDQVIPAVVPQKSSPTTECSSSVSSMSSSPTATAISSSKSPAFKKKGSRGCDQRKATAPAAATTTNKRPRVRRERLGERIIALQQLVSPFGKSDTASVLHEALGYIRFLHDQVQVLSSPYLQRLPPSARVPEQERGTPAAEEQPPALRPSDLRSRGLCLVPISCTEHVAGAGAGTGHGNGADLWSVAAGMAKATATVTAAVERSKEAAAAAAATAALLRADRPGQQLA

SEQ ID NO: 51040 - protein, 109 aa, Oryza sativa
MVFHATLLLTAVGLRRNANFQLFMLFLAYSGVYLAEKINSYMAEHWKSIATRNYFDRAGVFVSVVWSGPLIFISMVIVVSSLITLCRLMAKWKRAELRHRAQLARDKQD

SEQ ID NO: 51041 - protein, 342 aa, Oryza sativa; identical to SEQ ID NO: 30438

SEQ ID NO: 51042 - protein, 106 aa, Oryza sativa
MIEDHGCSHAARQHHLKGRHQELAHHVKNKNLLLGVMIVILRLTVLICKKCFSITMKTLCTEELYKGELHDVFLSLQEAAQPLAMKMKALLARMLYSMLSQEMMSQ

SEQ ID NO: 51043 - protein, 451 aa, Oryza sativa
MKKAAATTTTQNAINLTHDDTVNANVNSGGSAAGDHANIKSMFFISQAINGLDTSRHHHPLMTIVSNKPPTPSPKLNSLDDTSSSSNKKKKMVQQPNKLSERIVKCLICIFIRLLRSSRVADLQLQQQDNNNNNASSRSSSSSPSLTRQHQGGGGGGSFRIDTSLLMNKQQQQQDCRSGQQDHYGIFAIPDSIVRDIGPYKNLVSFTSSAFDLRGFSTSPLLTKLRGMLEALQHVDLRFLTHHQKLAFWLNIYNTCIMHGILHNGLPSNPEKLLALKNKATLNVSGQKLNALVIENFILRQPSSVKEEFWKCEVDVEEQQVRSRYGLNSSEPNILFALCCGNRSSPALRIYKADRVMMDLEKAKLEYLQASLVVTSTRRRLMIPSLIHSNMHDFAKDLDSLVRWICDQLPTSWSLRKSMVDCLRWSGHRLNIHHLVDVIPYDYDFQYLLPM

SEQ ID NO: 51044 - protein, 844 aa, Oryza sativa
MSGRSSPMYEGLASRPDEWDVVLKVKYGETLKRFGGYVQGPQFSLNLSALRSKIASAFKFGSDVDFILTYTDEGDIVMLDDDDDLHDAAIHQKLNPLRINVQLNNSHTAAPQAKQQDSDNIPLRSTTTEDPLAHIKSVIDEVLKPISMKSIQEPVPETLAKLSHEVLEAASPQLAELIKPFVKLVTPSNNNPSNGHADGSCSSSTGLPQTQVDPKTNDEPKIDTSLGSQPLDTQNSKSSGARGLKTLSVEAPATSGVKSSQGQQASLYPSIEELLFSPFLPNSGDDKSASKGISDAQSKGKSVMTSATPPTPPAAPAFRPAPPIPSLNDWSQPPARGSTFYPSIWQSEADPKANSDSRWRVPLCRAGHPFQPHAPLSRPPPPMPAPMSYGPSPHFPYPGRLLSSGHLHGDLGNNIENSPARTFHRWIQCDGCGVQPIVGPRYKSKTKEDYDLCDACFHRMGNEVEYTRIDKPLLPQRLLRDPTLCRKIHSRAAMKSKREKLESRFILDVTVLDGTLMAPSTPFTKIWRMHNNGSIMWPLGTQLIWVGGDQFALQTYVPLEIPVDGFPVDQEIDVAVDFVAPARPGRYISYWRLASPSGQKFGQRVWVHIQVEDPSFVSNNRTAAINLNLPPESNITNTSSLIDVNIEPVDQVFNQHVNSTNKELLEHLIHHQIDEPKNPEPAPLPVPIVSSTTSLHPIIDVDVPSSSTAAAFVPVFDEPAPEPAVTPVPPTVNVPAGNAPASVGASSSDHHGIDNLTEEKLLKELEEMGFRQVDLNKEILRQNKYNLEQSVDDLCGVSEWDPLLEELQEMGFEDTEINKEMLEKNGGSIKRAVMDLIAREKKDQ

SEQ ID NO: 51045 - protein, 254 aa, Oryza sativa
MMWIAEGRMSRRWSRTIYVGNLPGDIREREVEDLFYKYGRIVDIDLKVPPRPPGFAFVEFEDPRDAEDAIRGRDGYNFDGNRLRVELAHGGRGNSSSFNNSGGGGRRGGVSRHTEYRVLVTGLPSSASWQDLKDHMRNAGDVCYSEVYREGGGTIGIVDYTNYDDMKYAIRKLDDSEFKNAFSKAYIRVKEYDGKRSRSYSRSRSRSRGRSYSRSRSPSKSPKGKSSRRSASRSRSRSASSRSRSESKGRSPSR

SEQ ID NO: 51046 - protein, 485 aa, Oryza sativa
MRPTAMLRWPAAAAALALVFLLLIAAAPPAAAFYLPGVAPNDFQKKDPLQVKVNKLSSTKTQLPYSYYSLPFCKPDTIVDSAENLGEVLRGDRIENSPYVFEMREPKMCQIVCKATISDKQAKELKEKIEDEYRVNMILDNLPLVVPITRPDRDDVVFQGGYHVGVKGQYAGSKDEKYFIHNHLIFLVKYHKDENSDLSRIVGFEVKPFSVKHQFEEKWNDANTRLSTCHPHANKIIINSDTPQEVEAGKDIIFTYDVGFEESDIKWASRWDTYLLMTDDQIHWFSIVNSLMIVLFLSGMVAMIMLRTLYRDISRYNQLETEEEAQEETGWKLVHGDVFRPPTNSDLLCVYVGTGVQFFGMLLVTMMFAVLGFLSPSNRGGLMTAMLLIWVLMGLFAGYASSRLYKMFKGSEWKSITLKTAFLFPGIAFGIFFVLNALIWGEKSSGAVPFSPQCLPWCFFGSVSRFHLSLLGAILVSRNLPLRLQ

SEQ ID NO: 51047 - protein, 453 aa, Oryza sativa
MVGDLSSLLAAASSASPVVLAPSKELHGVHLPMPLQGKRPPLQPQDAAVHIEAAAAAAAAAFQGQVMVPGHAHAGAPAAFQAFAVPDMAALIDVQDSHPDSVQLSLGIAEQCSRQEKILKFLRSGSDVKELDVSLLTELTGHQTLPINLGTQPYIPDDKLSALPISMASQPYIPDDKLSIYEFELDEPQQYLPENQLVIPDPLVEFFQSHGSALTIDQNRRILFNGNGDDMRYLLSIVLAFNMSKREISSCKTAYLVPYFERKRRSRASSHASNSKLASTAVDASKSTANGKSKSSSRKKQKSKNIKERDLYPKNYFHASEAFLSMLLDKDNSSSTIHSLKKAGPEISELLTKCSIGIAGTGLAVLLSVVCKMATGMKSPIAATRLVNTGVGLGLFWLSWAVNGLRDTITSIFRSPGDMNLKDEEVAVRIQKSMNDILFRAITILAITAFKFA

SEQ ID NO: 51048 - protein, 399 aa, Oryza sativa
MLSARAAATAAAAAASPLWKRGEGGSSGSGSGCTSCREVRRRAAAVRVRAAAPRRVEAVAMESAAETEKKEEVAAAGGGVEDMATEEVPVTPWAFSVASGYTLLRDPHHNKGLAFSEKERDAHYLRGLLPPAVVSQDLQVKKIMHNLRQYSVPLQRYMAMMDLQERNERLFYKLLIDNVEELLPVVYTPTVGEACQKYGSIFRQPQGLYVSLKDKGKVLDVLRNWPERNIQVIVVTDGERILGLGDLGCQGMGIPVGKLSLYTALGGVRPSACLPITIDVGTNNEQLLNDEFYIGLRQRRATGKEYHELMEEFMSAVKQIYGEKVLIQFEDFANHNAFDLLAKYSKSHLVFNDDIQGTASVVLAGLLSSLKVVGGTLAEHTYLFLGAGGWNWYCRTHCS

SEQ ID NO: 51049 - protein, 218 aa, Oryza sativa
MSFLEQATERKAPPPARLGSITKLTAASSSFANLFSTFLGPVSSPEPRPRRSFDGGATGVGLGIVAAMSHACLTTEAEPIAIGAAARRRAREEAELSESYTCVITHVAGVDGASGSVRKRVYFGFGDGGGGWLVEADEEPAPAADFLSRCFLCDKRLDGLDIYMYRGEKAFCSSECRCHQMLMDDHADNCGSEALKANDYSASPHSAPLPFSLSVAAA

SEQ ID NO: 51050 - protein, 258 aa, Oryza sativa
MRKKLGTRFPAARIKKIMQADEDVGKIALAVPVLVSRALELFLQDLIDRTYEITLQSGAKTLNSFHLKQCVRRYSSFDFLTEVVNKVPDLGGADSCGDDRALPRRRKALPNGSDPENEESRSSKMAVRSANISPRGRGRGRGRGRGRPPTKRKEVGYVQFEDESSMFADQGEALPGEETVPETIHGTESVPPSTHPPAEAPSAAEIPAPNPKVEEAKNDDHQPDWPMPDAIGNIGVGPSGFGHLTVQVDEDEDYDNED

SEQ ID NO: 51051 - protein, 297 aa, Oryza sativa
MEFWGLEVKPGQTVKCEPEDERFLHLSQAALGESKKGSDNAVMYVKTDDQKLVIGTLSADKFPQIQFDLVFDKEFELSHTSKTASVFFSGYKVSQPAEEDEMDFDSEEVEDEEEEEKIIPAPRANGKVEGKENEQKKQGKTDSSASKSKAAVNDDDDDDDSDEDDSEDEDLSPEDDDDDSSEDDSSEDDEDESDEEDTPKKPETGKRKVAEIVLKTPSSDKKAKIATPSGQKTGDKKGVHVATPHPAKQASKTPVNDKSKEKSPKSGGGSISCKSCSKTFNSEMALQSHSKAKHPAK

SEQ ID NO: 51052 - protein, 458 aa, Oryza sativa
MSEVVASAVVGEAVSRVSTFFVDKHKRKLSEEDGLERLEMAHIRMEAALEMSGKWPPVTDASLLRWRKKLKCASEECSQVMNRCKRRAMEDDEMEQQIRRCSFPRRIAHETRSFFSSFSGDKNVDSLITTSTIQRFERFADGAGEFLRFLQFGSIGSINYMLVDPLTGPLLAGKALQFENPPGISGYYLAARPLRFAERGVVACVFLQYKNHERPEENFLLGILIRVTASTNVVGIMARCSEKLTSNFKPVTEAVRQELAQFHQRGFYCFPFVASTDPEYSRIHQSETHRARPNPACCEEEHEHHGPRRSSDMVEPLGAFPEPVIKLVVQRHVSATRHKRTSSSSSYSCSCGHANMGCSGPTLLQVTAVFAPHASPEELPSGAKSVAVVAIDGREEQAVRTNVGWREMEELLPNAVDRLCHEAAAHEVFWRSGHGVAYLCVEKMGTEMARCRPTQWRV

SEQ ID NO: 51053 - protein, 439 aa, Oryza sativa
MLIWSSSLSNLLWITSTLLLSIFIPHWASDCKKEHTLVFETYRAAPRPLGNAVSYVNSAFLGHVSLDKSSGDNILSNLHLAFGAYGTKHAIRARKVEEYLTGKILSASVVLEAIRLLRETIVPVEGTTHPEYRVSVAVGFLFSFLSPLCKGVIESGKTLSISEDLVDTDNVHNKPLSSRRETLSDDEYTPVGDPIKKYKVEVQASGEAIYVDDIPAPKNCLYGEFIYSTQPLANVKSIKFKPSLASKKIITVVSAKDIPTGGRNIGSTFWFGDEEPLFGDPIAEFAGQVLGVVIAETQPYADMAAKQAVVEYTTDGLKAPILTVEQAVQSNSYFQVPPERAPKQVGDFSNGMAEADHKIMSEEVKLSSQYYFYMETQTALAIPDEDNTMTVYSSSQFSELAQNVISKCLGIPFNNVRVITRRAGGGFGGKVVRSLHVRI

SEQ ID NO: 51054 - protein, 412 aa, Oryza sativa
MDRGVLHKSSALVGEMGEGHGWWSVNNLRPPFVEQLHNPASLLLPSSTTTSTTPSSSSSPLHSFSSLLLSNHYPLPSTATTSTAAAPWHDTGSRHGQHLQDSWNHILLGGLASGEEGYNKNWEGQVLFPTTPAAAAAEADHGSNSYNNIYSTTTTSHGSSTSDDASQLAVAARPSSSPWGGIHGHHPHHNALQQQASSPRSSCITSTTSLGSNGVLEFSNNTSPRECISTASGAAFKKARTQEPSPAQATVKVRKEKLGDRITALHQLVSPFGKTDTASVLLEAIGYIRFLHGQIEALSSPYLGNGGSSSNGGGGGGGGSNSKLQHQPEASRVQGERNSIFPEDPGQLLHDNAVKKRGQPDQDESCEEAKTMDLRSRGLCLVPVSCTVDVGVDAGPADYWAAPPAFGIGFGR

SEQ ID NO: 51055 - protein, 862 aa, Oryza sativa
MSSGLKKKGLEWDLNDWRWDSNLFLATPSNASPSKCSRRELGRAEGEIDFGVVDKRRRVSPEDDDGEECINAATTNGDDGQISGQRGRSSEDEMPRQGTCSSSGPCCQVDGCTVNLSSARDYNKRHKVCEVHTKSGVVRIKNVEHRFCQQCSRFHFLQEFDEGKKSCRSRLAQHNRRRRKVQVQAGVDVNSLHENHSLSNTLLLLLKQLSGLDSSGPSEQINGPNYLTNLVKNLAALAGTQRNQDMLKNANSAAIASHTGNYVAKGNSLHDSRPHIPVGTESTAEEPTVERRVQNFDLNDAYVEGDENRTDKIVFKLFGKEPNDFPSDLRAQILSWLSNCPSDIESYIRPGCIILTIYMRLPNWMWDKLAADPAHWIQKLISLSTDTLWRTGWMYARVQDYLTLSCNGNLMLASPWQPAIGNKHQILFITPIAVACSSTANFSVKGLNIAQPTTKLLCIFGGKYLIQEVTEKLLDDTKMQRGPQCLTFSCSFPSTSGRGFIEVEDLDQSSLSFPFVVAEEDVCSEIRTLEHLLNLVSFDDTLVEKNDLLASRDRALNFLHEFGWFLQRSHIRATSETPKDCTEGFPAARFRWLLSFAVDREFCAVIKKLLDTLFQGGVDLDVQSTVEFVLKQDLVFVAVNKRSKPLIDFLLTYTTSSAPMDGTESAAPAQFLFTPDIAGPSDITPLHIAATYSDTAGVLDALTDDPQQLGIKAWKNARDATGLTPEDYARKRGHESYIEMVQNKIDSRLPKAHVSVTISSTTSTTDFTEKHASQSKTTDQTAFDVEKGQQISTKPPLSCRQCLPELAYRHHLNRFLSTRPAVLSLVAIAAVCVCVGLIMQGPPHIGGMRGPFRWNSLRSGPK

SEQ ID NO: 51056 - protein, 363 aa, Oryza sativa; identical to SEQ ID NO: 31653

SEQ ID NO: 51057 - protein, 515 aa, Oryza sativa; identical to SEQ ID NO: 47222

SEQ ID NO: 51058 - protein, 549 aa, Oryza sativa; identical to SEQ ID NO: 28944

SEQ ID NO: 51059 - protein, 393 aa, Oryza sativa
MERLSSVRNPAEEEEEEIVEVGTADAGEGSSADHGKLRKTLMLLFQLDDSCSGSAVGAAHPADAKDPQVADFEVDPGGGNRGAKWKGGAWLRSILPRKGMRWSRRKEPPRPPRPRPVDPDGAGDNAQVERKPSFRRSCEWMVCREPVRGSGSLEPPRHSWDGSMVGRALACSFACLEEPQPPPDGERRAQRSNAEEEAGESRAGVAESRNGDHLADAGGEGRHLSGRRNCSDTGPEMTMSGVGRRRSNRWSRVWDRSITSPLKEFVRKGEHVLERSLSESRKDTRRGRNGETGDMDCEIQPGRNGHGSVRASQGSFRSSQAVANGDVHNFRTDWLRNKECKIGRSRSVHYTSPGNLDNGMLRFYLTPMRSARTANRGRRRNSRLFSRGLFGFI

SEQ ID NO: 51060 - protein, 371 aa, Oryza sativa; identical to SEQ ID NO: 31772

SEQ ID NO: 51061 - protein, 383 aa, Oryza sativa
MLTIASTFLYALISNRVLLMHVAAEQEGLFCEPFPGSSWVLPGDFPHNNPQGLHIGAPESYVNMLKNNVVRNDDPGSVSASSLPPYVYLHVEQFRLKLSDNIFCDEDQLILNKFNWMILKSDSYFAPALFMTPMYEKELEKMFPQKESVFHHLGRYLFHPTNKVWGIVSRYYEAYLARVDEKIGFQIRIFPEKPIKFENMYDQLTRCIREQRLLPELGTAEPANTTAEAGKVKAVLIASLYSGYYEKIRGMYYENPTKTGEIVAVYQPSHEEQQQYTSNEHNQKALAEIYLLSYCDKIAMSAWSTFGYVAYSFAGVKPWILLRPDWDKERSEVACVRSTSVEPCLHSPPILSCRAKKEVDAATVKPYVRHCEDVGFGLKLFDS

SEQ ID NO: 51062 - protein, 235 aa, Oryza sativa
MGDSQYSFSLTTFSPSGKLVQIEHALTAVGSGQTSLGIKAANGVVIATEKKLPSILVDETSVQKIQSLTPNIGVVYSGMGPDFRVLVRKSRRQAQQYYRLYKETIPVTQLVRETAAVMQEFTQSGGVRPFGVSLLIAGYDDNGPQLYQVDPSGSYFSWKASAMGKNVSNAKTFLEKRYTEDMELDDAIHTAILTLKEGYEGQISANNIEIGVIRSDREFKVLTPAEIKDFLEEVE

SEQ ID NO: 51063 - protein, 77 aa, Oryza sativa
MFHVQSVFPLYSSHKLSYDETLAFLFKIKFMRLFNCGLIFAIYIGQPYGAPWCVRVMVIVFLQLHYASLFKSYDRCL

SEQ ID NO: 51064 - protein, 567 aa, Oryza sativa
MASSHIILPPDDDDEEQRRLEEEEDEDPWARSGPPPAAPEHAMKAALPFSATCVRISRDSYPNLRALRNASSVSLADAAYVKISEGDFGYVLDDVPHLVDHLPDAPTYPNPLQDHPAYSTVKQYFVNEDDTVPQKVVVQKNSRRGVHFRRAGPRQKVYFESDEVKACIVTCGGLCPGLNTVIRELVCGLAHMYNVSKIYGIQNGYKGFYSSNYLTLTPKSVDDIHKRGGTVLGTSRGGHDTKKIVDNIQDRGINQVYIIGGDGTQKGAYEIFKEIRKRGLKVSVAGIPKTIDNDIAIIDKSFGFDTAVEEAQRAIDSAHVEACSAENGIGLVKLMGRYSGFIAMYATLASRDVDCCLIPESPFYMDGEGGLLQYVERRLKENKHMVIVVAEGAGQDLIAKSLSTSEQQDASGNKLLLDIGLWLTHKIKDHFKSKKMEMTIKYIDPTYMIRAIPSNASDNVYCTLLAHSAIHGAMAGYSFTVGNVNGRHAYIPFYRVTSTRNKVKITDRMWARLLSSTNQPSFLSQKDIDEAKENDRTANKPPLPTGLSHHVANSFDQSASSSSNSQI

SEQ ID NO: 51065 - protein, 129 aa, Oryza sativa
MGKDFAPSFSSSLLPHSGASPTLLAPLPPILLTVTAPPMPLLAPNRIALPPCCYRGARSAGGKVMPAGSVSHDLPAGVFGRSEARAITGGTSATSTTVVSPWQRTPQGKALLSHPLLYSHSPSHRDPDP

SEQ ID NO: 51066 - protein, 454 aa, Oryza sativa; identical to SEQ ID NO: 36538

SEQ ID NO: 51067 - protein, 346 aa, Oryza sativa
MSDSALKDLNLAQSAELEKTKDSSAKSCITKPVLNGNKCNNTEENAPPVLPDAVTNGCEAGNADVEYIDSESLTDLEDAGATLSTLVARLDSKDWVMTCEALNNVRQLAIFHKDRLQELLEPLVPLIVKSVKNPRSAVCKTTLMTCADIFKAYGDLMVDSIDPLLVQLFLKSSQDKRFVCEAAEAALISMTSWIAPSALLPKMQPYLKNRNPRIRAKASMCFSKSVPRLGVEGIKEYGMDKLVQIAATQLSDQLPESREAARKLALELQAFYEKSQASSSGEVDDAPATSPDADADAGAESWEAFCQSKLSPLSAQAILRVTSTTKEGVAVGVTSTPPKEGVTVGC

SEQ ID NO: 51068 - protein, 500 aa, Oryza sativa
MDVNQLWLLWATLAVSLLYYISNRRRRVGGRRRCPPGPMPLPLVGNLLNLRGHLPPALARLARTYGPVMMLKMGLTTTVVISSGDAAREAFTKHDRHLAARTVLDVTRSLDFADRSMIWLPSSDTVWKTLRGVTAASIFSPRGLAALRGVRESKVRDLVGYFRGRAGEVVDVRHAVYGCMLSLVSSAFFSVDVVDLSAESENEFRQSMTFLMEVVSKTNVSDFFPFLRPLDLQGWRRLTERYLGRVTCFLDDVIDRRFAADASANRHGDFLDSLLDLVSTGKIVGENVTTILLDVFIAGSDTITATVEWAMAELLRNPSEMAKVRAEMDGALGGKKTVDEPDIARLPYLQAVVKEAMRLHPAAPLLLPHRAVEDGVEVGGYCVPKGSMVIFNVWAIMRDPAAWERPEEFMPERFIRRGDDDEVDFWGKTFEFIPFGSGRRVCAGLPMAERVVPFMLASLLRAFEWRLPDGVSAEELDMRHRFTIANFRAIPLKAVPVVVS

SEQ ID NO: 51069 - protein, 318 aa, Oryza sativa
MASCLSVLLLLCLALAGSVSGQQLSATFYSRSCPRALAIIRAGVRAAVAQEPRMGASLLRLHFHDCFVQGCDASVLLNDTANFTGEQGANPNVGSIRGFNVVDNIKAQVEAACKQTVSCADILAVAARDSVVALGGPSWRVLLGRRDSTTASLALANSDLPPPSFDVANLTASFAAKGLSQADMVALSGAHTVGQAQCQNFRDRLYNETNIDAAFAAALKASCPRPTGSGDGNLAPLDTTTPTAFDNAYYTNLLSNKGLLHSDQVLFNGGAVDGQVRSYASGPSRFRRDFAAAMVKMGNIAPLTGMQGQIRLVCSKVN

SEQ ID NO: 51070 - protein, 485 aa, Oryza sativa
MDRPNLAVAVVGLPAVVAATLPAPSWQFFDLFLPAGPSHRSSGGGFGKWVLMNHEEYVEKKSLYAMKAAGDIGGKTIDASLSAAEEAKVTWVVDPKGTPGDTTFTTIAAALEKVPEGNTKRVILDLKPGAEFREKLLLNITKPYITFKSDPANPAVIAWNDMAATRGKDGKPVGTVGSTTVAVESDYFMAYGVVFKNDAPLAKPGAEGGQAVALRLFGTKAAIYNCTIDGGQDTLYDHKGLHYIKDSLIMGSVDFIFGFGRSLYEGCTIVSVTKEVSVLTAQQRTKTIEGAIESGFSFKNCSIKGQGQIYLGRAWGDSSRVVYSYTDMSKEVVPIGWDGWNIAKPESSGIYYGEFKCTGPGSDAKKRVGWALDLTADQAKPFIGTHYIYGDSWILPPPDGKSAASTSTASKSTASAIPRNSTAPATATESNSTAPATPSNSTAPVTASNSTAPATASSSNPPATKSYSGPPATPSASSTPAKASR

SEQ ID NO: 51071 - protein, 276 aa, Oryza sativa
MAAAAAMAASRRLLHLRPELGLRLRSRALIPYPSWTKAMGRCRYEPSPRRLSSCRRAAKNERPWRSSSNEQLTDGDGTAKYMGRNFPDEFAQLSLEEEESDDEAHGISETMVKDVEKAAVELLAGRAFTVSDLRKKLRAKKFPDNAVDSVIADFKSRGLLNDGYYAESFSRSRWLSSTWGPKRIKQALRQKGVQDAEVDQATRRVFQDGHSNQTMYGISEDSMDHLFEQAAKQWQRGQSLPLENRRARVVRWLQYRGFNWAVTNAIVRKLEAQKPP

SEQ ID NO: 51072 - protein, 184 aa, Oryza sativa
MQQEHRHRLLDAGLRRWQVGEIAARIAHLYYSQYQRTSDTALLSEAFVFYHAVLGRGYFLADAADHLFAPTKHLRFLARFLLVALLLARRADTVPRLTTHIRTLLDDSKKTLQEADYKEWKHVVQEIARFLRADSPFINMRPLRYSYAFDPPPDTLPTVPPTVKKRGLVLSDAMLCSYYQNEVG

SEQ ID NO: 51073 - protein, 136 aa, Oryza sativa
MPPPTWGARRAPAAVPTWVTWEGSCDCCGFTEDCKAPYIAGMRAPYERIEVGLRALHGRHRRRAWLHLFAHFAGGGARPRAAPSSVASDESPPRHCWRPRARTGLIFVVFLLLLRRRLAGPVTGRRREGIDWKGKI

SEQ ID NO: 51074 - protein, 216 aa, Oryza sativa; identical to SEQ ID NO: 35401

SEQ ID NO: 51075 - protein, 248 aa, Oryza sativa
MGRGRVELKRIENKINRQVTFAKRRNGLLKKAYELSVLCDAEVALIIFSNRGKLYEFCSGQSMTRTLERYQKFSYGGPDTAIQNKENELVQSSRNEYLKLKARVENLQRTQRNLLGEDLGTLGIKELEQLEKQLDSSLRHIRSTRTQHMLDQLTDLQRREQMLCEANKCLRRKLEESNQLHGQVWEHGATLLGYERQSPHAVQQVPPHGGNGFFHSLEAAAEPTLQIGFTPEQMNNSCVTAFMPTWLP

SEQ ID NO: 51076 - protein, 443 aa, Oryza sativa
MAEQRGNMLMKKYEMGKLLGQGTFAKVYHARNTETSESVAIKMIDKEKVLKGGLMDQIKREISVMKLVRHPNIVQLYEVMATKTKIYFVLEHVKGGELFNKVQRGRLKEDAARKYFQQLICAVDFCHSRGVYHRDLKPENLLLDENSNLKVSDFGLSALADCKRQDGLLHTTCGTPAYVAPEVINRRGYDGAKADIWSCGVILFVLLAGYLPFHDKNLMDMYKKIGKAEFKCPSWFNTDVRRLLLRILDPNPSTRISMDKIMENPWFRKGLDAKLLRYNLQPKDAIPVDMSTDFDSFNSAPTLEKKPSNLNAFDIISLSTGLDLSGMFEESDKKESKFTSTSTASTIISKIEDIAKGLRLKLTKKDGGLLKMEGSKPGRKGVMGIDAEIFEVTPNFHLVELKKTNGDTLEYRKVLNQEMRPALKDIVWAWQGEQPKQQQQPTC

SEQ ID NO: 51077 - protein, 787 aa, Oryza sativa
MKSTAAGESVFRVAFEWDESQGIPGAVVVTNSNRSEFFLKTLTLDGVPGKGTVVFVANSWIYPADNYQYERVFFANDTYLPSKMPAPLIPYRQEELNILRGDGKIGPYKEHDRIYRYDYYNDLGQPDKGSKLVRPVLGGSQELPYPRRGRTGRAPTKTDPNTESRLPLLDLNIYVPRDERFGHLKMSDFLGYSLKAIVEGVLPIIRTYVDTTPKEFDSFQDIMELYEGGLKVANASALAEIKKRVPFELIKSLLPVAGDQVLKLPLPHVIKEDKFAWRTDEEFAREMLAGVNPVMIKRLTNFPAKSTLDPNVYGDHTSKITEAHIKHNMEGLTVQNALKGNRLFILDHHDHFMPFLDKINKLDGNFIYASRTILLLKDDGTLKPLAIELSLPHPDGQQHGAVSKVYTPANTGVESQIWQLAKAYASVNDSAWHQLISHWLNTHAVIEPFVIATNRQLSVVHPVHKLLSPHYRDTMNINALARQTLINADGIFEKTVFPGKYALEMSSVVYKNWKFTEQALPVDLVKRGVAVPDPTSPYNVRLLIKDYPYAVDGLVIWWAIERWVGEYLAIYYPNDGVLRGDEELQAWWREVREVGHGDLKDQDWWPKMDTVQELTRACTIIIWIASALHAAVNFGQYPYAGFLPNRPTVSRRPMPEPGTEEYAKLERGGDEADLVFIHTITSQFQTILGISLIEILSKHSSDEVYLGQRDTPEWTSDAKALDAFKRFGSRLVDIENRIKDMNGNSALKNRNGPVKMPYMLLYPNTSDVTKEKGQGLTAMGIPNSISI

SEQ ID NO: 51078 - protein, 286 aa, Oryza sativa
MLAMGLTLELREFLALLRERPLSILFGCAAQYTIMPAFGAIVSRVLGLSPPISVGLILLGCCPGGTASNVVTLVAKGDVPLSIVMTVCSTLGAVFLTPLLTKILAGAYVPVDAVKLSLSTLQVVVAPILLGSSIQSAFPSVVKFVTPFAPLLAVLTSSLLACSVFSENFVRLRSTIADASYGNGGLFSGDIGVVMLSVFLLHCAGFVVGYTTAAIGGFKERQRRAISIEVGMQNSSLGVVLATAHFSSSLVALPAALSAVIMNIMGSTLGLVWQFMTPPGSKNENR

SEQ ID NO: 51079 - protein, 722 aa, Oryza sativa
MPRRRGTPLPTILLLLAFVGGACGTEILSKSRLESCSHDSDAGGRLKCDRKLVVDLAVPSGASGGEASLVARVAGVEEENDTPSATKSIRDPPVITVSKSATYALYALTYLDRDVAYRPDEKYVKTHKCEPYAGAKVVGECERLWDEKGNVIKQTEPICCPCGPHRVQSKCGDIWSKLTKGKANTAHCVRFPGDWFHVFGIGAWSLRFSIRVQVKKGSSVWDVVVGPENKTVVSGDNFLRVKVVGDYTGYTSIPSFEDNYLVTPRKGTGSSQPQDLGNEHSKWMILDRVRFTLDGLECDKIGVGYEAYRNQPNFCSAPYGSCLGNQLWNFWEYDKRRIDNSQLPLYIVEGRFQRINQHPNAGAHTFSVGVTEDLNTNLLIELMADDIEYVYQRSPAKIIDIRVPTFEALSQVGIANVTTKNIGKLESSYSLTFKCSSGISPVEEQLYTMKPDEVIARSFELRSTTDQAAMHQCEAILKASDFSELDREGYRFSTAATVYNNGAQIGPTNDHKKGGFWDSIKALWRNLIDFLTGRLCWTKCPRLFDFGCHIQYVCIGWILLLLLIPAAVVFLWLLHQEGLFDPLYDWWGLEPDDDYRARRRHQKGRHHRHHHDHRHRHGHSHGDHHHHYHGGHHQRRRHHHPPAWDVEGHHHDRQQHSHEAGRNHHRGYGEVVAAGAAPLRLDRASRPGQTEVDAVVEYRERRSRHERHGGHGHRDGHYSPSV

SEQ ID NO: 51080 - protein, 361 aa, Oryza sativa; identical to SEQ ID NO: 36911

SEQ ID NO: 51081 - protein, 180 aa, Oryza sativa
MGGRKDNHDSSNADKGFHGAYPSGYPGAYPLMQGYPNSPGQYPTPGGYPSAPPGQYPPAGGYPGAQYPPSGYPPSQGGYPPGAYPPSGYPQQPGYPPAGYPGHGHGPPMQGGGHGAGASGYGALLAGGAAVAAAAVGAHMVRPGGGGGHGMFGHHGGKFKKGKFKHGKYGKHKKFGRKWK

SEQ ID NO: 51082 - protein, 433 aa, Oryza sativa
MADTRGSTSSGGGDDRGREGHDDFTGGGQYNRYHRILEAVPSPLVRRENGVHHQYPTGLIHHPSSTMPVAPCSYVPRYTMVPTSAMLPLQHHHRQLQISQEDFQDRVPSNNVAAPHLPSNFQDLRPMCNGPPFMSYGQTASNRNVLYQNLTPYSFNAWASNNMPRNPVYTSYHPTAIEDPHATPFHINNHDTDQGFFTVSTSFRVDQSFVHAPSPFPPVSSSSRSFSSAQISNGPIDAKKAKKSDIKDQPIVLRRSDTESEKNDELDQTPASEPSSMSHNSANSTIRFNCREYRVILRKELTNSDVGNIGRIVMPKRDAEAHLPALHQREGVMLKMDDFKLETTWNFKYRFWPNNKSRMYVLESTGGFVKQHGLQTGDIFIIYKSSESEKLVVRGEKAIKPNVIMPIVDCSCKNDLNNSEECGFAISLLTKKT

SEQ ID NO: 51083 - protein, 75 aa, Oryza sativa
MPCKSSCCCTRPRTGRSSCSGSARTCRGPSCQAMTRSGDRPLRISALPFSGILIARCWDLQARTHRGTGTPGRPP

SEQ ID NO: 51084 - protein, 100 aa, Oryza sativa
MSRRGTRRQRDGNGDRGAASSSSPSTSPSHGPAGGWASQIRCCGAWCGGRTSVAVMLGDGAPVLLGRRRRRRPPSSLLLMLFFFFFFHVQNACMPCSLAC

SEQ ID NO: 51085 - protein, 52 aa, Oryza sativa
MSRVFRELRVPRGDPEESAAGYISWLNGACAQLEGIGQHIDEALKQECRRSS

SEQ ID NO: 51086 - protein, 758 aa, Oryza sativa
MSAEIKRYQEDKSILKQYIENDQVIDGGKVYKVQTEVIPPLPDNHQPMTRPIIRLQEKNIILTRINPLIRDTSVLVRLRPAWEDLRSYLIARGRKRFEVYVCTMAERDYALEMWRLLDPDSRLINSVQLTDRLVCVKSGSRKSLLNVFHDGSCHPEMALVIDDRLKVWDEKDQCRVHVVPAFSPYYSPQAEANFSVPVLCFARNVACNVRGGFFKEFDEVLLPRISEIHYEDEINDFPSAPDVGNYLITEDENAAILNVNKDPLAFDGMADAEVERRLKEVSCSVQAVNPIPTNADVMPVAPNQQLITSSVPEAPSLGMIPLNNDQGPQPPSSWPVAQSAPVDPSQSSPAREEGEVPESELDPDTRRRLLILQHGQDTRDPAPPCPAGSPVQTSVLPVQSHGNWSHVEDEMNPRSLNRTSTGFHLESDDINYDKKQPHNPPYFPDEDNLITSDRYNRRIHRYPSQLPHSEDHHMLNRSSIAYRSFPGEDMGNRFGPSNHRSSKIEPGHQFVQNAETSAGVLEEIAVECGFKVEYQSTLCSTAELQFSIEVRILGEKVGEGIGKTRKAAKRQAVNMSLRNLAEKFLTSDPDKMMILKENGFSSNSNSFRYSGGSRDDTSPVASTSNESRYMGERVDTLRKPAGSVAALKELCTVEGYNLVFQEQPSRPRGSSGKEAYAQVEIGGQILGKGVGATWEQAKLQAADEALGNLKSMLGIFAHKSSGFQRSSVSNFNRFKPDFQRSLQTIPSGWDSRNNGRVL

SEQ ID NO: 51087 - protein, 392 aa, Oryza sativa
MDGECRDAYGFAVRPQHLQRFREYAKIYKEEEEERADRWKDFLDRLAESADDITTSISPSKEDSAAGDVNGGEHLDGAENLENSNRGGIKCNNEEEEGEEDAEKSDTPENSKEIDGNNQSQEANGEADDINDVSANSENLKQESIANSVESDKAPEELKEVSGCSEELLNDENGDSEGLKDSHGALEGLGEANNDNSEKLEELFLDKGLLDELKPIRVESGKRVRASIRIIEKMMSSRVGKIRNTANDMCGNGEAQLASIEEEERAADKSCRGDPAEESSNPDKVEQAQDREQGDSASAALEGGNGESYFPWREELESLVRGGVPMALRGEMWQAFVGVGARKITGYYNKLLDEGTEELDEKNPEDQELKDQTNAQKKPPEKWKGQIEKVAL

SEQ ID NO: 51088 - protein, 224 aa, Oryza sativa
MAGRGGVVGSHWDGMVPPECAPNPSILRLSPQLRWEEAHEPLHNGIDSNRTCGVGPGMSFANALLRSGQFPVIGLVPCAVGGTRMADWAKGTDLYSDLVRRSRVALETGGRIGAVLWYQGESDTVRWADANEYARRMAMLVRNLRADLAMPHLLLIQVGLASGLGQYTEVVREAQKGIKLRNVRFVDAKGLPLEDGHLHLSTQAQVQLGHMLAQAYLNYGTSTL

SEQ ID NO: 51089 - protein, 8 aa, Oryza sativa
MARLEQRA

SEQ ID NO: 51090 - protein, 697 aa, Oryza sativa
MAMMNRTRDLLMEGFEGLVREGSFSWALPRRGASPVDDADDPDSSSSSSSGKQPSISGLSPKANAVVSRCSRVLGTSTDELQYDFDMQASDSIKQPRNYARNFLEYCCLRALAHASQVAGYLSDKSFRRLNFDMMLAWEVPSSSSELTVKVEVDNTVSLEAFSRIAPAIPTITDVVTCSNLFDVLSSSSGGRLTFPVYDKYLTGLDRAIKKMKGQSESSLLSAQRSQRGERIVEVDGTLTTQPVLEHVGISTWPGRLTLTDHALYFEALRVVTYDKPKAYELAEDLKQSVKPELTGPWGSRLFDKAVMYKSTTLTEPVIIEFPELAGHFRRDYWLAIISEILYVHRFVRKFDISGVDKEETILKAVLSIMRLQAIEELAIPVSNRFESLLMFNLCDKLPGGDVILETLAGSISSRRSTQVNQPGTSSGRHSMSPFTVLSNLGVVSPINKGERLFVGEIVVGEMSALQKVVNESMNNYKKVELAQATVDGVKVDGLDTNLAVMKELLSPVSELWRFLVLLASWDEPIKSMVFCFSSSYIIIRGWLVYFLVLVLLFSAAFMFLTRLTSHGKPMTEVKVTSPPPMNTMEQLLAVQNAISKVEELVQDANIVLLKIRALLLAFPSQATDRAILALVVMALSLAFVPTRLLVLMMFLEAFTNHSPPRRASTERWTRRLREWWFSIPAAPVVVEKDKEDKKTK

SEQ ID NO: 51091 - protein, 85 aa, Oryza sativa
MADLLGDPTWPQLHRRPCTDTPWPGLQCELAPDDARHLRATRLHFGPDVATPPCRPGARLAAPVLLGLPHLKTLSLFGCFVVADC

SEQ ID NO: 51092 - protein, 107 aa, Oryza sativa; identical to SEQ ID NO: 44743

SEQ ID NO: 51093 - protein, 239 aa, Oryza sativa; identical to SEQ ID NO: 49666

SEQ ID NO: 51094 - protein, 312 aa, Oryza sativa
MPCGYGVPIISTLDFTARRGTTFASHQYDTGPFYDEIRRRLSFDFTKSQLVEKLRRLKKKYRLCAARMASSPHAAAAGFAFRTPHEGAIYDLARHIWPPALKRDGTASDDDDINPAAAAATAAVMTPVAMEDGFGGSAPTPTPTPRGRGGRRVRRRMAQEQEAAALPSAPALTSTDGAHQEPLVAAMENTLPQIAQLPPVSETEPMPVIANGANEEAVRSVLSRLLKEFITSFAVVGQTGPGMGLNMGFGGAGLNADIAGLGFGIAGLNPGVPGADRWRQHQILELEVYLKRIELVREQVTAALDELRSSEG

SEQ ID NO: 51095 - protein, 445 aa, Oryza sativa
MATTAAASPPAIATALSALLRRQRRRSSRCVGASHARCLAADANAEAVAPSRRGGHGGTRLEEAVPAGEGRSRIDAWISARLGGGGVSRARIQASIRAGLVVVNGRPVSKVSHMVKGGDIVSCTVLELQPLRAEPEDIPLDIVYEDDHLLVVNKPAHMVVHPAPGNANGTLVNAILHHCKISTFTCLARNSIDDECPDSSDDDIDVFDIDQFTTGEVSSEVREALVRPGIVHRLDKGTSGLLVVAKDEHSHAQLAEQFKLHTIRRVYISLTCGAPNPNSGRIEVPIARDPNNRIRMIATPGSGHRYARHAASRYKVREVFAGGGSALVEWRLETGRTHQIRAHAKYLGIPLLGDETYGGTKSMALSLLRPRTPSRYHCDLSNMISKIDRPCLHAALLGFKHPHSGKILEFSCPPPDDFTEVLNELHQVTLASNGNSGGGVARICD

SEQ ID NO: 51096 - protein, 946 aa, Oryza sativa
MSISMKDVDPAFRGVGQKDGLEVWRIENFKPVPVPTSSHGKFYMGDSYIILKTTALKNGSFRHDLHYWLGKDTSQDEAGTAAILTVELDAALGGRAVQYREVQGGETEKLLSYFRPCIMPQPGGVASGFNHVEVNQQDHVTRLYVCQGKHVVHVKEVPFVRSSLNHEDIFILDTANKIFQFNGSNSCIQERAKALEVVQYIKDTFHEGKCEVAAVEDGKLMADTEAGEFWGLFGGFAPLPKKTSSEDNEDDKETVTKLLCFNQGTLEHISFESLEHELLETNKCYLLDCGAEMYVWMGRGTSLQVRKGASEAAEKLLIDENRKGSNVIKVIEGFETIMFKSKFNKWPPTPDLKLSSEDGRGKVAALLRSQGLDVKGLMKAAPEEEEPQPYIDCTGHLQVWRVNGDGKTLLSSSDQSKLYTGDCYIFQYTYTGDDKEECLIGTWVGKKSVEEDRTSAISLASKMFQAAKFQAAQARLYEGKEPIQFFVIFQSLQVFKGGLSSGYKNFIAVNGTDDDTYVEGGLALFRIQGSGSENMQAIQVDAVSSSLNSSYCYILHNGNTVFTWTGNLTTSLDNDLVERQLDVIKPDLPSRSQKEGRETDQFWELLGGKCKYSNKKIGKENESDPHLFSCILSKENLKVKEIHHFTQDDLMAEDIFVLDCRTDLFVWVGQEVDAKLRSQAMDVGEKFLLHDFLMENLSQDTPIFIVTEGSEPQFFTRFFTWDSAKSLMHGSSYQRKLAIVKGGATPSLDKPKRRTPAFSGRNAGQDKSQQRTRSMSHSPERHRIRGRSPAFTAIASAFENPSTRYLSTPPPAVKKLFPRSGGSELPKTSSKQSAINALTSAFEGPTKSTIPKSVKASPEAEKAIQEEGSTIGESENEPEDDENSTIYPYERLTTTSDDPAPDIDVTKREVYLSSVEFTEKFGMTRASFKNLPKWKQNRLKSDLQLF

SEQ ID NO: 51097 - protein, 120 aa, Oryza sativa
MQSEHLIAYLAKSLNSMHQKLSKREFLALIMVVYCWRPYLQKVEFVIRTCSHVIYKTISFCMTCPQNAMTKPNELQFMIQCKKVERKECRSMPWLVLPHHLQSKLSQNANRVCLQERTAA

SEQ ID NO: 51098 - protein, 375 aa, Oryza sativa
MIPNDFLCPITLAIMRDPVIVATGQTYERRSIQKWLDSGERTCPKTRQRLSHMSLAPNYALKNLILEWCDKNKVELQKREPEPVAEQDDEHQRGAEDIPSLVEGMSSIHLDVQRKAVKRIRMLSKECPENRTLIADSGGIPALIGLLACPDKKVQENTVTSLLNLSIDESNKRHITKGGALPLIIEILRNGSAEAQENSAATLFSLSMIDENKLTIGRLGGIAPLVELLQNGSIRGKKDAATAIFNLVLNQQNKVRATQAGIVPALLKIIDDKALNMVDEALSIFLLLSSNAACCGEIGTTPFIEKLVRLIKDGTPKNKECALSVLLELGSKNKPLLVHALRFGLHEDLSKIAKNGTSRAQRKATSLIQLARKCY

SEQ ID NO: 51099 - protein, 115 aa, Oryza sativa
MLGGSCSIYAHRHRILLHVTNSMHLLLTRSHRPSPTLWQHTLARKQIAARGVCILVVRRLLSALAQSCGCWLCASPITPPSGKHSKKKTQTGDQPSDLVGSLVHRSDRRVSRFRC

SEQ ID NO: 51100 - protein, 258 aa, Oryza sativa
MPIASKLVYFQRRRPSPAPPEPEPEPPDPRRRPCRAGAGASAARRRKPGQEHVPGSKRDTSKGVASAGNITGQAGSTGSSSRLNRSVSDHGRLPDSVQQARERLLQRLNSVDLSGRRQNTSLSSETIHGGVAPGVSTTADSIFSSLTSCFHTDVSIAPCKLQESTAETFNTADKHTFIAHCSEPAPTQEVASCRVTDDDELAGPSTECSICLERCGDADGLLELRCKHIFHSACLERWLRSRSDCPYCRASVLLTAEG

SEQ ID NO: 51101 - protein, 175 aa, Oryza sativa
MSRSGAMDLASGLGGKITKDEVKSAVDEYEKYHGYYGGKEEARKSNYTDMVNKYYDLATSFYEYGWGESFHFAHRWNGESLRESIKRHEHFLALQLGVKPGMKVLDVGCGIGGPLREIAKFSLASVTGLNNNEYQITRGKELNRVAGVSGTCDFVKADFMKMPFSDNTFDAVYAH

SEQ ID NO: 51102 - protein, 309 aa, Oryza sativa
MDPSQEEPAPQVAAAEGAEPRRRRPGAAVRGALGVAAPFAASFLFSFVVGLAGLVLGGLSSTASVSMPSTCRILSTGVDLRSSKVCELGLLNYRAKHVFYPSSNRKFRCHDDYYWASVFEVEYTEYFSGQTSYAVAEAPKEALPLNCRPDFGVAWSTTLKFKVNESYSCRYTLGSSKADIYSDRLFNCTSEEPSTIEMLKRIFVLLSKSYMLEDFNSIGMLGYVVAGVVAGILSALLITILLRSLRGLVLAVVGSSVSKHSIRVFACRLKRACLLVAYVSVVGWITLQYSKMIGLKELLLDYEIMERFL

SEQ ID NO: 51103 - protein, 293 aa, Oryza sativa
MDDYWRIAGVLRRRMARAGDWKEWRPVYKALVVLEFLLTHGPDEVPRDFLPDVAALRDLRGFTHVDDRGFDWGACMQRRCDSVLSLLTDAERLRDARRRIRVSHSTHELVQQHGSPSSSSGSPSSASSRTSSQSHASSWSVASSDSPTMVCHCAAAADYRHDKKFDAYTADDDWMQHLQVHNTTTTLEYDDDHDHDHDCPNHPPLTTPRSWDAHDDHDCPNHPPHTTPRSWDAHVHDLSLLQRRGRPGTDATFCSRMLGAVNVSSRASGFQSLSQPERRSASKKLQRQLSMEY

SEQ ID NO: 51104 - protein, 392 aa, Oryza sativa
MAKERKRRQPADAPPPGDDDEGRDHRREKKPRKERPDPVLPSQIKNKDKRKEVHAKLKREKKAQKRKLARERGQAAQRAVELGEQPPEKLVPRTIENTREPDETVCRPDDQELFAGNDADEFNAVLKQQTTPKVLITTCRFNSGRGPAFIEELMQVIPNSCYVKRGTYELKKIVEYANNRDFTSLVVVHTNRREPDALLIINLPAGPTAHFKLSKLILRKDIKNHGNPTSHKPELVLNNFTTRLGHRVGRMIQSLFPQEPNFRGRRVVTFHNQRDYIFFRHHRYIFEMKENKIASKDKKAKTSESKSQPEKQVICRLQECGPRFTLKLLTLQHGTFDTKNGEYEWVHKMYHQICCHTKVVIIQLPWDYTSLFLPFSPSKNLSLLAPCSSRLL

SEQ ID NO: 51105 - protein, 130 aa, Oryza sativa
MAESAEMRAKVAKLGLAAVLAYGLFDAVTYTTFFVLAFLGYEKSTGKNPAANLKALLGIVILMWTGNNVTRPFRVAGAAALAPAIDKGLKGIQEKLNLPSQMYAFALVVGSVAAVCFTIFGCLILSKWGK

SEQ ID NO: 51106 - protein, 457 aa, Oryza sativa
MADAKGDEVLAEGQMPLGRWPILSYGVGHMLNDITSACWFTYLLLFLQEIGLAPRDAAIVMLSGQVADGLMTILAGEMIDRFGHFKLWHIGGSILVGISFSSVFGGCLLCTVLGTDSYLVRTIGYSFFAAVFNIGWAATQVSHMSMVNCMTLNSTSRVALASCRNAFTMVANLGLYAIALVVFALVSAKACSDIVLQYRWIAYVSIFVGCCFLVVFYAGTKEPTLQSGSDCKKSARISWGYWFKKALYYQVALLYMLARLITNVSQSLIAFYVTRDLKMNEYSKAIIPAIIFCCSFLVSVVLQEIKWNSRRLKSLLTIGAILWVIAGAAVFVLPSQMHNLMYPLAMVIGAANALVMVTTIGLESALVGDDLNGCAFVYGSLSFLDKMSCGIALFVLESYEDSISCGETRGLYTVSRFGTGLIPSCFAVFALLVTSTLKLQDTNPRAAAAALEAPLLV

SEQ ID NO: 51107 - protein, 585 aa, Oryza sativa
MALSKRMLFIFQAMVCLCSFSLSQGNQQFSLRNLPTLQKASSFPAMRHETYDYIVVGGGTAGCPLAATLSLKYKVLLLERGGSPYGNRNVSYMENFHIGLSNMAPDSASQAFISTDGVINARARVLGGGTCINAGFYSRASSNFIQEVGWDEDLVNESFPWVEDKIVQWPKIAPWQAALRDGLLQAGVSPFNGYTYDHVSGTKVGGTIFDETGYRHTAADLLAAGDPNNLRVLLHASVNRIVFNSQRGQLKPRATGVQFTDENGGLHQAFLNSNCDSEIIVSAGAIGSPQLLLLSGIGPKNDLRSHKIPVVLHNKYVGKGMADNPMNSIFIPTKSPPRQSLIETVGITEAGVFIEASSGFGQSPESIHCHHGIMSAEIGQLSTIPPKERSLEKAQKYANTKLNLPKEIFHGGFILEKIDGPLSTGHLALIDTDVKKNPAVTFNYFSHPQDLTRCVYGIKTIERILKTNRFSELSANTDGHSMERVLNMSVQANVNLIPKHTNDTESLEQFCRDTVITIWHYHGGCHVGKVVDQQHRVLGVSGVRVVDGSTFSRSPGTNPQATVMMMGRYFGVMILRGRLGRAAGV

SEQ ID NO: 51108 - protein, 709 aa, Oryza sativa
MRAALFGAERSGVVDHGGGDKEELFWPAGKGGLVVVEPRSVLDCTRSPSPPYSTSTLSSSLGGGSADSTGVAAVSESSTAAAGATKWGAPGEHGGGGKEEWGGGCELPPIPGALDVGLVGGEGWDATATLGNAAGPDQSFLNWIIGAAGDLEQPGPPLPVLQQPLIDNAGFGIPAVDTMGFSLDHPLSGVASDLSSSGAHTATGGGGKASLGFGLFSPEATSLEQPPPSMLFHEGIDTKPPLLGAQPQFLLNHYQPQPPNPAAALFMPLPPFPEHNHQSPHLQPPLKRHHAIPDDLYLARNQQQSSAVAPGLAYSPPLHGPAPFQLHPSPPPIRGAMKSTAAEAAQQQLLDELAAAAKATEAGNSVGAREILARLNQQLPQLGKPFLRSASYLKEALLLALADSHHGSSGVTSPLDVALKLAAYKSFSDLSPVLQFTNFTATQALLDEIGGMATSCIHVIDFDLGVGGQWASFLQELAHRRGAGGMALPLLKLTAFMSTASHHPLELHLTQDNLSQFAAELRIPFEFNAVSLDAFNPAELISSSGDEVVAVSLPVGCSARAPPLPAILRLVKQLCPKVVVAIGHGGDRADLPFSQHFLNCFQSCVFLLDSLDAAGIDADSACKIERFLIQPRVEDAVIGRHKAQKAIAWRSVFAATGFKPVQLSNLAEAQADCLLKRVQVRGFHVEKRGAALTLYWQRGELVSISSWRC

SEQ ID NO: 51109 - protein, 28 aa, Oryza sativa
MHSVGGTAMLRPNVALLHMIIKVALTYI

SEQ ID NO: 51110 - protein, 385 aa, Oryza sativa
MGRVVVVVAAAAVAVAVVVLLGAAAPAASAMEFGDKDVASEEALWELYERWRGQHRVARDLGEKARRFNVFKDNVRLIHEFNRRDEPYKLRLNRFGDMTADEFRRAYASSRVSHHRMFRGRGERRSGFMYAGARDLPAAVDWREKGAVGAVKDQGQCGSCWAFSTIAAVEGINAIRTSNLTALSEQQLVDCDTKTGNAGCDGGLMDNAFQYIAKHGGVAASSAYPYRASQSSCKSSAASSPAVTIDGYEDVPANSESALKKAVANQPVSVAIEAGGSHFQFYSEGVFAGKCGTELDHGVAAVGYGTTVDGTKYWIVRNSWGADWGEKGYIRMKRDVSAKEGLCGIAMEASYPIKTSPNPAPKKIKKVTDDDEDDDDEEHRHHDEL

SEQ ID NO: 51111 - protein, 291 aa, Oryza sativa
MAALSLARSPPHHHHAAAALALPAPRIPRLAPLLRTPRRPHPLIDIRRLPAAAVAASSPPEAQAVEDGEEEEEEGGEKRRKLYVANIPWSFPAPEIEKLFAQCGAVKDVEVIKGKDGKKKGFAFVTMATAEEAAAAVEKLNSLDVMGRTIRVEFSKSFRKPAPPPPPGTILERHKLYVSNLPWKARAPNMKEFFSKFNPLSAKVVFDSPSGKSAGYGFVSFGTKEEAEAALTELDGKELMGRPVRLRWRQSVDDSDDSVKADGEIEDANVDGEAEGVTDNGTKDHGEDKQE

SEQ ID NO: 51112 - protein, 93 aa, Oryza sativa
MMLSLLPPNTCIFLELGIRTILLISECYFHFCCESCCIGDSTIFAPFYAISAHKHMERAGLQLLVSKLRKKREVIFFFKIISRIIDINILIFF

SEQ ID NO: 51113 - protein, 473 aa, Oryza sativa
MMMQPSQRPRTRARRGQRRPRPPRPPPPPPLDSGGSAWIGTCVDSSSRWSIFCSKEMSASENQAAEASKGDDEKMDPPKMKIRIRLPPRKRLSNGLLKADMDGPDDRNNAQSSGVPVQTKSTIPSKQLTIPAAQCYASSISTSILWNEGNNNASSQTLPNEPNCDTSSDKLPEEASDSIPSKKLIIKAAQHYTSSISTGGLCNEANNNTSSKTLTNESNCDTSSDKLPEETIDNISSKVLTITAAQHQIDSISTGELCNEANNNTSRKILTITAAQHQIDSISTGELCNEANNNTSSKILPNEPNCDISSDKQPEEANDTIPSKNLMITAGVCMDDVSNYSAKEGLCEDANDTIPSTNLMITAGVWGHDVSNYSAKEGLCEEANDIIPRKNLTIVDGVWEDDVSNYSTKEGLCEEANDTIPSKNLIITAGVWGDNVSNYSAKEGLCEETNDIIPRKNLTITAGVWGNDVAITL

SEQ ID NO: 51114 - protein, 70 aa, Oryza sativa
MSNSFRILSSCTCSSQTKSSCRQLRNQFSSHLSCSVVATPHNLSSCSLPHVACVLEATFDGTVSFLLYLM

SEQ ID NO: 51115 - protein, 163 aa, Oryza sativa
MPLPPPLQLPCHPKLLQMPFDQEDQPGIHGVMLSSDHCGLYPLPALPLSNSAAAAAATVALGKHSAAAGSMPNIGGAEEVATTVTKAGNESTTCNGSTTWWRGSTMAAMGEKGKMKIRRKMREPRFCFQTRSEVDVLDDGYKWRKYGQKVVKNSLHPRYICST

SEQ ID NO: 51116 - protein, 381 aa, Oryza sativa
MELIDLMRAEGCTPNNVTYNVLMDGMCGEGDVDDALELLRNLPSHGCKPSTVNYNTVLKGLCSAERWGDADELVTEMLRENCPPNEATFNVVIYSLCRKGLLQQAIQLLEKMSKHGCTANIVTYNAIINGLCEQRNVDGAMGLLSKMKSYGCKPDIVTYNTLLKGLCSAARWVDAEELMDNMTQNGCLPDNVTFNTLIGFLCQKGLMVDAIEVFKQMPDKGCTPNSITYSTIISGLAKATKLDQALELFNEMGHKGFNPDKIYQLLAECLNDDDTIEEAIQTVRKLQDSGISPHTVLYNAILVGLCRNGKTEFAIDIMAYMVSSGCMPDDLTYVILIEGLAYEGYLNEARELLIKLCSRDVLVNSLIKSEALLLDQNIHAS

SEQ ID NO: 51117 - protein, 64 aa, Oryza sativa
MSALWYVAIHELTGIRDARALGLDGAFLISPLSLGESFAHIAPDLSVFFVYWDPSVKMAIQMVW

SEQ ID NO: 51118 - protein, 699 aa, Oryza sativa
MVVEIIVMYPIQHRDYRPGIDNLLVLLIGGIPIAMPTVLSVTMAIGSHRLAQQGAITKRMTAIEEMAGMDVLCSDKTGTLTLNKLTVDKSLIEVFQRGVDQDTVILMAARASRTENQDAIDATIVGMLADPKEARAGIQEVHFLPFNPTDKRTALTYIDGEGKMHRVSKGAPEQILNLAHNKTEIERRVRAVIDKFAERGLRSLGVAYQQVPDGRKESPGGPWQFVGLLPLFDPPRHDSAETIRRALNLGVNVKMITGDQLAIGKETARRLGMGTNMYPSSALLGQDKDESIVALPVDELIEKADGFAGVFPEHKYEIVKRLQARKHICGMTGDGVNDAPALKKADIGIAVDDSTDAARSASDIVLTEPGLSVIISAVLTSRAIFQRMKNYTIYAVSITIRIVLGFMLLALIWKFDFPPFMVLIIAILNDGTIMTISKDRVKPSPQPDSWKLSEIFATGVVLGSYLAMMTVIFFWVAYKTDFFPRVFHVESLEKTAQDDFQKLASAVYLQVSTISQALIFVTRSRSWSFVERPGFLLVFAFFVAQLIATLIAVYANWGFASIKGIGWGWAGVIWLYNIVFYLPLDIIKFLIRYALSGRAWDLVLEQRIAFTRKKDFGTQENQLKWATAQRTIHGLQPAATAAVFRDMTSYNDLNQLAEEARRRAEIARLRELTTLKGRMESVVKQKGLDLETIQQSYTV

SEQ ID NO: 51119 - protein, 625 aa, Oryza sativa
MQRSRRALLKRKAAAAAKEEEEEAGVGVATAAAAGRRRRRRLYGFSVSLVVACWVVLLLLNPLVGHGNGQRDEGIFADEGSSDPSFDSVEPTLSEGSVDSVVQQENGENHALPGDSCAKPDENHVLSEETLLEKDQLCSNDEAQGDSMDALPKDNVDQGENLPRTDDDSVVHPEGEVESEGVPRPARLSRVVPPGLDEFKTRAIAERGKGVPSGQPGNVIHRREPSGKLYNYASAAKGAKVLEFNKEAKGASNILDKDKDKYLRNPCSAEGKFVIIELSEETLVDTIAIANFEHYSSNLKEFEMLSSLNYPTDSWETLGRFTVANAKIAQNFTFPEPKWARYLKLNLLSHYGSEFYCTLSMLEVYGMDAVEKMLENLIPVENKRLEPDDKMKEPVDQQTQLKEPTEGKESSHEPLDEDEFELEDDKLNGDSSKNGAHDQVTETRPIQAGRIPGDTVLKVLMQKVQSLDVSFSVLERYLEELNSRYGQIFKDFDADIDTKDALLEKIKLELKHLERSKDDFAKEIEGILSWKLVASSQLNQLLLDNVIIRSELERFREKQADLENRSFAVIFLSFVFGCLAIAKLSIGMIFNTCRLYNFEKFDRVKSGWLVLLFSSCIIASILIIQ

SEQ ID NO: 51120 - protein, 134 aa, Oryza sativa
MAAALLRRALHLHLHLRRALPSPPRAGALLLPAAASSPAHRFLSGFTTTTQQNSASTTTIDLSSDESRRRLINRLVYRSKQRGSWSWTWCSGPGSSSTSTPWTRPTSAPCSKSSTSKTQICGSGLLVGNNHPRQ

SEQ ID NO: 51121 - protein, 347 aa, Oryza sativa; identical to SEQ ID NO: 33064

SEQ ID NO: 51122 - protein, 799 aa, Oryza sativa
MLEMTESWIEGSKNTSAPESVSCSVSRYESSPPRRLGKRNIYHLLAQREISPRTKHQAKNIWSGSPECATGSIELAFWVTDARHDLFSWAESQSLHRWSARYCLLLPAPRSTIAAAFSPDGRTLASTHGDHTVKIIDCQTGKCLKVLLGHWRTPWVVRYHPLHPDIVASGSLDNEVCLWDAKTSRCIGSHFFYKQIASIAFHAKGELLAVASGHKLFIWDYNKRDEASDPPMILRTRRSLRAVQFHPNGAPYLLTAEVNNLDSADSELTHATSSGYSNSPSAVFFAIMNSACCPYSESRFSSPCLIWPAYVRDDGSICLLRNDWVSGSSDVQQPSDSETQQAGHMVTPMDVCPGEPGVNNYDDEDSASLSNRIEMHTPSWQNSSRFHNSSAATDLHRIDIRQVSDLSSDTPNPEMPAHSRIDVPNSMPMDLFAFSNTIDVQMFLRDVEAGHHHNNYTGGSHSWELPFLQGWLMAQNRTGLRATLPNNEVIGDLPIGGTAGTDNVMNESSNMYSFERVGPSSSIPITTDSLRGLSKHRHMLASVPGGAGTSLQGAQNGEAHVNVVSLGVGSEFATSLFAGDGTELPCTVKLRIWRHNIDNPCAVLAPEACCLTISHAVLCSEMGTHFSPCGRFLVACVACLLPQTEVGEHVSQSPVQYDSTGAGTSPTRHPLPSRRVIYELRVYSLEEETFGTVLVSRAIRAAHCLTSIQFSPTSEHILLAYGRRHNSLLRGIFMDGKTTIPVYTVLEVYRVSDMELVRVIPSAEDEVNVACFHPSPGAGLVYGTKEGKLRIIQHNVADY

SEQ ID NO: 51123 - protein, 929 aa, Oryza sativa
MLVRLGVVVVASVAALTLKRANSGNRDGQARKGKDKTRYSEHGEKEEEKEEVKTISGIINSALSDDDDMLSEIESLLSGEIDIPLPSDGFDVKERSRYNSVNSELERLRGLVRELEEREVKLEGELLEYYGLKEQETDVVELHRQLKIKMVEIDMLKMTINSLQEERKKLQDDVARGTGAKRELEAARNKIKELQRQIQMEANQTKGQLLLLKNQVIALESKEEEAAIKDAEVQRKLKKLKELEVEVVELRRKNKELLYEKRDLIVKLDAAQGKITESDVVSHAREEINKLRHANEDLTKQVEGLQMNRFSEVEELVYLRWVNACLRYELRNYQAPSEKISARDLNKTLSPKSRERAKLLMLEYAGSERGQGDTDLETASSAPSSPRSEDFDNVSVDSSSSRYSFFGKRPNLMQKLKKWGRGKDDGSSLASPTQSFTSDSPKSASQKPKGPLEALMLRNAGDGMGITTFGKREQDPSDIMDEANVASSFHLMSKTVQGFADDKYPAYKDRHKLATEREKAIKEKAEKARVQRYGGVNSSGIVPSPRSALPPKLAQIKEKAPTANAESSDQPSDNQNNPLVVTQLKLANIEKRAPRVPRPPPAPSATANTASALPPPPPRPPGAPPPPPPPGKPGGPPPPPPRPGSLPRNLAGGDKVHRAPEVVEFYQSLMKREAKKDTTSLGSTTSSVSDVRSNMIGEIENRSTFLLAVKVDVETQGDFVESLANEVRAASFVNIDDVVAFVNWLDEELSFLVDERAVLKHFDWPESKTDALREAAFEYQDLLKLEHKVSSFTDDPKLACEEALKKMYSLLETVEQSVYALLRTRDMAISRYREYGIPVDWLSDSGVVGKIKLASVQLAKKYMNRVATELDALQGTEKEPNREFLLLQGVRFAFRVHQFAGGFDEESMKAFEELRSKMCTTQTSAPQIS

SEQ ID NO: 51124 - protein, 314 aa, Oryza sativa
MRMDRNEEEMVTNDSDPLLKRENEEAESSSQLTPPKPATLSALEIEDEETDGSSAGCCRICLETDSELGDELISPCMCKGTQQFVHRSCLDHWRSVKEGFAFSHCTTCKAQFHLRVETWEDNSWRKMKFRIFVARDVILVFLAVQLTIAMIGAISYFLDRDGSFRNSFSDGWDRFLSKHPIPFYYCIGVVVFFVLLGFFGLILHCSSFNDNQDPCLAGCRNCCYGWGVLDCLPASLEACFALVVVFVVVFAILGIAYGFLAATMAVQRIWQRHYHILTKRELTKEYVVEDLHGSYTPPKLDPEHEERLKMLKLL

SEQ ID NO: 51125 - protein, 569 aa, Oryza sativa
MELFYELLLTAAASLLVAFLLARLLASAATASDPRRRAPDHAAVIAEEEAVVVEEERIIEVDEVEVKSARARECVVSEGWVEVGRASSAEGKLECLPEEEEAPAKAARELVLDAVLEEREEEGQVGEERCDLAAAVAEVVGVKPHELGVEAAPGEVSDVTLEEGKVQDVGVEQHDLVAEAAPREALDTGLEKQGVPIIEAVEIKRQDDLGAEVAPSDVPEVEFEQQGVRIIEAIDVNQHHRVALAAPAEVVDAGLEERVQAIEAGSSGLTSETVPEEVLDELSEKQEEQVIEEKEHQLAAATAPVAIPGVALAETEELKEEQSSEKAVNVHEEVQSKDEAKCKLHLVDQQEGSASKVELVGRNTDNVEISHGSSSGDKMIAELTEEELTLQGVPADETQTDMEFGEWEGIERTEIEKRFGVAAAFASSDAGMAALSKLDSDVQLQLQGLLKVAIDGPCYDSTQPLTLRPSSRAKWAAWQKLGNMYPETAMERYMNLLSEAIPGWMGDNISGTKEHEAGDDAVGSVLTMTSNTINQHDSQGNEDNTGMYEGHLTSSPNPEKGQSSDIPAE

SEQ ID NO: 51126 - protein, 121 aa, Oryza sativa; identical to SEQ ID NO: 29150

SEQ ID NO: 51127 - protein, 642 aa, Oryza sativa
MSWLRNAVHRAVEASGGPLLTRTVRSSLGTVVHHAGQAVAGGARLINDRIGSRSYKSMRLTAKRLEDAALSYRGEDRVQLLRRWLVMLRETQRAAAAEKEAKRAGHPDQHLPVLDLYMDYETGAEPMNFIHVFLYSQALECLVLSMIMEFPTEEEASLLSEVFGLCLPGGKDVHNAILSSIKELAKLFSTYHDEVLAKRAELLQFAQCAISGLKINPGISRLDDEILQLQQRINGMDALRSNSTSRRSKASQTVAEGFRTAVNEIRLCSRMEELVLMKKSMHHGNSFETYFEKVNKLKVLSESLANSAAKAERRIMENRLQKEESLIFRVTKTNEVSVTEKEILAEISGLQKQKDLLGDELKKVNNILNAAVMKLKKTREERDQFDEASNQIVLHLKAKEEELSRSIASCKVESSTVGAWIIFLEDTWKLQSLYEELRKKQANDELDKCATCFAKLINHHLYARVEELSTCIDSIKTFVDNLKIFDNRSVSAEDGNNGSSEQSNPRKYLEEEYLEAEKKVVAAFSLVDNIRAIYLSNQDYQARRDDPDVKKLFANIDKLRVEFESVPRPLLQIEIKEREERAKQSRSLQAARSSRQAGHESPIPAQLRTRLPSESDSELAKSDPEYREYSADDISGWEFDDL

SEQ ID NO: 51128 - protein, 258 aa, Oryza sativa; identical to SEQ ID NO: 42756

SEQ ID NO: 51129 - protein, 234 aa, Oryza sativa; identical to SEQ ID NO: 30935

SEQ ID NO: 51130 - protein, 787 aa, Oryza sativa
MEVLGRQPCKREEEFGWGIVHPSSAHQLFDEMSSPFEVYEEDTILVMKEEKVSRDEALRLLLEEWMDAKRKLEEKLNRVLEKFEEMEAHNGAEDATVIIKAATTDLREASSPTPKTSLSPVCFNENSMHAATSSSHNIGLTALTVAKCLKGCSNHGVGAGSLMPTRCPTNCSSPGVIPDHTMATVVACATTSMAFMELVVGEEATCDTYTGTTNCPEVTHTKCSTLGLDVKGDTDQVMVAFLAQPCVFLLNMDNTGTKLVNMVEVTSLQTWAPPCRVICKGSLVKKHPATWLEFEWKQHDVQQIQPWPPPQWLETWLFLSCFSDVAPHDSVSPFIIDIIPYALDDREEMLRRSIELRPCTHPQYLGKGKYWAGTAMSYGGNHLLAVKRLLARFKEDFSMVPSWMSWNYVRRILWSPGCSLLSARELWKCLQLFCGKGELLDGESFMQRRRSNMTSYEVCWERKFISKTYSDSSQNWFELYTSLSSELWHKPTGYKLMQSEATSGATYLISADWTITESCKLSYKITLEDGEVDVYWLNTKDQEFSYEQLIFHKEELATVWVYQSTSFIKSKGSGRVVTIAASTSFTNSIPVPLASHVWKEFSWTLHYWNDGSVWKLWFCYMVFLISVKQAAVPMDLLDGNLEESDPARLKMWPDHPKYVQRPCVNQRDELRLSAPDLQISWDPGGLCLLKFLAISSLGQVTFQSVKFSFQDSSSLFHMRSARICLSCSFETQVFCWQAENKLDIDEAFGTMQEYWRNQSGGLPFLQFTCHRLVDKSNFKERRLSGTH

SEQ ID NO: 51131 - protein, 485 aa, Oryza sativa
MATTASVRPPLLRQGSEKASLLCKPKQRASVRRRSFTARASSNPVSIPKQWYNLVADLPVKPPPPLHPQTHQPLNPSDLSPLFPDELIRQEVTEERFIDIPEEVAEVYKLWRPTPLIRARRLEKLLGTPAKIYYKYEGTSPAGSHKPNTAVPQAWYNAAAGVRSVVTETGAGQWGSALSFASSLFGLTCEVWQVRASYDQKPYRRLMMETWGATVHPSPSAATESGRRILERDPASPGSLGIAISEAVEVAARDADTKYCLGSVLNHVLLHQTVIGEECLEQLAAAGDVPDVVIGCTGGGSNFGGLVFPFMREKLAGRMSPAFKAVEPAACPTLTKGVYAYDFGDTAGLTPLMKMHTLGHGFVPDPIHAGGLRYHGMAPLISHVYELGFMEAIAIQQTECFDAALKFARTEGIMPAPEPTHAIAAAIREAMECKRTGEKKVILMAMCGHGHFDLASYEKYLRGDMVDLSHSDEKLQEALAAVPKI

SEQ ID NO: 51132 - protein, 37 aa, Oryza sativa
MRTTTTRRRRLGAAVQQLDSFFEILFFSEFCFSVRAT

SEQ ID NO: 51133 - protein, 229 aa, Oryza sativa; identical to SEQ ID NO: 29253

SEQ ID NO: 51134 - protein, 172 aa, Oryza sativa
MLADRVLAELVKELKVRPVPVVFASFSGGPKGCTYKVLQLIERRCEGQLSLEEYQLVRDCLCGQMYDSSPVDFVSDLGTRFLLHPSVLKMSQPPRILSWMTRGIASGLDTLFIGKFEAQRAEYWDTLYSSVVCHSVLSVTCNLIVNGSVCGYLSKHWSIVLSACWSNTHILF

SEQ ID NO: 51135 - protein, 243 aa, Oryza sativa
MGKEASAMVARRSTSRRDWRRWWWWLLPLACCFVCWVASSAATVAPAAGVAVTSLPGFDGPLPFSLETGYVEVNESTGVRLFYYFVQSEKDPDVDPLLLWLSGGPGCSSLSGLTHEIGPFQFAAKRYYSGGLPKIIYQPETWTKVSNIIFVDSPVGAGFSYAATQEGSKTSDTKTVKQLVIFLRKVTRVLTNAPEFQIFTPPILYGIGLIYFLFALWFSSRTSAGFECHFSNIHHPLQNIMFF

SEQ ID NO: 51136 - protein, 255 aa, Oryza sativa; identical to SEQ ID NO: 29267

SEQ ID NO: 51137 - protein, 52 aa, Oryza sativa
MSSGSTHRGEEKEKNIRYPCCTNVGSIWVGHAKEDKLSRIETHMARSIAHQG

SEQ ID NO: 51138 - protein, 852 aa, Oryza sativa
MTVVWDLRNQKPLTSFSDSNRTKCSVLQWNPDMSTQLIVASDDDNSPSLRVWDVRKTISPVREFVGHSKGVIAMSWCPYDSSYLLTCSKDNRTICWDTVSGEIMSELPASSNGNFDIHWYRKIPGVVAASSFDVKIGIYNLEFSGLYAAGDSAIGAPARPRAPAPKWLKCPTGASFGFGGKLVSFHQAAPTQGAQVTTSEVHVHNLVIEQSLVSRSTEFEAAIQNGDKSSLRALCDKKAQESLSDEERETWGFLRVMFEDGDAARTKLLAHLGFNPPQEQTSSSTDELNRTLADTLNLDHGAPTDTSDSQFMVDNGEDFFNNPQPSEASLAEESISTNGQQIEQEMPVNVEPSDLSVDKSIQHALVVGDYKGAVNLCLAANRMADALVIAHAGGSALWESTRNQYLKNTVSPYLKVVSAMVGNDLMSFVSTWPLNAWKETLALLCTFARKEEWNVLCDTLASRLLGVGDTLAATLCYICAGNIDKAVEIWSRDLKSEDGGKTYVDLLQDLMEKTITLALATGHKSFSASLSKLVENYAELLASQGLLKTAMEYLKLLGSDEHSHELAILRDRIAFSTEENHAASTSVHAGSINSSAYPTIQPSYSTPDPSQNLYQGTSQYAVPSNQYQDYQQQSNTAYGTYNSTYSQQPTQMFVPSNTTPVISQPNATPAPVPQQPVKAFTPTNLPGLKNPEQYQQPTLGSQLYAGANPPYTSGQSTPYQGVPPTTYHQPRPPTQFQTVPTAPPAVSSATVPGTTPSQMFPGPVANNPTSRFMPSNNPGFVQRPGLSPVQPSSPTQAQGQPQPVVAPPAPPATVQTADTSKVSAELKPVIATLTRLFDETSKAMGGSQVKKT

SEQ ID NO: 51139 - protein, 342 aa, Oryza sativa
MDKWVIANGLPSEVEYALDFPWKASLPRVETRVYLEQYGASEDAWIGKGLYRMTLVNNDLYLEAAKADFTNFQRLSRLEWLSLKRWYIRNNLQAHGVTEQSVLRAYFLAAANIFEPNRAAERLGWARTAILAEAIASHLRQYSANGAADGMTERLISGLASHDWDWRESKDSAARSLLYALDELIDLHAFGNASDSLREAWKQWLMSWTNESQGSTGGDTALLLVRTIEICSGRHGSAEQSLKNSADYARLEQIASSMCSKLATKILAQNGGSMDNVEGIDQEVDVEMKELIQRVYGSSSNDVSSVTRQTFLDVVKSFCYVAHCSPETIDGHISKVLFEDVN

SEQ ID NO: 51140 - protein, 791 aa, Oryza sativa
MAHLGAVLCIRVALVVVLLPSLLATVAVAHNDTGEHKNYLIIVRKPYEYDHNVYKTVSSWHASLLASVCDTAKEELATDPGAETRLIYSYRNVVNGFCARVTREEVYEMAKKDWFVKAIPEKTYKLMTTYTPKMVGLTGAPAAYHGGLWNRSNMGEGMIIGVLDNGIAAGHPSFDAAGMGPPPARWKGRCDFNSSVCNNKLIGARSFFESAKWKWRGVDDPVLPVYELAHGTHTSSTAGGNFVPGANVMGNGFGTAAGMAPRAHLALYQVCSEDRGCDRDDILAAMDDAVDEGVDVLSISLGDDEAGDFAGDPVALGAYTAIMRGVFVSSSAGNNGPNPLTVSNEAPWLLTVAASTTGRKFVATVKLGTGVEFDGEALYQPPNFPSTQWPLIADTRGDGTCSDEHLMKEHVAGKLVVCNQGGNLTGLRKGSYLHDAGAAGMVLIGPEFMGSMVQPKSHILPVAQIVYLSGEELKAYMKSTKSPTAALIYKGTVFGDRKTPEVAPFSSRGPSRQNQGILKPDITGPGVNIIAGVPVTSGLATPPNPLAAKFDIMSGTSMAAPHLSGIAALIKKAHPKWSPAAIKSAMMTTADTLDRRRRPITDQKGNNANMFGLGAGFINPTKAMNPGLVYDLTAQDYVPFLCGLGYSDHEVSSIIHPAPSVSCKQLPAVEQKDLNYPSITVFLDREPYVVSVSRAVTNVGPRGKAVYAAKVDMPATVLVTVTPDTLRFKKVNQVRKFTVTFRGANGGPMKGGVAEGQLRWVSPDHVVRSPIVVSAQKFLNGNTSSSDHAGH

SEQ ID NO: 51141 - protein, 536 aa, Oryza sativa
MDRVLLSSQLSSQTVVNTRVQQGSGGINSIGFAVIRKGSLKLRCYAIGGLGGGENLNDPLKESNNGPVLQGFNGSSASFRTVGAKITQETGDFFVSDAEGDPDKPTDGFSSIDEAIGALHEGKFVIAVDDESGDNEGDLVMAATLADPESIAFMIRNGSGIISVGMKEEDLTRLMIPMMSPIAEIEDISAAASTVTVDARVGISTGVSAADRAKTIFTLTSPDSKPTDLRRPGHIFPLKYRNGGVLKRAGHTEASVDLVALAGLRPVSVLSTVINPVDGSMAGMPVLKQMALEHDIPIVSIADLIRYRRKREKLVELIAVSRLPTKWGLFRAYCYQSKLDGTEHIAVAKGDIGDGEDVLVRVHSECLTGDILGSARCDCGNQLDLAMQLIDKAGRGVLVYLRGHEGRGIGLGQKLRAYNLQDDGHDTVQANVELGLAVDSREYGIGAQILRDMGVRTMRLMTNNPAKFVGLKGYGLAVVGRVPVISPITKENQRYLETKRTKMGHVYGSDLPGNVPEEFLNPDDIAGDQDEDDTHN

SEQ ID NO: 51142 - protein, 245 aa, Oryza sativa
MASYAAVLRPHASSTRTPRGPRRPAGAVPPTPRRAALRATTRSPPAVAATPPPRERVQQQQQPGDGQTTTRLYSLAPCPLLLAALLPGAEPVRAVFEPFVELVKTWGLPGWLVHWGHPGNMAVVLFAMGGYGTYLGFRIKLSDDPEEKAKAKDLHPKLLAGMFFFFAAGATGGVTALLTSDKPIFESPHAVTGIIGLALLTIQSILPTLFEGNPSLRNAHGLLGSGIMTLFLIHAAFGLQLGLSF

SEQ ID NO: 51143 - protein, 185 aa, Oryza sativa
MARRDQLVSFLCFFLIVSAVAGGLCVSATVLPMRVGKQYVVGGRSGWRTPPPASVDLYAKWAAGIRFYVADSIEFVYKNDSVVKVDKFGYYHCNATAAAANDGSVLFLLDAPGFAYFSSADADHCKKGQRLMINVDSAPSPSPSPSPAPQEAATASAATSSSAATAAHALLLAAMAMMGLILGEW

SEQ ID NO: 51144 - protein, 309 aa, Oryza sativa
MPMALLLSSPPRPSLRRVTRWSAASLSPRASLPSPRRVGLAVAAASWDGAGRWRVETTTTRARAAARAGASGEGGDGEVEGGGGTGIAAAAAATVVLAVMNRVLYKLALVPMRNYPFFLAQATTFGYVIVYFSILFIRYHAGIVTKEMLALPKSRFMLIGLLEALGVASGMAAAAMLPGPSIPVLSQSFLVWQLILSVLILGRKYRANQIFGCLLVTAGVILAVASGANSGPFLSDVKLFWPAVLMASSACHAGASIIKEFVFIDGAKRLKVSNNSIIRERGLTYLWSTPLGQVFRPCLSSYSFRFCLT

SEQ ID NO: 51145 - protein, 23 aa, Oryza sativa
MKKRKTLKLTRRPLAKMLQRRLM

SEQ ID NO: 51146 - protein, 302 aa, Oryza sativa
MHILNPITGEQIALPSVITINQVTPIFNHKGVLCKYRYSRHTAEGVTDSPMTLPLDKLRYFFHCKAFVFYDKSVKSYIVVLIHNPCEQLSFARLGYDKWTWLPPHLRFQDCTYKDGLLYAVTSLGEIFAFDLNTTVITAKIIMDRTKEYSRERIYIVQAPWGDLLQVWRPPQGDGRGYDEITGRSALVSNTGRTKLYRVDTLAKELVEISDLGDHVLFMGNNQTYCLCAKEYPLLKANHIYFTDDSECLALRTLWGFRLDIGLLNLRDKSVEEIVSPRLWLKCRAPVLLVPNPRKMNSTCHN

SEQ ID NO: 51147 - protein, 256 aa, Oryza sativa
MLLLFVALGACRATHNITAILADHRDLAEFGRQLTATGLADDIDGRNTITVLAVDDAHMAQLRARGLPREALRHVLSLHVLVDYYDDAKLHRPPRRLRGRVHAVPGARATRPGSEGMVKIAVRRGGRVAFVPQGRRRRPGQRVLRQVRARGALQHLRAAGQRRDHVPGRRGAVVGDGVEAQLYGRLVQARAAECWCTRLHRRRWGKVRRPTTAPTRGRNPATEEMVARRTAPASARHRVGYPSLWRFSWLPVPSSW

SEQ ID NO: 51148 - protein, 278 aa, Oryza sativa
MEGAQQHSVASQDDEQLLMFSDQENQIDKTLLTLVKSDRSGLYIKDLQGRWILVDGDLGPLDIVVYPGLALYRETAGYVNPAVHKTEVGNLQECMFGRCSLVFKLMPRSVARLSGEEMRAAGHGVDAQFQVPILVNDFMQTEHSANQLFPKNNEPSPHVEQEASYNFVMKRKKEGRKTKALPPSKRLRLEAQRVLKERVQDIADKKGIKLRFCSLRDCESHIKSLDRPCENIRTEIGWPPGVPFVHPHDLPNKAKLMFLEAYEPGWTASQQDLESRSL

SEQ ID NO: 51149 - protein, 309 aa, Oryza sativa
MAVDLMGCYAPRRADDQLAIQEAATAGLRSLEMLVSSLSSSSQAAGAHKASPQQQPFGEIADQAVSKFRKVISILDRTGHARFRRGPVESSAPAAPVAAAPPPPPPPPAPVAAALAPTSSQPQTLTLDFTKPNLTMSAATSVTSTSFFSSVTAGEGSVSKGRSLLSSGKPPLSGHKRKPCAGGHSEATANGGRCHCSKRRKNRVKRTIRVPAISSKIADIPPDEYSWRKYGQKPIKGSPYPRGYYKCSTVRGCPARKHVEGATDDPAMLVVTYEGEHRHTPGPLPAPPAAAAVAAMPVSVAVSTGNGHV

SEQ ID NO: 51150 - protein, 78 aa, Oryza sativa
MQGRSVVSGADAARIDDEGEGVCCCVVGEGGSDGEMGVIGGGGDERPRCQRRGLLSCAVDLIQFSMHEPANNATFRFF

SEQ ID NO: 51151 - protein, 166 aa, Oryza sativa
MNRKPGDWDCRACQHLNFSRRDLCQRCGEPRGAADRGSGGGGDYANFGGRGGSSFGGGFGTGSDVRPSDWYCNCGAHNFASRSSCFKCAAFKDDAAVNSGGAGAFDGGDMSRSRGYGFGSGAVRASRPGWKSGDWICTRSGCNEHNFASRMECFRCNAPRDSGTEV

SEQ ID NO: 51152 - protein, 395 aa, Oryza sativa
MRPAVAAALLLVAAAVAASPVSALYSAGSPVLQFNPNNFKSKVLNSNGVVLVEFFAPWCGHCQQLTPIWEKAAGVLKGVATVAALDADAHKELAQEYGIRGFPTIKVFVPGKPPVDYQGARDVKPIVEFALSQVKALLRDRLNGKTSAGSGGKKSGGSSEKTEPSASIELNSQNFDKLVTKSKDLWIVEFFAPWCGHCKKLAPEWKKAAKNLKGQVKLGHVDCDAEKSLMSKYKVEGFPTILVFGADKESPFPYQGARVASAIESFALEQLEANAAPPEVSELTGPVSFRDINKVILLWRQWSGIDVLTRWFGFCRTPWKRNVLLLPFALYLSFQISWIQRPKEETSTLSCYYLLLRNLKRVHTVLSGQLLGSKLILRSKLELVVMAIQRWLLTT

SEQ ID NO: 51153 - protein, 296 aa, Oryza sativa
MSSASSMEALHAAVLKEEQQQHEVEEATVVTSSSATSGEEGGHPAAGVGEAEAVAPPAIGGGEPRALPPHARPRRPPPRPGAASALGFGAPAGRCGVQVLRLRQVLQLLPGARRPQDEPPGQAADSARSSRLGSRPRRRLAAFRRGPRASHVIHRRVLRRHDQQSPQVFHLPEGVPHRAGARRAQEEALRRWRRRRRRRIFNRAPGHGGRRVRGGKLRQRPVRHPGVRPQPPGRAGVRVAAVLQGQEDVGRGGGGPEPPRLQEAPASHRVIQQLHGSDPSESFCLGSEIQSKHTIR

SEQ ID NO: 51154 - protein, 278 aa, Oryza sativa
MQSVHQALLDLGLAGRVNVSTAHSVNILATSYPPSAGAFREDLAQYIQPLLNFHAEVGSPFLVNAYPFFAYKASPASVSLPYVLFEPNPGVRDPATNLTYDNMLYAQIDAVYAAMKAMGHADITVRISETGWPSKGDDDEVGATPQNAAAYNGNLMKRIAAGEGTPLKPAVPVDVFVFALFNEDMKPGPSSERNYGLFYPNGTPVYNIGFDAASFSPSPTTSTFSSSSRPTVTKKNLNFILLRNFEYANLSFIEQRELLMAMSSLIVLPEKISVRCNG

SEQ ID NO: 51155 - protein, 402 aa, Oryza sativa
MHRWFIASCGDIRAAAARSSRRRGGDAIAPKSAPPSPSPPPRLRKTVSETAAVMLAVPKDVEEFRTMPAYGTNLELFTYDQLRAATADFSPEQIVGEGGFGVVYKGLIHGAVVAVKQLNPLGHQGDREWLTEVSYLGQYNHPNLVELIGYCCEDDHRLLVYEYMANGSLENHLFRRSCNLSWTTRMKIALDVARGLAFLHGGDRPIIYRDFKTSNILLDTDMKAKLSDFGLAKERPRGGKTHVSTRVMGTYGYAAPEYVATGHLTAMSDVYGFGVVLLEMLVGRRALEPPAAGCSKCNLVDWARPILIRPKKLERIVDRRMALPAPAADYGGGVDAAVERVARLAYDCLSQNPKVRPTMGRVVHVLEAVLADHHHHAGAAAAAARPAAAAAAATATAGRLYV

SEQ ID NO: 51156 - protein, 393 aa, Oryza sativa
MHGYGTRRSDSGGDRSMARLSTAAWPFLAAVAAALLCSVDAVIVEGLQVGFYNQTCPSAEEAVRDVVTSEIGLDRTIAAGIIRIFFHDCFVTGCDASILLDETPSGDVPEKESSANGFTLHGLRTLDVAKSTVESMCPRTVSCADILAFAARDAAVAAGIPFYEVAAGRMDGLRSNMDDLPGNMPTPSHQVPRMSELFVKRGLSQEDLVVLSGAHSIGGAHCFMFSNRIYGFSQGADIDPALEPAFAEKLRKVCPPRKDGDDPEQSPKVSFDGRTSEKLDNVYYSELLASRGLMTSDDALIKDPETKTTVDLFAGDNAVWQEKFAAAMQKLGAVDVLVGEGKGQIRKQCRLVNKPSKQSKPTSTRQSMPALRPKRKKPRLGLGNFIPGFHGFF

SEQ ID NO: 51157 - protein, 230 aa, Oryza sativa; identical to SEQ ID NO: 31096

SEQ ID NO: 51158 - protein, 290 aa, Oryza sativa
MQMSTNPNHYPVFPHSFRNQHVVSFQTSTIANGSGAIPVCPASSGGMNSDMTLLNTTPSTIVSTSSPNMLADSNQSLKYAAPMAVDWSYPELQLLNDGLLKYANEPGIMKYIKIAAMLPEKTVRDVAMRCQWMAAKKENTRRRKTDEHYLGKKTRDRKDKMVESSWATNRQVQTTDIRSPSTLACNTVRDNQFQSGASEIDRAMLNILEENARVLKQIGENIMTSQVQNNIDLFHHARRNISDLLQSMSQMPGIMSKMPPLPVSIDDRLASYILPGVNLAQVFGSSHLRS

SEQ ID NO: 51159 - protein, 78 aa, Oryza sativa
MGDAASSASAAEMVGRAVGEVREALNEHARPRLLPRLLPRRRLEGRFLSYSLLAPHLPWIYLGSNFPLQPFAPQSSSN

SEQ ID NO: 51160 - protein, 93 aa, Oryza sativa; identical to SEQ ID NO: 48973

SEQ ID NO: 51161 - protein, 472 aa, Oryza sativa
MAFFRGLTAVSRIRSRMAQEATTLGGVRWLQMQSPSDLDLKSQLQELIPEQQDRLKKLKSEHGKVQLGNITVDMVLGGMRGMIGMLWETSLLDPEEGIRFRGLSIPECQKVLPTAIKGGEPLPEGLLWLLLTGKVPTKEQVDALSKELVTRSSVPGHVYKAIDALPVTAHPMTQFTTGVMALQVESEFQKAYDKGMPKSKFWEPTYEDCLNLIARLPPVASYVYRRIFKDGKTIAADNALDYAANFSHMLGFDDPKMLELMRLYVTIHTDHEGGNVSAHTGHLVGSALSDPYLSFAAALNGLAGPLHGLANQEVLLWIKSVIGETGSDVTTDQLKEYVWKTLKSGKVVPGFGHGVLRKTDPRYTCQREFALKYLPEDPLFQLVSKLYEVVPPILTELGKVKNPWPNVDAHSGVLLNHFGLSEARYYTVLFGVSRSIGIGSQLIWDRALGLPLERPKSVTMEWLENHCKKAAA

SEQ ID NO: 51162 - protein, 73 aa, Oryza sativa
MVLCPDPGCHVFDCSHLHLIVVFGDSLQGRGDLTVGIEAVRWRSGGREDQCLLPPSVFSTAPPPSHLKEISSI

SEQ ID NO: 51163 - protein, 101 aa, Oryza sativa
MRLAVATFLAIALSLSLLLAGALARPPPAPVRTDAGGGAAPAPQDKGGNLTDIDDYVPAPPPDPAAGKGGAKRSASGPAVVAHKAASYGAAAAMTLLVSCL

SEQ ID NO: 51164 - protein, 285 aa, Oryza sativa
MASAAAVAGAEAADPKAWKWAIRKRVWDALEAEGVARDPRPVHHRIPNFDGAAAAADSLGRLDVFQDAQCVKVNPDSPQKQVRFLTLSGDKKLLTPQPRLRTGFFSVLESHMIPIGCIPEACTSVGAAKYGRPIGLDEKIKVDLIVIGSVAVDPSTGARLGKGEGFAELEYGMLRYMGSISDSTMIVTTVHDKQLVNDIPVEKLLVHDVPVDIICTPTQVIFTNTTIAKPQGIYWEKLSPEKLGQIRILQELKRRIESETGTTLPCGPSEKLPPTAQRRRRKRRR

SEQ ID NO: 51165 - protein, 472 aa, Oryza sativa; identical to SEQ ID NO: 33002

SEQ ID NO: 51166 - protein, 165 aa, Oryza sativa
MASPAWQPPHRLQPPPPAQLDLTDELLEEVFVRLPTAADLARASTAFASFRRLITGHAFLRRFRRLHPPPSSASSPRDSSRRSRPIRRPPRPAPSPTPTRPTSLAPSSPPATAGVSATSPTAGTSSPPSRNAATRLPTTAPWSGNSLSATPCTGATCCSHPSPMT

SEQ ID NO: 51167 - protein, 143 aa, Oryza sativa
MRRLPLRLLRSAASSPRRRPAPSPPPSPNPAAPPALLSRWGWGWAPPRRGYSRFATGFTPLQPKPLASILDVERASGLSPDHLVAAWDDYHLGRGHIGASMSAKLYHLMEQRSATCRHFVIPLWKGTGYTTMFMQGYYSVFSI

SEQ ID NO: 51168 - protein, 364 aa, Oryza sativa
MAGGKIQKKRHGGGAGGGGGGGGGGARLQGGIPFEKSKGQHILRNPALVDSIVEKAGLKPTDTVLEIGPGTGNLTKRLLQAGVKAVVAVELDPRMVLELDRRFQGDPLASRLKVIQGDVLKCDLPYFDICVANIPYQISSPLTFKLLSHRPIFRCAVIMFQREFAMRLVAQPGDSLYCRLSVNVQLLSRVSHLLKVGRNNFRPPPKVDSSVVRIEPRKPLPPVSFKEWDGLVRLCFNRKNKTLGAIFKQKRVLELLEKNYKTMQSLQLTSDAEKGEEKMSPDDVALLSSMVDDMNMESSYENDDDDEMEMDDADMVVESRACFKEKIMGILQQGDFAEKRASKLSQVDFLYLLSLFNKAGIHFS

SEQ ID NO: 51169 - protein, 302 aa, Oryza sativa
MAMRRWREDAVALSLRGCGFGDGDDDRPEKPRRYGVTEMRSPFYAFRPAHHALQEILDSLGPFVDGLKFTGGSHSLMGKELVREITDLAHKHDIYVSTGDWAEHLLRQGPSFFKQYVEECKALGFDTIELNAGSLKLPEEALLRLVRLIKTSGLQAKPLFSVKFDSSDIPPSGDRAFGAYIVPVKQNSERVEDVDLLIRRAERCLEAGADMIMIDADDICQRADSLRADIVAKIVGRLGLEKTMFEASNPNTSEWFVRRYGPRVNLFVDHSDVMNLERLRGFNMRGVCNSPLFGIGSPFFLM

SEQ ID NO: 51170 - protein, 281 aa, Oryza sativa
MDAVVSVSHGALGPLLGKLSTLLADKYACLKGVRREIHSLRSELSNMQAALHKYASLEDPDIQVKAWITELRELAYDIEDCIDKFMHQLGANGEQHRTSNSIEDFFRKSIQRLKTLGPRHNIAGEIEELKARVISVRDQKNSYKLDDIFCSSSSNTNASVDPRLATLFAEENHLVGIDGPRVELVNWLDAESRLIKCRKVLSIVGFGGLGKTTLANEVYRRVKVHFDCHAFVSVSQKPDFKNIFKDITYNMPTKDGFLKDIDTWNEKKFIEKLRELLVDKR

SEQ ID NO: 51171 - protein, 310 aa, Oryza sativa
MAVSAGGGGGAAGQFGDTTLTKVFVGGLAWETQKEGMRGYFEQFGDILEAVVITDKNTGRSKGYGFVTFREPEAAMKACFDPYPVIDGRRANCNLAYLGVQRSKAAAASLQPYAGHMRAMKSIIQTGGGGASLSMADHGIQQGIPTYNVYGYSPYFSDYGYPLSYYQAYGGLGAQYQMFAGGAAAGAAGLTMANPTGGGLYSPYFQYGPAVAANAAAAGYAGMQYPQMYQYAAAAAAVGAPTAATTASQLTAVAGLQQYAGTVALAPNSTGQAAGMTMSLTAPTLPAPSPQYQYRLISSHVAAAPEKPLA

SEQ ID NO: 51172 - protein, 401 aa, Oryza sativa
MGGVIGALFRGGGHRREMHRAPMNQPGYGGGGENHRRAMLTKKYSYIPDNYQSLDQVTAALRDQGLESSNLILGIDFTKSNEWTGKRSFSGQSLHKIGSTPNPYEQAISIIGKTLAPFDDDNLIPCFGFGDATTHDYNVFSFHPDNSPCHGFEEVLSCYKKIVPHLRLSGPTSFAPIVEAAVDIVDRSGGQYHVLVIVADGQVTRSVDTSDNDLSPQERRTVDSVVMASSYPLSIVLVGVGDGPWEDMQKFDDKIPARQFDNFQFVNFTSIMSRSTTQQQKESAFALAALMEVPIQYKATMELGILGRSTGKAKRIMPAPPPLPSAAGRQPSLRREDSAAATAAAAPPSPREDQVCPICLTNAKDLAFGCGHMCCRECGESLTKCPICRQTIRSKLRLYSG

SEQ ID NO: 51173 - protein, 274 aa, Oryza sativa
MGLLSNRIGKETLKAGDHIYSWRAAWVYAHHGIYVGDDKVIHFTRGRGQEVGTGTFIDLLLMSSGPNTNTPCSICNNEGATTNTETNGVVSSCLNCFLSGGALYRFEYAVNPALFLAKARGGTCTLAPTDPDEVVVRRANHLLSNGFRCYNLFKGNCEDFAIYCKTGLLVAEQGVVGQSGQAISIIGGPLAAVISTPFRLVTTNIYGMAVMAVGVYCASRYAADIGNRRDVLKVEVEDLTAGLASGRIRAVENISQLVAPAEAQGLAVTAPVAA

SEQ ID NO: 51174 - protein, 257 aa, Oryza sativa; identical to SEQ ID NO: 29074

SEQ ID NO: 51175 - protein, 57 aa, Oryza sativa
MTLAQPLEHAYLCKLVPILVGYAICYSCHVLIHSNGVYSSSLLNSVEPLGSACHLYS

SEQ ID NO: 51176 - protein, 167 aa, Oryza sativa
MSSSSSRGPGWLSTAPSQIQPSLIPDSPILTAPSQRRGGVVAREMTGGESEEGEADGNPPSVTLALQSPFTVEPCVVAFPRRCHHIKAPHAWSSFPEAGRNGRSLAKAPSRSGQLPQQQRVHGLLHCSVRGSGLFCQRGHCLIHHRRGFFPFPKCTTYLPLRNFFFE

SEQ ID NO: 51177 - protein, 298 aa, Oryza sativa; identical to SEQ ID NO: 29448

SEQ ID NO: 51178 - protein, 361 aa, Oryza sativa
MPPVGEVAAAEARSGMVLGGGAAAAAVGGGEDAVVMQVAGAEGQDSVITINCPDQAGLGCDLCRTILEFGLRITRGDVSTDGQWCFVVFWVVPRTPSIKVRWANLKNRLMSMCPSNYPMTFYPEITQPGPSQFYLLKLFSADRKGLLHDVTHILSELELIIHRVKVSTTPDGRVIDLFFITDGMELLHTKERQEETCSMLIATLGPSISCEILLAEGFQQGFSSLPPTISEELFRLELADGDNCSRSICAEMKRVQKATINFDNTLSPAHTLLQINCADQKGLLYDILRTMKDCSIQVTYGRFWSDKKGFREVDLFIKQADGKKIIDPEKQDVLSSRWDARRKKKCRSCGTSPPPLLHRPP

SEQ ID NO: 51179 - protein, 445 aa, Oryza sativa
MQTSKTRNGPSDAPQKASPATPRSSRVAKTGGNETDSAGITPTRTTPERSPKVTERRSPRSPITEKRPSRLSELESRVSQLQDELKKAKEQLSLSESRRRHTQQEAEEAKKQEQAATSKLEDLQRQLAEFSAAEESRLQELRKVSQERDRAWESELEAVKKQQSVDSAALSSALSEIQRLKQQLGATTESDAARAKQCEFAESELEGLKQEMELRLATIEGLKVNVGESDKAVAEANAVAAETKKQLEMAQATIDSLLAEGARLQECLRSKDAELGQSMARLATLEEDLKKAHNKDDVDGSFGSPDHGEAVEKVVVTIPNGNGSCGGSGAEIEQLRTALEVAEIRYQEEQTRTTIETKTAYEMLENAKSEYDKSSRRAARASEQLDAAQAASVEMEAELRRLRVQSDQWRKAPPPSSSSPSPRLLVSWLFSSLFLGKEKTDNSIL

SEQ ID NO: 51180 - protein, 171 aa, Oryza sativa
MERLLHFRPPKPTSANAVAAAATADGDLLELDVLWPASRAPGLLAALPEEDGKRRRKRGGSGSGSVAVRSAARPIPETAALTLVPSSSAAAMAKSAPVRIPSEAAAARRGVMWAAQAGGEDGEAAMVPPHEIVARRAAAHSSVLEGSGRTLKGRDLHRVRNAVLRRTGFLD

SEQ ID NO: 51181 - protein, 656 aa, Oryza sativa; identical to SEQ ID NO: 42997

SEQ ID NO: 51182 - protein, 1111 aa, Oryza sativa
MARSVGGGSGGGGERPGSAPMRLCVHVLEARGLQAAYLTGHSDPYVRLQMGRRRAKTTVVKRCLSPLWDEEFGFAVGDAEEELVVSVLNEEGYFGGGFLGRVKVPLSTVMAADGLSLGTAWYHLHSKGGRFRKKRRVAGEIRLRIYLSRTAICDEPRNMPMQLINDTPCSSMRSVGTTASSLSARSVGTTASSLSARSVGTTASSLSASVSSLDLSACPSMERASCSSMDKLSQGIMDQQGRRSPGQLSCISTERSILLEPEEDDNDATTNASSVVEVMSRYFCRKPVDAAPSATSDHEQFQDTQMNSESCENGDNGALPETSLNELMKSLESKDKGSEMPENLRGGILVDQSYVLQPTEMNSMLFSAHSDFWPAVAEVQGLSGFQTDPWKLVSNDCLKRTLSYTKAASKLVKAVKITEEQTYLKAAGNSFAVLSSVSSPEVPCGNCFKVEILYCITPGPQLPSKEQTSHLTISWRLNFVQSTMLKGMIESGTKQGLREGYAQFTEVLSQKTKVIAPDDSNLSKDEILSSLQTQEESIWKLAARFLGNFAFIFSLCIALYATAHLRLVKPNMVHGLEYFGIDLPDSIWEVVFCAILIIQGQNIFKSGRRFLYAWKQRGSDHGVKAHGDGWLLTVALIEGSGVVGSGTPGLPDPYVVFTCNGKRKTSSVKFQTSEPKWNEIFEFNAMDDPPSRLEVVVHDSEGPHNKIPIGQTEVNFLKNNLSDLGDMWLPLDGRFPQGCEPKLHLRIFLNNSRGTEIVMNYLAKMGKEVGKKIHLRSAQTNSAFRKLFSLPPEEFLIDDFTCYLKRKMPLQGRIFLSSRILGFYSNILGRKTKFFFLWDDIDDIQVAPPTLAKVGSPSLMIILRKDRGLEARHGAKTLDPQGKLKYHFQTFVSFNDAHRIIMALWKMRSVDPEQKGEMIDKNSELKQLPCEEGSLLANEDVKMSEVYSAVLSVDINSLMDMFSGGPLEHKVMQKAGCVDYSPTEWELLNQNIYQRQISFKFDKILSRFGEASTTQRKYNLANRDGWVIEEVMTLQGVQHEDYSSIQLKYQMTSTSLKPSTCSIQVLLGIAWLKGAKQQKKVVKNVMSNSANRLREIFSEVEKELASKKGVS

SEQ ID NO: 51183 - protein, 294 aa, Oryza sativa
MALRSAAGRLASSSRRRLLSPPTSIHTAFLHSHATSFGYKQVAEEDKSKLVGNVFSSVASSYDLMNDLMSVGLHRLWKDRLISKLNPFPGMKHLDVAGGTGDVAFRALERINSVSHRAMQGTLTDIEEETQIYVCDINPNMLNVGKKRASERGYKEGHCLSWIQGDAEALSFEDGSMDGYTIAFGIRNVTHIEKALSEAYRVLKRGGRFLCLELSHVDVPLFKEIYDVYSFSVIPAVGELVAGDRQSYQYLVESIRRFPNQEKFAQMIQEAGFERVEYENLVGGVVAIHSGLKL

SEQ ID NO: 51184 - protein, 272 aa, Oryza sativa
MASSRLLLLAALLATAAVLAASQKPKAATPTKATPASPGPAAAAADGPAPTNVTAVLEKSGKYTTFLRLLHESRVDTQINSQLMDSYNGLTMFAPTDAAFAALKPGTLNSLSSQDQIQLMLYCVLPRFYSLAMLTTLGGPVNTQASGADGPYKYKIKPSNNNVNISTGVNWALLSTVVSKDFPLAVYSVDKVPLPYELFGPKPPTPAPAPAPAPSKSKTKKHKKSAGIAEPPVADDASADDTTKKAAAPATAVSRWVVAAAGVLAGAILAAL

SEQ ID NO: 51185 - protein, 181 aa, Oryza sativa
MAPEYAMNGYLSTKTDVFSFGMLVLEIVSGRKNIDKHLDAEKTDLLNYTWKLSEEGRQMEIVDPAMAEWDADEARLCVQLGLLCCQAVVSDRPDMYTVHLMLSSDSFTLPKPGKPAIHGRVGRWMSTTTTASSAASTANTATTLGTDTMTTRASASAAALGGIAEDDSRNSISISFTTEGR

SEQ ID NO: 51186 - protein, 242 aa, Oryza sativa
MGSVVDAPVVVEGVAENMLGDKKVTVVFVLGGPGSGKGTQCANIVEHFGFTHLSAGDLLRAEIKSGSENGTMIENMIKEGKIVPSEVTIKLLQDAMIKNENDKFLIDGFPRNEENRAAFENVTKISPAFVLFFDCSEEEMERRLLGRNQGRVDDNIETIRKRFKVFVESSLPVIEHYNAKNKVKKIDAAKPISEVFEDVKPFLPHMLRLNRDKKRTTEGTNGGVLSEKALLECDYISVIKNH

SEQ ID NO: 51187 - protein, 392 aa, Oryza sativa
MQSPSKVSEASGSAPPATSVIEGWAELPEGLLHSIVALLGSFLDLLAFTGTCHSWRAAFSSYPSKSNFRTILPPLLVRPNVRVKAPYSSNGHRKLRSCEVIDLANRNTPLRCQIPQETLQRMHFAGSSHGQLICCRRGYCLVVDVFTGAEVSPPRLPFSENCDEFYYCGILTAPITSPNSHLIISTQSSLFDWPVGSDSWSELKLPVNRVDQIVEFNGQLIAVIEYSLYTLQLAPILRLEKIKTLWWDNMNECPYMRPWFVVCGDMLLIVDHYISFSFGAPVLYRPYRLDMSTKPAKWVEVKKLENWALFIGGDARSPPFSFKNPERWGGRSNCLYYAHYSQPLSLHGLGDDADAVWDPNTDDNLVFKRNWYRQLQALWVYPSMFYSAGDGQ

SEQ ID NO: 51188 - protein, 512 aa, Oryza sativa
MAEIVSSVVVHEAVNQIIHGLVNWNERKSSAEENMERLEMAHIRLEAALETSCKWRITDSSLLCWQKKLKRAAQECDDTLRKCRQRILEQEEAEQEVRNSSIPRRIAHATKSLVSSLFYSNIDGSCRSAVRRFEWFADGANEFLRFVEFGGTPHQYLFFDPLIRQLLAGKTLEYKLVSENKYRLFVIRPFCISENRIEARLIFDSKNASALEDDFFLCMLLQVSESVDILGIVIKCLQLFNPHFMSTAESVRNELTQLPSQDFTWVPYAESCHKKHWDNIHSITTQWFRPNPLCCKQHGQNHSCESSNLGMPSVQGVSLGPVIEVSLQCHVPVPEFREQGTIVKGKPSLKKCPHMKVDLVYTPHGSSQDLLPEIKSSVIEVINGDKQHCLHTNIALELMEEIMLPRAVDCFHENAEAKLYQMLWKSKHGGAYLQVMKATMNTRSTQRTIRGSRKAKLLQQQGHKTQHRTNAISDFLNLWSAHAPVQLQGSILDWIQKEKEAQLAPPLLRLKF

SEQ ID NO: 51189 - protein, 743 aa, Oryza sativa
MAGRNYHGYGGGGGGGMSMVVASTPGQELALTNCAYVSSADIRRFPNALALVGDAFVFTLRAHDAVSAGSIALNAIQRRQTKVSAGDSITVSSFAPPDDFKLALLTLELEYTKARTNRNEELDAVVLAQQLRRRFLDQVMTSGQRVPFEFCGTNYIFTVNQALLDGQENSTPLDRGFLSSDTYIIFEAAPNSGIKVVNQKEAASSKLFKHKEFNLEKLGIGGLSAEFTDIFRRAFASRVFPPHVVNKLGIKHVKGILLYGPPGTGKTLMARQIGKLLNGNEPKIVNGPEVLSKFVGETEKNVRDLFADAENDQKTRGDQSDLHVIIFDEIDAICKSRGSTRDGTGVHDSIVNQLLTKIDGVEALNNVLLIGMTNRKDLLDEALLRPGRLEVHIEINLPDENGRLQILQIHTNKMKESSFLSPNVNLQELAARTKNYSGAELEGVVKSAVSYALNRQISMDDLTKPLDEESIKVTMDDFVNALHEITPAFGASTDDLERCRLRGMVDCGKAHRHLYERGMLLVEQVKVSKGSPLVTCLLEGPAGSGKSALAATVGIDSDFAYVKIISAETMIGFSESSKCAQICKVFEDAYKSQFGIIILDDIERLLEYVAIGPRFSNIISQTLLVLLKRVPPKGKNLLVIGTTSEVGFLESIGMCDVFSVTYHVPKLKKEDATKVLRHLNVFDEADIDAAAEALDDMPIKKLYTLVEMAAQGPSGGSAEAVYGGEEKIDINHFFSILSDIIRY

SEQ ID NO: 51190 - protein, 844 aa, Oryza sativa
MEDGAAGGDVSADRVIAELLDMGFEFDEISRAIGAVGTRCADVLEFMLGGSGNGKMKKASRETRSRSCVSSNAEARPSDDGNKLVNPRKRLKQSSITDHLASNTGCRRGSCGEKASTSYPCLAASDDPRAPVAVSADVCSALKPESQFLLANSRSESDLGHKISAVLRKHFGFSCVKGFQKEALDAWFAHKDSLVLAATGSGKSLCFQIPALLTAKVVVVISPLISLMHDQCLKLAKHGISACFLGSGQPDSRVEGKAMSGMYKIIYVCPETVLRLMEPLKKLAEKPGIALFAIDEVHCVSKWGHDFRPDYRRLSVLRENFSASKLKFLGHDIPLMALTATATIPVRADIIKSLKMSEDTVVVLTSFFRPNLRFRVKHSRTSVSAYKKDFRELVVTYNDSRNFRGKGQKALSEINPDSESSSYESPDDAMSDDEDANVDSMSHEDNSFGKTKVGMPLINENAENELDVYPGVDDFDVTCGEFLECSWPENSASSSQCNKTGSSSSEIADQGPTIIYVPTRKQTVELANYLCKTGLKAAAYNAKMPKSHLRQVHQQFHCNALEVVVATIAFGMGIDKSNVRRIIHYGFPQSLEAYYQEAGRAGRDGKLADCTLYCNLLRAPTLLPNKRSKEQTKVAYRMLRDCFQCDICINGPPQMHDFKEDAVMFMSVLQAQNGQATEDMGCSNIPRYISGRQRFGEVPNFRGVVSYIREKFPRFATTDKVWWEGLARILEGRGYIQEAAEIPRVLIQYPEVTEAGLNFLSMQSEEEGLYEYLNAAMLLVMNDPKPISTSSEWGRGWADPAIRRQRLAGKKMGRRKGKRHSRSHSTGFTTARQRLAEILSKRRR

SEQ ID NO: 51191 - protein, 624 aa, Oryza sativa
MKSPLRKFRGFGLHSHRERKDHRPPPAKLDELADAAQEMEEMRNCYDSLLSAAAATMNSVYEFAEAMEEMGTCLLEKTALNYDDDDSGRVLMMLGKAQFELQKFVDNYRTNIINTITNPSESLLKELQVVEEMKELCDHKRQEYEAMRAAYREKGRSRHSKTETLSSEQLQAYFLDYQEDAALFIFRLKSLKQGQFRSILTQAARHHSAQLSFFRRGLKYLEALEPHVKAVAEKQHIEYPLNGLDDDTDNDEYSSYQGNQSDDSELSFDYEINDRDKDFPASRSSMDLDQSNQACSPEPLKEHKQEYTEQIQADFAAPRVKLEIGTQSAPISADNVFDPSTRFRKMNTSNRTNYSYKLPTPDDDKNSTSAHTNRSPHSDQPESKSHVAENLWHSSPLVKGFKPNSMFSGPVKMPSSTEGISAPLVYPYATSDFKKMKREAFSGPIPSKAGLNKPLFSATDLRAPMNYPRAMSTKSYGPGWQSSVAPKFTPRITSLPTTSPRISELHELPRPPANVGAARPGLVGYSGPLVSRRQVPNVPTRASPPSQTASPLPRPPAAMTRSYSIPSNSQRTPILTVNKLLEARHSRESSEVSSPPLTPISLADVSRRSTAETALEKTRMMETL

SEQ ID NO: 51192 - protein, 276 aa, Oryza sativa
MTGSSCPADSSQLLYPRRGAPTTTTTSRPPLHPLIAHAPYDVVLHRSVVLSISSARDQAELASFWCYIRLGGGASAKRAAGEDDRSRSSLTAARGGGGETMSGRGRGDPLVLGRVVGDVVDPFVRRVALRVAYGAREVANGCELRPSAVADQPRVAVGGPDMRTFYTLVMVDPDAPSPSDPNLREYLHWLVTDIPATTGVSFGTEVVCYESPRPVLGIHRLVFLLFEQLGRQTVYAPGWRQNFSTRDFAELYNLGLPVAAVYFNCQRESGTGGRRM

SEQ ID NO: 51193 - protein, 151 aa, Oryza sativa
MGQGLSQPAQAVEEPSPPAVEAAPSSSPSPAPAPSSLEALAAEAMSFDEDGNESIDVKVQKALDCPCVAELKNGPCGSQFVDAFSCFLKSTEEEKGSDCVKPFIALQDCIKINPEAFSKEILEEEENDEEAEKSNLKVRAPAWSRESKPKL

SEQ ID NO: 51194 - protein, 563 aa, Oryza sativa
MGNCCVSRPSGADKRRRCGSSTAPHTRGGRRVIGAANMRCLSTVSSVSDAARAVMSNEPATVLGNSGSSGNGGVMAAEEMLRRYEIGEELGRGEFGVTRRCRDAVTGERLACKSISKRKLRSSVDVEDVRREVAIMRSLPAHANVVRLREAFEDADAVHLVMEVCEGGELFDRIVARGHYTERAAAAVMRTIMDVVQHCHKNGVMHRDLKPENFLYANASENSPLKVIDFGLSVCFKPGARFNEIVGSPYYMAPEVLKRNYGQEIDIWSAGVILYILLCGVPPFWAETDEGIAQAIIRSHIDFQREPWPKVSDNAKDLVRRMLDPNPYTRLTAQQVLEHPWIQNASAAPNIPLGEAVRSRLKQFTVMNKFKKKALLVVAEYLPTEELDAIRELFNMLDTKKKGHLTLEELRKGLQVIGHNIHDTDVDMLMEAADIDGNGILDCKEFVTVSIHLKKIRSDEHLPKVFSFFDKNGSGYIEIEELKEALSPRGDQKSIDDIFLDVDIDKDGKISYEEFELMMSAGMDWRNASRQYSRAVYNTLSRKIFKEVSLKLDHSGPLVAAGK

SEQ ID NO: 51195 - protein, 212 aa, Oryza sativa; identical to SEQ ID NO: 30232

SEQ ID NO: 51196 - protein, 168 aa, Oryza sativa
MAIGQAKTKSSLSTSLSFSCSSTRILGRKRVAVSPAPPPSGGPHSPVRTLRKQRSTRLHMDDAVSLLESLPQDVLIKVLCKVNHSDLRPLLLVSKQVSEATVVAREQHFAFATPSSKAALRGGEEEEEAPGAPKLQRRVARSSPVWGKNLASISVNLFEAFESEVVEM

SEQ ID NO: 51197 - protein, 162 aa, Oryza sativa
MGHLKHCAVHYDNNRRPTGSAEVIFTRRSEAVAALKRYNNVRLDGKPMKIEVIGADLGMAAPSAPRVSVVPGARGRGQREVVMMPGGSGFGRGAAGSSNFIPGWKRNNFAQRGGQGRGRGRGRNNFGRGRGRGYVRKGPVEKSAEQLDKELDSYHSGAMNVD

SEQ ID NO: 51198 - protein, 328 aa, Oryza sativa
MTMLLWTSLQLRNLLWATSKHDVYLMQNYSVMHWSSLLQRGKEVLNVAGQLAPSQNVRGAMPLSRVQISTMAVKGNLMVAGGFQGELICKYVDKPGVAFCTNLTGNNNSITNAVDIYQAPNGGTRITTANNDCVVRTFDTERFSLISHFAFPWSVNNTSVSPDGKLLAVLGDSSDCLIADSQSGKEMARLKGHLDYSFSSAWHPDGRVVATGNQDRTCRVWDVRNMSRSVAVLEGRIGAVRGLRYSPDGRFLAASEPADFVHVYDAAAGYADAQEIDLFGEIAGVAFSPAGNNGGGGEALFVSIADRTYGSLLEFHRRRRHGYLDCYV

SEQ ID NO: 51199 - protein, 349 aa, Oryza sativa
MDMASIECVSYSDSMDDDDDDGVGVGGVSHLPRPILVKPSSAAAAVNVVVVSAGSGGGAGGGGGGVGVVAGAPAVPPATSVHELLECPVCTNSMYPPIHQCQNGHTLCSTCKTRVHNRCPTCRQELGDIRCLALEKVAESLELPCKYYSLGCPEIFPYYSKLKHESQCNFRPYNCPYAGSECSVVGDIPFLVAHLRDDHKVDMHSGCTFNHRYVKSNPREVENATWMLTVFHCFGQYFCLHFEAFQLGVAPVYMAFLRFMGDENDARNYSYSLEVGANGRKMIWEGTPRSIRDSHRKVRDSHDGLIIQRNMALFFSGGERKELKLRVTGRIWKEQQNPDSGACIPNLFS

SEQ ID NO: 51200 - protein, 475 aa, Oryza sativa
MERQDGDAEGSGRGEHRSRGCRSPAETKTDRSPGIPRVLEVGFATVREHHGTKSTTGPQKSNNLQNKKIKSREDGREPEAAELRRGERRRDHEVVFAAAARDPPTLQRPDFDCVRQNKHPNANTENEMTGGDLEKASGSLLDQSKQPLNIKRDRRRLEEVSDKMWKDEAKEIGSRSPALTKGSTKESQMLQSLDGKAKNAQKRRKDAKQELRSKIPGVTLVSDDSLFGQAANYIEDLEGTSLDLEGLSGTAMIRKVLPGSNKIRGVTALFEAASRHITEVKKKKKIAPEEVEKEFRPGVDAHDGRAGKKLTNMIPIPHIPKINGDIPSAIEAFADHQRLLDRLVLYDLAEVKVKGDRNCQFRALSDQMYHTTEHHRFVRQQVVKQLESYPEIYAGYVPMDYREYLKKMTEDGEWGDHVTLQAAADLYGVKITLLTSCRDTFYIEVLPADQKPKGEICISFWAEVHYDSVYAEKAS

SEQ ID NO: 51201 - protein, 332 aa, Oryza sativa
MHSLPPPAAASLPILLLLRRRRRREVHLCSGSGDTASEERRGGGEGVRVRPGLGTTSKPASPPVPLDPGRAFSGDLTAMASRRLFASLLRSTAAPRTPSTPGCLFNRAAAAAYSSSAPYNGQGFPLPQSETASRLGLFSSPGDTRQPSYGDRLMQSQQLSQDYRARTQANNAPRFGDTMSRIAGGENSSYFGTPSRIFDEHKQSLVKGKRDFVHVLLKRNKTFVTVTDVRGNKKTGASAGCLEDRKGRSRLSKYAAEATAEHVGRAARKMGLKSVVMKVKGTTFFNKKKKVILSFREGFRGERVREQSPVVLIHDVTQLPHNGCRLPKQRRV

SEQ ID NO: 51202 - protein, 348 aa, Oryza sativa; identical to SEQ ID NO: 30998

SEQ ID NO: 51203 - protein, 204 aa, Oryza sativa
MDFYGRREQYGGYGGYGGGGALATPGYAPAAPYGMSQVSIEGNGCGRTLPPQPTVKVYCRANPNYAMTARNGAVVLAPANPKDEYQHWIKDMRWSTSIKDEEGYPAFALVNKATGQAIKHSLGQSHPVRLVPYNPEVMDESVLWTESRDVGNGFRCIRMVNNIYLNFDAFHGDKYHGGVRDGTDIVLWKWCEGDNQRWKIQPYY

SEQ ID NO: 51204 - protein, 1002 aa, Oryza sativa
MAASTRALFLSCFHGSGGGGGTSEVSRRLVLRPRYPSMPRRPRSAAVAGEGGEGGGGGGDGDLEAAAVGAEEEEKVAVFEVSGMTCAACAGSVEKAVKRLQGIHDAAVDVLGGRAQVVFYPAFVSEEKIRETIQDVGFEAKLIDEEVKEKNILVCRLHIKGMTCTSCASTVESILQVVPGVQRASVALATEEAEIRYDRRIVTASQLTHAVEETGFEAILITTGDDQSRIDLKVDGTLNERSIMIVKSSVQALPGVEDIKVDPELHKITISYKPDQTGPRDLIEVIESAASGDLTVSIYPEADGRQQHRHGEIKRYRQSFLWSLVFTIPVFLTSMVFMYIPGLKDGLEKKVINMMSIGELLRWILSTPVQFVIGRRFYTGAYKALSHGSSNMDVLIALGTNTAYFYSVYSILRAASSHNYMATDFFETSSMLISFILLGKYLEILAKGKTSEAIAKLMDLAPETATMLIYDHEGNVVGEKEIDSRLIQKNDVIKVVPGGKVASDGFVIWGQSHVNESMITGESRPVAKRKGDTVIGGTVNENGVLHVRATFVGSESALAQIVRLVESAQMAKAPVQKFADQISRVFVPLVIILSLLTWLAWFLAGRLHGYPNSWIPSSMDSFQLALQFGISVMVIACPCALGLATPTAVMVATGVGASQGVLIKGGQALESAQKVDCIVFDKTGTLTIGKPVVVNTRLLKNMVLREFYAYVAAAEVNSEHPLGKAVVEHAKKFHSEESHVWTEARDFISVTGHGVKAKISGRAVMVGNKSFMLTSGIDIPVEALEILTEEGEKAQTAIIVAMDQEVVGIISVSDPIKPNAREVISYLKSMKVESIMVTGDNWGTANAISKEVGIENTVAEAKPEQKAEKVKELQSAGRTVAMVGDGINDSPALVSADVGLAIGAGTDVAIEAADIVLMKSNLEDVITAIDLSRKTFFRIRMNYVWALGYNIIGIPIAAGVLFPSTRFRLPPWVAGAAMAASSVSVVCWSLLLRYYKSPKLGR

SEQ ID NO: 51205 - protein, 305 aa, Oryza sativa; identical to SEQ ID NO: 31964

SEQ ID NO: 51206 - protein, 259 aa, Oryza sativa
MGEEAKYLETARAERSVWLMKCPPVVSHAWQGAVSSSDAAGSNPNPVVAKVVLSLDLLRSEEPSLQFKMEMAQTNTGNTPKSYSLNMSKDFVPMCVFSESNQGKLSCEGKVEHKFDMKPHSDNLVNYGKLCRERTQKSMIKTRKVQVIEDHRMSLIPLPGMVGLIPSGSKEKKKQTPTKPSDAKRIRRDRRELENIIFKLFERQPNWALKALVQETDQPEQFLKEILNDLCFYNKRGPNQGTHELKPEYKKSTGDTDAS

SEQ ID NO: 51207 - protein, 925 aa, Oryza sativa
MDDFQGLLARDFGLRPQGKAAPMSAARAAASSGSAWSNSRSASASSAAAATAPPAPLYDDLFGAAAPSAQPPKAAPSPSLDAIFDSFKEPSAPDAPPKPKHSSMPVFDKPVYDDDIFDGVPGVKSSSSARFDDVFGGSHAPPPPAYDDLLGGFGSKPEVKEVLPEEKRKPEPAASSAGFDDLIPGFGGRIPMRARETVGTKDKNVSMSTSKPASMASDPFDVLGTTSTSKHTSSGIFTDPLDELGRPAKSQGKKHDNTAVDSGLFEDSSTFNQVPKSEPLFTSELNDDLKDRNGSTKDRDSSPVQNFSRKNTTQKPSVENFENIFPKSQSARYSDVHVDIGASGSEKYSGNGMDDQSPRSDESEDEIWLTVSEIPLFTQPTSAPPPSRTPPPLAVKQKPHGSQAKRKDDNYPRRSNQNHNHHRSSSNQAGSSSIDELEDFAMGKSQSSAYDNANPFNEEEFEHSSSAAASAAAMKEAMDKAEAKFKHAKVVRERERDAKHRNREQQEQDDEARFNTQDHEERDRQERLEREREMRQREEKEREQRRLEEERELEKQRERERAARQAVERATKEARERAAAEARAKAEREARQRAERAAVQRAQKEARERAAVDARERAERAAAEAKERAAAEAKEKVATQARDRAAAERAAVERAQQEARRRAERAAVERAASEARERQAAEARERQAAAAAAAAAAAKEKQSKPDDLESFFGMGARANSAPKQRAPTADSMFNSQTQNRGAASSASASMRKASSTTNIADDLSAIFGGAPTSSEEFQEIEGESEERRRARFERHQRTRERAAKALAEKNERDMQVQREQAERHRISETMDFEIKRWAAGKEGNLRALLSTLQYVLWPECGWQPVSLTDLITAAAVKKVYRKATLCIHPDKVQQKGANLQQKYVAEKVFDLLKEAWNKFNSEELF

SEQ ID NO: 51208 - protein, 63 aa, Oryza sativa
MLFVRAIAGPGPALLPPVKDEDADGDGNPEASGEGGGVPPVTIRWARITCAASHPPTPATARC

SEQ ID NO: 51209 - protein, 416 aa, Oryza sativa; identical to SEQ ID NO: 32607

SEQ ID NO: 51210 - protein, 213 aa, Oryza sativa; identical to SEQ ID NO: 48867

SEQ ID NO: 51211 - protein, 333 aa, Oryza sativa
MASSLSKSDKKKVLDFAAWSFNITTSVGIIMVNKALMATHGFSFATTLTGLHFVTTTLMTIVFRWLGLSQPSHLPLPDLIKFVIFSNLSIVGMNVSLMWNSVGFYQIAKLCMIPASCLLEVVFDHVHYSRDTKLSIMVVLIGVAVCTVTDVSVNAKGLAAAVIAVWSTALQQYYVHFLQRKYSLNSFNLLGHTAPAQAGSLLLVGPFVDFLLTGKRVDHFGFTSIALFFLTLSCVIAIGVNLSQFICIGRFSAVSFQVLGHMKTVLVLSLGFLFFGKEGLNFQVVLGMILAVVGMIWYGNASAKPGGKERRSVLPVRSEKPSGALDEKDGSEK

SEQ ID NO: 51212 - protein, 404 aa, Oryza sativa
MAFAAEPMDLEVSPDSSPAAAAAAAVCSICLDAVACGDGVAARSTARLQCGHEFHLDCIGSAFNAKGVMQCPNCRNIEKGHWLYGNESQPCSHSDTGDWLNGETFDYPFSFEFGWCPFNTPLTSVFGESESEPNPFLEYIGSLHGFHHPMYAPSSSTASTESIPFHQRPTGTEGHATTDLRNTQVFNESEPRNHEREQQYLGSVQMPGTLNHSTAPFGIGMPRYDGGNQQRLRPHMHDNSLFHRPTARRASNLAHLRSLTAASETRGHGHGMTSHAVQQTIPSSMASNPQPPATRRVRPRALSITSFIAASSSAEIRAPHDFPLTETASTTNGNIRNGVGAPRHANQSYSWSSETFWPQTGEPHWWSPMAPVHNRSYDNFSGRSATELLSIYGAQNGLPTPRFL

SEQ ID NO: 51213 - protein, 984 aa, Oryza sativa
MSSPAEPPPPEHPPTPAPAPAPASPPPHPAASGNEAAAPPKPNPPITPAPARNASAAPPSGSPATAAAAAPVPSRKESGSTSAAAPAAATRKASGVAAATTGVLPRKPPGTTAPVAARNIPATTAASRTATRATTTTTATSVSRRPAAAAAAVASRIPLRATDATTTHAASRNPLTGAAAATATVAAVGRGGFRAAPTRPEEYTPRMGMEFESEHEAYEFYRYYGWKVGFNVRKEYANKSKKTGEITSRKFACSREGYRANVKRGNHMVPMPDSRTGCNAHLVIRRKKPGAKLEVYAFQPRHNHPLFATSCMPNPLQPNVVHWTTLPDVVTPPDLLMDGGEVGGQNSTEENSTASAGEGRRQPLRTRRQWEMKYGEAGALLNYFQDQSLANPSFYHSVQLDVEDKVANVFWADPRMITDYSQFGDVIAFDVVSRNSISLRHFASFVGCNNFGEPIVFGLALMYDETAESFQWLFETFLHAMSGRAPKTFFSHQDAVVAKAVSIVMPDTTHVICAWHLKHAATRNINQLKSDSDFMKEFKACINLYEEETEFLTSWDAMINKHNLHDNVWLKKVFEEKEKWARPYMRGVFSAGMKGTRLNDRFQSDVRDHLRPEVNILLLLRHLETVINDRRRKELEVEYSSRLKLLYFKIKAPILTQAFEAYTNTIFPLFQEEYEEFQSAYIVNRDESGPCREYVVSVVEKEKRYTVYGNPTEQTVSCSCKKFERNGFLCSHALKILDAMDIKYLPDRYIMKRWTKYARTLMSGDVQGQAIQADKLSESSSRYQYMCPKYVRLVARASECEESYRVLDQCWVDLSNKVEEILQKQTCVDATLTQTDVQNLKVSLPSITNGTQAENIMDKSSGTTAKESKKKGQKNKIQSRNCIEKGLRKKQKVHSEQPSEYALLGGSQSGNMFQAFEGPPNMSPLGTQTPTYKTYRGIDLSSPMGPISYDEMPSGLDPTFTTHLGFATYHTSQVSSSSPHNQAL

SEQ ID NO: 51214 - protein, 113 aa, Oryza sativa
MSTEGCSSYLCRLPGPPTLAVGGAAGGELVETSSSSGPSHASPPHRSTASTSLSSNPPRPSSTAVPPLFLPGQVPPPPPSPPYYPQRRRRRHISLHLPFIWPMQAGDDQIRRF

SEQ ID NO: 51215 - protein, 308 aa, Oryza sativa
MAPEVLKRNYGPEVDVWSAGVILYILLCGVPPFWAETEQGVAQAIIRSVIDFKRDPWPRVSDNAKDLVKGMLNPDPRRRLNAQQVLDHPWLQNIKKAPNVNLGETVKARLQQFSVMNKFKKHALRVIAEHLSVEEVAGIKDMFEKMDLNKDNMINFDELKLGLHKLGHQMADADVQILMDAADVDGNGSLDYGEFVALSVHLRKIGNDEHLHKAFAYFDRNQSGYIEIDELRESLADDLGANHEEVINAIIRDVDTDKDGKISYDEFAAMMKAGTDWRKASRQYSRERFTSLSLKLQKDGSLQLTTTQ

SEQ ID NO: 51216 - protein, 250 aa, Oryza sativa
MVELYQDNLVDLLLAKNATHQKLEIKKDSKGVVTVENVTVVNISSFEELRAIILRGSERRHTAGTNMNVESSRSHLILSIIIESTNLQTQSYARGKLSFVDLAGSERVKKSGSAGKQLKEAQSINKSLSALADVIGALSSDGQHIPYRNHKLTMLMSDSLGGNAKTLMFVNVSPAESNLEETYNSLMYASRVRCIVNDTSKHVAPKEIMRLKKLIAYWKEQAGKRSEDDDLEEIQEERTPKEKADNRLTS

SEQ ID NO: 51217 - protein, 529 aa, Oryza sativa
MACAPDPSNNKNSSSILHQQVKKISSIPFSWGAHAWGIGREDPRRAIHALKVGTALTLVSLLYILEPLFKGGGKNAMWAVMTVVVVLEFTAGATICKGLNRGLGTILAGSLAFIIELVAVRSGKVFRALFVGSSVFLIGFAATYLRFFPSIKKNYDYGVVIFLLTFNLITVSSFRQEDVVPLARDRLSTIAIGCAICLFMSLFVLPNWSGEDLHSSTVRKFEGLARSIEACVTEYFQDQDKDDKILDKQASRASIHIGYRAVLDSKSSDETLAHYASWEPRHSMQCYSYPWQKYVKIGSVLRHFAYTVAALHGCLESEIQTPPSVRSLFRNPCTRVAREVVKVLQELAVSIRDHHRCAPDVLSDHLHEALQDLNSAIRSQPRLFLGSKHACANSHVLMELNSSKHTATRTTLPSFKTDGTSLLERRNTKADQPSERNERGTLRPTLSKIAMTSLEFSEALPFAAFASLLVEMVVRLEMVIEEVKELERAANFREFTGHDYLTIDLTSNDKMRNPNGVPLDSHTISTAAE

SEQ ID NO: 51218 - protein, 271 aa, Oryza sativa
MEIQKLRCRVNFAALRFTPEIEELGRRVVRILRRNGPFLVLHLRYEMDMLAFSGCTHGCSNEEAEELTRMRYAYPWWKEKVIDSNAKRNDGLCPLTPEETAMVLKALDIDSSYQIYIAAGEIYGGQRRMSALTSAYPNVVRKETLLPSDLRFFQNHSSQMAALDYIVSLESDIFIPTYDGNMAKVVEGHRRYLGFKKTVLLDRKLIVELVDQYKNGTMRWNHFSSAVKASHSSRMGAPSRRQMIPDKPKEEDYFYANPHECLHQPEELSVL

SEQ ID NO: 51219 - protein, 366 aa, Oryza sativa
MSGGGGGGGGSGSGSGSRDEYGRAVARAAVAQALEAAGFDCAHRSAVDALVDVILRYVVHLGRTAAFNANLAGRVLANEYDIIQALEEIGTDFDGFVGAATSDRCLVGSGVVRELIDYVESKPEVPFVRPLPSFPVPRVEPQPAQSFAMAGKESGMKHVPEWLPVFPDPHTYIRTEVWSEEEAKARVDKVEQVRQRRKAEKSLLSLQRRLALAGADGFRPAVTENTAEKGKEIQVAGSKRNPFLEPALPPGEKEVSDVAMQPQRRKISVLDAFAPAIQAANMMDIDTGPGWDNNQNQKSIVPKERAPVHLKIGIDKKPLSAVLNSKPLDLREDPSFLKEEVKDERKRRAGMILRASMENPQELPQL

SEQ ID NO: 51220 - protein, 374 aa, Oryza sativa
MFIIVGVILFIFLRKMPAKKKEKDLEENKWAKNIKSAKGAKVSMFEKSVAKMKLNDLMKATGDFTKDNIIGSGRSGTMYKATLPDGSFLAIKRLQDTQHSESQFASEMSTLGSVRQRNLLPLLGYCIAKKERLLVYKYMPKGSLYDQLHQQTSEKKALEWPLRLKIAIGSAKGLAWLHHSCNPRILHRNISSKCILLDDDYDPKISDFGLARLMNPIDTHLSTFVNGEFGDLGYVAPEYARTLVATPKGDVYSFGVVLLELVTGEEPTQVKNAPENFKGSLVDWITYLSNNAILQDAVDKSLIGKDHDAELLQFMKVACSCVLSAPKERPTMFEVYQLMRAIGEKYHFSAADDELTMQPQNAEAEKLDELIVAN

SEQ ID NO: 51221 - protein, 343 aa, Oryza sativa
MEHVQIPRVKLGTQGLEVSKLGFGCMGLTGVYNAPVAEEDGVAVVRRAFEAGVTFFDTSDAYGPHTNEVLLGKALKQLPREKVQVATKFGIAGFDANGMPVKGTPDYVRACCEASLERLAVDYIDLYYQHRIDQSVPIEETMGELKKLVEEGKVKFVGLSEASADTIRRAHAVYPITAVQMEWSLWTRDIEEEIIPLCRELGIGIVPYSPIGRGFFAGRAAVQSIPSESWLTRHPRYNGENLEKNKVFYTRIEELATKYGCSPAQLALSWVLHQGDDVVPIPGTTKVKNLDDNIGAVKVKLSKEDLKEISAAVPAGEVAGSRLIGVLEPYSWRVANTPPPKSL

SEQ ID NO: 51222 - protein, 106 aa, Oryza sativa
MNPSYRRISESDDEFIHFVLPTLGDSSQSSCIRRPMHTSKLTGGCRVHEILTGHERLCKRNFRMEVDIFHALVNKLREKEYLTGTICFSRRAYCYILIYSGKKCNQ

SEQ ID NO: 51223 - protein, 281 aa, Oryza sativa
MQARVVVFPVKGRAWCFASPRATAPAAACGGGDGGALLPPLPPTVKDLWRGIAGGGRTASENAEAVIDFVADKMNRAWIGFGSAPEGSMKNRIHSFGLKLLSRVRPSEVLLKSVTKDVSLLEIVHPASINPRLVRRRLRHIAVRGASVHRKFLYGSVCLLPVTSVFMVLPLPNIPFFWVLFRAYSHWRALQGSERLQLLVSDSSDQWKILLEKQKEMSSRKDGNPCENTQYAPWNLQPSKKLDGFLESRKLNEGLDCDTISRICQAYDLDKIDVLKYRDLE

SEQ ID NO: 51224 - protein, 483 aa, Oryza sativa
MDFSTIREKLLNDSYTTLEQFENDVFLLTSNAMSYNSDDTVYYRQARSIEALAKKDFENLRQASEPEEEQQPKTVPRRGRPPKYAKKIEKTENDVSPDLSNAKTKSADHAETIRKRLTGDRTRNANITTRDSPFLQHNTPGSFAGKRTDRFGDYSGPSKYGKKTTPTISDDERRSTYDQQYFHSSPLFSALGGERKVLVPVGLQQQHAYARSLARFAAKFGPVGWDIAAKRIRRLLPSGTNFGPGWVVDGEPPENSQWPRVPMLSDPSIQSTGVPASNVISKNDESNQKSGLTSNEDSGEEHLARTEPVASTSACVNTNSVSATKLATKCENGANVSCDGVGSTGQTPPLQQHSHSREIHSNMNGFTALPNTISQYAGQGFLGQMQLTHAQVLGMFSGVNGRTNGFIHGHPLVANSIKAPQNGDVGKVATNPSPDAGHDSEAALSQTMTSSAPSLSAGVQPSGSMPSEKLANPKKHPDLALQL

SEQ ID NO: 51225 - protein, 251 aa, Oryza sativa
MSTKMKKGILRPFRYISNMMDGKEAAQDMQIGFPTDVKHVAHIGWDGPSVPNNNNNTAGAPSWMKDYHSAPLDSASFRSDRGGSAAANPWASQEIVVDGGSLGDTSFSETRSEASGSMDITAGDSPPSPDSRRSRRHRSRGSAATSSMDCTAADGGAAPEKKDKAKKSSRGKNRKKDKSDKSAAAGAGDDASGATCQDLPAVPKKSNRRKNKGGSEGTGAAAASKADGAGAGGEDAAAPEPPATEEAQDHD

SEQ ID NO: 51226 - protein, 377 aa, Oryza sativa
MASRRSAAASPAMAAAAAVVAVSVYLLVCSAPAAATAAAVAKKPSYPPVAKGLSFDHYKKSCPQAEAIVFSFLRDAIGKDVGLAAALIRLHFHDCFVQGCDASILLTKTPGGPDGEQQAIPNESLRPAAFKAVNDIRALLDRACGRVVSCSDIVTLAARDSVKLAGGPSYKVPLGRRDGLTSATPSQVLGALPPPTSHVPELIAALAKLNLDAADLIALSGAHTVGIAHCTSFTGRLYPRQDGTMDKWFAGQLKLTCPKNDTANTTVNDIRTPNAFDNKYYVDLQNRQGLFTSDQDLFVNATTRPLVAEFAVDQSAFFHQFVFSVVKMGQIQVLTGSQGQIRANCSVRNPGAASADEELPWSAAVETVVEAAESIVL

SEQ ID NO: 51227 - protein, 410 aa, Oryza sativa
MWKRVLETTKKAAAAATATAATGPQLATRKNPSSSRRKAVTPATAVSPAALLRLKQAASSKRTNLPSTLPDAQDVAAVEDENPSGGFTKEILSILNGPDDAEELRGAQAPPEESEDAEESVVNRILDTEWFAAPPPSNPLAAWRKEVAREKKKRYIFKNTESRRFTRLMQKCADKLGAEPALEFFGKLGRDTGAKEFNALIRICLGKAKECMDIDSAVEHIYRAYRLFELMRERGYQIVEDCYGPFLLYLVDVGMSEEFDMFSVFFKDANPRSSSRIAYYEMLLWIRAQDEEKIQELCRSVEDFNEEGDYDMAESYMLAFAESDRRLDFISLLESLDPTRILRSKYLLTIFQSLGRLELKNYAEKLLQQMRSKESGVGKFSSIIFEYASNIPNIALNRMIRTLEMDFLEG

SEQ ID NO: 51228 - protein, 134 aa, Oryza sativa
MAHKRGRLVGWVLLLLLAVAIAVAAAATPRQLFLVTQAPVTLTNHHGQLLTGNYSVNLLWYGRFTPAQRATVADFLLSMPPPPPRQPRRAGAAGSRTRGWGTRRSSARGSARGRSTSRRTALRRRRWCRRTPTW

SEQ ID NO: 51229 - protein, 404 aa, Oryza sativa; identical to SEQ ID NO: 29440

SEQ ID NO: 51230 - protein, 1046 aa, Oryza sativa
MEGGNHGGGGYPYPPPQQYPYPYGQYPYQYPPPQQQPPPPSAYLSPSRSFHGYPSAPPPQPQPQPYAHHSAPLQPYPPPPQHHAYPPPQPHPPSPYVYDPYHAPAAAYPSYPSPNPSPSISPSSSFHHHPEPPSPSPSAPSYPSIADGLANMHVSDRHDYPPPPSPAAVPAASSPSVLPPSASFPGGGSSHGGGGMQMVPYGPPAGGSQHGGMQMVAYGSPAGGSQHGSVRPSLKVVLLHGTLDVWVYDARNLPNKDLFSKRVGDLLGPRLIGAVGSKMSSANMTSDPYVTIQVSYATVARAYVVPNNENPVWTQNFLVPVGHDAAEVEFVVKDNDVFGAQLIGTVSIPAEKLLFGERINGIYDVLESNGKPCAQGAVLRLSIQYIPVAQLKMYHHGVIAGPDSLGVPNTYFPMRRGNRVTLYQDAHVPDGCLPDFCLDHGMRYQHGQCWRDIYDAICQARRLIYIVGWSVFHTIHLIREGVEKMPSLGELLKMKSQEGVRVLLLVWDDPTSRSILGIKTDGFMGTRDEETRRFFKHSSVQVLLCPRSAGKRHSWVKQQETGTIFTHHQKTVILDADAGNHKRKIIAFVGGLDLCGGRYDTPSHPLFRSLQTVHKEDYYNPNFATVDARGPREPWHDLHSKIDGPAAYDVLQNFQERWLKASKRHGIKKLGKSYDDALLSIERIPDFISINDAIYFSDNDPETWHVQVFRSIDSNSAKGFPKDPREATRKNLVCGKNVLIDMSIHTAYVNAIRGAQHFIYIENQYFIGSSFNWDSNKDIGANNLIPIEIALKIANKIKAKERFSAYIVIPMWPEGNPTGAPTQSILYWQHKTMQMMYETIYRALKEEGLDDLYEPQDYLNFFCLGNREVADSPSTSNSTSTPQEQARKHRRFMVYVHSKGMIVDDEYVIMGSANINQRSMEGIRDTEIAMGAYQPQYTWASKVSAPRGQIYGYRMSLGAEHMGVVEEGFNYPETMECMRRVRQIGEQNWERFVDNEVTEMRGHLMKYPVSVDRKGKVKPLPGCTSFPDMGGNICGSFRAIQENLTI

SEQ ID NO: 51231 - protein, 385 aa, Oryza sativa
MEERNDVNMDKSDEILLPGFRFHPTDEELVSFYLKRKIQQKPISIELIRQLDIYKFDPWDLPKLASTGEKEWYFYCPRDRKYRNSVRPNRVTTAGFWKATGTDRPIYSTEGTKSIGLKKSLVFYKGRAARGIKTDWMMHEFRLPTLTDPSLPKKPIDKNIPLNDSWTICRIFKKTSSMAQRALCQTWGAQLPGTIDPDIFSTLQSVQASQFALESSSCSLQAAATAAHQITSKYALQGNNNNQQQQQQHKPSNPLDGSSCKVINFNCSQSAEVQNSQIILPFEAHTSQKTATPLLFDTQFGQPDQISRFVVDSSVNANGGGISNKSQDPSARKPGSGFSMNSDWDGVARINFPFDLGADSSEDWRSSIPWESFLSPTTVHAEMPN

SEQ ID NO: 51232 - protein, 146 aa, Oryza sativa
MLLDDTNPSNGSSPDSELCERLSCSRPVRLPRDGEICPSRALEASKISAILMSALQVMPSHVQQFVPFRHDAERPPSPERPARNWRRTLFSWSMQESVEEAKHSTVSRANPSKSVGNLLLLLLHGNWEGLMMDLFFIRLSIVWNSG

SEQ ID NO: 51233 - protein, 640 aa, Oryza sativa
MGATSTSPQIPRIGKVIRKQIGKKQLATNNLKSILSKEMIDALASSQQEAGTLSVDFFRKRASPSWKTDDLVNDLSNASLDVDDKVKSENSSAEHELSLTDKTPKDDTAEHQVDAPAKNARRKLREKRREKRAMDLVRKDDEARVKLENAAIERSKAVDSAVLGKYSIWRKENENENSDSTVRLMRDQIIMARVYSVLAKSKNKNDLYQELQTRIKESQRAVGEATADSDLHHSAPEKVRVMGQLLSKAREDVYDCKAVTQRLRAMLQSADEQVRSLKKQSTFLSQLAAKTIPNSIHCLSMRLTIDYYLLPLEKRKFPRSENLENPELYHYALFSDNVLAASVVVNSTIMNAKEPEKHVFHLVTDKLNFGAMNMWFLLNPPGKATIHVENVDEFKWLNSSYCPVLRQLESAAMKEYYFKADRPTTLSAGSSNLKYRNPKYLSMLNHLRFYLPQVYPKLDKILFLDDDIVVQKDLTGLWDVDLNGKVNGAVETCGESFHRFDKYLNFSNPHIARNFDPNACGWAYGMNIFDLKEWKKKDITGIYHKWQSMNEDRVLWKLGTLPPGLLTFYKLTHPLDKSWHVLGLGYNPSIDRSEIDNAAVVHYNGNMKPWLELAMTKYRPYWTRYIKYDHPYIRGCNLAE

SEQ ID NO: 51234 - protein, 265 aa, Oryza sativa
MQVHENTYALVVSTENITLNAYMGNNRPMLVTNTLFRVGGAAILLSNRAADRRGRAKYQLIHTVRTHRGAHDQSFGCVTQEEDDAGEVGVSLSKELMVVAGEALKTNITTLGPLVLPISEQLRFLATVVLKRVFRADVKAYLPDFKLALDHFCIHAGGPRRPRRAREEPQALAVGHGAVADDALPLRQHVQQLAVVRARLLRGQGEDQARRPGVADRLRLRVQVQQRRVEGAAHRRRRGPRRRRQPVDEGGGHAPRRRAQGGAHR

SEQ ID NO: 51235 - protein, 74 aa, Oryza sativa
MMNNYLIGSIKDYVPPSASEATTIGGNDVPPNFRRMPQKKGPPAPNTFLDFLLPLFVLGLAFAAWYYLTFIAKA

SEQ ID NO: 51236 - protein, 246 aa, Oryza sativa
MAGADERVGQWQREPGEGGALPAPLRPDHGVPPLLHPLDARRHRLLRRRRPHPRGPPHAGDDRRLPVQAHVHLRHRLGRLHLGHLRRPLPRQLPVRAVRGVVHRPRPPRLPRRRPHRPDALLRRLHRRRGRAARLRPRRDDAGEAAGDAAVQGAEHGVLLLLRHAAVPGAVPGVRRRGVRAPPVQGQRPPPPRLPPPPPHPPRIPAGEAHQGRRHVAQHIIIFVSSFHRRAFESWDDRNGSKRKKK

SEQ ID NO: 51237 - protein, 272 aa, Oryza sativa
MWTLRSKISLDGGAVCGSRRRGQNKYCQRFINNVEKVLQNYQGKMVEAFGIKFEFDSILVDNLNKWVSFAVSARTKHLSFDLVPIRFARCDDRFIFPFELLDSGSICRLQHLQFSFISLQPPSWFGGFPNLRKLELNLVHVTRKELENMLCNCCCLEWLSMVRCHLKDDLRVDRPMSHLAYLLISCCVITKIELHATKLSTFIYEGEFVPIVLNHTSKLVNAHIFIFDAIFHHVVASLFHGLPNVHKLTLCIPDLQLEVFPFNNCELKIQFS

SEQ ID NO: 51238 - protein, 501 aa, Oryza sativa
MASDGSFFRYGERQIAAKPEDCPAMSSMLSLEDLPDALLAEIVKRITNTSDLKSISLVSKRLYTIEAEQRSSIRVGSDLCPAIDTLSALCSRFPNLLEVEMDYSGWKFHWNLLEKHIFSLHFPVLRDLTLYIDDIRMGCLASCKNLMSLRLNSVSAIGSCGLLSVAVGCKNLTSLHIIKCNHIVGSDKWLEYIGSAGSLEELVVKNCKRISQYDLLKFGPGWMKLKKFEFKFKRSFNTYEPRDPCYVDNYQYGYDFCCESLRDVTLATIVTKPEIGLRCLLTKCKALERLCLHYVIGISDHDIITISQNCSNLRSISLSQEMLLCEIPGGTGVMARTPLTDDSLNALALRSHMLEAVELMFYGCAPDWPSEIAFTQDGLVTLLQSCPIRHLVLRGANFFDDEGMEALSCAQFLETLELMQCVAVTDVGMRFLAQSPCLKNLTLQMCYEVTDDGVCEVAHARDLESLTVESCNQISVEALHGAAKSVHYKVDCPSYYDRYKD

SEQ ID NO: 51239 - protein, 381 aa, Oryza sativa
MEGHKPVHQFVDSPKPQRSARRICGMASRIDANDHGNQQGGNPQGPVGTAERLEHLLNQPANKICADCGAPDPKWVSLTFGVFICIKCSGAHRSLGVHISKVVSVKLDEWADEQVDILADSGGNAAVNMIYEAFIPENYMKPRQDCSSEGRNDFVRRKYELQQFLSNTQLTCYSQKSGKNHNRVQHSSSNRHGLGHAFRNSWRRKEHESKSVKKTVEIGMVEFVGLIKVNVIRGTNLAVRDMMSSDPYVILNLGHQSMKTKVIKSSLNPVWNERILLSIPDPIPMLKLQVYDKDTFTTDDRMGEAEINIQPLVAAAKAYETSVVADTAQLNRWLAKEGIWIQKDSAISIIDGKVKQEVTVRLQNVERGHLEMELECVPLTQ

SEQ ID NO: 51240 - protein, 187 aa, Oryza sativa
MITPPVAGDTFAGAPPPPSQEEDAPPYGSVVLGGTFDRLHDGHRRLLKASADLARDRIVVGVCTGPMLAKKEYAELIEPVEKRMKAVEDYIKSVKPELVVQVEPIEDPYGPSIIDDKLDAIIVSKETLNGGFAVNRKREEKGLPLLKVEVVDLLSGGAEGEKLSSSALRKLEAEKANQQEGAASKGV

SEQ ID NO: 51241 - protein, 198 aa, Oryza sativa
MAASLLRSGHRLRLLRHGSLSWASFSAAAAEELIDVRKLPTDYDASTFDPTAPSRPPPSDRVWRLVEDVSSLTLAESAALSALLLRRLDVPAPPIAILNSAAGLGGGGGAGAAGAAGEKAGGAAAAEKTVFELRLEAFDAASKIKVIKEIRSFTDLGLKEAKELVEKAPAVIKGGVSKEEARTIIDKMKAVGAKVVMD

SEQ ID NO: 51242 - protein, 208 aa, Oryza sativa
MCRFLISTPFSRRRGERKAEAGRMARSVSYVSAAKLLAMARSNPRVAIIDVRCRALASALRLSPTLRRADLVADVDEIVRFFLCVVGDCRDEERSYQAHIGGSHHFSSRSFAARLPELARATGDKDTVVFHCALSKVGPIPHTSHARHFANLRLLYPISYRMQAHGTNHLATTLFDLLIFTRTSCGSYFRLLDCVVSDRKNRKLILVS

SEQ ID NO: 51243 - protein, 295 aa, Oryza sativa; identical to SEQ ID NO: 32972

SEQ ID NO: 51244 - protein, 189 aa, Oryza sativa
MATSWAAPPPGYPYAQGQGGAQPPHPPQSTAVAVTPVSNGVGNPYVIVTPASASPSTCQSLRKALERYGRKLEDGTRKAADTTGNIWHHLRTAPNMADAAVARLAQGTKVYAEGGHDRVFTQAFGVVPGEQLRKAYACYLSTSSGPVIGTLYISTARLASAVTAPYPTTPPPSLSPAPPQLTLLRPSTR

SEQ ID NO: 51245 - protein, 519 aa, Oryza sativa
MGMLDLMRLMSIQRQRDQERRRRQAQAPPRDGLIALRAKRKGSPCQQDGDSQGAADIEIPSLPEDIWRLIHSLMPMRDAARAACVSHSFLSSWRCHPNLNFSSEALGLSKNAYGNEELAGLFYSKVNHILKRHSGIGVKKLTIKVYSDYSGKGSSYLNNWLQIAVKPGIEELIIALTQFQAKYNFPCSLLSNGSGDSIQYLHLSNCSFHPTVTLSGLRSLTRLYLCRVRITENELGCLLSHSLALEQLEIRYCNRIVCLKVPCLLQRLISLKVFGCDKLKLIENEAPNVSMFAFQGDKTELKLGETLQIKSLCMVRSGYVYHARAELPSIMPNLESLALKSCKETAFAPKLCSKFLCLRHLSIGLIGFFPAYDYLSLASYIYAAPSLETFDLNVMQRNVQSVSIFAHPADLRSIREEKHHNLKSVTVTSFISVKSLVELTCHILESTASLECLTLDASQTGFRCDTPGSKISKCPPLDRDIIMEGHRGVLAIRRYIQPRVPSTVKLTVLEPCSCHSTEL

SEQ ID NO: 51246 - protein, 430 aa, Oryza sativa
MSWVDLSAVRDWVHTVNTLSSLKVLRLRGCKLESAISTMSHFNLTRLEVLDLSVNKFNASIQQKWLWDHKGIKELYLTEGHWFGSIPDAFGNMSALQVMDLGHNNLMGTIPTTLQHLCDLQVVSLYDNYIDGDATEFMERLPRCSWNKLREMDLHSTNLSGELPVWIGKLSSLDFVDLSHNTLTGELPVGFGALRNMIYLNLGWNNFTGQISEEHFSSLLNLKYLYLSGNSFKQMVFEEDWIPPFRLKVAHLRSCRLGPKFPSWLKWQTEIRVLDVSGTCISDSLPVWFKTVFSQAYSLNLSDNQLCGTLPRTPEDMLAMVMDLGSNNLTGQVPRFPVNITYFDLSNNSLSGPLPSDLGAPRLEELRLYSNYITGTIPAYFCQLRRLVSLYLSSNHLTGEFPQCSDNYKALPPDDLDPFFSPYFGAACLQ

SEQ ID NO: 51247 - protein, 53 aa, Oryza sativa
MEGGTSHAWHPRNLILPPFHIINRFDFFPNQTSLHLTKFIGKCSSIYNTKLVY

SEQ ID NO: 51248 - protein, 190 aa, Oryza sativa
MGRRAAATAPAAAAAAAGAISATWWPGPSWSTTTRRSTPTAPRSPRSTARRPCSPSRDTWWPAPRRSAGSCWGCPSSNAGTPSAPSTANPRRPSREASSSSSVATSSSPARSTSSGSARCFSWCPTSREASSCRMTYSGSTTASSRLRVAAERNRVLGCFGPMWMRDCEKLLRAVSTVSLSSSVLLPSFM

SEQ ID NO: 51249 - protein, 82 aa, Oryza sativa
MSLNKLSVSKSMTVHCIYYLHPKIFGIYMGKIPYILGRMYYHFISKRYSHVLGRILDHEMENLYASIPISFIMRTSSCNFFW

SEQ ID NO: 51250 - protein, 356 aa, Oryza sativa
MASLTAALATPAAAALLLLVLLAAPASAANFTCAVASGTTCKSAILYTSPNATTYGNLVARFNTTTLPDLLGANGLPDGTLSSAPVAANSTVKIPFRCRCNGDVGQSDRLPIYVVQPQDGLDAIARNVFNAFVTYQEIAAANNIPDPNKINVSQTLWIPLPCSCDKEEGSNVMHLAYSVGKGENTSAIAAKYGVTESTLLTRNKIDDPTKLQMGQILDVPLPVCRSSISDTSADHNLMLLPDGTYGFTAGNCIRCSCSSTTYQLNCTAVQNKGCPSVPLCNGTLKLGETNGTGCGSTTCAYSGYSNSSSLIIQTSLATNQTTACQRGGSGRSQFARSMWSMSVISFHMVLIIICFL

SEQ ID NO: 51251 - protein, 315 aa, Oryza sativa
MDRDAGGGGDPATGGPAEFPGEAKITLRPDFLHLQAAPLQAAARKSKRYAIQQSILYKEHKRQSRHQLRGAQPSTSQKPRHAEAGSKTHVRQSVLYSERKRQPRHERGGTQPPTLLTASEHDSTTVEPSRLKEASPSLSDELRELEEYRKTHTFSSFEDAIHYVLSVHPRTLSGLPVTEDDHHDGEAFELTTPAQSVPVQVPTSEASVDVVQNGNKWMGEEVMTAFEKYVEERDYLKGIEYKLDELCHQCLNVKNYNHIFHHFNFSVKTKTPGSTDWTSELYFAEVKTMFRQKVYFCWPLEPNENGMKIFSYVTY

SEQ ID NO: 51252 - protein, 71 aa, Oryza sativa
MIQGVHPLIVLVAIIVSEDETKCGLMMQQQPDVIHDIASHFMDSPTWWYTPRSTGLDQNFKLTKHVVHGHP

SEQ ID NO: 51253 - protein, 325 aa, Oryza sativa
MQLSSQCPSLEVLELKGCYLDGHQISSASLKILTIVECRIMEGFTIAAPNLVSLCCVTPYHRAPLFENVGSLTLDAATIVLDDSFLYAGYEYEYEDIDEDAIEGNGSEDGEGSLNDSDYDSDAVSDASTCEYSEIANNYDDEKQLVEHDEVHNRSKGNYHGYDHRYKARPYRGYRKKKFNGGKVLGGDNVLHSLSNARSLELLADAGEVILNRELKTCPTFSNLKTLSLGEWCMGADFGQLISFLQHSPNLEKLFLELKLDYDNTQAMKEGTKPKGCSFACTHLKMVKIKCSIDDVRVHWLAQLFRTNGVPIENIFVRQTSSTCE

SEQ ID NO: 51254 - protein, 392 aa, Oryza sativa; identical to SEQ ID NO: 47311

SEQ ID NO: 51255 - protein, 86 aa, Oryza sativa
MDLRDAADAAQSAARLFGSSIAAPPAASQHPPRARARAMGVPPLHAPPRRFLPRAWLAIGLGEKQWWKYYTSRFYTRGNVIISVKN

SEQ ID NO: 51256 - protein, 85 aa, Oryza sativa; identical to SEQ ID NO: 42513

SEQ ID NO: 51257 - protein, 539 aa, Oryza sativa
MSPATAAADDLRAEEEGKGGRSSSRQEEANVLLAVDAAEGGGAWSPVGWFRMLGRELHWSFVAGVVATYGASQGLGGGVMRVASDYYWKDVQRVQPSAAQVYQGVTSIPWMVKPLWGLLTDVLPIAGYRRRPYFVIAGFMGVVAMLVLSLHSKLHVLFALLALMAGSASVAIADVTIDACVAENSIVHPHLAADMISLNGFCASVGGLIGFSISGFLVHAIGSQGALGMLAIPSALVILAGMMIKDVHMPNFPYELAHMKFVEASRTMMATLKCPEVWRPCVYMYMSLALSVDIQEGMFYWYTDRNAGLSFSEGLIGFIFAVGSVGSLIGVILYQNILKDHSFRSVLCLSQLLLSLSGMLDLILVLRLNLKLGIPDYYFAVIDEGVSKMINRIKWMPLLVLSSKLCPPGIEGTFYALLMSIDNVGLLSGSWAGGLILHVLNITRTEFKNLWAAILIRNAMRLLPLALLFLVPRSDQNSNLLPADLLPEDDAAQYQMDNVELTSLTVDGKSSTGSLHQECKNQDVVENDDDEASLLANRS

SEQ ID NO: 51258 - protein, 894 aa, Oryza sativa
MPPWWGKSSSKEVKKTAKENLIDTFHRLLSPNEQKGRTKSRGNRRHSKDPTAEKGCWSTAQSRSASPSKEVSRCQSFAAARAHAQPLPLPRSRAMVARTASDITESKVVLEKRGKGQQLPLPTTNWVKERPETTEPVAELSTASISSHGSIDSDDPGDLRLQGPVANDTDNVAKVATTGNSSVVHKECSSAITRKGTKEVTMPTNAFLSNQILSTSPRGTVVADSYQSNLQNSRKVVLDSAPNSVMSSPSRSPRILCPDQIPSSAFWAVKPHTDVTFVGSAQCSSPGSGQTSGHNSVGGDMLAQLFWQPSRGSPECSPIPSPRMTSPGPSSRVHSGSVSPLHPRAGGMAPESPTRRLDEGKRKQTHRLPLPPLSICNNSTFLPNNSTPTSPISHSPGRVENPTSPGSRWKKGKLVGRGTFGHVYIGFNSDKGEMCAMKEVTLFSDDPKSKESAKQLCQEILLLNRLQHPNIVRYYGSEMVDDKLYIYLEYVSGGSIHKLLQEYGQFGEPAIRSYTKQILLGLAYLHAKNTVHRDIKGANILVDPNGRVKLADFGMAKHINGQQCAFSFKGSPYWMAPEVIKNSNGCNLAVDIWSLGCTVLEMATSKPPWSQYEGIAAVFKIGNSKELPPIPDHLSEEGRDFIRQCLQRNPSSRPTAVDLLQHSFIRNASPLEKSLSDPLLQLSTTSCKPDLKVVGHARNMSSLGLEGQSIYQRRAAKFSSVHSDIHVRSYISCPVSPCGSPHLRSRSPQHQNGIMSPSPISSPRTTSGASTPLTGGNGAIPFNHARHLAYNNEGFTITSRCLDEPLPNQPPDPVLGRFVRVKQPSLGFQERAVPEADILSPQFGRMGHVSVWNLHDKPLPSEHASQKGFEDRVKLKPPLDLRSGPPHLGCNHGH

SEQ ID NO: 51259 - protein, 223 aa, Oryza sativa
MGGSKAEEKPAGGGGGGEDWWCYQFGNKDALIVKSSKKSPPALRMVVFAMTMICGIFICTMCMKQLGSDSLSRIVKIEVAEQLCNKSAILHSEVHFVHYPQPITYSRSECKCTPVRFFAIISSQRSGSGWFETLLNSHMNVSSNGEIFSSKERRSNISSITKTLDKVYNLDWNSSASKNECTAAVGLKWMLNQVRRRVKSRLTFCFFLIHPPCPSSKFVIFFT

SEQ ID NO: 51260 - protein, 399 aa, Oryza sativa
MFAAICRRRLAALFPQIRGGGGGAYHVQSNPQAALLFHSYSSTAVTGGSDPEPCPDTVSYLVSCGLPPAVARHTAANTRGLRIRSTEKADAVRTLLRSYGFSDADVARIARSAPLLLTVDPDRIIRPKLEFFATMGFQPSKLSTAPLLLARSLEKHLVPTIQFLRSIIGSDDGIRRGFSRIPRALLVSLDNCMRPAVEALHRHGLTGREDVSKVLVLQMGVLMLSPVRIGEIFEDLKAMGMSITDGRFANSFRAMCSMRRATWLRKVALYRSFGLSESEVFEAFKKQPTALLGADETIKKNASFFRDALKLEMREVMVHPVVMAYSFEKTILPRCAVLSVLMREGKINPDIQLLHALLGSAKTFSGRYVDRFAADVPDVVEAYEGKIKFKGFKGQGQGV

SEQ ID NO: 51261 - protein, 300 aa, Oryza sativa
MTAAEAATAPALGTTPPRLRPMDRAGLPPYGGAGGSGGLVRPPSSAAGYSGGGGSSSPPGTPPRPHSPRMFVPQSPVTPLHRAVDGPPPVFNQILTSEQEEDHDGPPDKLIPTLLVWTLGGKNVYIEGSWDNWKSKQLVHKCGKDHCVMLGLASGVYRYRFIVDGERRFQPDRPREADIMGTISNLIDVHDYVPDSVDSVSELMAPPSPDSSYGFLAPDDKEFTKEPPALPPQLHLGVLNSRGGSGGKEGECAMPKHNVLGHVFIGKGTPPMVAALGTTFRFQSKFVTKVLYKAIQREDR

SEQ ID NO: 51262 - protein, 226 aa, Oryza sativa
MEAAVGYAADSLIKATELRLGLPGTADDLPSTPRGKKRAAAAEDNNANAAAADDDEHDAVEAAPPVAKAQVVGWPPVRSYRKSCFQQQSAAASKSKAAVSSCNNKDEPITKNAAPAPAASSAAAANGGSLVKVSMDGAPYLRKIDLRMYKGYRELREALEAMFVCFSGAADGANPSEFAITYQDKDGDLMLVGDVPFDMFTSTCKKLRIMKRSEATGLGSPRQMKI

SEQ ID NO: 51263 - protein, 402 aa, Oryza sativa
MAAYQTGPVSEPPMLNTEIITQKVTGFNTETTTKEKPIGYLDVFVHQARDIHNICIYHKQDVYAKLCLTSDPDVSCSTKVINGGGRNPVFDDGLRLDVRTVDASLKCEIWMLSRVRNYLEDQLLGFALVPLADIVMADGKLVQEFSMTSTDLLHTPAGFVQLSLSYVGCSPDVIPIPAPNKSALVVNGSGNDSSVPCELEKIEFPDLNVVNENQIMVSKYFEMETLSYEDSVKVDNPKLVQSDAAVPGTELFNKNLDEYREGSPQSCVSTTDYSTATSVTPHSVSEPSDTILAASPTGSQREKSQDVTDGEADSSDVPLKGEVVKPVISINLNPGESVVQEDIVNMYMKSMQQFTESLAKMKLPLDVENSSPSTENNTDSITAEKPSPSKGSRVFYGSRAFF

SEQ ID NO: 51264 - protein, 290 aa, Oryza sativa
MVKTRAAATPRPSGGGGGAGAADITAGKISFRSRKIVKSTPAKGKSVATTTTAVLSPPPLSSPGELAAALSHLRTADPLLSEVISSTGAPAFISSPSRPAFHSLAHSILHQQLAPSAAAAIYARFLALIPAAADPDAAVVNPAAVLALSAADLRAIGVSARKAAYLHDLAGRFAAGELSESAVAAMDEAALLAELTKVKGVGEWTVHMFMIFSLHRPDVLPSGDLGVRKGVQELYGLPALPKPEEMAALCERWRPYRSVGAWYMWRLMESKGAAAKKAKSNAIATLPSSC

SEQ ID NO: 51265 - protein, 132 aa, Oryza sativa
MPNVQVADVSNLTAGITVYKKDKMNCMLDAYVFNKSFKPWSLRVHSSLPSETQQEPEARHRHHHSSLGPLQPPQALSAPPQSAARFLGTWHGFRHCGSCWPELGKPLECNTPCGCACPSCQGAASAGSSRSL

SEQ ID NO: 51266 - protein, 439 aa, Oryza sativa
MAAPRHHHLALAVALALLVVTAAAADEGGPRGRRVLVLVDDLAVRSSHSAFFASLQGRGFDLDFRLADDPKLSLHRYGQYLYDGLVLFAPSTPRFGGSVDQSSILEFIDAGHDMILAADSSASDLIRGIATECGVDFDEDPEAMVIDHINYAATDAEGDHTLIAGDDLIQSDVILGSKKIEAPVLFRGIGHAVNPSNSLVLKVLSASPSAYSANPKSKLASPPSLTGSAISLVSVMQARNNARVLISGSLDLFSNRFLKSGVQKAGSKIRHEKAGNEQFVTETSKWVFHERGHLKAVNVKHNKVGETNEPGMHRINDDLEYSVEIYEWSGTSWKPYVADDVQVQFYMMSPYVLKTLSTDKKGVFSTSFKVPDVYGVFQFKVEYQRLGYTGLSLSKQIPVRPYRHNEYERFITSAYPYYAASFSTMGAFFIFSFVYLYHK

SEQ ID NO: 51267 - protein, 135 aa, Oryza sativa
MQNQCERNMASSGAGRDERWILAGATALVTGRSKGIGRAIVEELVGFGSTVHTCARSEAELSRCQEELTAKGLAVSFSVCDVSVRTDREELVSRVRELFGGKLNILVSLIISCHHDFQRSNGICKIRGAVHIAPT

SEQ ID NO: 51268 - protein, 488 aa, Oryza sativa
MIARSRHAASLAAAACGGTSSAARSYAGLDLLLQENFSAPRRVLQLHALLLTSGALSLPHPDPAATAAFPYNCLIHAHLRLRGSASPPWGPLRIFSAMLARGVRPNRHTFPSLLKSSASFDAATPTLHAQCLRRGLDEDRFVACSLLSAYGRDGHLVRDARKVFDDMASPDLATCNAMLDVLCLSGDMYGARCLFDRMVVRDVVSWTTIISGLTRIGCHWDAVEMFRAFLLQNKGRLSEATLVSVLSACANLDAVEGLAVGMAVHGHVVPPEVQFTAFLGTALIDMYGKYGKLSCCGHIFHLVRDKEVCTWNALLSAFANHGKEAEALVKFEMMRSEGFLPNHITFVAVMTACARAGLVETGLDFFEELFTEYKVIPMMVHYGCVVDLLGRAGRFLEAIQIIERMPFMADDSVWGALLGACKIHGNIELSAQIREKLIVLGGQQPGRYVTVRNMYLEEGNWYAATRMGEVMQEAGIKKIVGMSSVVLN

SEQ ID NO: 51269 - protein, 220 aa, Oryza sativa
MGVVGWRVRSMVQHLGWNCRRGLSSAAVQSQLENVGFIGLGNMGAHMARNLVMAGYKVTVHDVNENTMKKFSDDGIPTKLSPLEVSKSSDVVITMLPSSAHVLDVYNGRNGLLANGGCLGPWLYIDSSTVDPQTSRKISMDISRCTLKEKKAYAEKPMMLDAPVSGGVPAAEAGKLTFMVFNPCFFVTLVLSPGIYFGRTVATLDGRISVLFWCKGMIYR

SEQ ID NO: 51270 - protein, 382 aa, Oryza sativa
MGPAAPPSEAAAAADDVVLPYISRILMEEDIDDDMFFCLYPDHPALLEAQQPFAQILSSSSSIAGEVNSAPMEDSAALMMQGSGNGRGRKGSKHGGDELEAEVGRASKLMATPEEEEDDDDGVGEMLEKMMLHGDEARGIPRGDERPARPRGEEVREGGAAERRAGQRGGCGPARAGHVVRAGGGIGRPPGRRRTPGADQAALVADRGRHQRLAHYFADGLEARLAGRGEALSAGWSRPRRSARRPWSCLRRTRCSWRRAASNGWRSRSPTWPSSRAAEGRNRLHIVDYGGQYHGLQWPSLLQRLAEREGGPPEVRMTLVGHPQPGFRPARRLERTGRRLSNCAARVRAPRSSSAPWRRRGGRRSPPRTSSASTPTTRRRSS

SEQ ID NO: 51271 - protein, 262 aa, Oryza sativa
MAVVASRCTGLLLPDLGASLAGFRRRRSTPASSLSFRPRRARRRLGSLSCIAPPDSAEPQTDEPAAKDDSTEDKAEASSASQDAGNPTFPNKDLSRRIALASTIGAVGLFAYQRLDFGGVSLKDLAANATPYEEALSNGKPTVVEFYADWCEVCRELAPDVYKVEQQYKDRVNFVMLNVDNTKWEQELDEFRVEGIPHFAFLDKEGNEEGNVVGRLPNPYFLDNVVALASGEPPVPHARVVGQFSSAESRKVHQVADPRSHG

SEQ ID NO: 51272 - protein, 663 aa, Oryza sativa
MPRLRFALLNWLTNQQLLVHVAFRNADDTPAPVAVDRNNDGQQGGGEYDQLEKALKGKTETDNIDGDDLTPMVETLKGILRKCRGNPWNIRAVGALLGANRVDKWKEIEENQVDDLVIGDKKRDPLIPAEYAQLPADIRLGFLYCLAFPERSEIPENSLIPARKLVRLWTAEGFPPDDSPLQSQEQEAENLLQRLIDYKLLVVKKTGLDGEVLKCKVNEHMRSLALEMCEAQKICRFARDPAHPAPRARPSSSLFSRKTALLHRYRVLAVHGDGDGNEAVQEMSSAMSKDIRLRSLLYFRTERKEPPKLELSFGRTYKLLRTLDLQGTRLTRLHSSITCLVCLRYLGLRGTQLEYLPETLQSLRRLMCLDIRDTGITEVNDVSEFKEMRHLYLANSFRDQSVLIKEGLLSLLHLQTLSGATHEVPSERKKAGMVPFEQELLYLKLLRKLSVKKASISCSKGISDAINKMDLLQSLTITCAAGEKRGFNLSYLNVNKNLRKLKLGGRMQKFDRLQPKLQSITYLYLWDSKLPVEGKDPLQLLQGLQQLLLLSLYNVYEGEKLTCTNGYHKLKKLSIIAMGKLNECTFGTKNMANLEVLVFAKCARLSSPPPKLDELNFLREVHLAQMPQGFYDGMKPATKKLVHFPEFQHHFHSSTRAVVQGGS

SEQ ID NO: 51273 - protein, 434 aa, Oryza sativa
MGGSSASPCDLDREFAPQIAQLLATPPLQPAQEYYNGLIQSRKHDGIRVNFSSKHGKGVCANKEFAEGDLILKDQILVGAQHSLNKIDCAVCSYCFRFIGSIEFQIGRRLYWQSVGSSSDCTNRRHCHESDLGSSASSSGATKENSSTLPEEVLGSLITGDMSLPFTDHFSLPQVVPCRGCEEERYCSQSCADSDWETYHSLLCTGSKTEPSQRSALQKFIEHANGSNDIFLVAAKAITFTLLRYKKLKTQPEFQNNTDESNFSLLMEAWKPLSMGYQKRWWDSVALPEDVDSCDEDTFRQQIRDLALTSLQLLKDAIFDSECAPLFSLDVYGHLIGMFELNNLGLVVPSPVEDYFIHIDDLPDDEKEEAEKVTRPFLDALGEDYAAPCEGTAFFPLQSCMNHSCCPNAKAYKRDEDTDGNAVIIALEPYQEGR

SEQ ID NO: 51274 - protein, 246 aa, Oryza sativa
MASADLLRREEEFYASLFDSAKGGDAVKSRGQMIERKIEVLEDMAAKVSNRRSRRWLNDRLLIELVPRLHVEEIKGLFAPPPWGEELPVSAFCRTSVGEWDAFRSIDMDVEARLVQQMKQSSTKQKNHLDRDELVALNSWHHIDRQTREAIKRNFLPDLLEIYEERVRTFIEDTSGKDMLVLNVQDPFQRLLLHGVCEFYNVSSTTTTTVRDGKLCKTTAIKKRSGTGAPSRITLVSFLRMKKKSH

SEQ ID NO: 51275 - protein, 342 aa, Oryza sativa
MKLLDEMRDKGCTPDIVTYNVVVNGICQEGRVDDAIEFLKNLPSYGCEPNTVSYNIVLKGLCTAERWEDAEELMGEMGQKGCPPNVVTFNMLISFLCRKGLVEPALEVLEQIPKYGCTPNSLSYNPLLHAFCKQKKMDKAMAFLDLMVSRGCYPDIVSYNTLLTALCRSGEVDVAVELLHQLKDKGCAPVLISYNTVIDGLTKAGKTKEALELLNEMVSKGLQPDIITYSTIAAGLCREDRIEDAIRAFGKVQDMGIRPNTVLYNAIILGLCKRRETHSAIDLFAYMIGNGCMPNESTYTILIEGLAYEGLIKEARDLLDELCSRGVVRKSLINKGAIRLLD

SEQ ID NO: 51276 - protein, 350 aa, Oryza sativa
MISSCPICNVQVLTAELQWHANAHFDDDQLQTDMELAHQIALTQSTPNPLLLDTHQECNNLFAGDPHAQGASSSIAGSSSLQGSVLDEQVSCLLQAQLRSNVQEIQGGVMNLLRACLESEAGSSTSMISGHVDHYQSLSSEDKGWGCGWRNIQMLSSHLLKQRPEAREALFGGSGFVPDIPSLQRWLEIAWDKKFDTLGSSHFHNKVYGAKKWVGTTECAALLRSFGLRARVVDFDSTESSGPHSKNGKHAPKRVQGPMDKFLIKNVSPTSTSSELCREDAENMRGQQVLVDWIWNYFASRHSDNSDSSRRVLVSDKTPLYFQHQGHSRTIVGIPKAKMVNMGIKIDLPF

SEQ ID NO: 51277 - protein, 107 aa, Oryza sativa
MVQFAKYGPNAERIHKGRIVEEISKPRGRSRSPSPKRRYRADYRDRGYRDDYRDRHYRDDYQDREYRRSRSIERYERERYQEKGYRRRSRSISPDYDRRASQEWAQG

SEQ ID NO: 51278 - protein, 461 aa, Oryza sativa; identical to SEQ ID NO: 46892

SEQ ID NO: 51279 - protein, 231 aa, Oryza sativa; identical to SEQ ID NO: 37662

SEQ ID NO: 51280 - protein, 186 aa, Oryza sativa
MASLIIWDEASMTKRQAVEALDMSMRDIMGCPRSPFGGKTMVFGGDFRQVLPVIRKGTRSQITEATLRRSYLWDCMVQLKLVRNMRAQSDAWFADYLLRVGNGTEEVNKEGNIGLPSDICLECKGNETDLERLIDTVFPNLNDNLTDPNYIICRAILSTRNEFVDRINMKMIERFRGDVMTYHSFD

SEQ ID NO: 51281 - protein, 271 aa, Oryza sativa
MAFTADDLLCATAEIMGKSTYGTVYKATLEDGSLVAGEAAEGEDHQGTQGFRVRGGGAGQDPPPQPAAAQGLLPRTQGREAPRPRLHAQRQPLPVPPRSRAQHSDQLGDADDDRQGHSPWPGFPPRRHDHRPRQPHRQQCPPRRPLQPQDRRLRPLPPHDHCRQLQRPRRRRRPRLPRPRAVQAKEGQCQDRRLQPRRHHPRAPHRQIPRRDHQWHGPAAVGGVHCQGGVDQRGVRPRAHARRRQWARGRRARGHAEAGAALRGPVAVGET

SEQ ID NO: 51282 - protein, 66 aa, Oryza sativa
MTSTMIRISFREQSWIFICMIPVAIAFLALCKPCNSWRKIQWQSSAHCLLPPPMSFLILQMNSTYL

SEQ ID NO: 51283 - protein, 266 aa, Oryza sativa
MPAAAAAKTLVPARGGGDMEEPLLAESSDRFSMFPIRYPQIWEFYKKAVASFWTAEEVDLSADAAPLGRRAVARRAPLRLPRARLLRGLRWHRAREPRLQVHVRRAGRRGSRPSTASRSPSRTSTRRCTRFCSRRTSATTSRRTASSAPSTPSPPCAARPTGPCDGSTAASASPSGSSPSPASRGSSSRVHSAPSSGSRSADSCRASPSPTSSSPATRVSTATSPASSTTSSAASSTSHASRRSSPTPWTSRGSSSATRSPSRSSG

SEQ ID NO: 51284 - protein, 249 aa, Oryza sativa
MKQKAALPKMQDRVVRESKYIAALKEKAEQRKREQDIIYERKLQKERSKEDHLYGDKDKFVTSAYRKKLEEERKWLEEEKRRQLQEEKEDVTKKKDLSDFYFGLSKNVAFGAQTHDNTKHAKPEKLDEKVQDAKTSKVGAEVSDRSPKHKRDSGEGAETANESRSVEEPATTQSRDSAAARSTEKNADVSLDAPQTQTPENTQPAPQTQNPQNTQPAQITDEHYKRNADALAAARERALARKKAKAQQI

SEQ ID NO: 51285 - protein, 317 aa, Oryza sativa
MTSPGASSFAAALVVEDFPWREEEMGMDPDKYREVFDLAQRGARAFRDGHFDEAVSFYSKAQTLRPGDPIILSNRSSAFCMISQVLRERSAADSEYQPLNGLDPTTHAEVALKDAEKVLAIGSNSPRPYLLKAYALILLEQYHEAREAILSGLQVDPLSHVLQSWLSDLHRNTSIAARARRPTLDRPDDFECTLCFKLLFEPVTTPCGHSFCRSCLHQSMDHGNKCPMCRTVLFIGPKTYPISVTLSNIIQKNFPEEYAKRKSEHETMTYAGVDLMPLFVMDVVLPCQKMALNIFEPRYRLGKEDNGRESSHGNGWY

SEQ ID NO: 51286 - protein, 690 aa, Oryza sativa
MFPIQHRAYRSGIENLLVLLIGGIPIAMPTVLSVTMAIGSHKLSQQGAITKRMTAIEEMAGMDVLCSDKTGTLTLNKLSVDKNLVEVFTKGVDKDHVLLLAARASRTENQDAIDAAMVGMLADPKEARAGIREVHFLPFNPVDKRTALTYIDADGNWHRASKGAPEQILTLCNCKEDVKRKVHAVIDKYAERGLRSLAVARQEVPEKSKESAGGPWQFVGLLPLFDPPRHDSAETIRKALHLGVNVKMITGDQLAIGKETGRRLGMGTNMYPSSALLGQNKDASLEALPVDELIEKADGFAGVFPEHKYEIVKRLQEKKHIVGMTGDGVNDAPALKKADIGIAVADATDAARSASDIVLTEPGLSVIISAVLTSRCIFQRMKNYTIYAVSITIRIVLGFLLIALIWKYDFSPFMVLIIAILNDGTIMTISKDRVKPSPLPDSWKLKEIFATGIVLGSYLALMTVIFFWAMHKTDFFTDKFGVRSIRNSEHEMMSALYLQVSIVSQALIFVTRSRSWSFIERHGLLLVTAFMLAQLVATFLAVYANWGFARIKGIGWGWAGVIWLYSIVFYFPLDIFKFFIRFVLSGRAWDNLLENKIAFTTKKDYGREEREAQWATAQRTLHGLQPPEVASNTLFNDKSSYRELSEIAEQAKRRAEIARLRELNTLKGHVESVVKLKGLDIDTIQQNYTV

SEQ ID NO: 51287 - protein, 230 aa, Oryza sativa
MDPDAVKSTLSNLAFGNVMAAAARDYQKEIVAKEKAQAASASHDEVDLDELLDDPELEKLHAERIAALKKEVEKREVLKRQGHGEYREITEGDFLGEVTGSEKVICHFYHREFYRCKIMDKHLKALAPIYLGTKFIKLDAENAPFFVTKLGIKTLPCVILFKKGIAADRLIGFQDLGSKDDFSTRALENILKMKGIIDEKKKDEDDEDDETYMSMNRRVRSSTAQDSDSD

SEQ ID NO: 51288 - protein, 174 aa, Oryza sativa
MEVKQVKVTAAAAEAATSSWSELPADLIGQVLLRLPSLADRVRLRAACRPWRTDAKRQAALPPPLPWFALRDGGLVDHHGAPVRRCAPILREGVTDYLAVDNLAFLAHNRAACCSLVNPLSASEETPLPQLANAVLRAMNDSKFYTVGNTKMPYVKVILSSPPLDSSPDPLVQH

SEQ ID NO: 51289 - protein, 47 aa, Oryza sativa; identical to SEQ ID NO: 37730

SEQ ID NO: 51290 - protein, 368 aa, Oryza sativa
MMDWTDNHYRTLARLISKHAWLYTEMVVAETIVHQKDNLDRFLAFPAEQHPIVLQIGGSNLDNLAKATELANAYSYDEINLNCGCPSGKVAGHGCFGARLMFDPEFVGDAMSAIAANCNVPVSVKCRIGVDDRDSYEELCEFVDKVVSKSPTRHFIIHARKALLSGLSPAENRNVPPLKYEYYFALLRDFPDVQFTLNGGITTIDQVTASIRQGAHRVMVGRAAYNNPWNMLGHVDSEVYGMPTRRSSRRQILESYQVYGDSIMGQYGPSRPNVRQLVKPLLNLFHSEPGNGLWKRKADSTLRHCKTLESFLEETLDAIPNSVLDAPIGKEAYIEEGHFADMDSLLPPRYSSLTNGSCEIPALVTAST

SEQ ID NO: 51291 - protein, 265 aa, Oryza sativa
MPCLGELGAGWNRGCRRLRISSLTLRSLGVSNDTRKDEKLEEVIVEDAPLLERLTPHTIWQGDFVIRVIQAPKLKTLGYLSHKITTLELGTMVFQKMVPVSLSNVMRSVKILALDTTPDLDVVIDFIKCFPCVEKLYIVAFNQGNLKNIRRNVSLECFDLHLKMVEFINYQGNMLDLNFIRFFVLNARVLECIKLVARRDKCEAKWIEKQNQKLQLYGRASRRVTFDFQADYGVDSLVHMKHISDLTTDDPFDRSFCRCRDEEIY

SEQ ID NO: 51292 - protein, 90 aa, Oryza sativa
MHAGCMHLPLCWGVRFFFLARTYDDKHFRKEGEKKKRERKLLTGGPQHTTISQFLDLIQILIFRSPYLLKYKTNSSETWTKILLKSFSIF

SEQ ID NO: 51293 - protein, 238 aa, Oryza sativa; identical to SEQ ID NO: 31892

SEQ ID NO: 51294 - protein, 59 aa, Oryza sativa; identical to SEQ ID NO: 35230

SEQ ID NO: 51295 - protein, 97 aa, Oryza sativa
MFYFCLQVLWITTYPIPLVNLQGRIYQVIKAQHSHQGRGGATIQVELRDVDTGNKITERFRTDEALESMNIFKTKTYMPSIFQTNFPFTIISYITCS

SEQ ID NO: 51296 - protein, 217 aa, Oryza sativa; identical to SEQ ID NO: 40447

SEQ ID NO: 51297 - protein, 531 aa, Oryza sativa
MGSCLSSDLPPRAGAGAGASPGWPQRWRRRRQRGVERGGAVSGGGGGVFSIGVGGKKLHHGGGGGGEMTEEELAKVEGRVCVNGASAAACLHTQQGRKGTNQDAMVVWENFNTSDSVFCGVFDGHGPYGHFVAKKVRDSLPVKIRTLWKTSANEDTSSHQNGSISGSVNSEESPVVDDEWGEYADDSEKLPEMFLPLKQSYFKAFKLMDKELKMHPTVDCFCSGSTAVTLVKQGLDLVVGNLGDSRAIMGTRDAANNLTAVQLTVDLKPNLPREAARIQQCRGRVFALQDEPEVARVWLPNNDSPGLAMARAFGDFCLKDYGLISVPQISYRRLTEKDEFIILATDGVWDVLSNKEAVDIVAAAPSRATAARALVDCAVRSWRLKFPTSKSDDCAVVCLFLDHAKSPDLIQENESEEETTEDVAIPDTVAKVDQDIAQGDAHISSEEQITEPALQHSYTLRDVDEIVPVEEPPVSKEPERCGSARSLADCISTNEEEEWSALEGVTRVNSLLNLPRILSGEKRSTSWRKRR

SEQ ID NO: 51298 - protein, 564 aa, Oryza sativa
MSVLIVTSVGDIEVDLHTDMCPLTTKNFLKLCKMKYYNGCLFHKVEKDFLAQTGDPTGTGAGGDSVYKFLYGDQARFFDDEIRPDLRHSKKGTIAMASAGENCNASQFYITLRDDVDYLDDKHTVFGMVAEGFDTLTKISETYVDDKGRPFKDIRIKHTYVLDDPFDDPPQLSELIPENSPVGKPQDEIAEERLEDSWVPMDEMVAPEELEEMIRSKEAHTNAVILESVGDIPDAEIKPPDNVLFVCKLNPVTQDEDLYTIFSRFGTVTSAEIIRDYKTGDSLCYAFIEFETKEACERAFFKMDNCLIDDRRIHVDFSQSVSKLWGQFRQSKRNANKDGCFKCGAPDHIAKDCDQGTEQKNKGPSYVLKDENTQRGGNNRRSYDLVFDEDGENYTDQQDPGSTGRRKIQRTDDRKSGLPPRGDHDRISRERTHSDENGREGGKEGDRDRGIRKHEDYHRYNKSGERSSSRYDDRGYSKHESRGKYRDGNDDYRRQPGGGSRYGRDKYEGERRYREDDGHGRSDRHKRDESDNRKRSPDTGKHRREDGGHRETSKHRERRQRDDR

SEQ ID NO: 51299 - protein, 613 aa, Oryza sativa
MAEEPQPEAAPAAVAATTEVAVAEKAPVEAEKEKKVEEETPAVEAEAKEEKKDEAAAAAAAGGDEAGAIEGTGSFKEESNLVADLPDPEKKALDEFKQLIAAALAACEFNLPPPPPPPKAKVEAAVEETKAEETKAEEEPKAEEPAKEEEPKAEVAAAAAAPPEAGTEEPKAEASSEEAKTEEPKAEAAADEPAKEESKAEAAPAEEAKPAEPEPEEKTVVVTEEEAATKTVEAIEETVVPAAAAPAAAATEEAAAPEPEVQAAAAPEPVLIWGVPLVGDDERTDTVLLKFLRAREFKVKEAMAMLRSAVLWRKRFGIESLLDADLALPELDSVVFYRGADREGHPVCYNVYGEFQDKDLYEKAFGDEEKRERFLKWRIQLLERGILSQLDFSPSGICSMVQVTDLKNSPPMLGKHRAVTRQAVALLQDNYPEFIAKKVFINVPWWYLAANKMMSPFLTQRTKSKFIFASPAKSAETLFRYIAPEQVPVQFGGLFKEDDPEFTTSDAVTELTIKPSSKETVEIPVTENSTIGWELRVLGWEVSYGAEFTPDAEGGYTVIVQKTRKVPANEEPIMKGSFKVGEPGKIVLTINNPASKKKKLLYRSKVKSTSESV

SEQ ID NO: 51300 - protein, 144 aa, Oryza sativa
MSSSAPPPPPGSVQKSEEEWEAILSPEQFRILRLKGTEYPGTGEYDKLFAEGVYECAGCGTPLYKSSTKFNSGCGWPAFYEGFPGAIARTPDPDGRRIEITCAACGGHLGHVFKGEGFNTPTDERHCVNSISLKFIPASEDSKL

SEQ ID NO: 51301 - protein, 476 aa, Oryza sativa; identical to SEQ ID NO: 35525

SEQ ID NO: 51302 - protein, 549 aa, Oryza sativa; identical to SEQ ID NO: 50264

SEQ ID NO: 51303 - protein, 193 aa, Oryza sativa
MAGTKLVALGFIVLLSIGLANASRVARYSSAQGSGSGSGEGSGSVNGGGSGGGSGTGSGQSGYNGAHASGGGRGGGGGGSQYGGSGSGSGSGSGSGSSQYSSNYYGSGGEYSSAGGSGGGGGGGQGNGNYGSTGQGSGSGTGSGYSDANSNYWRGPSYANANAGGYGNGNGYGQNGGSGGGGGSGSGYGDANP

SEQ ID NO: 51304 - protein, 79 aa, Oryza sativa
MACKTPQASLARSGRSFLSYRQHLSARIANFLLYSGGHSPAEASTTCCSISLFRAASTSLGRPSGLLPVSNLSSTTPNE

SEQ ID NO: 51305 - protein, 87 aa, Oryza sativa; identical to SEQ ID NO: 50023

SEQ ID NO: 51306 - protein, 392 aa, Oryza sativa; identical to SEQ ID NO: 39455

SEQ ID NO: 51307 - protein, 544 aa, Oryza sativa
MASAEAECAAAAVGGGGRAEIDTSAPFESVREAVDRFGGSAAWSSHLIRRMFAPPNPKEQSEESKQPVDIKEQAAQLEHDLIIKEKETLDVLKELESTKKIIADLKQRIQKESNETSPSAVKSDDQSEIPITESEEQKPENVNIDMDMEGLDEHPQPLSGSVLLELEQAKANLNRTTGDLAAVRAAIELLHNSIAKEKLLLERSREKLSSNTALASSLEDELDQTTQKLQTLKDLQARREDPSDIFIEIKKMASEVQQLRGMANASKSEAMMLAAEIEQTKASIGTAEIRCIAAKKMEEAARAAEALALAEIKALLSSESSSECGSSVCDGVTLSAEEYFTLCSKAQEADENSRKEVEEAMLQVDVANSSETDSVKKLDDARLEVEECKRALQEALKRVEAANRGKLAVDEILRRWKSENGHKRRSIGGSPKFKNAAQRRKDSHSMDIISDASTNSCKQTLSIGQILSMKLMGPEGYDKTIWDDKTSEMPNVSLGQILNRGRVLSREETAVRKRVSGKRKKFALTGLSVLLAKQAKNKKKRESL

SEQ ID NO: 51308 - protein, 521 aa, Oryza sativa
MHHPRARYPPGYTSGGGGGGGGGGGGGRGNGGGGFGGGGGGGGGNHGYYGRGPQPQPQQQHYHHQAQQLHQHQQQQQHAQRNSSSQQQQWLRRDQATAAAASGEVAARTAAQLEAVDSSSEDWKAQLNLPAPDTRYRTEDVTATKGNEFEDYFLKRELLMGIYEKGFERPSPIQEESIPIALTGSDILARAKNGTGKTAAFCIPALEKIDPEKNAIQVVILVPTRELALQTSQVCKELGKYLNIQVMVSTGGTSLKDDIMRLYQPVHLLVGTPGRILDLTRKGICVLKDCSMLVMDEADKLLAPEFQPSIEQLIHFLPANRQLLMFSATFPVTVKDFKEKYLPRPYVINLMDELTLKGITQYYAFVEERQKVHCLNTLFSKLQINQSIIFCNSVNRVELLAKKITELGYSCFYIHAKMLQDHRNRVFHDFRNGACRNLVCTDLFTRGIDIQAVNVVINFDFPKTSETYLHRVGRSGRFGHLGLAVNLITYEDRFNLYRIEQELGTEIKTIPPQIDLAVYCQ

SEQ ID NO: 51309 - protein, 237 aa, Oryza sativa
MAEAAGAAVAPAKLGLYSYWRSSCSHRVRIALNLKGLEYEYKAVNLLKGEHSDPEFMKVNPMKFVPALVDGDAVIGDSYAIALYLEDKYPEHPLLPQDLKMKALNLQIASIVCSGIQPLHNLTVLVRTDLHSISYCHRFIEKKVGTGESIPWTQQQIDRGFAAAENLVKGCAGKYATGDEVRLADVFLAPQIYAAVTRFQINMLNYPTLARLHEEYMKHPAFQAALPDRQPDAPSST

SEQ ID NO: 51310 - protein, 481 aa, Oryza sativa
MGSVVSSANINARSMDRHEKSGFGSNKRVKISTYECDSFQRIIPTLPDELSFQILARLPRLYYLKLKLVSQAWKAAITSSELSQLRRELGLTEEWLYVLTKLEPNKLDCYALDPLFRKWQRLPPMPSFVSEEESTGRTQSSWFQTWNVVGSSIRIADFIKGWLRRRYGLDQMPFCGCSVGVADGCLYVFGGFSRAVALNCVFRYNPCLNVWQEVSPMISGRAFSKAALLQSKLYVVGGVSRGRNGLLPLRSGEVFDPKTGIWSELPEMPFMKAQVLPTAFLADVLKPIATGMASYKGKLYVPQSLYSWPFFFDIGGEIYDPELNSWETMADGLGDGWPARQAGTKLGIVVNEELYTLEPSSSLDSGQIKRYDSEQDTWKTIVPQVPVHDFTDAEAPFFYLLAFMERSTLLQKRQTTIFKLCKLYCRITLRTVHLKKTSYGTYWLQRTLGLLSLLVVKFLMFKCGINSVTDVGIPWFNYLFD

SEQ ID NO: 51311 - protein, 740 aa, Oryza sativa
MVGQISPSLLSLNYLQYLDLSSNLLAGPNGSVPEFLGSMNSLIHLDLSYIPFSGTLPPLLSNLTNLEYLDLSFTSFSGTLPPQLGNLSNLRYLDVSEMQNVVYSTDLSWLSRLHLLEYIDMSNTILSKITNLPAVLNKIPTLKHVLLLNCSIPSANQSITHLNLTQLEELDLSLNYFGHPISSCWFWKVTSIKSLRLDETYLHGPFPDELGEMVSLQHLDFCFNGNAATMTVDLNNLCDLESIYLDKSLSSGNITDLMDKLQCSSKLYSLSSISNNMIGMLPSSIEHFTSLNHIDLTNNSVSGVMPRGFQNMANLEYLHLSSNRLSGQMPLLPTSLKILHAQMNFLSGHLPLEFRAPNLENLIISSNYITGQVPGSICESENMKHLDLSNNLFEGEVPHCRRMRNLRFLLLSNNSFSGKFPQWIQSFSSLVFLDLSWNMFYGSLPRWIGDLVTLRILHLGHNMFNGDIPVNITHLTQLQYLNLADNNISGLIPLSLSHFNEMTLKAVGDSISTLAFDESFDTFSLGMKHQILKYGSHGVVDMVGIDLSLNRITGGIPEEITSLDRLSNLNLSWNRLSGKIPENIGSMKSIESLDLSRNYLCGEVPSSLTDLTYLSYLDLSYNNLTGKVPSGRQLDTLYLENPSMYNGNIGLCGPPLQRNCSSNGYAQGHGDHKGQEKDSNSMFFYYGLASGFVVGYWVVFCALLFHKSWRVTYFCLVDKVYDKLYVYVVITWTRWMNTTN

SEQ ID NO: 51312 - protein, 1016 aa, Oryza sativa
MGSDKQSGSPLLGTLKMKSVRTILTHTYPYPHEHSRHIMTAVIIACLFFISSDNMHTLIHKLDNNIKWWSMYVCLIGFFYFFSSPFLGRTIQPSYSNFNRWYVAWICFASLYHLPSFQSMGVDMRMNLSLFLTIYFSSVLFIIAFHIVFIGLWYIGLVARMAGTRPGIWTIFQNCTVISIACCVFYSHCGNLAVHKSKSFSRNSDPNLLAFLENEKGTTWISNFLRMNELKDQICSSWFAPVGSASDYPLLSKWVIYGELVCSGSCAGPSDEISPLYSLWATFVGLYIANFVVERSTGWALTHPSTVLEEEKLKRQMKPDFLDMVPWYSGTSADLFKTAFDLMVSVTLFVGRFDMRMMQAAMKRTTDETQNDDLLYDYFNEREDLWFDFVADTGDGGNSSYTVARLLAQPSIQTVIGGSMHTLPRGNLLLIGGDLAYPNPSSFTYEMRFFSPYEYALQPPPWYRAEHIALDKPEVPLGISKMKDYDGPQCFIIPGNHDWFDGLHTFMRYVCHKSWLGGWFLPQKKSYFALRLPQGWWVFGLDLALHGDIDVYQFKFFAELCRNKIGENDSVIVMTHEPNWLLDWYWKETTGKNVSHLIQDYLNGRCKLRLAGDLHHFMRHSANQIDNPTSVQHLLVNGCGGAFLHPTHVFKNFEQFSGATYECKAAYPSFDDSSGIALGNILKFRKKNWQFDTIGGFIYFILVFSMFPQCNLGHILNEETWSGRLGSFSNTIWSALLYIFEHSYVSSVGSLTLLLASYSFVPSKLSRRKRAIIGGLHVLAHLTAALLLMLLLELGIEICIRNHLLATSGYHTLYDWYRSMESEHFPDPTGLRARLEQWTLGLYPACIKYLMSAFDVPEVMAVTRINICKNGMMSLSRSVLMMYYTSVFIYFWIFSTPVVSLIFGSYLYICINWFHIHFDEAFSSLRIANYKSFTRFHIKKDGNLEIFTLAVDKVPKDWKLDPKWEAEERRPHQLSHHRKHPSKWRSSSSPDPVTSVRVVDHFTISRTRTSDPNTSC

SEQ ID NO: 51313 - protein, 113 aa, Oryza sativa
MRICVLGNSWICICCKVLHPLVLGSECRAYAYMHMHMLEGVGPLGAWIRMWFGYSPQLVFLLICIRNSWLYRKVLSPDLWFTQNELVILRYNLSFGHEFVALSEGLHLFSLHI

SEQ ID NO: 51314 - protein, 408 aa, Oryza sativa
MKKGKHFILIRNPLNILPSFDKVVPPSFFELGIAELVSIYSELCELGSPPPVIDADDLQRDPEAVLSGLCEDLGIPYQPQMLQWEAGPKDFDGIWAPWWYRSVHKSTGFSMPRRYPLTFPFALYDLLEQSLPFYNVLKRHVSKTIGSPQPTLPDPPLPVPENKKILVWVGDELLPRDSAKVSVFDSVVQGGDAVWEGLRIYDGKVFKLDEHLDRLFDSAKAMAFSNVPSRDWIKDAIFRTLNANGMFNNAHIRLTLTRGKKVTSGMSPAFNLYGCTLIVLAEWKPPVYDNSHGIKLVTATTRRNSPNSIDSKIHHNNLINNILAKIEGNLAQAEDAIMLDKDGFVSETNATNIFMVKKGIVLTPHAEYCLPGITRATVSLIRFQLENYQQSQSKKLDTSIGMTWKRIY

SEQ ID NO: 51315 - protein, 616 aa, Oryza sativa
MWRLRSRTAAAAAVIAASAASLADVAYADSGYSFFRRSSPPPPPPAAAAAAAASEDSGTEVAVEVDSSGFDPESLERAARLLRKLNSSKYAKQLFELMRMQEKTRLAELEAEKVQYIIQQHLRDIERQQKEGEKFRESLQQQAQAEAQKLRYDDELARKRMQTEREAQRRQDAELVKMQEAAALRKEEVRRTTEKKILEKMLEDEKEKALLKKQNIQANAEAKGEALTREAKALEDYNRKMLLERINGDKEKWIAAINTTFSHIEGGFRMLLTDRSKLLMGVGGVTALAAGIYTTREGAKVTWGYINRILGQPSLIRESSMPKFPLSRFKALKSTSASLSGGAGFENVILHPSLKRRIEHLARATANTKSHDAPFRNMLFYGPPGTGKTLVAREMARKSGLDYAMMTGGDVAPLGSEAVTKIHQIFDWAKKSRKGMLLFIDEADAFLCERNSTHMSEAQRSALNALLFRTGDQSRDIVLVLATNRPSDLDAAITDRIDEVIEFPLPGEEERFQLLRLYLNHYMLKEDGKNSFWDSLLKKQRQKIQVKDISDDLLREAARKINGFSGREIAKLMASVQAAVYGRPDCVLDPQLLMEVVEYKVAEHHQRIKLASETST

SEQ ID NO: 51316 - protein, 377 aa, Oryza sativa
MRADRAELRELKPPYPLSAPGLPLLDPTICPRHASSRASRLACVRARRAAPSFWSLAPRYFPLVPNPESASASVLALLLWYLCSRLLCLATLLPPPHCLLPWFGSFCSWVDAGCVRACVRAEAMSSAVDAISCSKGIAAPPTEEATKERVAVVGKNGGVEHGGDAATMNGKQCGEAPHCRKESNEEEEDDEEKAPKAIDLGPRVSIKDQLEKDKDDESLRRWKEQLLGSVDLNSVGETLEPDVKIMSLAILSPGRPDIFLPLPVEPNAKGVWFTLKEGSLYKLKFTFSVSNNIVSGLRYTNAVWKTGIKVDSHKEMLGTFSPQPEPYTYVTPEETTPSGMFARGSYSARTKFLDDDRKCYLEINYTFDIRREWPALS

SEQ ID NO: 51317 - protein, 392 aa, Oryza sativa
MESSASSSAAVAAEGAPATGEQLAVFWHEGMVAHDAGRGVFDSGRDPGFLDVLDQHPENADRVRNMVSILRRGPIARFISWHSGRPAHAAELLSFHSAEYIEELVQANAVGAKKLCEGTFLNPGSWGAALLAAGTTLSAMKHILDGHAKIAYALVRPPGHHAQPDRADGYCFLNNAGLAVKLALDSGRRKVAVVDIDVHYGNGTAEGFYHTDSVLTISLHMKHGSWGPSHPQSGSVDEIGEGRGLGYNLNIPLPNGSGDAGYEYAMNELVVPAIEKFRPELLVFVVGQDSSTFDPNGRQCLTMDGYRKIGQIMRGMADQHSNGQILIVQEGGYHISYSAYCLHATLEGVLNLQAPLLDDPIAYYPEDEKYTMKVVDIMKKCWKESIPFLKDI

SEQ ID NO: 51318 - protein, 383 aa, Oryza sativa
MMRLKVTILVVAFVLSAGVHISAAAAAAGQREEVHLVPAVYVFGDSTVDVGNNQYLPGNSPLQLPYGIDFPHSRPTGRFSNGYNVADFIAKLVGFKRSPPAYLSLTPQTSRQLMRGYRGANYASGGSGILDTTGTTVVTLTKQIVYFAATKSKMMSNGGGDGNSSSASASAIDDLLSKSLFLISDGGNDLFAFLRQSNRTASQVPSFYADLLSNYTRHVQALYSLGARRFGIIDVPPIGCVPSVRVTSQAGATRCVDAANDLARGFNSGLRSAMARLAGSGALPGMRYSVGSSYNVVSYLTANPAAAGFKVVNSACCGGGRLNAQVGCGAPNSTYCGNRNGYLFWDGVHGTQATSRKGAAAIYSAPPQMGFASPINFKQLVSS

SEQ ID NO: 51319 - protein, 663 aa, Oryza sativa
MAGGDRERDVEEETRNQMMQNLFGDQSEEEEEDDDEAVDFVDEDDHPHPHQQQQQLRHQVVDDDDDNDAHARSGYHSEEVEGEADNGGEGEAEGEGESEGQVGMEEESEAEAHRADLDQGESDGEKVQSSPGELSDRVMQNDAAGMDSEDEAYQQRPVASRRRGVVASESEGSEDDYYAGRAHEDEEPRQTRKASSSPVEEERDQEVVRDVFGESDEDEPAPYRDQQEIDEDSHRSPMEDEGHYEKDLQPDDVVADEDMRYESDENRELKPKEKPVGPPLNLVVPLKQPPAQPERMNVIKVSNIMGIDPKPFDPKTYVEEDVFVTDESGTKKRIRLEDNIVRWRTVKNANGTTSCESNARIVKWKDGTMQLLIGNEVLDISVHEAHHDQSHLFLRNGKGVLQSQGRLLRKMRFMPSSLSSKSHRLLTALVDSQNKKTVKMQKWIESKDPERVKQEKERALGQNIRAHSILQRKREKVSRKYTQPARQRRQLSPGFLEDALDEDEEPDHQYGSRRMPARSRFGDELEAEALAERRIVSAKKSSMGRNIPRKPSFPARPPRRQENEYSESEREESEYETEGEDIEHSPTQGREDELDEEDEYEEDVEEEAAMSDEEIEEPKRRRESGGASASQRRKEIDSDDDSPPRKQQAVHRRKAVVFDSDDE

SEQ ID NO: 51320 - protein, 633 aa, Oryza sativa
MRNASGSSCCSRVAAPLHAQVLGSPSPSHGYGGAGDGCLLQAPPPAVVCGEMLALTTPAPPSLLHALASLNVLLLVAYLLLFLLAKLAAGLHRRGHGSCDEHQVTETSGREEFAGADDIAGVQQQQAEMLFWFDEAVFEDTALLGGEGKDQLMYDAATTPPTPTPARCLQVESTFPMVESTRRISPHHRQCSFSHEEPKAAAAAAAATASSQKDIIPAAVPSPENVPVEAGEEDGHGEHGEEDDEEEKRFRGDDVKLFVNSRALADTKKLLLEGAMAGKGGVQREREEESRLGASTLTSESTSKSSVEWRSSTVTKDSETEYPFSSSSRRSSSRWESYALFRKYDEDMVYFHRVGAQKLTETESYRSIKYQPRSVSERIVQKLTPKPRPAIGLRDPYPELERVYVAQICLTWEALNWNYASFRRHAGDIAARCCPARVAQEFQQFQVLLHRFIENEPYEYGLRPEVYARMKNSSPKLLLVPEFRDEEDEKDDLISAVQFLYILEESIRTFMAFLRADKRSHYQMFREMVKRRTSSMDQTLVITLKKANKKKKSRLKDLTRPRRCLRRTKLREEEEMSILLGLIDLKIVARVLRMPEITDQQLHWCEEKMNRVKVDPAQGKMQRDPSPLFFPAH

SEQ ID NO: 51321 - protein, 378 aa, Oryza sativa
MARRSAPLLQRLLSPTPSPSPSPPHPLAAAAVSRRTVTYMPRPGDGAPRAVTLIPGDGIGPLVTGAVRQVMEAMHAPVYFESYEVRGDMPTVPPEVIDSIRRNKVCLKGGLATPVGGGVSSLNVQLRKELDLYASLVNCFNLPGLPTRHDNVDIVVIRENTEGEYSGLEHEVVPGVVESLKVITKFCSERIAKYAFEYAYLNNRKKVTAVHKANIMKLADGLFLESCREVATKYPGIQYNEIIVDNCCMQLVAKPEQFGVMVTPNLYGNLVANTAAGIAGGTGVMPGGNVGQDHAVFEQGASAGNVGNVKVVEQKKANPVALLLSSAMMLRHLQFPSFADRLETAVKRVIAEGKYRTKDLGGSSTTQEVTDAVIAHLD

SEQ ID NO: 51322 - protein, 238 aa, Oryza sativa
MEESDETAVEAALGLSASFFVNSVLNAVDDVRYGAFEYCLQEGAPEAVGAAMATQKAEELERGVISIHNLVKDVLDKRMSNWEKYCLRHCFAIPEGFLTREDDIPAKKSLNDGNSDSDLDAELVSLRKKLEDANNESEELQKELSSLERQAECQRNLDSSMAELLKVFESKAFQDNFQDLVNVIPLFQRKLEGMKRKIVENIDDQIDWNVNGHHKRLASGFTARTEDSQDVVNVLKKY

SEQ ID NO: 51323 - protein, 538 aa, Oryza sativa
MSRSGVEVVVSRGCSRLVLPGMQPSSASAASSSSFSRGGHGGGGDRRPLPDGPFAGLVICVTGLSKEARTQVKEATERMGGEYSGSLHPKCTHLVVQSFAGRKFEHAVKHGAKNGLFVVTLGWLVDCVRRSMRLDESLYSIKNIGENGMPLGEFNRLVGAPVSGNSCLPPMMFQEKTFSDTTEKHRLQTSRKEHDHDEFLFTNDSIYIDPGISGEMRKKVSDAATREGAKLLDHWFIGCHATYVVCEDASVKRYVGHSDNIVTPLWILKTAKEKGLQRLVHLSSDLARQVATILENAQTFQENRKIGDVPSVNSNSSGVPSTQGEIDEIHQERQKFVEVAKKNVRDRRARRMQSCEVPIHPITPVKLMESICWTVSEPTTSACIYTEFSWSDDAFEQQSTTFFDANGDGKDDQSSDSFTRPLRESEKSEVIFKNHFLTVLFPIDRFGELGPSSRTFFSNGGFTRIQVLDHIYNFYQENMSSDEINVALQTDSRHADRLRSLYASTESAERGFVTFKRIDFLGSRRSFEGLKTPQQREQ

SEQ ID NO: 51324 - protein, 236 aa, Oryza sativa
MVVALGPGRFYGSSLPRPRFFSGGDRVEPPVAVTDPLMAWAHEAHWSMGGLSSKRLRLRAASRAPSTSSAAAPAATPGRRPRPAPPASSPARSPPSAPTTTTPPPTRKRRSRPRSSRSSTSRRSRRRSRRRRTRKRKRRKPSPPSPPRPRGSGRGSSATSSTASRPCRRGRPRSRSPQQPLHRRGLHRGGRPPRWLSPRRRRGRHRGGRLLPRGLLLHRRGRRRGGRPRQGGHRRG

SEQ ID NO: 51325 - protein, 207 aa, Oryza sativa; identical to SEQ ID NO: 35302

SEQ ID NO: 51326 - protein, 506 aa, Oryza sativa
MCDYFLQRIEGEQAAGDLADIVLRAGGAAAAAVAGGGIPSTEWQLPPAEEEEEEPGLFPLPPSSSDGSGMSGADAFGDPFAGLPDPFGGDYPSSGGAAAAADFFDAVVAKAGFVDVGVLGGGGGGGCDGGGVDGGGGGSSLLGMSKPILPRAAMQLPSVSPRAIRPYPVMACDTVKLGAPMAGGPCAFDGAAAAGLHMSSSPRGAVGGIKRRKNQARKVVCIPAPAAAGGRTSGEVVPSDLWAWRKYGQKPIKGSPYPRGYYRCSSSKGCSARKQVERSRTDPNMLVITYTSEHNHPWPTQRNALAGSTRSHHAKNSSSNSSSSGASSASKNNSSHSGYHHHHHQKPLVKAEPNDQSAAATTAATVPVKEEAAMVGTSSEALAKTTQKSMEDAAAAASATAAAVEHSDLMQQMFSQSYRPMIPEAAAGGHHDDFFADLAELESDPMSLIFSKEYMATNYKPAGDPAGKEMNAVDKGLDPAYMLDWSSTTVVTRAGGSSFMQGEGGL

SEQ ID NO: 51327 - protein, 145 aa, Oryza sativa
MSRISKFLQETRDRGIFPSIELSLKSNASSAQPSLIISVVQINGGTFPESLFLDALKVTVSPRYGPFNAVETEIEVFHIKRQKRIRSEARKVIVRYVQDDKLQAFPCFPCPLRYSSLDLVIGKVKASDVRKVSQDIWEGCHAARC

SEQ ID NO: 51328 - protein, 217 aa, Oryza sativa
MLTKEHQHTCKLTGLMLWESAQFMCSVLAENPSILAGKRVLELGCGSAGICSMVAATVAQFVVATDGDAESLDLLRENTASNLEPDLLKKILIRKLFWGDKDDLKAVRELSSDGAGFDCIIGTDVTYNPDAIFPLFKTARELISNKDSDAALILCYIQRRVDEDSILSTAMAQGFRLVDKWINGIHESNGIISSWFCGNDVCSSFRNATLSILYFQV

SEQ ID NO: 51329 - protein, 403 aa, Oryza sativa
MFGTPASSPLFGTPSTTPAFGAPSSTPAFGTPSTNPAFGTPSSTPAFGAPSSTPSFGTPSTAPAFGTPSSTPAFGAPSSTPAFGAPFSTPAFGVAPSPSPSPFGFQQQMTPSPSPFGFAGGGGGQITTQMAPVAPLPLSPSDRDIQAIVDAYKEDPGNPRYAFRHLLFSVTEPSQRVKPVAASDIMWAEAMGKLEGMDSSDRERLWPQLVQGFKDLSYRLKLQDGVLVSDSDRLSMTRDNVKKLQRHFQADTYPWIQRLKQQELVIERRLLRITRIVEALENRGYRIPLTKEEADLYERLAVIAKQLKGPTGDLHRRVYNLLSTSRLLASAGGTAGPIYIPSSAKVDEQSVAELLEALQQQTEAVAKLGNVMKRDTRDLEIILSEDTDMAEDSVGRRALKMYN

SEQ ID NO: 51330 - protein, 168 aa, Oryza sativa
MTVFLRTKMHRRSVEDGAIFLGAMFLGLVTHLFNGFAELAMSIAKLPIFYKQRDLLFYPSWAYALPTWALKIPISFLECAVWICMTYYVMGFDPNIERFFRHYVLLVLISQMASGLFRLLAALGREMVVADTFGSFAQLILLVLGGFLISRGMPSNSYIVPVVTRALY

SEQ ID NO: 51331 - protein, 535 aa, Oryza sativa
MEEGRRGDREGKSAAGWTALSTTKTTLEEKRRLQANGSVGGDAGTSGFRRIVRLFFACMVAGGIQYGWALQLSLLSPYSQTLGISHSYVSLTWICGPIAGFVVQPIVGYYSDRCTMKMGRRRPFILVGCLIICISVMIIGFSADIGRHLGDTKEHCSTYTGPRWSAAMVYIVGFWFLDFANNTVQGPARAMMADLSAGHHGPNVGQSIFSLWMAIGSVLGYLSGANGKWHEWFPWLKTAACCDACANLKGAFFTAVLLIVVSMTVTMYLADEMPLDKQDVDTSGGGGCAVFVDLFKSLRNLPPAMFKVLAVTAVTWLSWFPFIQYNTDWMGREIYHGEPQGTAAKADVYDAGVREGAMGLLFCSVALGVTSFVIPKLCRRLTSKVVWSISNFLVFALMAVMVAVGMVSMRGYRPSLAAGLTGPDPTLKAVALVVFALIGIPQAVLFSVPWAVASEVTAEEGGGQGLAIGVLNIAIVVPQLVIALTAGPIDGAFNKGNTPAFGIGGAFAFICGVLALIWLPKTRGVSNAAVVAGGH

SEQ ID NO: 51332 - protein, 444 aa, Oryza sativa
MDNIITAIQSASVSSYGQLKADNGDVGREDCDTSEISSWLESFENQEWLSWIGGTSQDAVASNIIVAAALVVWYPSIVKPKLAHLVVNQLIKLVMSMNDRYSSTAAELLAEGMESTWKVCLGTDMTHFLSDVLFQIECLSSAPSNNAVYKTAVAVTMREALVGTLLPSLAMADIVGFFGVIQSQIWATSSDSPVHVISLKTLIRVVRGSPKALAPYLDKAISYVLHTMDPSNLIMRKACIINSMMALREIARVFPMVALNESMTRLAVGDAIGEIHNATIRVYDIESVTKIRILDASGPPGLPSLLDGSSNTTATILITALSFSLEGEGLVAFSENGLMIRWWSLGNAWWERLSRSLTPIQCTKLIYVPPWEGFSPNSARLSIISSILGHDKHQNSETKTRELDEADNLKLLLHNLDLSYRLQWVSGKTIKLTRHGQELGTFQL

SEQ ID NO: 51333 - protein, 148 aa, Oryza sativa
MNTKNFLMENNWDVLFERDQLKIERDAGRVFKGWNEGKIFFAPTYKYSYNSDAYASETATSNKKRRTPAWCDRILWRGDGILQLSYYRGESRFSDHRPVCGTFIVEVEVLNRKAKMRPSNANMKIGAEELLPQGNNKGKGTTLLAHMP

SEQ ID NO: 51334 - protein, 93 aa, Oryza sativa
MLSGGRRGDLDLYRCVSLVGYCMLPMVIFSAISLFLPRGGGLIFGVGMGFVLWSTRVCTRLLAELASSGDEHRGLIAYACWLVYMLFSLLVVF

SEQ ID NO: 51335 - protein, 274 aa, Oryza sativa
MSRLMAAMLLGGARVAGNTTTAVMELHHPRPSYFLPPRPRLAAASWSRLRLQTAPRSSQAYDNSPADDRRDVGDRYRDAAEEAKEATGDAKERVKGMAGEAKGRAADIAGRAKDETKDTASRAADAASRATDRAKHEAADKAADVKDRAKDAADMAQGTARAVRDKTAETAEGAMDRAGEAKDRTVEGTKHAGEKVAEMTKEGASKVVETAQAIGEKAKQAAQGAWGATKEAAQGVKDTVAGGDVDADAAMKEQDRIAQEEKKRQAREKGAGLP

SEQ ID NO: 51336 - protein, 626 aa, Oryza sativa
MAVLAAPVVAAVLLLTWAAYGEAQYVLYKDATKPVEARVTDLLARMTLAEKIGQMTQIERQVASPQVLKDYFIGSLLSGGGSVPRKQATAAEWVSMVSDFQKGSLSTRLGIPMIYGIDAVHGHNNVYGATIFPHNVALGATRDPNLVKRIGAATALEVRATGIQYAFAPCIAVCRDPRWGRCYESYSEDHRIVQAMTELIPGLQGDVPANFTSGMPYVAGKNNVAACAKHFVGDGGTQNGVNEDNTIIDRRGLMTIHMPAYLNALQKGVSTVMISYSSWNGIKMHANHDLVTRYLKDRLNFKGFTISDWEGIDRITTPAGSNYSYSVQAGVLAGIDMIMVPNNYQSFISILTSHVNNGIIPMSRIDDAVTRILRVKFTMGLFENPMPDSSMADQLGKKEHRDLAREAVRKSLVLLKNGKTSDKPMLPLSKKAPKILVAGSHADNLGYQCGGWTIEWQGDTGRITVGMTILDAVKAAVDPSTTVVFAENPDADFVKNGGFSYAIVVVGEHPYTETKGDSLNLTIPDPGPSTVATVCGAAQCATVLISGRPVVVQPFLGAMDALVAAWLPGTEGQGVTDVLFGDYGFTGKLPRTWFKSVDQLPMNYGDAHYDPLFPLGFGLTTQPRTY

SEQ ID NO: 51337 - protein, 102 aa, Oryza sativa
MARRGGRRRYAVGGRRWGGRRLPSVPPSQIWPEGGGGRRPVASVSGWMAGGRQRLPSLPPSQIWPESGGGRLVAGQRPGGRRRRRLPAVTANSLPTCLSPRP

SEQ ID NO: 51338 - protein, 336 aa, Oryza sativa
MSPSLLLTSRGTHSPAPRPQTRRASQLLVSFPSRCSRFVGLRLARAAADSQGPNGAAPGSGSGGDGEGKAANGADTKLPKNRRDILLEYVKNVQPEFMELFIKRAPPQVVDAMRQTVTNMIGTLPPQFFAVTVTTVAENLAQLMYSVLMTGYMFRNAQYRLELQQSLEQIALPEPKEENDSADYAPGTQKKVTGEVIRWNKTTGPEKIDAVKYIELLEAEIDELSHQVARKSSQGSNELLEYLKTLEPQNLKELASSAGEDVVFAMNAFIKRLLAVSDPAQMKTTVSETSANQLANLMFWLMIVGYSMRNIEVRFDMERVLGAAPKIGELPPGENI

SEQ ID NO: 51339 - protein, 239 aa, Oryza sativa
MESRKPPPSALVDNHVVPGDVVLDLAEMTNQTIKLGAGLRQDCDTIQATSAGRLRLSKPSKYWVESSQKRYIPSVEDTVLGVVVDTKPDNFLVDIKGPNLAFLPVLAFEGGTRRNIPKFEIGTLIYARVVKANSIMNPELSCMDATGKAAEFGQLKDGYMFDTSTGLSRMLLSSPTCPILEALGKKLSFEIAVGLNGRVWVNAPSPSNVIVVSNAIIKSESLSGIGQRSMVESLLERLS

SEQ ID NO: 51340 - protein, 603 aa, Oryza sativa
MSYSSGIWHLNGCVKYSTRFGNTGRRFWGVYMEMEEPIRREKLGILKTKRLEQNRSFLLVLATLAATVTYPAGLNPPGGFWPDDNKPSHLAGDPVLRDHYPRRFKAFLVCNATAFAGSLVIIIMLLSNTAVDHVVKSNALRLCVLVSLFGLMGAYAAGSCREVHTSIYVFALVGAVFLYLCIQWIEHMVPIPCIKSSMEWVGKKKTHLLQKLGSFIMRGTRNPTEESRSTPRAQNPVNNRRSGTSDTAKDDVEKLRTYLLLLGILAATVTYQAGLNPPGGFWQDNNGHTAGDPILDAINPKRYKAFFYCNATAFVASLVIIILLQSQLITVGAMKRHILQTAMALDLFGLMGAYAAGSSRKFSTSVYVFILVLVVFTYFTLHVLLSMALKTQLKTKIEHVPNLFHRFTRFCFRRTEGGSDDGRSDSVELPNEEKDLEKRRKFLMMLAILAASITYQSGLSPPGGFWSDNDRHRAGDPVLHDEFPGRYRIFFYFNATAFMASLAVILLLVNKRLCDKGLKSYALRACVLVDLISLMGAFAAGSCRRVSTSIYVILVVAAVFAYVMIQILVLQVAEQKVDLLKKRRSGFESQQRSMTLTGPSWKH

SEQ ID NO: 51341 - protein, 292 aa, Oryza sativa
MMSGGGYSALDDPKASGSVPAATGPDPPTIKFADSNLQIFPPSEAKGKISGAYRPPTDADDTFSSSKSGGGGRGGGGGGAGSDDAGQGGWFRMFSVAAYKPYFDVDTSDVVERIRESVFPFRGTFTEKTSENPDLYGSFWTCTTLIFVAASIATFVTYLSHKWHKKEWNYDINLVTWSAGLFYGYVTFVPLGLYVILKYFSAPAGLVQLWCLYGYSLFIFIPASLLSIVPIEIFRWVIAGVAGFMSATFVAMNLRAHIVNSGERWFLIVAGIFLLQLGLAVLLKLYFFTITV

SEQ ID NO: 51342 - protein, 95 aa, Oryza sativa; identical to SEQ ID NO: 29895

SEQ ID NO: 51343 - protein, 421 aa, Oryza sativa
MFFTRLDDSPMFRKQIQSLEEGSELLRERCLRFHKGCRKYTEGLGEAYDGDIAFASSLEAFGGGHNDPISVAFGGPVMTKFTIALREIGTYKEVLRSQVENMLNDKLLQFVDIDLHDVKDARKRFDKASLLYDQARERYLSLKKGTRTDVATAVEDELHSARSSFEQARFNLVTALSNIEAKKRFEFLEAVSGTMDAHLRYFKQGYELLHQMEPYINQVLAYAQQSRERSNYEQAALVGRMQEFKRQIDRESRWSPNGINDSPNGDGIQAIGRSSHKMIEAVMQSASKGKVQTIRQGYLSKRSSNLRGDWKRRFFVLDSRGMLYYYRKQNSRPSSGYTNQRSSAPSEHGSGLLSRWFSSHYHGGVHDEKSVARHTVNLLTSTIKADADQSDLRFCFRIISPTKNYTLQAESAMDKMDWIKK

SEQ ID NO: 51344 - protein, 431 aa, Oryza sativa
MSSEAGGAAASSASAPPPPRRTPLERTADAAEELYRLRDTFFPRDPVEKAAALRALADDALAVLDSLPPEQRKTPQQRAVYEFLRGKILDVFPDYHKEAEDHLSKAVKLNPSLVDAWLCLGNCIWKKGDLDSAMNCFSLALSKGADKKILCQLSMLERSMAQGSEGQAQLVEESIKHAKEAVMLDIRDGNSWYNLGNAYLTSFFVSGSWDHMKLHHSVKAYQNAEKDETTKCNPDLYYNCATADKYLENYERALRGFEAAALKDPGLGADTEVQKIISLLDKLDSAMKGQLRSKRLASSVSSLSEVNIKSSHKKATIGILSEGLNKTVAVLGKVILLIRHDNIAPMYYLTCDLDQSYFILSVYGLRNEAIKEGDRVALLDPYYRILDISWKEQRYQFKSIRVDFPEQILVNEKAPPPHHVVRASIHAHNKP

SEQ ID NO: 51345 - protein, 168 aa, Oryza sativa
MSARNGASSPLSPSSRWLAPPFPLSPSSHPLRRGPFLLFIGWGEELGSGNEFDLGRPGNDVFAIIVQKKGDRYVCKCRLAERERERAMAHRSPFHFTLPLAFLLHLWPSRRLLLLGRCASLIRYIDRFFFNDALVLIFYIVCLLIHRRYDLMAGCTLALPESIHSSIA

SEQ ID NO: 51346 - protein, 186 aa, Oryza sativa
MEKGGRSERLFYKLLIDNVEELLPVVYTPTVGEACQKYGSIYRRPQGLYISLKDKGKILEVLKNWPERSIQVIVITDGERILGLGDLGCQGMGIPVGKLSLYTALGGVRAPCLHLHPSATIIAAITSVLAPSLTHRFPLRFALSPLRVASLHPHRIAPLIIPSWVTSFHIAASSGFVCSRPLADHP

SEQ ID NO: 51347 - protein, 178 aa, Oryza sativa
MVCHRMLPLLVVAVALLPAAAVATNYTVGDEKGWNPDVDYTAWVKKHRPFYKGDWLLFEYQNGRSDVVQVDEVGYDNCDKANAISSYSKGHSYAFQLKEAKDYYFICSYGYCYKGMKLAVTAKKGSASSSSSGSGDSSSSSKSDTASSKSKSSAAASSLANPSYAALLAVAIIFLRML

SEQ ID NO: 51348 - protein, 402 aa, Oryza sativa
MLTTSDMASAAGGASGKDWFDCLPDDLVHHVLSFLPALDAVRTSVLSRRWRDFWVSMPRLNVDVGDFRDDGQFENFTVHALPLLDSSVPLRSLRLRSSLHYLSALWVNHAVKRKVAVLEYSGRAELCSSVDASLSLASSYLTKVVLKHFDFDYGQFWPLIDACPALENLELLDVWTFYSVTISSSSLKHLRIVSCLFYNGFRINAPNLLTMCLDDVNVNGPLGHDSLVLENLSSLMTASVSVYHCFYPKHYVKTELHFFHGLSHARNLKLIAPLYEALFEEGLPTCPVFNNLKCLVLGDWCMAFDLYPLRCILRQSPMLEELCVELGEEECENCKNRKPAFSYGEISPFWCDRLKTIKIKCTEHDERFVALLQLFCKILVCIEEVDIDRQWVSAQPPDSSEL

SEQ ID NO: 51349 - protein, 326 aa, Oryza sativa
MDRWTGVLNVPLSRGGPPFRVAASLVLTPAKTLAVPCANAILFTGDRVRGSGDPAIERLSDAAYLARLLAGKLTGEANAWVVDAACFAGSFAVYRDLVPSVDAVGDPERYDPTGFPAAAGVTIILGHCIREIQSMVTKATMKGSSGNQSPTTSLLKYCPPKTVILGFSKGGVVVNQLVTELACLASESAKISDDVSGSSPPLLTRNLLVPISATEFLSSASEFHYVDVGLNHAGAYITDHAVIKEIANYLMHTSKNLCFVLHGTPRQWSDPNRSWIQMEKEVMLRLLQDEAQRCEGRLVLSQKRYFDGKPRSLLMHFEILEVMDIG

SEQ ID NO: 51350 - protein, 543 aa, Oryza sativa
MELARSACSKEHHKIYAGWFAVANPDGDGRVTGADATKFFAMSGLSRADLKQVWAIADTKRQGFLGFGEFVAAMQLVSLAQAGEEITQDSLKREDLSSLDPPVMEGLDELLARSKAGVKRVHPEENGAPQVQVHSANSWFSSKSAKKMQVPLTAVTSVIDGLKRLYVEKLKPLEVAYRFNDFASPLLTSSDFDAKPMVMLLGQYSTGKTTFIKHLLQTSYPGAHVGPEPTTDRFVVVMSGSDERTIPGNTIAVQADMPFTGLTTFGGAFLSKFECSQMPHPLLDHITFVDTPGVLSGEKQRTQRSYDFAGITSWFAAKCDLILLLFDPHKLDISDEFKRVIASLRGHDDKIRVVLNKADQVDTQQLMRVYGALMWSLGKVLNTPEVARVYIGSFNDKPVNESAVGPIGKDLFEKEQDDLLCDLKDIPKKACDRRVNEFVKRARAAKIHAYIIGHLKKEMPAMMGKAKAQQRLIDNLGDEFAKVQREYHLPAGDFPDVEHFKEVLGGYNIDRFEKMKPKLVQAVDDMLAYDIPELLKNFRNPYE

SEQ ID NO: 51351 - protein, 227 aa, Oryza sativa
MAAGRGISQLLKKAFRPSSSSPLSSSWINHEESSGFTGLRALAILGVGASGLLSFATIASADEAEHGLEAPHYPWPHAGILSSYDHASIRRGHQVYTQVCASCHSMSLISYRDLVGVAYTEEETKAMAAEIEVVDGPNDEGEMFTRPGKLSDRFPQPYANEQAARFSNGGAYPPDLSLITKARHNGQNYVFALLTGYRDPPAGVSVTLSHTYCFVILVLVATCRFHI

SEQ ID NO: 51352 - protein, 326 aa, Oryza sativa
MVQDGRKQFSDRTSHAHRLSNVSREDKRHTRCSESIPQTPKESRKRSRSKRSRGSSLSSDRSTSHSTSKCSRSRAHSPSHSAHSSSKSFQPTQPEGLRSMAVSNVSPLLVSGSPQHNLPSTAENKNSDFLVNSPLEGNLDSKTTTGLKHTRGYQQDIKDSRLSGESPVIPLRLKIQRNGELPVSGKDAYLDGYTETNLNNNLVYDDNVADGVQVQKTNSEDASSVKSSKDILVKSERSNSLKLTTNEVVSALKHNGMEARGTDLLNQPVEKYFGAARLWPWEVIYYRKLKKGPISTENYAKRLEQNKEYSIVDRYVRSSSGWWECH

SEQ ID NO: 51353 - protein, 242 aa, Oryza sativa
MQCDVGMVHAGVLVVDEVAEVDGEGGVAGGEEGRVPGDVFGDGPHNAIGPRLRRAAAEELDAAEPNSKDAVELDAAAGGAPLENSKRDGRRAAARRGEAIGRGVRGGDRWLGVGEAEGAGQEQGGAWAGAPRRRPERPVHLEVGSRRVGRSRVGDGDVGGGQPEISTRSNGGWDVKYEEEEEVNTGHGSGRRAEQGEAYSVCTLYYCVVWSSLPREVQNFRFGSRVVIIFSSLGTREQKPYL

SEQ ID NO: 51354 - protein, 107 aa, Oryza sativa
MSGPPRYLELQHKENVVTTAEVFIQTQWLYLQHVMRCRQKVWQTGTPIQVAHRDQISLRHPDAGSATLERHLGGSGNCQQCAVQTCMCPPCVHLHRVLRLYDRVHDH

SEQ ID NO: 51355 - protein, 277 aa, Oryza sativa; identical to SEQ ID NO: 33165

SEQ ID NO: 51356 - protein, 430 aa, Oryza sativa
MCPELLADIPYGTKSDIWSLGCCIYEMTALRPAFKAFDMQALISKITKSIVSPLPTRYSGAFRGLIKSMLRKSPEHRPSAAELLKHPHLQPYVLQVHLKSSPARNIIPSHQSPIDKVKKMTFPTESMCRSKGRRNSLGNERIVTFSRPSPERKFTSSIQSIKDYSTTRSVKDLSIDVSLVEEVSSKTTFTTRTSSIVKTPKRTPSKTITTPQLEPPKVSYNRVNRSELLSRTPVNRSARVIRRASLPLPLPSSETPKRGVSSISILEQLESPDVSVNSPRIDRIAEFPLASSEDPPFLKLHGRRSPTPTPQHCVIDQSITKDKCMVEAFHIIDVDDDDGRSDSSSGRNNAAAAASSRDGSSESTRQRRFDTSSYQQRAEALEGLLEFSAQLLQQERYDELGVLLKPFGPEKVSPRETAIWLTKSFKETGL

SEQ ID NO: 51357 - protein, 313 aa, Oryza sativa
MRGENTDGRREVQLGPHTIQTHGVRLARNHLHDWVVLILLAAVVIALHFAPPFSRFVGKDMMTYVSYPVKQSTVPAWGVPIISIVCPVIIFLSVYIARRDVYDLHHATLGVLYSVLITAVVTTVVKNAVGRPRPDFFWRCFPDGKQLYDQVTGDVICHGEKSFLKDGRKSFPSGHTSWSFAGLGFLSLYLSGKIKVFDRQGHVAKLCIMILPLLIASLVGISRIDDYRHHWEDVFAGGLLGFIMAMLCYLHFFPPPYHHQGWGPYAYFHMLEELQVANSHNAESQQSVCGHHVELSRLHNSRTSRNDLEAGRV

SEQ ID NO: 51358 - protein, 265 aa, Oryza sativa
MAEKAVGHGPRTRIRGGGLAAAPTAPSAAARRLSAVSYTAAPNLTKKVPDPKVVKPARKTTPVKKRPQVDQAQKQREELAALQEQLSGLQKKLLEKDEALRSAEHLISRISAANAAVDELRGQLTEKESQIESTGSELHGAKIQLAEKQAALEKLEWEAKVSSTKVEELQVDVASMDVEISALMKLFRKITENDRAPYSRERADDSSLECEPVQLDDMVGDIDMEKMEQEMSAYATALAAAKDNPTDEFLKAVTEARLRLQAFVL

SEQ ID NO: 51359 - protein, 17 aa, Oryza sativa
MMVISSPFQLISSSYRI

SEQ ID NO: 51360 - protein, 326 aa, Oryza sativa
MCGGAILADFTPARVPRRLTAAELLPVTPTPPAAERRTTRKRKSDVDFEAEFELFEDDDDDDEFELSDDGDESLAVSCVSSPKSKAVPSFSFSSDVSSSSRPRRRVAAAAAGRRKASKKSKYRGVRRRPSGRFAAEIRDPKKGRRVWLGTYGSAEEAAMAYDREARRIRGKGARLNFPRDGDGSPRRSNDRPCWTIDLNLPAAAVSGDDDDAMAVDAADADAGSAGRAAAYADQEALSAAKCKIKQCPRDEQMASATPELMEEDASSSRNMVPLSMALQLQYAAMIAECDREMEEIAAVERDLERRRRQVFERRGHLVRQASLLLD

SEQ ID NO: 51361 - protein, 518 aa, Oryza sativa
MEDGDGEEGTAKRAKLSAGDGGGGGGEDRLSALPDDLLVQILLRVGTSAAARTSVLSRRWRSLWYLLPELDFVSTADARAIRAALAYHGAPPLRLLLVSAVGATAGSVAEWLPLAARRLSGYLGLLNVVPKTKRDEGEGAAAGEVLELPCFASAANLALDLGFIAVAMPRSGVFSRLTLLSLDNVRFHRPCDLGDAVSSPRSPFLKRLTIQNAHGLSNLSIHSESLLQIRLGGLKGLKQLNVVAPALGALYVISCFSDPLAMSQPVADISAPQLETLHWEDAFDPSSVRFGNMANVKCLGTHFYLAFGQEDFGHNGDCLRLLQRFQFDALDRLSLTLAYMSELNDLENEYLMEEMTMLPDIMFLGLTVLASGHAIGPSVFHVLRMSTSIRRLELATDIYSSNPQARAACSSSCTCDLPPNWKTEELKLAFLHEVEINNFRGTEHQIALVKQLFGWAAMLKDMTINFCHSITESMARKVCQMLLSFSRPEILMNFYIYQQTTSGFVCSRGQMHRTKLVA

SEQ ID NO: 51362 - protein, 381 aa, Oryza sativa
MEPSASASADPPRRSPWRHPSNGGNPNPNGDAVIDTTSWPALSEAARNPPKPPPCIDSPYEGKQSSRHKPARRGGAGADHSPSPRDDRATSWDHGRHHHHHNSGGRRGSFGGRRRGGGGGGFDALYRAPIGPYVRGATAPPPPPPPPMAVAPPPFLPPPLRPFAAPLLFHHDMASPVSPVSPIYYVGPPPPPEALRPLPPFPPTMLAPPAYPYYHPQPQPDPEPEPDADPQQHRANLLKQIEFYFSKDNLCTDVFLRRNMDDQGWVNIALIAGFNKVQESTDDLQYIKDTIQSSSILEMQDDKIRRQNDWNKWVIPRESNTDVLPSPNINNLTAHLGSVGLQESAASSSSMVDENHHEILTNGPTSGNNQAPVVEDGAGKL

SEQ ID NO: 51363 - protein, 75 aa, Oryza sativa
MPLPAGCLHRLTTRATGGGGVARRGEASSSSRRCQLGGGPGEADAAREREPSMPFPNALPVLAQRPLAASNQHLN

SEQ ID NO: 51364 - protein, 557 aa, Oryza sativa
MGSAMDVVDISSDEEGFAAAAVAVATTTKKASVDSLGWIADLLREEDERALSDEFDDLEVMSELSAPPVMAQQKGGKPDCGGEEDDDDCVVLDGDPDDVVAVAGEKGSEGDGSSDELQIVAEKGPVACRDFPHSRHLCSNLPFSTTSHVKYCSMCHCFVCDTPAPCNYWGKGTEIYDHCHATDKEKKWKAMRHTFKSKGLPTSHPEKRQNVVYPTTTSFVQQDTQCEISLIQSHMTTYFPNQSHLANVVNQGLTQTRHTSVRVSPSVGRTVSATRTTPATRAGRGMSNAPSIQIPQSRTRFKRVGATSPGIVTLNDNQFGSAAPNNTQLHQPSSPHASQPAQVAPRTLFGTVQKNPPQRSLSAPIALQGQQDQSASSYQAASNGTHGTGPQFSRCISLTTQRTQLLPEPALDVYSKSWQDIIDSLASDLEVPDYNMGAAESQQPDRTISQPLDSITFQGVGLHSEPVVALANLMPCNGQNVANGMIGSNCLAQTTQILPHLNHQPSLVPNESHLNNSVSSTADGLLMEAAHQRDTQGSDSLDLLFDFEFEDWDSAEP

SEQ ID NO: 51365 - protein, 525 aa, Oryza sativa; identical to SEQ ID NO: 40439

SEQ ID NO: 51366 - protein, 612 aa, Oryza sativa
MVTDAEEVSPTASSSELEQEDDDDDCYLSDQEDDALEESVLQVLEDERDEDCHWSSTSVITKESLLAAQREDLRKVMELLGLREHHARTLLIHYRWDVERIFELLDQKGRDRLFSEAGIPLQPANNPGSPSSTEVTCNVCYDDVPLSDASKMDCGHNYCNECWTGYFIVKINEGQSRRIKCMALKCNTICDEAIVRKLVNAKRPDIAERFERFLLESYIEDNDTVKWCPSTPHCGNAIRVKGDIHCEVECTCGRQFCFNCSSEAHSPCSCVMWELWIKKCRDESETVNWITVNTKPCPKCHKPVEKNGGCNLVACICGQAFCWLCGGATGRDHTWSSISGHSCGRFTEDQSKKTEQARRNLYRYMHYHNRYKAHTDSLKQEAKLKGDIQGKISISENKDSKIKDYSWVINGLNRLFRSRRVLSYSYPFAFYMFGDEIFKDEMTSDERELKQNLFEDQQQQLEFNVERLSGFLERDFQNFSDDEVMDTMKHVINLSNVVDRLCKQMYQCIENDLLYPLRTPHNIAPYKSKGLDRASELNVCWDSSEQGLQPINYSQDEHKSQPGLSGSSIFGKRQLGSSSNNNGRPHKRERNDAHGGVALFDLNVPAEVADKI

SEQ ID NO: 51367 - protein, 322 aa, Oryza sativa
MAAAPGAGGQGGGGMDAVLLDDIIRRLLEVRTARPGKQVQLSESEIRQLCTVSREIFLSQPNLLELEAPIKICGDIHGQYSDLLRLFEYGGFPPEANYLFLGDYVDRGKQSLETICLLLAYKIKYPENFFLLRGNHECASINRIYGFYDECKRRFNVRLWKVFTDCFNCLPVAALIDDKILCMHGGLSPDLTHLDEIKSLPRPTDVPDTGLLCDLLWSDPGKDVQGWGMNDRGVSYTFGADKVSEFLEKHDLDLICRAHQVVEDGYEFFADRQLVTIFSAPNYCGEFDNAGAMMSVDETLMCSFQILKPAERKGKFMASNKM

SEQ ID NO: 51368 - protein, 82 aa, Oryza sativa
MTLLMKQIKMWIMAVLVFRKLLLSYLKIAMGLLKERNLKLKIHQKILQNIQKCLNKKIVSRLSWKSVVPTKLIKIYRMMATS

SEQ ID NO: 51369 - protein, 646 aa, Oryza sativa
MAEPALLDPTAAFDLRLYPAHLFDHELPLAGGGGGDDDDDLPLDGLEFDLPGDFSVEDFLLRSPERDDSGEGSAAGSGPTASPSSSPTTSASNSAVANGSGGEVKHEESDEGRSGGGDPKWSLKRKQASPGPSSDAAKCRRSGDGDVSPSASASRTAVDSDEGGTVCEEEEDERRAARLMRNRESAQLSRQRKKRYVEELEEKVKSMHSVINDLNSRISFVVAENATLRQQLSGGSVNCPPPGVYPPAPIPGMHFPWMPGYAMRPPGSHVPLVPIPRLKPQQPVPSSKVVKKPESKKTVENKSKSKTKTKKVASVSLLGLLLIMLVFGAFIPGFNHNFGMCGQSDNAMFRNFGQSHARVLSVSSQDKSSLNNSDMIGVDVGKMTGNTDGPGKKHQPAHNSSEILPALLYVPRNGKHVKINGNLIIHSVLASEKAVAHKASKDDSDQSARDHKETSVAIARYLSLPGKDVNRQETSSADGPLPQWFREGMEGPILNSGMCSEVFQFDISTASSNPGGIIPASPVVNSSSVNATEKIPAHSAAYHGKLKNRRVMYNEAIPLTGKTANNTEPFNRTSESSSKLPDSKPASSVVVSVLADPREAGNGDGDPRVSPKPLSKIFVVVLVDGVRYVTYSCTLPFKSSSPHLVN

SEQ ID NO: 51370 - protein, 445 aa, Oryza sativa
MDEEYDVIVLGTGLKECILSGLLSVDGLKVLHMDRNDYYGGDSTSLNLNQLWKRFRGEDKPPAHLGSSKDYNVDMVPKFMMANGTLVRTLIHTDVTKYLSFKAVDGSYVFSKGKIHKVPATDMEALKSPLMGLFEKRRARNFFIYVQDYNEADPKTHQGLDLTTMTTRELIAKYGLSDDTVDFIGHALALHRDDRYLNEPAIDTVKRMKLYAESLARFQGGSPYIYPLYGLGELPQGFARLSAVYGGTYMLNKPDCKVEFDMEGKVCGVTSEGETAKCKKVVCDPSYLPNKVRKIGKVARAIAIMSHPIASTNDSHSVQIILPQKQLGRKSDMYVFCCSYTHNVAPKGKFIAFVSTEAETDNPQSELKPGIDLLGQVDELFFDIYDRYEPVNEPSLDNCFVSTSYDATTHFETTVTDVLNMYTLITGKAVDLSVDLSAASAAEEY

SEQ ID NO: 51371 - protein, 397 aa, Oryza sativa
MQRSRRALLKRKAAAAAKEEEEEAGVGVATAAAAGRRRRRRLYGFSVSLVVACWVVLLLLNPLVGHGNGQRDEGIFADEGSSDPSFDSVEPTLSEGSVDSVVQQENGENHALPGDSCAKPDENHVLSEETLLEKDQLCSNDEAQGDSMDALPKDNVDQGENLPRTDDDSVVHPEGEVESEGVPRPARLSRVVPPGLDEFKTRAIAERGKGVPSGQPGNVIHRREPSGKLYNYASAAKGAKVLEFNKEAKGASNILDKDKDKYLRDPCSAEGKFVIIELSEETLVDTIAIANFEHYSSNLKEFEMLSSLNYPTDSWETLGRFTVANAKIAQNFTFPEPKWARYLKLNLLSHYGSEFYCTLSMLEVYGMDAVEKMLENLIPVENKRLEPDDKMKEPVDQ

SEQ ID NO: 51372 - protein, 438 aa, Oryza sativa
MLSSPAAPVPNDVTLLTVLSACADSPSSPLARRLALSVHARVLKLFPSHLLLSTCLVRFYFASRLPHLALQLFDAMPVRSAVTYNTVISGLMRNGLVAAAFEVFDGMPAPDKVSWTALIDGCVKNGRHDEAIDCFRAMLLDGVEPDYVTLIAVISACAEVGALGLGMWVHRLVVRQGLERNVRIANSLIDMYARCGQVELARQVFSGMRKRTVVSWNSMIVGFAANGRCADAVEHFEAMRREGFKPDAVTFTGVLTACSHGGLTDEGLRYYDLMRAEYGIAARMEHYGCVVDLLGRSGQLEEAMRVVTTMPMRPNEVVLGALLAGCRMHGDVGMAEQLMQHLLELDTGGDANYVLLSNIYAAVGKWDGAGKVRSLMKARGLRKRPGYSAVEIDGDVHEFVSGDRSHPQAEEISQMLGLLMHEMAGHDYDHVIDCLDGG

SEQ ID NO: 51373 - protein, 500 aa, Oryza sativa; identical to SEQ ID NO: 30902

SEQ ID NO: 51374 - protein, 330 aa, Oryza sativa
MYEKVRRLKQRYEATAKKVEHGGDLPAKEDDLRMYQLSSEIWGKNAKDAGNSSKNKKGQAKKDKVSGDSKEAAKEDKVDEAAIAVNEKGGTLAENKKGKTNKQKTGMETKVGSSKEAALAASPTKGKKKGSHKDKLDEEAKSGTAKVTSTIATDDDDGTLGGSKREKAGKEELDGDTHIVMPKEATTTAASDDGTLVGSKKGKADNGKLDGDTHSVMPKEATAGTQNGGILTGGENHKEKVDKDANVPSIRREYAELQSLYPNLASFVNGIEAQHPCGSTFKRAFEFISDDKACTLESKIKKQKIAEVRMQLRLADTKKEVANALLGLLD

SEQ ID NO: 51375 - protein, 475 aa, Oryza sativa
MRVNPALFLPLMAEYAAPTWAILISGFFMLLSVSLSMYLIFQHLSAYNNPEEQKFVLGVILMVPCYAVESYVSLVNPDTSVYCGILRDAYEAFAMYCFGRYITACLGGEERTIAFLKREGGGDSGEPLLHGASEKGIIHHHFPVNYILKPWRMGVRFYQIIKFGIFQYVIIKTLTASLCLILQPFGAYCDGEFNLRCGYPYFAAVLNFSQYWALYCLVEWYTATKDELAHIKPLAKFLSFKSIVFLTWWQGIMIAIMYSLGLVRSPLAQSLELKSSIQDFIICIEMGIASVVHLYVFPAKPYSLLGNHRSPENISVLGDYAATDPVDPDEIKDISRPTKLRLPQLEPDEIIVTNVKESVRDFVIGSGEYVIKDLKFTMKQAVRPVGKRFEKLMKKKGKFGQSRDDNWVSTSTLQRAIHGIDDPLICGSSSDSGIGRGKRHRRDVSSAGVVDSWEGSDQTSDGYVIRGRRWEIKKS

SEQ ID NO: 51376 - protein, 586 aa, Oryza sativa
MTGAAAWPVCTICYEDLRPLSDQHLHCLPACGHVFHALCLEQWLEYCPGGKKKLTCPICKQPCGAAHPPTRLFFQSTGACPTQTASSSPSRHEPTDGGADRDELAAEVARLEQKAASLGRVLDEQRDGIQKLNAEVAMWREKAAEAEVMKESVRREKECVQHLLNAKTEELSRKSSECGRLQEKGLSLAKELAALKLSTDMNLQEEEILKLASLGNHGNAANAVDVLTRSLALRNKSYKELMIQCNVLGRSESRSQQRFEKAKELIKKLKARVQDLEKEQEEKENGVIRDLRSAKKFKADQTNSGNTTVNNGFSGLAAGCGDYPMKLDEVVQDPCDKPGPSPEAKNDLNIKDKMDDKHADVIDLDADDSVFQHEHKKGLSAKPFGNDGNDLDFKSRSSLQEHYRKESITCKTYVAEENSFLKPSMVTERSALQESFTTNKLQSFQETPVLRSMKATTSTWEKETLTIDGISKQATRMAPGTGPQQVHNFNSLSDDFQIPIRNLGGEGTGKSVGKWCKGVATPGSLNTNANKRNLIAVGPDGRGGKVKILRDLGKFQDSKTQALWPKAQKVGSRGGQSQIDHFFGKR

SEQ ID NO: 51377 - protein, 364 aa, Oryza sativa
MQLKAPTRAKYSQGFMPIGESDAYCALIPGLPEDLAKICLALVPRSQFPVMGSVSKRWMSFLESKEFIAVRKEVGKLEEWVYVLTADAGSKGSHWEVLGCSGQKHSPLPPMPGPTKAGFGVVVLDGKLFVIAGYAADHGKECVSDEVYRYDSCLNRWVELSKMNVARCDFACAEVNGMIYVAGGFGPNGDSLSSVEVYDAEQNKWTLIESLRRPRWGCFACSFEGKLYVMGGRSRFTIGNTRFVDVYNPNDNSWGEVKNGCVMVTAHAVLDKKLFCIEWKNQRSLAVFNPADNSWQKVPVPLTGSSSTRFCFGIHDGKLLLFSLDEEPCYKTLMYDPAAPTGSEWFTSELKPPGLCLCSVTIRA

SEQ ID NO: 51378 - protein, 802 aa, Oryza sativa
MDADFRFDPDGSDDDGAAASAAAGRRKPAQSPWEFSSYAESVAAEHARRRTTSIDEKISQALSGSRRGGKPSIPDGDSEGDEDDSEVEDDSEEDDKEVVEGEIDDEEDEVEESEDDDEGVEVSDEEVEELEEGKGEEKSDEVEEGEEGQDGEEEEKEEGDEEAAEEEEETDKKSGVVDPSKFFASSEGASFHANSFLELNLSRPLLRACEALGYQKPTPIQAACIPLALTGRDICGSAITGSGKTAAFSLPVLERLLFRPKRVPAIRVLILTPTRELAAQVHSMIEKLAQFTDIRCCLIVGGLSTKVQEVALRSMPDIVVATPGRIIDHLRNSLSVGLEDLAILILDEADRLLELGFSAEIQELIRMCPRRRQTMLFSATMTEEINELVTLSLNKPVRLEADPSLKRPATLTEEVVRIRRAREANQEAVLLALCLKTFKDKVIIFSGTKHSAHRLKIIFGLSGMKAAELHGNLTQAQRLEALELFKKQEVDFLIATDVAARGIDIVGVRTVINFSCPRDARTYLHRVGRTARAGREGYAVTFVTDDDRSLLKAIAKKAGSQLKSRIVAEKPVAECAKLIEELEDQISTIIQEEREERILRKAEMEATKAENMIAHKDEIYSRPKRTWFATEKEKKLLAKAAKESTSQGKSNSGVISAQQAEDLRLKEKKRREREKNLPRKKRRRLEAEREMLEDESEDEEEAKESKGGKKEKKGQSLVDVAYRRAKSMKASGKRGAGTGKGKNDKKAKQHSGKGPTRQEEMQELFQNDMSEWKQGRSLKKNNVMRKKSKNSFKSKSRYNRRK

SEQ ID NO: 51379 - protein, 89 aa, Oryza sativa; identical to SEQ ID NO: 35136

SEQ ID NO: 51380 - protein, 475 aa, Oryza sativa
MAAIPREAWEGCSVLLDINDGDRLAFFRLTPAATVKVGNRTCSLQPLVGRPFGSLFSVGPSGLVPCADAPSSRDDTTQDAADGPSQDETRDNRSLVDNNTAQNLSSDDIEAMKRDGVSGDEIVEALIANSSTFGKKTLFSQEKYKLKKQKKYAPKVLLRRPSTRSICETYFKKSPARTGFMRVDALSLLLSMANVGPYSDVLVVDMVGGLVVGAVAERLGGTGYVCSTYLGSAASSIDIIRMYNLSSDMTTRIVQAPLSDLCSLQNSVDVSSGLNDSIQGEAQEPTAVPVENTQPSVPQPTDTAVPDEKTQSPKEQSIDIDIPEPLLDEHINQDGNSSLDSKGDEDGSSIGPKSLKAGKAPSPERMKYWSEHGFSSLIVAAPGHDVESFVADLLPLLSYSAPFAIYHQYLQPLATCMHSLQVSKMALGLQISEPWLREYQVLPSRTHPHMQMNAFGGYILSGIRIHNGDACNGSK

SEQ ID NO: 51381 - protein, 143 aa, Oryza sativa
MSSRRTSAANLLAVALLIISLLLLPLLHLPVAHARHVAVLKATDSSSAISIRSGHVEPTPASGAVQRRPASSGASNRGGGGRRRRAAASSRSTVEMRASAWAKHHRDEVARMHEMLKRDYASKARRRSPINNGEPSLEEEDLP

SEQ ID NO: 51382 - protein, 150 aa, Oryza sativa; identical to SEQ ID NO: 29358

SEQ ID NO: 51383 - protein, 604 aa, Oryza sativa
MVRELRLDSFYARLHAAAAASAADASSPLLILPSAADADALCALKVLTHVLSADSIRFSIYPVASAAAAASLLASFSASQPLCLLLINWGAHRDLRAVLPPAATAFVVDSHRPIHLHNLSAANDRVVVLFTTDDEHTADLSYDFDVSSLADASDLSAQGEADDHLRVAEEDEDSDASDSDSDGEGGRRKRRRLSDDAEADGDPERLFGKLRREYYRLGTFHGKPSGCLMYELAHALRKNTNELLWFACVSLTDQFVHERITNERYQAAVMELEQHINGSGNLDPSGVGAVVTLKDGTKIRAPEASRIAYEDEPRLMLLREWSLFDSMLCSSYVATKLKTWSDNGLKKLKLLLARMGFPLADCQKRFQYMSMEVKRKMRDEFDRFLPEYGLTEFYYRSFLRVHGYRSKVSAADVVYGVTALLESLNAESKDSKGSSAAEQFWVAYSALSLSNVDQLRKGMQSAIEIQRAILRQGSSAITKTGLIRSAKKFRWVKLDDPVDTDKLCQPQALTKFCFFLMDALRERGARMKPLICACLAREPEKVLVVGVCGKPRLGAVKGNAFGNAFRSAAEEIGADYFHDMFESSWIVLDVVAVSSFMIRLTEKL

SEQ ID NO: 51384 - protein, 278 aa, Oryza sativa
MVGWRAAGGARAVLRRLSAAAEAAAKQDGRVFAASYSGSSGGVNAPFGLGQYANLLRAQAFASRGVALNFHQLIRNAGISTTRNLLAADDAMVPVSSPLTPPLGDGEQTDKKGAIVKRLKVQAIKKDIKQSPKKVNLVAKLVRGMRVEDALLQLQVTVKRAAKTVYQVIHSARANAAHNHGLDPDKLIVEEAFVGKGLYLKRLSYHAKGRCGVMVRPRCRLTVVVREATAEEEAKIAKLRVSNYKKLTRKEKQLMPHRLIEVSPRWARKRKEEAGAAA

SEQ ID NO: 51385 - protein, 158 aa, Oryza sativa
MGFLSFAGRVLFAAAFLLSAYQEFSEFGVDGGPAAKALQPKFNTIVANISTRTGLVVPHIELKHIVAAMISLKGLGGLLFILSSSLGAYLLLFHLAFITPVVHDFYNYDIESAEFVQLFTKFAQNCALVGALLFFLAMKNSIPKRQPNRKKAPKPKST

SEQ ID NO: 51386 - protein, 641 aa, Oryza sativa
MASRSRAVSSGFTKAPTFSVTTASQLHDAIDRLLPRLRGDPSLAPAARALAAAATASLPPSTVLSNRLLHLLSSHPATLPDALALFSSIAAPDICSHNTLISALSRSPRHLPSARELFDRMPQRDHFAWSALVSGYTRHGQPEAALALYRRMQEEPGNDGADNEFTASSALAAAAAARCGRAGRELHCHVVRRGIDAAGGDAVLWSALADMYAKCGRVDDARRVFDRMPVRDAVSWTAMVERYFDGGRGGEGFRLFLHMLRTRGVRPNEFTYAGVLRACAQFAVESFGRQVHGRMAKSGTGDSCFAESALLRMYSKCGDMGSAVRVFEAMAKPDLVSWTAVISGYAQNGQPEEALRYFDMFLRSGIKPDHVTFVGVLSACAHAGLVDKGLEIFHSIKEQYCIEHTADHYACVIDLLSRSGQFERAEKMIGNMAVKPNKFLWASLLGGCRIHKNVGLARRAAEALFEIEPENPATYVTLANIYASVGLFDEVEDVRRIMESKGITKMPASSWIEVGRRVHVFLVGDKSHPKADEIYALLKKLYVKMVEEGYVADIEFVLHDVEDEQKEQDIGYHSERLAVAFGIIATPEGSPIKVFKNLRICGDCHAAIKLISQIVQRDIIVRDSNRFHHFKDGICSCRDYW

SEQ ID NO: 51387 - protein, 518 aa, Oryza sativa
MLHFLKMPIMDPFLHDGDVNEISQETAEQVSAEQGTSRVTEKMEVEDKTKEIKTNDRKTAAKPKLNLTETEVNLDDNVVANNDTKNSGDINVDVCSNTGVSNRSSDTEPTKKETSGENTSNIVNDVLKYAFEAVGHIPKIEGLGSFTEAGNPVMALVAFLSGLVDHDDVTTLCCSSLKAISDMSPALQLATMHCFILQDPPNDLKDPPVSISFANTDCGQQKDKDATSNPSVTDNDDNLKEESALSVEEPNTTSTSSKNTRKLSNAKESKDESPQVEPKPSSANDCDNPISQVAKRASDNIRGHSSTVLPVSLNNTNEPCSISSQEASAGNTKDTSHTEHIEGDKPIYEDPPLEGKVELNKIEHEVTDLSAVQQHESIQTSLKKGYIQDHNSIKKTVADDVSVQRLQRAAASAISAAAVKSKLLAKHEEYQIQRLAALVIDKQLHKMQAKMSVFTEADNLVLRAREHTERTRKKLLMERSAIIASRMAALPPRPNHQPGMPGSRLPVGYGVNQHLRRS

SEQ ID NO: 51388 - protein, 261 aa, Oryza sativa
MNSSDVVVSNVVFQDSPFWNIHPVYCSNVVIRNVTVLAPHDSPNTDGIDPDSSSNVCIEDCYISTGDDLIAIKSGWDEYGMAYGRPSSHITIRRITGSSPFAGFAVGSETSGGVEHVLAEHLNFFSSGFGIHIKTNTGRGGFIRNVTVSDVTLDSVRYGLRIAGDVGGHPDDRYDRNALPVVDGLTIKNVQGQNIREAGSIKGIATSAFSRICLSNVKLNGGAAVRPWKCEAVSGAALDVQPSPCTELTSTSGMSFCTNSL

SEQ ID NO: 51389 - protein, 440 aa, Oryza sativa
MGKQMAALCGFLLVALLWLTPDVAHAQTQILFQGFNWDSWKKQGGWYNMLKDQVGDIASAGVTHVWLPPPTHSVSPQGYMPGRLYDLNASKYGTKAELKSLIAAFHAKGIKCVADIVVNHRCADDKDGRGVYCIFKGGGPRGCLDWGPSMICCDDTQYSDGTGHRDTGADFAAAPDIDHLNPLVQRELSDWLRWLRRDVGFDGWRLDFAKGYSAAVARTYVQNARPSFVVAEIWNSLSYDGDGKPAANQDGQRQELVNWVKQVGGPATAFDFTTKGILQSAVQGELWRMRDKDGKAPGMIGWYPEKAVTFVDNHDTGSTQRMWPFPSDKVILGYAYILTHPGVPCIFYDHVFDWNLKQEINALAATRKRNGINAGSKLRVLAAESDMYVAMVDERVITKIGPRIDVGNIIPSDFHIVAHGNDYCVWEKSGLRVPEPEGRR

SEQ ID NO: 51390 - protein, 492 aa, Oryza sativa
MASSTAFAAAFALLLLASSAAAEGEAVLTLDAGNFTEVVGAHDFIVVEFYAPWCGHCNQLAPEYEAAAAALRSHDPPVVLAKVDASADLNRGLAGEHGVQGYPTIRILRDRGARSHNYAGPRDAAGIVAYLKRQAGPASVEIAASASPPAADSIANDGVVVVGVFPELSGSEFESFMAVAEKMRADYDFRHTTDAGVLPRGDRTVRGPLVRLFKPFDELFVDSQDFDRDALEKFIESSGFPTVVTFDTSPANQKYLLKYFDNAGTKAMLFLSFSDDRAEEFRTQFHEAANQYSANNISFLIGDVTASQGAFQYFGLKESEVPLVFILASKSKYIKPTVEPDQILPYLKEFTEGTLAPHVKSEPIPEVNDQPVKTVVADNLREVVFNSGKNVLLEFYAPWCGHCQKLAPILEEVAVSLKDDEDVVIAKMDGTANDVPSDFAVEGYPSMYFYSSGGNLLPYDGRTAEEIIDFITKNKGSRPGEATTTESVKDEL

SEQ ID NO: 51391 - protein, 145 aa, Oryza sativa
MAFMRSHSNASSGMGVAPDIRDTFLELQMKKAFRYVIFKIEEKQKQVVVEKTGATTESYDDFLASLPENDCRYALYDFDFVTGENVQKSKIFFIAWSPSTSRIRAKMLYSTSKDRIKQELDGFHYEIQATDPTEVDLEVLRERAH

SEQ ID NO: 51392 - protein, 551 aa, Oryza sativa; identical to SEQ ID NO: 36931

SEQ ID NO: 51393 - protein, 319 aa, Oryza sativa
MASLAVVVVVVAVVCAAGVAAAGKFDDVVEPSWANDHVVYEGDLLKLRLDSSSGGGFASKSKFLYGKATADLKLVAGDSAGVVTAFYLSSGGDKHNEFDFEFLGNVTGEPYLVQTNLYIDGVGNREQRIDLWFDPTADFHTYAVLWNPSQVVFLVDDTPIRVYENKNATAAVKGHHRHAAAANGTSNATSAAASVPPFPSPQPMSVYSSIWNADDWATQGGRVKTDWSHAPFVATFRDVRVEGCAWAANATDSDAGEVARCTGSSWGKEGRYWWKEKDMEELTVHQNHQLVWARAHHLVYDYCVDTDRFPVQPPECAGR

SEQ ID NO: 51394 - protein, 568 aa, Oryza sativa
MLVLFETPAGFALFKVLDEGKLDKVEDLWKEFTTSDSARKVVELKAFNKFENTSDALSAATLIIDSKPTKGLRKFLQKHCEGETLAVADSKLGNAIKEKLKIDCLHNSAVMELMRGLRNQLTELISGLGAQDLGPMSLGLSHSLSRYKLKFSPEKVDTMIIQAIGLLDDLDKELNTYAMRVREWYGWHFPELTKIVADNIQYAKVVKMMGDRTNAESLDFSEILSDDEVEAQLKEAAVISMGTEVSELDLLNIRELCDQVLALSEYRAQLFDYLRSRMNTIAPNLTALVGELVGARLIAHGGSLVNLAKQPGSTIQILGAEKALFRALKTKHATPKYGLIYHASLIGQAAPKHKGKISRSLAAKTALAIRYDALGDGEDNSIGLESRVKLETRLRVLEGKELGRSAGSTKGKPKIEVYEKDRKKGAGALITPAKTYNPAADLVLGQSTEETPKKPEGASKKRKHQETEPAPAEKTTKEDGDQEGEKKKKKKKSKESEESPAADADGGKKKKKTSKESEEPPVATTEGEKKEKKKKKKSDSQDAEDVAMETEESGKKEKKKKKKHHSDE

SEQ ID NO: 51395 - protein, 609 aa, Oryza sativa
MASPRRRSLPLPLLLLVFPVSLFVVLLLHHRSSIPAAELLSGPGPDPRRFSLLIKVLAYDRPGPLRRCLRSLAAADYAGDRVALHVLVDHPRPNASLDASREILAEADALRWPHGEKRVHYRAANAGLQAQWIEAWWPGSDDEFAFVVEDDLEVSPLYYRFLKRLVMAYYYDRENYSPYVFGASLQRPRFVAGKHGNKIQLDSETHLFLYQMVGTWGQLLFPKPWKEFRLWYDEHKSKGIKPILEGMKTTGWYKKMGERIWTPWFIRFVHSCGYFNFYTNFLKERALSVSHRDAGVNYGRSVGPDSTLLDGKNLDFNLWELQPLNKLKWYDFCFAEVLPGRVIRKFSELGSVLKSVQLENNVVLISLYSLEQRIARNLICYLEKSGMRNYIFLVDNTEFLDDLAHRGHPVIDAISLLQRIKMSSSIYSDDFVKEIVVKAYVIKNCLDLGYNLWVLNGNTISLGSKLNEPSDQSVDFFAAESVDLMFLRGSQSSKKTWNELDILRMADGMMSSKSGFSSSLEHKNFVRVLTGVLGNNGAVRLGKLDEEIMAVELGPNTSNRSLSEGHCKVLFWSHSMTSDSVQSQLENRGLWLIDSDSSCSAVVCGQKQK

SEQ ID NO: 51396 - protein, 535 aa, Oryza sativa
MGMEVAAARLGALYTTSDYASVVSINLFVALLCACIVLGHLLEENRWVNESITALIIGLCTGVVILLMTKGKSSHLFVFSEDLFFIYLLPPIIFNAGFQVKKKQFFRNFMTITLFGAVGTMISFFTISIAAIATFSRMNIGTLDVGDFLAIGAIFSATDSVCTLQVLNQDETPFLYSLVFGEGVVNDATSIVLFNALQNFDLVHIDAAVVLKFLGNFFYLFLSSTFLGVFAGLLSAYIIKKLYIGRHSTDREVALMMLMAYLSYMLAELLDLSGILTVFFCGIVMSHYTWHNVTESSRVTTKHAFATLSFIAETFLFLYVGMDALDIEKWEFASDRPGKSIGISSILLGLVLIGRAAFVFPLSFLSNLTKKAPNEKITWRQQVVIWWAGLMRGAVSIALAYNKFTRSGHTQLHGNAIMITSTITVVLFSTTVFGMMTKPLIRLLLPASGHPVTSEPSSPKSLHSPLLTSMQGSDLESTTNIVRPSSLRMLLTKPTHTVHYYWRKFDDALMRPMFGGRGFVPFSPGSPTEQSHGGR

SEQ ID NO: 51397 - protein, 231 aa, Oryza sativa
MEPSTKQLLPMPQQDPNSPSSSTSSSSSSSTSPSHPHHRAPLPPSPRPVPRTIETTPFPTTFVQADTASFKQVVQMLTGAEQPSKNAATAATAAAGNSSAAGIGGGQGANGPCRPKKPAFKLYERRSSLKNLKMIAPLAMGALPSPTGRKVGTPEILSPSVLDFPSLKLSPVTPLTGEPFNRSPASSSEDAERAAISERGFFLHPSPRGAEPPRLLPLFPVTSPRMAAPSE

SEQ ID NO: 51398 - protein, 306 aa, Oryza sativa
MARHLAPPGSFHRLLASRHYPPSSPAPPPRPLLLLPKTLIPPAAAAMEFPRRGRRDVAAASAPASSSPETEVAPGAWGKVSAVLFDMDGVLCNSEELSRLAGVDLFAEMGVDVTGDDFVPYMGTGEANFLGGVAKLKGVKDFNAESAKKRFFEIYLDKYAKPNAGIGFPGALDLLTECKNAGLKVAVASSADRIKVDANLAAAGLPLSLFDAIVSADAFENLKPAPDIFLAASKTLGVDTDECIVIEDALAGVQAAKAAEMRCIAVMTTLEEDALQQASPSLIRKNIGDISIRDILYGGSNAYHSM

SEQ ID NO: 51399 - protein, 474 aa, Oryza sativa
MSLASTTTIRPSGSWTPTCRMQTATALFLAPIIVLSFGGFQGPSYTRELTLQGIWWATFVNCSQAVKNNNKYIHVDCQNTSSSFVYVLNVAPYYALMENLEPSCGYLAMIPVSWTPASGKKYQYFAELMRKGFSVRFPFVLDHPTAFELIKQCLNRSIRGFREEPFSTTAHVKNRIADIVFVDLIFWACIIGKTSQTSDYFETPLYMVEMLHGKRIFYSGFVLQFVMWTVKWIYVICRFVLAPLALLTFLAQRYWKTRITIDAVEKFLRMQLMLGPTRYTYTDIIAMTSHFRDKLGQGGYGSVFKGVILPGDVYVAIKMLDNYNCNGEEFISEVSTIGSIHHVNVVRLVGFCAEEMRRALVYEYMPHGSLDKFIFAPEKSFSWDKLNEIALGIARGINYLHQGCDMQILHFDIKPHNILLDSNFVPKVADFGLAKLCPRDNNYVPVSAARGTVGYIAPEMISRSFGVISSKSDV

SEQ ID NO: 51400 - protein, 395 aa, Oryza sativa
MGNCWGAKISSESPCRSASSPSGGTSKYASNSSVSAASVPPTPRSEDEILEAANVKAFAFNELRTATRNFRPDSVLGEGGFGSVFKGWIDEKTLAPTKPGTGMVIAVKKLNQEGHQGHREWLAEVNYLGQLSHPYLVRLVGYCVEDEQRLLVYEFMPRGSLENHLFRRSTHFQPLSWNLRMKIALGAAKGLAFLHSDKVKVIYRDFKTSNVLLDANYDAKLSDFGLAKDGPTGDKSHVSTRVMGTYGYAAPEYLATGHLTTKSDVYSFGVVLLEMLSGRRALDKNRPTGEHNLVEWARPYLMSKRRIFRILDARLGGQYSLAKAQKAATLALQCISVEAKNRPNMEQVVAVLEQLQDSKETGANPQLQKKSSSKNAGSNGSKPSSKGKPANARLV

SEQ ID NO: 51401 - protein, 459 aa, Oryza sativa
MAGAPPTEAEKESLVTSFLEIAAGQTPETATQFLQMTSWHLEEALQLFYIDGEAALAAHPAPSPAAAAEAAAAAVAAAAEVEDAMRFAPPPAAALGDGMLQGLGEEEDVRAPLPTKRETLYGDAPMVVVRPNSTVAFRNFEEESRQSAVWDSEQNAASSSRDNLAALYRPPFALMFNGPFDKAKLEASVLDKWLLINLQSTEEFSSHMLNRDTWANEAVAQTIRSNFIFWQVYHDTSEGRKVCTYYNLVSVPAILLIDPITGQKMRGWNGMIHPDRLLEDLMPYLDKGPKEHHAAQPQKRPRKVDQETSIGKQGKTPVPVVATEDEDEELARAVAASLEESKGSDTSEEKIEPEVENEPSLSAKLNYPPLPEEPKGSRELLCRVAIRLPDGRRIQRNFLHTDPIKLLWSFCYPQVEDGDKKAFHFVQPIPRASTNLEYESDKTFKEAGLANSMINLLWD

SEQ ID NO: 51402 - protein, 471 aa, Oryza sativa
MAAAAPPTGKKRRFERSSSQEPPGSGGLDLISGLPDAILGEIISLLPTKYGARTQLVSRRWRPLWRSAPLNLDVYDLSGQERKRVALASKILAEHPGPARRFSLHCFRLRGRHAKLDGWLRSRALADLRELSFSYEVEREAQAQAYPLPPSALRFAPTLVVLYLSSCGFPDEMPPTLHFPRLKQLTLCSVAISEDAIHGVLSRCPALESLLLQGNFGVRRLRINSASLRSFGFYSKSWGFSSASWNGFAGAELQEVVIEDAPCLERLLPLCPNDGVAAIRVIAAPKLEIMGPLSDGISQLHLGTTIFQEMTAVSLTTSMRSVKVLVLDSDGPNLDAVVDFLSCFPCLERLYIASQPFKVIKNTRRYDPLNPIECIQFHLKKVVIRNYGGRRSDVDFAKFFVLNAKALREMELAGLNNCNQKWLANQHRRLQLEKKASQNAQFTFKTTHTSDFSMNKHTHDLSISDPFDRSL

SEQ ID NO: 51403 - protein, 341 aa, Oryza sativa
MRISELGECDGVRSEGEEEQQVVVEEASVRGGVVVARLSAKRALVGAGARVLFYPTLLYNVLRNRFEAEFRWWDRVDQYILLGAVPFPSDVPRLKQLGVQGVVTLNEAYETLVPTSLYQAHGIDHLIIPTRDYLFAPALQDICQAIDFIHRNASEGGITYVHCKAGRGRSTTIVLCYLIKYRSMSPEAALDHVRSIRPRVLLAPSQWQAVNVFSTLTTGRLPIQSKNLGHFLEAGDDCITNSEIDDYYSMELDYEDSGLPLCQVMLPRPTSPTVCTDAVLITEADLEGYDTYADTRKDVVSLEVIVSRKPIMRRLSCLFGSLKLTNNCEPTPSRFAEVRAC

SEQ ID NO: 51404 - protein, 44 aa, Oryza sativa
MVVFDHSLRSFSIALVNLLGEVHYNSLYDIEVIKFDGIPMPVAG

SEQ ID NO: 51405 - protein, 69 aa, Oryza sativa
MASLLEQLSVLALQSNWRIQSNFPFCLNDMLCAYFIVMSNICSCSISTCQEVYPVRHSNYGSPNFHIQK

SEQ ID NO: 51406 - protein, 490 aa, Oryza sativa
MFRLRSSARLLRELREASRSSGRRREWLSGGAVASAARTTSLLHPLPGLDVPQCLPDQLGVQPTRVTTLPNGVRVASEDLPGPSACVGVFVDSGSVYETAETAGVSHLLERLSFKDTAHRSHLQIVQDVEATGGNIGASASREQTVYSYETLKAYLPQAIEVLIDCVRNPLFLQDEVERQVAFAREEVQELQKNPERFLQESLNLVGYTGALANPLVAPEESLTRINGSIIQKFYHENFTADRLVVAASGVDHQYLLDVAEPLLSDWHKGSPVERPESKYIGGDFRHRADSEMTHVALAFEVPGGWLEERDATIMTVVQTLMGGGGSFSSGGPGKGMHSRLYLRVLTKYHTVESFSVFSNAFDRSGLFGIYLTTPSDFVAKAVDIATKELIAIATPGQVTDIELARAKNSTISAVLMNLESRVIVAEDIGRQILTYGCRKPVDHFLQCMDEMTLDDITAFAKKMLSSPPTMASWGDVDKVPPYEFVCKRF

SEQ ID NO: 51407 - protein, 700 aa, Oryza sativa
MASALTGVMTSVINKLTALLGKEYMKLKGVQGEVEFMIDELSSMNALLHRLAEEDQHLDVQTKEWRNQVREMYYDIEDCIDDFMHHLGHTDIAESAGLVHRMAQHLKTLRVRHQIANQIEKLKARVEDASKRRLRYKLDERTFNLSTAGAIDPRLPSLYAESDGLVGIEQPRDVVIKLLTEGEGASSQKLKVISIVGPGGLGKTTLANEVFRKLESQFQCRAFVSLSQQPDVKKIVRNIYCQVSQQEYGNIDIWDEEKLINATREFLTNKRYFVVIDDIWSTQAWKTIRCALFVNNCGSRIMTTTRNMAIAKSCCTPDHDRVFEIMPLSIDNSKSLFLKRIFGSKDVCIPQLDEVCYEILKKCGGSPLAIITIASLLANKANTKEEWERVRNSIGSTLQKDPDVEEMRRILSLSYDDLPQHLKTCLLYLSTFPEDYEIERDRLVERWVAEGFIITEGGHDLKEIGDCYFSDLINRSMIEPVKIQYNGRVFSCRVHDMILDLLTCKSTEENFATFMGGQNQKLVLQGKVRRLSLNYYTQDHIMVPSTAIITHCRSLGIFGYAEQKPPLSMFPVLRVLDIENGEDMESSYTKHIRKLIQLKYLRLNVRSVAELPEKLGELQHLQTLDLRRTNIRKLPESFVRLQNLTYLRVNNLDLPEGIGHLHALQELTEIRISQDCLASSLLELRNLTKHTLTTKFSPII

SEQ ID NO: 51408 - protein, 685 aa, Oryza sativa
MFVVTMLQLLLLLLLLLSISLDVSHLIAEAAAAAKPPVSFSFNFSDPSTYSLDDLLFEGDAAKPKDGLVDLTSGRSCYPYCPAGRMSYAHPVQLYDDTTGGEKVVVASFSTRFTFTIRPIDDGIRGDGLAFFLASYPSKLPANSFGGNLGLINNGTTTAFGSDRFIAVEFDTYNNTFDPKSINHIGIDINSVVSSLNTTLLPNFSLNGTMTAHIEFNGITQMLVASLWLAGRPWSAAPDYQVSLRLPDPITSLLLPQVAVGFTGATADLKELNQIMLWSFNSTLTLVNQDRRNKALLFGGPIIGGAVALALVLWFLISCLMQKRVRNTFGKGTGGARRFEYDDLAIATGNFSDDRKLGEGAFGVVYSGFLKRLEREVAVKKIVRESSQEHKDFFAEVSTISEAKHKNLVKFFGWCCRGHSWNILRFMCSCLWSNNNKELFLVYELMKNGNLNDYLYKSESAAVLSWQTRYKIAKDIGSGLLYLHHECYPYIIHRDIKPGNVLLDDDFNAKLADFGLSRVANPNNATLKTTAIGSQGYIDPQCMKDGEVSFNRNSDVYSFGIALLEIVCARKHREQIWGLYKSGGDVVEAADSRLAIGVDGAERREMERAIILGLWCSVFETKHRPTMLQAMDVLERDAQLPDLNLIVNSNLSSTDASSSSPVEKRYDSEEAPLVAGSSSSQLAGR

SEQ ID NO: 51409 - protein, 76 aa, Oryza sativa
MMKFIQSFGLPSFGHQFLIPIATEEFAVSFYLLCLFLIYLAVAITEPSPRTATTAGKAQQIWVWRCKLEEVGASTA

SEQ ID NO: 51410 - protein, 475 aa, Oryza sativa
MASFGMNWNQKSPVFWDWENPAPFGPNTMENPKSIPHPEPRGVVVAAANHGSTNSSGGTFTSSSELANGSSKSSLSASFDSSSKLGNSLEFRFASVKGHGKNMCKDGEAGRVEDSGTSPAVAVSHGEPVIGLKLGKRTYFENVCGGQNVKSSSAASGVTCPSTVVKKMKVSQQSTQSSYCQVEGCKVDLSSAREYHRKHKVCEAHSKAPKVIVSGLERRFCQQCSRFHGLAEFDQKKKSCRRRLSDHNARRRKPQQEAISFGSSRLATMFYDARQQTDIYFGQSPFGQVRSNAISSCDNLGGFKFTEAKLPWMKPMKTIGLEDLNFSTLQMPGNVVSHTVHHHDFDGLIPFKGNTPKVLNQGVDPACAVVSSNSNGAPDLRRALSLLSSDSWGPADVQAGSQVHPGGVMPPLAVAAATVTAPTNPVSVMHALHPSTGGGGFWQDGDDPPPLDHASQAQAFMHPGNGSSSGYGHLH

SEQ ID NO: 51411 - protein, 408 aa, Oryza sativa
MLCQQAVPIHRGRRSARRRWPLAVRRPPSPAARLLPESSSTTAGALDLLRYGRNFRRASPPPRPPLVNSAEPSSAQVLREPDVSFSVGLLSNTASKEPITAHTSSSSSPLTVQHDDTETSTPSQCCLWSSPGSSILVRRPRGWYFVFYIRMDPGGCFHMYPDVGCGPYQSLSEVDDAINQHLHDLRIPEMGEELDRLPLMEKMIRQAMYWPDGKRKRCKSAGYFEKDKCHLIQALVEKYNEDHNLLGDFAYELKDFLQHGVIYEDQRQYHHLNFTAKVKRADGCGVENLFFAEISHMQGEYEWVVSCCCIIKPSANGHCYGCRNNGYVGMKHPNNDAYSGGHLDGYLPFGVNSYARNNDEELSVKDEEDMLRRMYKGLDKPGGFKRPIPKFATRIVWKTEEEAGVEAG

SEQ ID NO: 51412 - protein, 181 aa, Oryza sativa
MEAYMLFSRREGMIRCDEQEEDIGCPSESELSLSSSSEGMELADDACSSGSSSSAAGHFEMSSLMTELPLKRGLSKFFDGKSQSFASLAAVGGLEDMAKPMRKRLKTSRSCGVGLGLQDAHRRGRLSPRPLCGNASAASFKKVSKGGQLSVLGASRRTRSPATAAISPRPEGMPGQALLFA

SEQ ID NO: 51413 - protein, 509 aa, Oryza sativa
MSTGETLRAELSSRTPPFGLRLWIVIGISIWVVIFFILGFMCLWSIYRRKPKKSFDKIPVSQIPDVSKEIAVDEVREHAVVENFRVQESHAISVQEKHYEKDSGKMLAHLVRSKSSDADNLSQCSSVYQCDRAGSSYSGDEGSSGNARRHFSQYATVSASPLVGLPEFSHLGWGRWFTLRDLEHATNRFSKENVIGEGGYGVVYRGRLINGTDVAIKKLLNNMGQAEKEFRVEVEAIGHVRHKNLVRLLGYCVEGIHRMLVYEYVNNGNLEQWLHGAMRQHGVLTWEARMKVVLGIAKALAYLHEAIEPKVVHRDIKSSNILIDEEFNGKLSDFGLAKMLGAGKSHITTRVMGTFGYVAPEYANTGLLNEKSDVYSFGVLLLEAVTGRDPVDYGRPANEVHLVEWLEMMVGTRRSEEVVDPDMEVKPTIRALKRALLVALRCVDPDSEKRPTMGHVVRMLEAEDVPSREDRRSRRGNTANADTESKTSSSEFEISGDRRDSGPSARFQP

SEQ ID NO: 51414 - protein, 806 aa, Oryza sativa
MAESLGLGALCRGGGWCYAAIWRSDRRDPRLLTIGEFHSEDGTRNVVEKMLNQVHVVGEGIIGRALVSGECQWISDTSFSFAQTSDADNQDLFQGYTWWQHQFLCGIKTIAVIPIADLGVAQFGSMQKISECLEFLDQVKGIFCQREIVPWDLSAEEIQRNVLPCHQQFQLSSLSSADGLTNIKTDPENKKLLENSASVESLRSLASFSSKYSQSSSNGFTSYESCNSMNPHIVAMPVNSKSINTVRAFNSTGKLLQHNIGSENPLQIKFCQHPDSNLASATDVFLSLNNLPRIENEISCPPNKLGYCIQSEKPYSFQSSFSSCFSVGDELKPILFDSATSFVQNDLMQEFNLTGFTSQADSAVHELPKQILGETATGALYSDRKSNNGSSDLLDGTIFDPFVQEWCDNNALLEGNTPHFGATTADSVTEHASSYPLSVEERSLFSESVFEELLGVSGNVNTDAPGDSAVVMAGDPLVGLVSGCQLPTYTLQDSLSVCKPQQEPSLDFPSGSDTSEHVPNGSSKMIPLSLGALSMDDCCSLNTAHSKVSQVKRPEEVKVVKKRARPGESTRPRPKDRQQIQDRVKELREIVPNSAKCSIDALLDRTIKHMLFLQSVTKYAEKIKQADEPKMISNKDSGAVLKENSSGVVLKDNSSAGSNNGGATWAYEVAGRTMVCPIIIEDLSPPGQMLVEMLCEERGFFLEIADTIRGFGLTILKGLMELRDGKIMARFLVEANKNVTRMDIFLSLVQLLQQNSLNRSSDQISKVIRNGVPSFAEHQQSPISVPVGLAVDDRLTVTTDTWIRSD

SEQ ID NO: 51415 - protein, 442 aa, Oryza sativa
MSEKKRRGGAGAGAASGSASKKPRVSTAASYAESLRSKLRPDASILATLRSLASACSKSKPAGSSSSSSSASKALAAEDDPAASYIVVADQDSASVTSRINRLVLAAARSILSGRGFSFAVPSRAASNQVYLPDLDRIVLVRRESARPFANVATARKATITARVLSLVHAVLRRGIHVTKRDLFYTDVKLFGDQAQSDAVLDDVSCMLGCTRSSLHVVASEKGVVVGRLTFADDGDRIDCTRMGVGGKAIPPNIDRVSGIESDALFILLVEKDAAFMRLAEDRFYNRFPCIILTAKGQPDVATRLFLRRLKVELKLPVLALVDSDPYGLKILSVYMCGSKNMSYDSANLTTPDIKWLGVRPSDLDKYRVPEQCRLPMTDHDIKVGKELLEEDFVKQNEGWVKELETMLRTRQKAEIQALSSFGFQYLTEVYLPLKLQQQDWI

SEQ ID NO: 51416 - protein, 242 aa, Oryza sativa
MAAAGSIGVYRAVFAALGALMLGTLVYTCVTDGSPFRLELLTPWLVATLIDFYVNVTAISTWVIYKEVNWISSFFWVVLLYCFGSIATCAYVVVKLFEIKTSGPSQDPLDLLFLRQGDLSERKSSFVIIGRIIFSILGAMMAAVVIYTVITDGLPFRKDLLTPWMAATLIDFYINVFAISVWVAHKESNWISTAIWICLLICFGSITTCGYIVIQLFQVSYRDPIYHVPLNSHNKYGIVPSH

SEQ ID NO: 51417 - protein, 618 aa, Oryza sativa
MATMENVIVLVNRIQRACTVLGDHGGGDGTASLPTLWEALPSVAVVGGQSSGKSSVLESIVGRDFLPRGSGIVTRRPLVLQLHKTEDGVQEYAEFLHMPKRRFNDFALVRKEIQDETDRLTGKTKQISPVPIHLSIYSPHVVNLTLIDLPGLTKVAVEGQPESIVQDIENMVRSYVDKPNCIILAISPANQDIATSDAIKLARDVDPTGERTFGVLTKLDLMDKGTNALDVLEGRSYRLQHPWVGIVNRSQADINKNIDMIIARRKEQEFFASSPEYSHLSSRMGSEYLAKLLSQHLEAVIRARIPSITSLINKTIDELESEMDHIGRPIASDAGAQLYLVLELCRAFEKIFREHLDGGRPGGDRIYGVFDNQLPSALRKLPFDRYLSLQNVKRVISEADGYQPHLIAPEQGYRRLIESALNYFRGPAEASVDAVHYVLKELVRKSIGETQELKRFPTLQAELAAACFHALERFREDGRKTTVRLVDMESAYLTVEFFRKLPQEVDKTGTGNPSTPSVDRYADAHFRRIASNVSSYIGMVSDTLKNTIPKAVVHCQVREAKRSLLNYFYTQVGRKDAKQLAQLLDEDPALMERRQQCFKRLELYKSARDEIDAVSWSR

SEQ ID NO: 51418 - protein, 270 aa, Oryza sativa; identical to SEQ ID NO: 32089

SEQ ID NO: 51419 - protein, 288 aa, Oryza sativa
MLALCLERAHCSGKCFGGFDIRDVYYIEYYQLIDINAPMTDFTSRRYINDWLSFNKIIDDHFRYTDPTSGYLSYTLYVEDFMFRISLLEDVPSTGRSWRERAVFFKNISLESSERRVQIVEGLVGFYRERLTSDRELFEEVLQDCGYWKRQTRTVPRMISALTYSVKNELQDWVPANHYFENCGYSQLYFCRCFFGHYTVPGRITKKELDTAVGILLPGHIPRAQKRLMVNYEKTQVDAAVLSPSGNTARFSVHHIFGIGSVGNDLALPQIKKALPPSQRKRKQTCDK

SEQ ID NO: 51420 - protein, 570 aa, Oryza sativa
MAIALRLAAAPLRLRLVSPAPPAIGGAGDGGRRGGGGAARIGVLGRARCRRRRGGGGRLEVAAAAADDSARCRAKGVGAAAAAAETLGGIGVGGGDQLSVVMKFGGSSVSSAARMREVAGLILAFPEERPVVVLSAMGKTTNLLLLAGEKAVGCGVIRVSEIEEWNLIKDLHIKTVEELALPRSVIHTMLDELEQLLKGIAMMKELTLRTTDYLVSFGECMSTRIFAAYLNKIGVKARQYDAFDIGFITTDDFGNADILEATYPAVAKRLHGDWIRDPAIPIVTGFLGKGWKSGAVTTLGRGGSDLTATTIGKALGLREIQVWKDVDGVLTCDPNIYPNATTVPYLTFEEAAELAYFGAQVLHPQSMRPAREGDIPVRVKNSYNPKAPGTLITKQREMDKVVLTSIVLKSNVTMLDIVSTRMLGQFGFLAKVFSIFEDLGISVDCVATSEVSISVSLDPSKIWSRELIQQELDHVVEELEKIAVVHLLQQRAIISLIGNVRRSSLILEKAFQVLRKSGVNVQMISQGASKVNMSLIVHDSEAKQCIKALHQAFFEDDVLTEVEEEALHMS

SEQ ID NO: 51421 - protein, 79 aa, Oryza sativa; identical to SEQ ID NO: 44778

SEQ ID NO: 51422 - protein, 291 aa, Oryza sativa
MGRSRPSPPPPHASEARDIDSKSIGPSSNGSDDEKVNWKALKDVTYKECFIHSGLKILSILSDIRLHPHERWNICQKVGSRAAILQNLVNPIEVFVDDECAGKPAPQVPKSSKPSIMKLRQATSRNLKREIELLMENPQRNFPLTNFCLDPSKLIKSSTMVSPVIYAQRRLSYLMNGMGRQQALGDAMQAWRRPTTFNFLDAALPSLGMEIESEEAIEGASNFQLELKRRGMFSSALLYARRRLPSESQLPCSSPSLMHQASVRNKGCLFSGSALQKNFHLWIARGLRLLR

SEQ ID NO: 51423 - protein, 73 aa, Oryza sativa
MISFHEEEAMVAAGRLPLETRASSRRCCSHGVNGGGGGTATVRVGTSNGEINLQLWGCRSYKFHILDTFASCQ

SEQ ID NO: 51424 - protein, 190 aa, Oryza sativa
MGNMLPCLVQGRTTLPAAMNPKQRLYSLKLLVKALHKLKKKMMMKPNKGKKIGSSKPSSPAAPAEAASATAAAVAGGGVEAAIGSSKPKVSPRRAAQGGQRKGVVRVKVVLTKEEAARLLSLTVVSAGAGAGGGRRKTTAQIIAEIKRMEIRRAMATSSAAVAWRPALASIPEEQHHHSPRRSLGVQQVA

SEQ ID NO: 51425 - protein, 280 aa, Oryza sativa
MPKPTRAVDHRRRRSGRAPAIAAVAVAAEDDGEEHHLNPFLDAAPSSSSSRVQFRKVASRAVWLEEAGAAEVVDSKGKLWLTTGVNRDGKLYYNVEEIGFLAERGALVLLDYEGETIGMEEIYGKIAGGKYGCSWDAFQAYKHLKLLGYIIGRYGVPWTVKRSHTYSVTDASTSVVETDQIQSLNRVGGASNDITKLLKEMCIDDMHPSFEVYLPNSKFKKTSPGDPSFVLCLLSNKPPSREELETVENKFEGIPLKFCHVDNGRVSFLSSNKAALPSLP

SEQ ID NO: 51426 - protein, 523 aa, Oryza sativa
MAAEEVEAAAIDGSGEEAKRKSGKQRGSGAKGRRRNGDRAFRPPAMRPEEEGRGVATRPGALRERKPPPNAFNAPDDDEDVEKTDQLLEPLNKPKRRDAGKKRGPRKKKVDQENIQTHRHNANAVKGKMLVNDKVSKTEKKRKRGDTGAAENNGKGKKMLTGENALMCHQCQRNDKGRVVWCKTCNNKRFCVPCINQWYPDLPENEFAAKCPYCRKNCNCKACLRMRGVEEPPRKEIFKENQIRYACHVLRLLRPWLIELRQEQMAEKELEAKIQGVSVDQIKVEQAVCDLDERVYCNRCSTSIVDFHRSCKHCFYDLCLTCCQELRKGEIPGGEEVEILDPEERDKDYAFGKILSDGENQRDSLKCRSDTQNSESNKGMASDENQKKALLLWKANSNGSIPCPRKEKEDCSFSSLDLKCLFPEKLLPELEDRSEKVFWSETFAKELGRTSELCPCFDHSGKIRSDSKKLRQAANREDSSDNYLYCPVATDIQDADLLHFQMHWAKGEPVVVSDTLKLTSGLS

SEQ ID NO: 51427 - protein, 447 aa, Oryza sativa; identical to SEQ ID NO: 32409

SEQ ID NO: 51428 - protein, 404 aa, Oryza sativa
MGSRPRVAFLHHHHHHHHHLLAVAVVLLLLARGAEPIAAGGGAAGRHLTTEERWMDQRLDHFSPTDHRQFKQRYYEFADYHAGGGPVFLRICGESSCNGIPNDYLAVLSKKFGAAVVTPEHRYYGKSSPFESLTTENLRFLSSKQALFDLVAFRQHYQEILNARYNRSSGFDNPWFVFGVSYSGALSAWFRLKFPHLTCGSLASSGVVLAVYNFTDFDKQVGDSAGPECKAALQEVTRLVDEQLRLDSRSVKVLFGAEKLKNDGDFLFFLADAAAIGFQYGSPDAVCSPLINAKKTGRSLVETYAQYVQDFFIRRWGTTVSSYDQEYLKNTTPDDTSSRLWWFQVCSEVAYFQVAPKNDSIRSTEINTGYHLDLCRNVFGEGVYPDVFMTNLYYGGTRIAGLSL

SEQ ID NO: 51429 - protein, 319 aa, Oryza sativa
MAASLAGLAFLAVTSAALLSPLAVVGQLRTDYYSTICPNLETIVRSSVKQSMAASPISAPATLRLFFHDCAVRGCDASIMIVNSNGDDEWRNSDNQSLKPEGFTTVLNAKAAVDSDPQCRYKVSCADILALAARESVYQSGGPNYQVELGRYDGRVSTRDSVVLPHANFNLDQLNAFFAGLGLSQTDMIALSGGHTFGAADCRFFQYRIGADPAMDQGFAAQLRNTCGGNPNNFAFLNGATPAAFDNAYYRGLQQGRGLLGSDQALHADQRSRGTVDYYAWSQSAFFGGFAAAMTRLGRVGVKTAATGGEIRRDCRFPN

SEQ ID NO: 51430 - protein, 614 aa, Oryza sativa
MLASVRSLRRLSSSSSSSSLSPASLRRLLLLLHRPPPPPPPPRPPLPPFQTLARGILPRIAARPVPRRFSTASCSSTLFRVGECGAPGATAIPEAERGEEEEREGEDGGEADAAVEVAAGRHDTDAYAAVELALDSVVKVFTVSSSPNYFLPWQNKAQRESMGSGFVIPGRRIITNAHVIADHTFVLVRKHGSPTKYKAEVQAVGHECDLALLKVDSEEFWDGMNSLELGDIPFLQEAVAVVGYPQGGDNISVTKGVVSRVEPTQYAHGATQLMAIQIDAAINPGNSGGPAIMGDKVAGVAFQNLSGAENIGYIIPVPVIKRFISGVEESGKYSGFCTLGISCQATENIQLRECFGMKPDLTGVLVSRINPLSDAHRVLKKDDILLEFDGVPIANDGTVPFRNRERITFDHLVSMKKPGEMAVLKVLRDGKEHELNVTVRPLQPLVPVHQFDKLPSYYIFAGFVFIPLTQPYLHEFGEDWYNNSPRRLCERALRELPKKAAEQLVILSQVLMDDINVGYERLAELQVKKVNGVEVENLKHLCSLVESCTEENLRFDLDDERVIVLKYQNAKLATSRILKRHRIPSAISADLVDEQATDDGEEATNGEIEASCTS

SEQ ID NO: 51431 - protein, 747 aa, Oryza sativa
MSRRHHLHLPLRLLSRNNPSAPLFRHAFSTLDTPEPPPPETEAEAEAVPEVTPAEAAAATPNPPRREEPLHETILYMIRRRPWTTRLENSIRLLSPTLAAPLVHGVISGAAAAGRADLALQFFRFAYRRAGFSPEPATFSLLIPILASHRMLNHARCILLDTMPSFSIAPEEATVAALIAAYGKANIPQESVKLFRLMPDLGIARTALSYNAVLKAILCRGREAMARRIYNAMIADAVTPDLSTYNTLIWGFGLCKKMEAALRVFGDMKDHGVTPDVTTYNTLLNAWVRAGDLESARKVFDEMPGAGFAQNSVSYNVMIKGYVEAGKVEEAVGLFSEMGEKGLRLSEKTFAALMPGLCDDEGRVVEARKAMDDMAERRLTPKDKSVFLRLVTTLCRAGDLDGALDVHQKSGQFKHVLVDPRQYGVLMESLCAGGKCDGAVEVMDELLEKGTLLSPKSPVLEGPAYNPVIEYLCSNGNTSKAETFFRQLMKKGVDDKAAFNSLIRGHAKEGVPEAAQEILAIMTRRGVRTDPESHALLVDSFLKKNEPADAKTALDSMMEQGHVPSPSLFMSVMVALFNSGRVQTASRVMKSMIEKGVTENMDMAHKILEALFMRGHVEEAIGRVNLMVENGCLPDLDKLLIALCENDKVMEAHKLADFALDRDFDVSFSTYDRVLEALYTEEKTLPAYSMLCKIKNKGGVVDQKGCDALMDSLKAGGYSKQADILSRILAENASSTSKRGKRVAMGA

SEQ ID NO: 51432 - protein, 141 aa, Oryza sativa
MENGGEEDDRASRCKRITRESDATKNGAATKLQALRLVEDLSLPSVQVVVMSANMGCSHCRQRVTKVVSKMNGLLDYMVDFGKKEVTVRGTMVHTKKKRKQHKKKHEENKKGIAANWEKKSSSQSNDSARTLAWFLRCYSS

SEQ ID NO: 51433 - protein, 317 aa, Oryza sativa; identical to SEQ ID NO: 32768

SEQ ID NO: 51434 - protein, 1153 aa, Oryza sativa
MERTEEEEAPAAKDPNASLPSPTYRSLAAPVTKPVDKFALLPAFLKVRGLVKEHIDSFNYFITKGIRNIVKANNRIEARNNPSIFLRYNSVRVGVPSVQVQYIAEKITPHFCRLTDRTYSAPVLADIEYTVGKQYELKRKPNFIIGYLPIMLRSHACVLNGKDEAELARYGECPLDPGGYFIVKGTEKVILIQEQLSKNRIIIDTDSKGRVIASVTSSTHEIKSKTVIFMEKEKIYLQLNQFTKPIPIIVVMKAMGMESDQEVAQMVGRDPRYGDLLYPSIQECAFERIYTQKQALQYMDDKVMYPGAGNQKEGRSKSILRDVFVAHVPVESGNFRPKCIYTAVMLRRMMDAILNADTFDDKDYVGNKRLELSGQLISLLFEDLFKTMNSNAVELMNKTSEKIHSSPLDLSLHIKENIITHGLERAISTGNWDIKRFRMHRKGVSQVLSRLSYMASLGYMTRITPQFEKTRKTSGPRALQPSQWGMLCPCDTPEGEACGLTKNLALLTHVTTDQEEGPLMNLCYSLGVEDLSLLSGEEIHASGSFLVMFNGLILGKHRQPQRFANAMRKLRRSGIIGEFVSIFVNEKQHCIHIASDGGRVCRPLIIADKGIPRVKEHHMKQLRDGIRSFDDFLRDGLIEYLDVNEENNALIALYEHEDQDDVQRSSITHIEIEPLTILGVVAGLIPYPHHNQSPRNTYQCAMGKQAMGNIAYNQLFRADSLLYLLVYAQRPLLTTKTIELVGYDKLGAGQNATVAVMSYSGYDIEDAIVMNKSSLDRGFGRCIAMKKYTVTKEKYEGGYSDRIVKPQRDKDGALLKQNMRALDEDGFAAPGLIIRNHDIYVNKQTPRNTKRDSGAHLTDRDYKDSPAVYKGVDGETTVVDRVMLCSDTDEKLIIKCIIRHTRRPEVGDKFSSRHGQKGVCGTIVQQEDFPFSERGICPDLIMNPHGFPSRMTIGKMIELLGGKAGVSCGQFHYGSAFGEPSGNADKVEDISRTLVKHGFSYNGKDLLYSGILGHPCQAYVFMGPIYYQKLKHMVLDKMHARASGPRVLLTRQPTEGRSRDGGLRLGEMERDCLIAYGASMLIFERLLISSDPYQVQVCRKCGLLGYYNHKLKASYCSMCKKGRKYGQDEDAVCLQAFIPGAASNERCSTIEVN

SEQ ID NO: 51435 - protein, 156 aa, Oryza sativa
MAAALRRTAAPMAAAAVFRLSAPPRHAARLARFLGGASAASSDAAVASGEFVPWHNGGGVLHRAASVDPTAVVEAGAVVHSGAVLGKDVVVGSGAVVGPSVSIGQSTRIWYNVVLSNCSVGEFCTLHNGACIGQDGFGFFVGDDGQVKKKLQASTL

SEQ ID NO: 51436 - protein, 523 aa, Oryza sativa
MRHRVGPAAAAAAALRRFSHLRPPAPPDPRLAFLRSEFDGREPGRQPPSPETREEPKGGERARSPVAVDIAHPWPEWVALMELLLQRGHLDASVFAGGAAGSPSKDSNVIRTACLRFGRERPELIRHLSRWDIQVALRYGCPSIDRKVVNSGKRLRAHVGLDEGEVCSQCNLRGGCERAYVKARKEEIGRTVDVMRILLTYGLDTVTGNVENRACLNKTVKESIKSLLNEIVGFDSMGPGSSTEKPTHRMPKGQSSIPMKQGDWNCPKCNFLNFAKNIKCLRCNGEFEERYQLLHENQEHLPLKKGDWICKRCNFLNFAKNTRCLQCHEKPTNRQLNPGEWECVSCNYLNFKRNAFCLKCGWKRPKSLNNQDSIESQRDLDDNKHSAISFIQDGIQSRRQILQNKAPLSDEDSDFWSSEEEGAYHSDKNIPPIKKDYKFLESFPIIGGRTAMSQDPLEREKWKDEMSRRNKGLLTEVSEESNRPSCPVRIPRSIEQIESGDDDDDDISSWFSGGTSNINMKKA

SEQ ID NO: 51437 - protein, 158 aa, Oryza sativa
MFTVRTHLGHLLNPGDLALGYDLYGANLNDDDMDTAMMRHSLPEVILVKKSFAKRPRTRRWKLKRLPMEEDAVNKAKGELEKRADEYEEFLRDLEHNSDIRFQIDLYKDEDYRSEMASTIGDDVPTVPIEELIEDLSLGDDEEEDEGGEGNQHAVMVG

SEQ ID NO: 51438 - protein, 240 aa, Oryza sativa; identical to SEQ ID NO: 36701

SEQ ID NO: 51439 - protein, 385 aa, Oryza sativa
MLAVEAERRGRIAERIGVQAEGPILTLEDTFCDIDDGSAKSQVARKVALGVSQSIVSLSSFAGRKRIRVCSGFVIRWNDSTSIGTILTSAALVRPPCGDDVRVEVFLPSGDISICQISMVDFHHNIALVEVTSNFKLQEAVILKYIIDKGDVLALGRSYEGGLLMCSRGEISNRASIFECSELLVSSCEITMAGTGGPLVNYNGHVVGINFFEENQTPFLSMAIVFKCLEHHQIFGRIIRPWIGFWFTSIQMVPLSHLEHIYRKFSDVDNGLYISNVAEGSPADIAGICQGDILMKCGGKFLSTAPEFGAMLMDKCKETMEEYDQETNGDFSAKRITVEIVIKRENDGSTIEKTISAGLIEEFNYNRWPTPIPSYKVRRDTIGRC

SEQ ID NO: 51440 - protein, 540 aa, Oryza sativa
MEHLSKDDARQQFLRILRTLPYGNSVFFSVRKIDDPIGLLPGRIILGINKRGVHFFRPVPKEYLHSAELRDIMQFGSSNTAVFFKMRVAGVLHIFQFETKQGEEICVALQTHINDVMLRRYSKARSATSAVSQNDVSQTYKPPNIEIYEKRVQELSKAVEESGRKADLLNEELQKKTKQERDMQKELEGLRDTLQSERQSIKEVTNDLDKLKSLCDEKDSSLQASLMEKTRLETRLKSGQGQESSNRTGVSGNHFERDTLPTVGTVNNSIEMLAKLEEELKSCKKELDASKELSKKLTMENNLLDQKVQRLERAKSEEKSNMERVYEDECCKLKSRIAELEQKLESRTRSLNVTESTLALRNAEVDTLQNSLKELDELREFKADVDRKNQQTAEILKRQGAQLIELENLYKQEQVLRKRYYNTIEDMKGKIRVFCRLRPLNDKELIEKDKNIVCSPDEFTVAHPWKDDKSKQHIYDRVFDANTTQEEVFEDTKYLVQSAVDGYNVCIFAYGQTGSGKLLQFMDLKTILVLPQGLPLNFLG

SEQ ID NO: 51441 - protein, 185 aa, Oryza sativa
MARLYVGNLDPRVTSGELEDEFRVFGVLRSVWVARKPPGFAFIDFDDKRDAEDALRDLDGKNGWRVELSRNSSSRGGRDRHGGSEMKCYECGETGHFARECRLRIGPGGLGSGKRRSRSRSRSRSPQYRKSPTYGRRSYSPRDRSPRRRSVSPVRGRSYSRSPRGRGGSPYADGRDGGRYRRSRS

SEQ ID NO: 51442 - protein, 152 aa, Oryza sativa
MQKFVWNSTVPDSLALAPDWDYSSIRYSFLVQFLTNQSVILAAYFSKKITELPWFGAHDVVVGSSNLLDFRARAQRDQITMQLLDVIPHAYQAHPLHRTIVGTDEAANTATAILSGNLSIASAMLRPPKLCPTRISLSPAGATATVSRSGRD

SEQ ID NO: 51443 - protein, 141 aa, Oryza sativa
MDGAANSPSRCKTMVAPSPFPRPLSEGWWRRHLIPRPCPLAAGTISVPFPSQFGCRRISLELVRHLRELPGLVRHLCGLTICYPRTLLLPRSTLHSICLILLIAMINPACLLVLIPYSLFNSSGEGISRHNLEAKKKGSAG

SEQ ID NO: 51444 - protein, 262 aa, Oryza sativa
MEESNDQGLAQKSTAPTGFFRVPGLFVRLSSKGLNAVDTDSAWSPTSPLDFKNLSSSTGSTNLKSSGLLGVEADQKFRTNPPRVGLGLVDALTADESSSCLGVTSSFLDSIRPFLELGLPKAASDAAMQKNGSGSVTLDEIADFALSEEYTCVIEHGPNPRTTHILGDETLEVCKGVPRSSKKSIFTIEPIGELPSTLACAVSRSCCYCRKRLQQDRDIYMYLGEKAFCSNECRRDYIDEEIEEVEELMMLDSAGSSALLAW

SEQ ID NO: 51445 - protein, 233 aa, Oryza sativa; identical to SEQ ID NO: 31878

SEQ ID NO: 51446 - protein, 506 aa, Oryza sativa
MAASSSFLAAGRRLIRLGCGRLLPAGHARSHGSTPALIRAAAAASSPASPRGHSGGRKPARPPSLQSTLWPLGHPGTLLVPEIERWAAKPGNRLRHVELERIVKELRKRRRHRQALEVSEWMNAKGHVKFLPKDHAVHLDLIGEIHGSSAAETYFNNLPDKDKTEKPYGALLNCYTRELLVEKSLAHFQKMKELGFVFSTLPYNNIMGLYTNLGQHEKVPSVIAEMKSNGIVPDNFSYRICINSYGTRADFFGMENTLEEMECEPKIVVDWNTYAVVASNYIKGNIREKAFSALKKAEAKINIKDSDSYNHLISLYGHLGDKSEVNRLWALQMSNCNRHINKDYTTMLAVLVKLNEIEEAEVLLKEWESSGNAFDFQVPNVLLTGYRQKDLLDKAEALLDDFLKKGKMPPSTSWAIVAAGYAEKGDAAKAYELTKNALCVYAPNTGWIPRPGMIEMILKYLGDEGDVEEVEIFVDLLKVAVPLNSDMTDALSRARMREEKKVKDAV

SEQ ID NO: 51447 - protein, 360 aa, Oryza sativa
MVVCKCRKATRVYCFVHKVPVCGECICFPEHQLCVVKNYAEWVVNPDYDWPQHCSSCNSVLEAGSEETTRLGCLHVMHTRCLISHIQSYSTQTAPAGYVCPSCSTPIWPPSTIKDTGSRLHSKLKEAIAQTGLEKNVFGNHFVTMPKADTRTPPAFASDPLKRVSISGDRESNGANIINSAIDANVQSGGMYSSATVGSGTPSHVEPEIVEIDGPSPITTQFPEQESNFIRSPSPHGPSAMTRKGANYVERQNSEISYYADDEDANRKKYTKRGTFRHKFLRMLLPFWSSALPTLPVTAPPRKEGDAPEGRSRHQKSSRMDPTKILLALAIMACIATMGILYYRLTQRSLSENFIEDEPQ

SEQ ID NO: 51448 - protein, 159 aa, Oryza sativa
MVISLVTLASALHMIEHRPEGQATALVGLSIAMVLVFVASFSIGMGPIAWVYSSEIFPLRLRAQGCALGTAMNRVVSGAVSMSFISLYKAITFAGSFYLYAGIAAAGWVFMFFFLPETQGRSLEDTVKLFGGDERDANGTVGREDGHGQNKSTELTTQQ

SEQ ID NO: 51449 - protein, 252 aa, Oryza sativa
MATYNQIDSVEFIILTELQPECYTVDDFRRNGKQFMTFLGSYLDAFAGLTQLFIQNLRLAEADIPNILSTCKRLQYLCMSVCDSEDSVLQLQLEHPRLVELDIYDAGFHLVDLKSLPNLKRLVFGMWVSPGEPLSFGNVPMLSSLSLNNVSAGYQKVFRLSHFLANVPNISNLHLSFASEKIWVKPECPKLLAPVLQKLRVLNLDRLPEGCDIAWTRFFLEAAPNLKMSITVWDHWCDMETDSVERGRTGLP

SEQ ID NO: 51450 - protein, 612 aa, Oryza sativa
MGRPRKPAKPAAAASSSASAAAAFSIGNCKVEIHGSSLRCQSTEQEEEELTISGPRGAKIVVSVDGAKSSSVGDGFDFILLSPSDVNERNKALLQEVLLLYKQELPTMDYAANTGRKSGFLEKCVTNGKYKTLVLSSTAGYEEVTAALSYQLVPADTQYAEIPLAVVRPPYQRVGIGQLLYKELSQRLRNVGVTTIFCWADNVSEGFWLKQGFESVGEVDTKGKICRIPVRADIKRALCFPGGSMLMVSHLKDLPAPQKSLLSSQQTYQFHTFAPDSISPSDTGTSTPSCEKLLPQTVACHKVSKTAAVEKNEDFHGTGGCSFSDQQENKRTHETSSSSLKSKRVRCSQHSDHHQDMNQNEICGKPLSISNTPIHENSVHLMPNELSNPSMVGHVKSKISGDAKANISSNGSPSVMLMNIADETKKTQLIEVVEMLGGVVTCEGNSCTHVITGKVRMTMNFCIALCSGAWIVSPKWLKESFKKGKFVGEAEYVFQDDEFKVKYKSELRDAVVRAKERPCSLFSGYTFCLTKNIQPSVNVLSRIIKSSGGKLINKLDDITQPLKTIFLACEEDMELALDAAKRGIKTFSGEWFLSCVMTQELDLEAPQFTESL

SEQ ID NO: 51451 - protein, 72 aa, Oryza sativa; identical to SEQ ID NO: 44043

SEQ ID NO: 51452 - protein, 640 aa, Oryza sativa
MEDAYAKSVAEVLAAFGVDPTKGLSDEQVEQHARLYGKNELPQEESTPFWKLVLKQFDDLLVKILIAAAVISFLLARMNGETGLAAFLKPSVIFLILAANAAVGVITETNAEKALEELRAYQADVATVLRNGCFSILPATELVPGDIVEVGVGCKVPADMRTIEMLSHQLRVDQAILTGESCSVAKELESTSTMNAVYQDKTNILFSGTVVVAGRARAVVIGVGSNTAMGSIRDAMLRTEDEATPLKKKLDEFGTFLAKVIAGICILVWVVNIGHFRDPSHGGFLRGAIHYFKVAVALAVAAIPEGLPAVVTTCLALGTKRMARLNAIVRSLPSVETLGCTTVICSDKTGTLTTNMMSVSKVCVVRSVHQRPITDEYSISGTTFAPDGFIYDAGGLQLEFPPQSSCLLHIAMCSALCNESTLQYNPDKKCYEKIGESTEVALRVLVEKVGLPGFDSMPSALNMLTKHERASYCNRYWENQFRKISVLEFSRDRKMMSVLCSRKQQEIMFSKGAPESVMARCTHILCNDDGSSVPLTMDIRNELEARFQSFAGKDTLRCLALALKRMPEGQQSLSYDDEANLTFIGLVGMLDPPREEVRNAIHSCMSAGIRVIVVTGDNKVGEKSWFKFALGSWLCTSVWM

SEQ ID NO: 51453 - protein, 604 aa, Oryza sativa
MSIKSSDGKSPIVVGPWGGTGGYPWDDGVYSTVRQVIITHGAAIDSIRIEYDLKGSSVWSETHGSTDGGSETDKVKLDFPDEILVSVSGYYGSVCGTPVIIRSLTFQSNRSIYGPFGTEDGTPFSLPVSSGKIIGFHGRSGSYLNSIGFYLKQVNVSDRSNSPVLPQSRSITSAYNKNGYSFPEGASGYDMVLAVRDRGDSYAVYTSNYPNQQYTNPSPDYNDGIRWNKVPQTSPSLQMVSFPSGYGDRGGAALSSHETYGPWGGSGGTMFDDGMYTGVWQINLTRAVGITSIKVLYDRNGQAVWGNKHGFSGAVSPDKIVFDFPSEVLTHITGYYGTTMIMSPTVVRSLTFHTNKRRYGPYGDECGTYFSTSFSDGRIVGFHGREGWYIDGIGVHVQEGNLVAPRVSSRSTIEMNPSLRYDMLAQSRSETYNEVPYSMVKEPVPMGPGPWGGEGGRPWDDGVYTGVKQVYVMRGTFIGSIQIEYDRGDQSVWSARHGTSGHITHRIKLDYPHEVLTCVYGYYNTNREEGPRVLRSITFISNRGKYGPFGEEFGAYFSSAKTEGKVVGFHGRSGQHLDAIGVHMQHWMGDRRPAPKYVLSKYLF

SEQ ID NO: 51454 - protein, 651 aa, Oryza sativa
MAGSERTVVWFRRDLRIDDNPALASAARDGAVLPVFIWCPADEGQFYPGRCSRWWLKQSLPHLSQSLESLGCPLVLIRAESTLEALLRCIDSVGATRLVYNHLYDPVSLVRDDKIKKELSALGISIQSFNGDLLYEPWEIYDDSGLAFTTFNMYWEKCMELPIDASPSLAPWKLVPVPGLESVRSCSVDDLGLESSKDEESSNALLMRAWSPGWRNAEKMLEEFVSHGLLEYSKHGMKVEGATTSLLSPYLHFGEVSVRKVYQLVRMQQIKWENEGTSEAEESIHFFMRSIGLREYSRYLCFNFPFTHEKSLLGNLIHYPWKVDEERFKSWRQGMTGYPLVDAGMRELWATGWTHNRIRVIISSFAVKFLLIPWTWGMKYFWDVLLDADLESDILGWQYISGSLPDGHELSRLDNPEVQGQKYDPDGVYVRTWIPELARMPTEWIHHPWDAPSCILEVAGVELGFNYPKPIVDLHIARECLDDSISTMWQLDTAEKLAELDGEVVEDNLSNIKTFDIPKVVLRETSPCALPIDQRVPHASGKDHNLKSKVLKASNRSSICVDMIRSSKMEATSSVANSPVSRKRSFCETAFHVPSYSSSAEVHSHIQDHGGSLVGPSRYLLQEAGRNYVDEVEDSSTADSGSSISRQRKAA

SEQ ID NO: 51455 - protein, 447 aa, Oryza sativa
MASSWRLLLQGITSLVFLCARGADEYVRPPPSPLVLTAHGKPASHPQQVHISMVGEKNMRISWVTDDLNAPSVVEYGTSPGKYTASATGDHTTYRYFLYKSGAIHHATIGPLEASTTYHYRCGKAGDEFTLRTPPARLPVEFVVVGDLGQTKWTASTLSHIGGGGGDYDVLLLPGDLSYADTQQPLWDTFGRLVQPLASARPWMVTEGNHEIEALPVVGIAPFAAYNARWRMPREESGSPSNLYYSFDAAGGAAHVVMLGSYAEFEEGSPQRAWLERDLAGVDRRRTPWLLALVHAPWYNTNEAHQGEGERMRRAMESLLYEARVDVVFAGHVHAYERFTRIYDNEADSRGPMYITIGDGGNREGLALKFIKGHKSAHLSEFREASFGHGRLRVLNETSAVWTWHRNDDQFATVRDEVWLHSLAAGEPAATVASAAGGGGGHPADEL

SEQ ID NO: 51456 - protein, 299 aa, Oryza sativa
MASAAAAADPGAAYKLLLSCPAGLPRSRVSVKFDQSFDRIPHPDAALEESISVIWNQRLKQNPSSYSGTKFRYGGHAVHYKDEPNKEYCVSLHLGLTDYSTFVGTNLNPLWEKFLVPSEDDSVHCQHMSNPLGNGAIVQTSDEKIIVLQRSYNVGEFPGYFVFPGGHSEPQEIGILAHQTDEKDLAVLNERVSQEMFDGIIREVVEETGVPSNSLTEPVFIGISRREMNVRPTAFFFTKCNIDSGGVHELYSRAQDGFESTKMYAVSEEELLGMTDRMPGCHRGGFALYEMMKTAAKKS

SEQ ID NO: 51457 - protein, 376 aa, Oryza sativa
MSLRHPLLPSLRGVLATDAVVGFAIDRCGGGDLNSLRRRQTEKMFSDSVIRFYAAELVLALDYLHSLGIVYRDLKPENVLIQDSGHIMLVDFDLSTRLPTPPPPPEEQDATIADSMPEPPPSSPSPNRAKGKRQPGAASCFPFCSVGATKPAASADSPSPTSTSRTASASSSSSSSTATTASSSTAAGVRSPAKSNSFVGTEDYVAPEIIAGSGHDFSVDWWGLGVVLYEMLYGRTPFRGLNRKETFYRVLSKQPELVGEKTPLRDLIARLLEKDPEKRIGARGIKAHPFFNGVDWDRILRVARPPFIPPPPEDEDEAGEVLDVEKVVNEVFAANDGGAAAGVVEKPSPEAGGTLAVGDGEQRRDPSKEGDFSVFF

SEQ ID NO: 51458 - protein, 738 aa, Oryza sativa
MHRGGDRSTDPSSGPAPGSRGGGDGRFGRGPSRWSSGGGGGGSGSPPHRFSRGGGGGGGDGGGGGGGGGRFHPYRGPSDHSGGGGYRSGGGGEYGEPGSGPRHRYGSGRGDHSDHDNRNNYVKLFIGSVPRTATEDDVRPLFEEHGDVVEVALIKDRKTGEQQGCCFVKYATSEEAERAIRALHNQYTLPGAMGPIQVRYADGERERHGAIEHKLFVASLNKQATAKEIEEIFAPYGHVEDVYIMKDGMRQSRGCGFVKFSSREPALAAMSALSGNYVMRGCEQPLIIRFADPKRPRPGGSRGGPAFGGPGFSPRSDAALVIRPTANLDEPRGRHMPPDSWHPSSPRSAPHQFNNFGSDNPMAPKGSTVTSTTDTATFRPQMFSGNGSLSSQTAVPSSSHMGMNPPPMAQGHHLGGQQIPPLQKLPGLPQNFPVQLQNNQLGQPLQGPAQQIGQLQVPQSMGPGSFGQNRLSGQLPVSQPLMQQNASVSAVQVPSAVSNSMQAIPGQQHLPSNVAPQMLQQPVQQMPSQAPQLLLQQQAALQSSYQSSQQAIYQLQQQLQLMQQQQQSNLNHQQPTQGQPVQSSNPGAPNAIIPSNINTIPQQATSPAVPLTCNWTEHTSPEGFKYYYNSITRESKWDKPEEYVLYEQQQQQQQQQKLLLLQQHKQKLAMQQLQSPPQAQTHPAMQPVQQIPQAQQGQQQMQMKQQELNYTQLQTPGAIDPSRIQQGIQSAQERAWKS

SEQ ID NO: 51459 - protein, 51 aa, Oryza sativa
MADQDRPPMGDCALHLRLPPTSPFSMYKTIPIQSCPPAFVLDTSKKIVYFG

SEQ ID NO: 51460 - protein, 662 aa, Oryza sativa
MGKKQKKPRKGKEKTERKTAKGEEKRARREARKVGEEDDIDAILRSIQKEEAKKKEVHIDENVPAPSPRSNCSLTINPLKDTELVLYGGEFYNGSKTFVYGDLYRYDVEKNEWKLVSSPNSPPPRSAHQTVAWKNNIYMFGGEFTSPNQERFHHYKDFWSLDLKTNQWEQILAKGCPSARSGHRMVLYKHKIVLFGGFYDTLREVRYYNDLHVFDLGNFKWEEIKPRPGCLWPSPRSGFQLMVYQDQIYLYGGYFKEVVSSDKSASEKGTVHADMWTLDPRTWEWNKVKKTGMPPGPRAGFSMCVHKKRAVLFGGVVDLEIEGDVFMSMFMNELYGFQLDNHRWYPLELRKDKPAKNKTKDIKRKEPSNNVEDNLGNEEDEIMEDSETTGGQSEVHGVSNHLTKSLTLNKAGSGNSSDILSDSTTQEVLPEAVKPGGRINACLAVGKDTLYLYGGMMELKDREITLDDMYSLNLSKLDEWKCIIPASESEWLEISEDEDDEDDDDDDNENDSEDDANQTDEDDEESDEDAEKNVDMSTAVSLIKGERKNLRRKEKRARIEQIRVMLGLSDSQRTPMPGESLKDFYKRTDMYWQMAAYEHTQHTGKELRKDGFDLAETRYKELKPILDELAVLEAEQKAEEEASASTSSKKDTRKSKQKSGMR

SEQ ID NO: 51461 - protein, 270 aa, Oryza sativa
MADEEQVERKEEVSELTPFDPTKKKKKKKVVIQDPSDEVDKLAEKTESLTVAETGEPSFTGMKKKKKKHVEHDTSLTEAGDGEDAIDDQIGEDEEGEGIVLGGATRYPWEGTDRDYKYEELLGRVFNILRENNPDLAGDRRRTVMRPPQVLREGTKKTVFVNFMDLCKTMHRQPEHVMMFLLAEMGTSGSLDGQQRLVIKGRFAPKNFEAILRRYINEYVICNGCKSPDTILSKENRLFFLRCEQCGSSRSVAPIKAGFVAQVGRRKAGT

SEQ ID NO: 51462 - protein, 62 aa, Oryza sativa; identical to SEQ ID NO: 32526

SEQ ID NO: 51463 - protein, 372 aa, Oryza sativa
MTEDDNCEITSIQSLIGCTGRRWIMGVISQLEERQFYLEDLTGAVPIDLSNAKITSGFFVENTVIVAEGELLSNGIFQVNTCGFPPLEDREASLSMLMGLDFFGGGVIPTEETVRLSTLEKKAMNDMFVILSDVWLDNYETMEKLGVVLDGYDSLEAVPSLFVLMGNFCSRPCNLAFNSFEELRLQFGKLGEMIAARSRLKEHSRFLFIPGPDDAGPSKALPRCALPKYLTEELQKHIPNAIFVSNPCRVKFYTQEIVFFRQDLLYRMRRSCLIPPTTEETSDPFEHLVATITHQSHLCPLPLTVQPIIWSYDHCLRLYPTPHTIVLGDKSDQKAFKYTGITCFNPGSFANDSTFAAYRPCTKEVELSALES

SEQ ID NO: 51464 - protein, 129 aa, Oryza sativa
MHVLHHSAKGAHVTLTHHLVEFLGIDVDKKDSTGRTILHIAVPRNSGGYLGHVLAKLEPSIDMKDNLGLTPLQLSILLGKYAAMQKLIDFGADIHIHSLYGGPIHAAVALDDEMALEALMRKTNTRLLL

SEQ ID NO: 51465 - protein, 262 aa, Oryza sativa; identical to SEQ ID NO: 34814

SEQ ID NO: 51466 - protein, 166 aa, Oryza sativa
MNFINVHDIFLDCDRDSIIYLGKPDGPTCHTGAETCYYTSVYDALQGSKPNQDRQVVSTLYSLEDTISRRKEEIVTEGSGKPSWTKKLILDNRLLCSKISEEAGELNQTLLENEDESRTISEMGDLLYHAMVLLRVKGVRMEQVLEVLRKRFSQSGIEEKASRNKS

SEQ ID NO: 51467 - protein, 682 aa, Oryza sativa
MDDDDLGYPPGMAGLDAMAGLGGLGGMGGLGGLGGMGGLGGLGGMGGLGGLGGFGGGGMEDLYGGGGGAGGEEGGEGPYAAEMEVGEEKEIGKEGLRKKLVKEGEGWERPDAGDEVQVHYTGTLLDGTKFDSSRDRDAPFKFTLGQGQVIKGWDLGIKTMKKGENAIFTIPPELAYGEDGSPPVIPPNATLQFDVELISWESVKDICKDGGILKKVLAEGTKWENPRDRDEVFVKYEVRLEDGTVVAESDGVEFTVKDGHFCPAISKAVKTMKKNEKALLTVKPQYGFGEQGRSAARDEAAIPPNATLHINLELVSWKAVTEIGNDKKILKKILHEGEGYERPSDCTLVRVKLIGKLEDGTIFVTRGHDGDEPFEFKTDEDQVVEGLDKAVLSMKKGEVALVTIPPEYAFGSDETRQDLSVVPPNSTVYYEVELVSFDKEKESWDMKENTEKIEAAAKKKDEGNAWFKMEKYARASKRYGKALNFIQYDSSFSEEEKQLSKPLKVSCKLNNAACKLKLKDYKEAKELCTEVLELDSMNVKAFYRRAQAHMYLVDFDLAELDIKKALEIDPDNRDVKMGYRRLKEKVKEQKRKETKLYGNMISKLSKLEDSETEGGTTQAPSKKHGLWPLTALLRRLFTRSDGSKESMLWLVLRLLIPVVLLVAVCVAFYMRSGPPEVDCINC

SEQ ID NO: 51468 - protein, 495 aa, Oryza sativa
MPPALTSNPPSFRPLSTPLTRRRAATTFLCRVGPGKPSKDTGADDEPKKRSFFADFGKLSDGRSLIPAFPPAAAGSLFAGGRGRKDPQTVFVAGATGQAGVRIAQTLLRQGFAVRAGVPDLASAQELARLASAYRLISPTEARRLNAVESDFEDPEAIAKSIGPATKVVVTVGAAEKGPDGGVVTTDEALRVVQAADLAGVTHVVVVYDLGAGDPSGESTYNVLDGFTSFFSNLFSRVQSLPLNEFLAKVVETDVRYTLIKTSLTDDYSPESTYGLVLAKEGASSTTSSTETGKVSKLQIAGLVADVFSNVAVAENKVVQVSTSSSVTSKTIEEAFSAIPEDSRRKEYQDAVAKAQAEEETRASQRTRQAEEDTTTVKAGGKKTPSDEAAASEAQASLENLLSRAKGFGTDFSWEKLSTQLAGVATQDSDEVEPKAQIATVRGQAKAKKLAPQRAVVKPAAQKTRPTPKQPESKPDVRPVFGGLFKQETIFVDED

SEQ ID NO: 51469 - protein, 89 aa, Oryza sativa
MCPLRVILIFLSATIAGFFLIRGLNADPDLHDDADASESPRERPPVPLHSKVGSALKTGFWTMVDMASGKYLWRTLVSPPTKCESEKAQ

SEQ ID NO: 51470 - protein, 206 aa, Oryza sativa
MRSFFRCWVSGTTKMVTTLISKLEPGLGNPTIRLRVSRFWEFRDQNDENILYHLGLVLVDGTGASIAAQIMPPLDELFAPAITEGKVYDLTFYRVRQCTSQYRPVGNMQSIALTKWSTLEECTDVPENFPNYVYSLTPYDQLRGRVNRKDSFTDAIGIITEITSVTPIQTRTKDGESLKRSIYIRDAELALLLCFLICKKIFTSVL

SEQ ID NO: 51471 - protein, 634 aa, Oryza sativa
MAKEYPASPKAQQLQESKKQRLTYILVVSALCVAFYVLGAWQNTTVPKPAASSAITKVGCDPAAAGQSSAVPSFGSASQESLDFEAHHQLSLDDTGAEAAVQPFPACPLNFSEYTPCEDRKRGRRFERAMLVYRERHCPGKDEEIRCLIPAPPKYRTPFKWPQSRDFAWFNNIPHKELSIEKAVQNWIQVDGQRFRFPGGGTMFPRGADAYIDDIGKLISLTDGKIRTAIDTGCGVASWGAYLLKRNILAMSFAPRDTHEAQVQFALERGVPAIIGVMGKQRLPYPSRSFDMAHCSRCLIPWHEFDGIYLAEVDRILRPGGYWILSGPPINWKTHYKGWERTKEDLKEEQDNIEDVARSLCWNKVVEKGDLSIWQKPKNHLECANIKKKYKTPHICKSDNPDAAWYKQMEACVTPLPEVSNQGEIAGGALERWPQRAFAVPPRVKRGMIPGIDASKFEEDKKLWEKRVAYYKRTLPIADGRYRNVMDMNANLGGFAASLVKYPVWVMNVVPVNSDRDTLGAIYERGFIGTYQDWCEAFSTYPRTYDLLHADNLFSIYQDRCDITNILLEMDRILRPEGTAIIRDTVDVLTKVQAIAKRMRWESRILDHEDGPFNPEKVLVAVKTYWTADESEQH

SEQ ID NO: 51472 - protein, 519 aa, Oryza sativa
MLGEAASPWSLASAGAAVALLWLCAWTLQWAWWTPRRLERALRAQGLRGTRYRLFIGDVAENGRLNREAASRPLPLGSHDVVPRVMPFFCNVLKEHGKLSFVWTGPKPFVIIRDPDLAREILSNKSGNFAKQTTAGIAKFVVGGVVTYEGEKWAKHRRILNPAFHQEKIKRMLPVFLACCTKMITRWVNSMSSEGISELDVWDEFQNLTGDVISRTAFGSSYQEGWRIFQLQEEQAKRVLKAFQRIFIPGYWYLPIENNRRIREIDQEIRTILRGIIVKRDKAVRNGEGSNDDLLGLLVESNMRQSNEKEDVGMSIEDMIEECKLFYAAGSETTSMLLTWTLILLSMHPEWQEQAREEVMHHFGRTTPDHDGLSRLKIVTMILHEVLRLYPPVVFLQRTTHKEIELGGIKYPEGVNFTLPVLSIHHDPSIWGQDAIKFNPERFANGVSKATKFQTAFFSFAWGPRICLGQSFAILEAKMALATILQSFSFELSPSYTHAPHTVLTLQPQYGSPIKLKKL

SEQ ID NO: 51473 - protein, 73 aa, Oryza sativa
MGGGSGGSDSVQRRIRWHRVSRAVELELGMRAADATTTTTCAGWWIRWQGISGSPVAATCVGGKVQAVVRLIQ

SEQ ID NO: 51474 - protein, 227 aa, Oryza sativa
MATPANATTFSGEVWAELRLADSSDVPHIHALIHQMAEFELLTDLFAATHELLTSTLFPSPPRPPFTSFTALILDLSPSPLPASGPSTIASHCLDLSASPLADPEAAAFASPRGGGRVTAGFVICFPNYSTFLSKPGLYVEDIFVRAPWRRRGLGRMMLSAVAGKAAELGMGRVEWCVLDWNKNAIDFYEGMGAEVLPQWRICRLTGAALDKYKGNQEEGGGSKAAE

SEQ ID NO: 51475 - protein, 181 aa, Oryza sativa
MLSRISQLGARLLRENRAVGNLASSTTSYYRGQLSRRFVPTKNILFSTATTSSDRDDGSQSKEKISVTFVNKDGTEQTISVPVGMSILEAAHENDIELEGACEGSLACSTCHVIVMDVNYYNKLEDPTDEENDMLDLAFGLTETSRLGCQVIAKPELDGMRLALPAATRNFAVDGFVPKPH

SEQ ID NO: 51476 - protein, 185 aa, Oryza sativa
MAKKGAPRRQQPAPAARQLAVAKKGKAPPKAAKRAPKKKQELLEPSSDDSELEQQQERLQEVEEDESGSDLDAPSDSGAEELSDSDDASLEGGDSGDEEDDDEEEEEDDDDPLADDFLAGSSDDESAEGDDSGVDSDESDDLEAKSRAIDEAKGKAEEEAEEELKLNIRSESDEFRLPTKEELEE

SEQ ID NO: 51477 - protein, 224 aa, Oryza sativa
MALDSVPSYPSDLGSSRARTPQQQRVSPRKEERTWTTDTYAPYDDGHQWRKYGEKKLSNSNFPGFYYRCTYKNDMKCPATKQVQQKDTNDPPLFSVTYFNHHTCNSSSKIVGSTPDSTVQSRKAISICFNSHGQTGEQPTFLSSSASLLSPSMQSYSSNQQPDMNTYSRQFQWADTSSSTSNAPVKMEADDYAEASASPSTTGALSRTLLPIGQSRCIEYFHFL

SEQ ID NO: 51478 - protein, 316 aa, Oryza sativa
MVVLVVATTSDAASATPAAAFLAMPGWTPGPSIPDGVESFANGAGVRLLRHARGIVEEDDLDLRWEAATGERVSEVVLLSRHTAVSNRPALTVHPIGVPHLRDGVDVPPQGGRPGWAAPPNPRIGPWLRLLRRIAADRGLVPEFEITLEGTHHGPVTNTPTLFVEIGSTEEYWGRQDAADAVALLLWKGLGLGEEESVGNWHGNGEKVLLGIGGGHYAPRHMDIVTKDGVWVGHLLSGYSLPMEEPKQMNGKNVADVGGMWKHSIKVSYEATKAAFPGGEIIAHIDQKSFKGWQKNAITSYLQELNIRVGKPNDFF

SEQ ID NO: 51479 - protein, 477 aa, Oryza sativa
MEKPAASVEEPLLVGAGEKKGESAAAAELKRLLRLAGPLVASGVLRNVVQMVSVMFVGHLGELPLAGASLATSLANVTGFSLLFGMASALDTLCGQAYGARQHHLLGVYKQRAMLVLAVAAVPIALVWASAGEILLLFGQDPAIAAEAGAYARWLIPSLVPFVPLVCHIRFLQAQSAVLPVMASCGVTAASHVAVCWALVRKAGMGSRGAALANAVSYGVNLTIMSLYVRLSRSCEKTWTGFSMEAFRELRQYAELAIPAAMMVCLEWWSFEFLVMLSGLLPNPKLETSVLSICLNTGALLVMVPIGLSTAISTRVWNELGAGNPQAAKLATRVVICMAMTEGSVVAFTMILLRNSWGHMYSDEAEVVTYIARMIPVLAISFFIDGMHSALSGVLTGCGKQKIGARVNLGAFYLAGIPMAVFLAFVLHLNGMGLWLGIVCGSLSKLILLFWITMSINWEKESTRAKELVFSSSLPVA

SEQ ID NO: 51480 - protein, 522 aa, Oryza sativa; identical to SEQ ID NO: 44101

SEQ ID NO: 51481 - protein, 127 aa, Oryza sativa
MPGASAGTVAGGCIRRKSAPGDGIAVMSLTEKTRSKPSGLPARSTPLCRANRKREIQFQYWARHSYSTSRRVIRFTIWVRRDDVLPFIWLSMLSAMAGGVGLKFSTCLLLPYMYFSHLLQKKIYRLH

SEQ ID NO: 51482 - protein, 658 aa, Oryza sativa
MAHLPLLLLSFLVLIGVHASVSHGSPPLPSTYDPSICSKSSECGGVNISYPFYLSNATDYYTRFSCGYTDLKISCSRDRDGRNETPTILLGGDNYTVLDIIYDSHTIVLADTDALRGGSCPRVRHNITFAQADEWLQYTGPRDNLTFFFGCKLNLPPPIDPGLVSLADKHQINCKDFSNWPDSGDSFVFTSAELEAPVESELARRCRQVIVVPVNGDILNSSNQSALPSGGYGQVLNKGFDLAWNSRKDEQCYQCEQSQGHCSYSQNRVFLDCLCSDGKVGNQDCRNSGASNSSTLRYSSLKGRMKLYIIAGISSVLLLCLLSFPCLFSLKKYRHRRISKGTPRIESFLQRNGTLHPKRYTYTEVKRMTKSFAEKLGHGGFGAVYRGNLSDGRQVAVKMLKDSKGDGEEFINEVASISRTSHVNVVTLLGFCLHRSKRALIYEYMPNGSLERYAFRNNSKGELSLTWEKLFDVAVGIARGLEYLHRGCSTRIVHFDIKPHNILLDQEFCPKISDFGMAKLCANKESIVSIAGARGTIGYIAPEVYSKQFGAISSKSDVYSYGMMILEMVGARERNIEANSESSSHYFPQWIYEHLDEYCISSSEIDGETTELVRKMVVVALWCIQVVPTNRPTMTRVVEMLEGSTSGLELPPKVLLSW

SEQ ID NO: 51483 - protein, 90 aa, Oryza sativa
MEGFIPFIYKAIVQYRKEGQVSVGDLFFDEPSPSSYFRLPGDSGRYQQQQQAAMSVLFSQATTADSDAVAPRRSPLRCTVHHRRPATATP

SEQ ID NO: 51484 - protein, 652 aa, Oryza sativa
MQRQGRSLQRSGSKRVLDPTGGGGGDDDDHAAKRPRVPALASVIVEALKVDSLQKLCSSLEPILRRVVSEEVERALAKLGPARIQGRSSPKRIEGPDGRNLQLKFTTRLSLPLFTGGKVEGEQGAAIHVVLLDANTGVAVTSGPESCAKLDVLVLEGDFNNEEDEDWTEEEFESHIVKEREGKRPLLTGDLQVTLKEGVGTIGELIFTDNSSWIRSRKFRLGLRVAPGSFEGIRVREAKTEAFTVKDHRGELYKKHYPPALKDDVWRLEKIGKDGAFHKKLNASGIYTVEDFLQLLVKDQQRLRSILGSGMSNKMWESLVEHAKTCVLSGKHYVYYAIDSRNVGAIFNNIYEFTGLIADDQFISAENLTDNQKIYADGLVKKAYEDWMHVVEYDGKALLSFKQKKKSVTTRSDTAAAATNSPVSYGSSNTHKQLSQPAKAGQTSTGTTSEDGSTSAYNGNQAGRYAVNSQSIPANVTTQYERSSLTPESQFNGSALQNQVSRGSNILALGPPQQQHQQNFEFSALGGQSMQPTGLNPFDDWSQPQENRSGVDDYLMEEIRMRSHEILENEEMQQMLRILSMGGASTNLTEDGFAFPNYMPSTPPNFNFGDDRARPPGKAVVGWLKIKAAMRWGIFVRKKAAERRAQLVELED

SEQ ID NO: 51485 - protein, 123 aa, Oryza sativa
MSGGGGGGRGMTRGLDLKLNLSLPAVARAVSPAADDESSPSSCLSSESELRQQHGGGGGQLQWSDSPEATSMVLAACPRCFLYVMLAEADPRCPKCRSPVILDFLHAGGGGGINADGRRHRRG

SEQ ID NO: 51486 - protein, 306 aa, Oryza sativa
MAAEAQATAAGGLAGEMEVEAYRRLFPLAFLERHLRESVRPDARRPAEARPTTVALAAVSSAHGSALVRLGDTAMLASIKLEVMSPSGEAPDEGSIAVEFHMPPICSPLVRPGRPAEVAPVISKNLEDILMSSGMLNLKELCLISGKASWLAYLDVYCLNADGSLFDAALISAVAAFTHLEIPLVSVGDDGRVFTVGGNEGKAKYELVNREKRKLTITNVPFSLTCALHKDNVLADPTAEEESIIETSVTIVLDSSDQIVSIQKPGGAVTSMTTIKECISLAKDRRRKLREILMDNVEAMEVDQTD

SEQ ID NO: 51487 - protein, 386 aa, Oryza sativa
MAMRGVDFKWYDGFFLSMLATSLIIVSINWKRYRLCAHPLHIWIVVDYTTVFIFRLLMFVDNGLAAGMGLDLGWQQRYARFCGRIVVLSVLVLLLYPFLWVWTVIGTLWFSTARGCLPEEGQKWGFLIWLLFSYCGLACIACVAVGKWLSRRHALQQRAQQGIPVSEYGVLVDMIRVPDWAFEAVGLEMRGMGQDTAYHPGLYLTAAQREAVEALIQELPKFRLKAVPTDCSECPICLEEFHVGNEVRGLPCAHNFHVECIDQWLRLNVKCPRCRCSVFPNLDLSALNNLRPSSEPDRPSASEVTAATMARYVRSSQPAGQSYLLRLQGLLLRQVVVRHGGGDDMASAENGASHVAAAVTAPATTGGVESELPSIVVDGGHQLPDR

SEQ ID NO: 51488 - protein, 655 aa, Oryza sativa
MPRKVVSGPDYDDEYNDDYDEYDEDYDDYGGTGHSDDIQHPTKEKESSKKSSSMVPVLWRCSMCMFDNHESMVYCEMCGVFRESFMKSAKDGSIKVHGIPSDFGTPSMPKSDSTKMPVNTRTTDFGGDPEIKNASISHEKVGSTQYASVGSSSGAGKKLKEDQSSRATSSAQNEDVAQKLSSDIQKLGLEKNEVDTAKPYLPEEYKPEKWMFANEESGVLSQLNLAIVGHVDSGKSTLSGRLLHLLGRISKKDMHKNEKEAKEKGKGSFAYAWAMDESSEERERGVTMTVAVAYLETNKYRVVLLDSPGHKDFVPNMISGATQADAAILVVDACTGSFEAGMDGEGGKSVGQTKEHAQLIRSFGVEQLIVAVNKMDAIGYSKERFEFIKVQLGSFLRACNFKDSSVTWIPLSAVENQNLIKIPSDVRLTSWYQGFCLLDAIDSLQLPSRDVSKPLILPICDVIKSQSTGQLAAFGKLETGAIRIGSKVLISPCGEVATVKSIERDSNSCDIARAGDNVAVSLQGIDGSKLIAGGILCNPGFPVPVSNFLELRVLVLDVTIPILIGYQVEFHIHHVKEAARVTKIVALLDKAGKPSKTAPRFLKSKQNAVVQVTLDAPVCVEEFSKCRALGRAFLRSGGSTIAVGVVTRVLGQDQN

SEQ ID NO: 51489 - protein, 178 aa, Oryza sativa
MCGRARCTLSPSQAARAFGFPTTTSVAGGGTGGGCGGGDAPAVPLLRMDRYRPSYNVSPGTYLPVGTVRARPAGYDGGGDMDGEVSVIQCMKWGLVPSFTGKNEKPDHFRMFNARSESIKEKASFRRLIPNNRCLVAVEGFYEWKKDGPKKMPYYIHFQDQRPLVFAALFDTWTNSEG

SEQ ID NO: 51490 - protein, 171 aa, Oryza sativa
MLHSIQGQLTEFRSYEGEEMQIREKIVPLKIDLRINNTVIRDQFLWDIGNLDSDPEEFARTLCDDLNITDPEVGPAIAVSIREQLYEIASQSVSAMREAARVSKKGRRAPEFASNSKAMNNSLDLFKYFGSKGSVVRKRKEWYLYEPVVDVITNEEVGVTDATEEINSRNA

SEQ ID NO: 51491 - protein, 353 aa, Oryza sativa
MGLNDPWFEVNAYMLHDPVRWKDLNPKFVLQVYRDVVATGNAGFAEAAWPAVYLAMAYMDQFDRDGDGMVENEGRPDQTYDLWSVSGVSAYTGGLWVAALQAAAAMAGIVGDGAAEAYFRGRYHRARRVYTDELWNGGYFNYDNSGGATSSSIQADQLAGQWYARACGLEPIVDGDKARRALATVLDYNVMRVKGGAIGAVNGMRPDGAVDASSTQSKEVWPGVTYAVAAAMIHEGMPEAAFKTAKGIHDAGWGKHGFGYAFQTPESWTADGGYRALHYMRPLGVWAMQWALSPPVLHKEHRVAAVAASPEDAALGQEKFDKVASMLRLPEEQQHKGILRALYDTLRQLLLPS

SEQ ID NO: 51492 - protein, 526 aa, Oryza sativa
MSLRPSERVEVRRNRYKVAVDAEEGRRRREDNMVEIRKSRREESLLKKRREGLQAQAPVPASAATGVDKKLESLPAMIGGVYSDDNNLQLEATTQFRKLLSIERSPPIEEVIQSGVVPRFVQFLTREDFPQLQFEAAWALTNIASGTSENTKVVIDHGAVPIFVKLLGSSSDDVREQAVWALGNVAGDSPKCRDLVLANGALLPLLAQLNEHTKLSMLRNATWTLSNFCRGKPQPSFEQTRPALPALARLIHSNDEEVLTDACWALSYLSDGTNDKIQAVIEAGVCPRLVELLLHPSPSVLIPALRTVGNIVTGDDAQTQCIIDYQALPCLLSLLTQNLKKSIKKEACWTISNITAGNKDQIQAVINAGIIGPLVNLLQTAEFDIKKEAAWAISNATSGGSHDQIKYLVSEGCIKPLCDLLICPDIRIVTVCLEGLENILKVGETDKTLAAGDVNVFSQMIDEAEGLEKIENLQSHDNNEIYEKAVKILEAYWMDEEDDTMGATTVAAPQGATFDFGQGGGAAQFK

SEQ ID NO: 51493 - protein, 434 aa, Oryza sativa
MGAGRACRGGPSSSSPAAAAAAVGRPFPPIAASCPFSSSSAAAAAPAAPSETASTSVTKTVNGSHHFKIAGYPLAKGIGVGKYIASECFTVGGYDWAIYFYPDGKSPEDGAAYVSLFIALASEGTDVRALFELTLVDQSGKGQDKVHTHFGRSLEGGPYTLKYRGSMWGYKRFFKRSALETSDYLKDDCLLVNCTVGVVQSHTEGPKIYTIPVPPSNMSQHIGQLLTDGKRTDITFEVDGEVFPAHKVVLAARSPVFRAQLFGPMKDKNMKRITIEDMEASVFKALLHFMYWDELPDIEELTGLNTTWVSTLMAQHLLAAADRYALERLKLLCELKLCEDVAINTVANTLALAEQHHCYQLKTVCLRFVALPENLKAVMQTDGFDYLQQSCPSLLTELLEYVAKVGEHSVSPCLYSNEVLDGGDANGRRVKPRI

SEQ ID NO: 51494 - protein, 118 aa, Oryza sativa
MARGKFKGKPTGERSFSSEEQIAAGTSAGRPKNFKKKQSEKEVYDRRQESDEEYDRSQESDEEESDNFQKNKHKGTEGLIEIENPNLVKPKNIKAKDIDVSQIFVSVHDGGSLVAMQF

SEQ ID NO: 51495 - protein, 174 aa, Oryza sativa
MRGGVETTSFSRITTVFSTTTLSSLLLILETSTSAFFPSVTSKVGGDLPPGSPSLISLAIVLFFTDIEGARGDLTLSSGRVADFLWSSCIIADIFFVWVSSGMLFLREWSMLANFEFEGRSVKALLLGSASFFNLSLDNSFLPFFSFFIAANDEVDLLTAFVLLSLSLLAFPVF

SEQ ID NO: 51496 - protein, 410 aa, Oryza sativa
MGGRKRALLVGINYPGTKAELKGCHNDVARMRRALVDRFGFDEADIRVLADADRSAPQPTGANIRRELARLVGDARPGDFLFFHYSGHGTRLPAETGQDDDTGYDECIVPSDMNLITDQDFTELVQKVPDDCLFTIVSDSCHSGGLLDKTKEQIGHSTKQNQAQQIKREERSDSGTGGFRSFLKETLKETVRDAFESRGVHIPHQGSRRNDDEDEEPHMGSSSHGGDRIKNRSLPLSTLIEMLKEKTGKDDIDVGSIRMTLFSLFGDDASPKIKKFMKVMLTKLQEGQHGGVMGLVGALAQEFMKAKLEGNQEADALEPAMKQEVHSVHEAYAGTTARVSNGVLISGCQTDQTSADATTPKGRVLRRAQQRHPDHPVGEERQGDEQGARAESARVVVQARVHPAAWPLLQ

SEQ ID NO: 51497 - protein, 491 aa, Oryza sativa
MALLLSYPRRHPSIHLLILSAYALFLLPILDGLELGGDGLYREILRDETVLRLKELGKISDGEGYLERTFLSPASIRASAVIISWMKDAGLTTWIDQMGNIHGRFEPTNSTKEALLIGSHMDTVIDAGMYDGALGIISAISALKVLKVTGRLQRLTRPVEVIAFSDEEGVRFQTTFLGSAAVAGTLPESILQVSDKSGTTVQDVLKLNSLEGTANALGEVRYSPESVGSYVEVHIEQGPVLEALRYPLGVVKGIAGQTRLKVIINGSQGHAGTVPMKLRRDPMVAAAELVLTLETLCKEPNKFLTYDEECGCFTEESLAGLVCTVGELLTWPSASNVIPGQVNFTVDIRAMDDKVRETIVTSFSRLVLQRCDDRLVDCAVEQKHAAAATPCDAELTSRLERATRSTISSMAAGVRRAGGETPVLMSGAGHDAMAMARLTKVGMLFVRCRGGVSHSPEESVMDDDVWAAGLALVNFIDQNAVDAAAATAAES

SEQ ID NO: 51498 - protein, 413 aa, Oryza sativa
MPPPARSPAAGVRRRGALLPLAFLLLLLLLLLHLTSSPARSPNSPLLRGSGDGEPRQRGPCDYASGEWVPDDDDPAVSGGLRYDQTCREIFKGWNCLANGKRNGRELLRWRWRPRGCELPRLDPLRFLECHRNTSIGFVGDSLNRNMFVSLVCMLRGASGEVRKWRPAGADRGFTFLRYNLTLAYHRTNLLVRYGRWSASPNGGPLESLGYKQGYRVDVDIPDQTWAEAPSFHDVLIFNTGHWWWAPSKFNPVQSPMLFFEKGIPVIPPLLPPAGLDLALKHMIIFVNKAMRPNGVKLFRTQSPRHFEGGDWNEGGSCQRDKPLSAEEVEELFSLDNNGTNVEARLVNQHLVRALEKSTFNVLNITGMSEFRADAHPSTTGGKKHDDCMHWCLPGPTDTWNDLLAANLLATES

SEQ ID NO: 51499 - protein, 602 aa, Oryza sativa
MQNLTLCAMKELHLYEDSEKALLSTSSANGTAILRVVQALSSLVTTLQEKKDPDHPAEKDHSDALSQISEINTALDALWLELSNCISKIESSSEYASNLSPASANAATLTTGVAPPLPAGTQNILPYIESFFVTCEKLRPGQPDAIQEASTSDVEDASTSSGGQKSSGSHANLDEKHNAFVKFSEKHRRLLNAFIRQNPGLLEKSFSLMLKIPRLIEFDNKRAYFRSKIKHQHDHHHSPVRISVRRAYILEDSYNQLRMRSPQDLKGRLTVHFQGEEGIDAGGLTREWYQLLSRVIFDKGALLFTTVGNDLTFQPNPNSVYQTEHLSYFKFVGRVVGKALFDGQLLDVHFTRSFYKHILGVKVTYHDIEAIDPAYYKNLKWMLENDISDVLDLSFSMDADEEKRILYEKAEVTDYELIPGGRNIKVTEENKHEYVNRVAEHRLTTAIRPQITSFMEGFNELIPEELISIFNDKELELLISGLPDIDLDDLKANTEYSGYSIASPVIQWFWEIVQGFSKEDKARFLQFVTGTSKVPLEGFSALQGISGPQRFQIHKAYGSTNHLPSAHTCFNQLDLPEYTSKEQLQERLLLAIHEANEGFGFG

SEQ ID NO: 51500 - protein, 299 aa, Oryza sativa
MAVESPSRADVLRGKAALVTGGGSGIGFEIAAQLARHGAHVAIMGRRREVLDKAVAALRSHGLRAVGFEGDVRKQEDAARVVAATVQHFGKLDILVNGAAGNFLASPEDLTPKGFRTVVDIDTVGTYTMCYEALKYLKKGGPGKGPSTGGVIINISATLHYTAAWYQIHVSAAKAGVDSITRSLALEWGTDYDIRVNGIAPGPIEGTPGMRKLAPEEMAKGSREIMPLFKLGEKWDIAMAALYLASDAGKYVNGTTVVVDGGLWLSRPRHIPKEEVKELSKVVEKKVRASGVGVPSSKL

SEQ ID NO: 51501 - protein, 305 aa, Oryza sativa
MDAAKDTTAAAADQNPTPNPPTAAAPPDDSAAAAAAGRRPFTSLTQEEADLALARVLQEQERAYMMLSAHHGGDYAASDGGSYEFDEEGEGSDFEDEDGDGDGDGEALDEDEEVADADADAAGDPAELDPARYEDDEAFARALQDAEEREVAGRLMALAGLSDWRVMDHDDDDVDDDDDEDDDDDDDDEDEDGDDPQDAWEDVDPDEYSYEELVALGEVVGTESRGLSADTLASLPSITYRAQDKQDGNMEQCVICRVEFEEGESLVALPCKHSYHSECINQWLQLNKVCPMCSAEVPTSQDTRA

SEQ ID NO: 51502 - protein, 315 aa, Oryza sativa
MASEQQRRRSPPTILAAILLLSFLATANLAGAIDPAGRRRNVVVFWGGNKNEGSLRSVCDSGLYNIVIISFYSLFGHGRYWDDLSGHDLRHIGADITHCHFKAVYVLLSIGGGDGKDYSLPSSKSAADAADNLYNSFLGGSRPGVYHPFGDDVTVVGIDFFIDRGQPDHYYEIAERINYDTRHWRDPIGFKLTATVSCAYDDSDPRMKKALETYLFRRIHVRFYDDPRCSYNHAGLAGVMAQWNRWSASYPYNGKIYLGLAAANLTGKNDMVAVGELYRKLLPAVQKTDTYGGVMLWNSYYDSITHYGRYVSAWA

SEQ ID NO: 51503 - protein, 237 aa, Oryza sativa
MEFCAESPQWLYKCGRTTEAEIQFEKLLGPLHVKSAMAELSRSERGDDGENVKYSELFYGRNFNVVFIGTTLFALQQLSGINSVFYFSSTVFRSVGVPPNLANICMGIANLSGSIVAMLLMDKLGRKVLLSGSFLGMAFAMGLQAVGANRHHLGSASVYLSVGGMLLFVLTFSLGAGPVPGLLLPEIFPNKIRAKAMALCMSVHWVVNFFLSVCCSCGFWSNLVHKFCTQCFPQLVW

SEQ ID NO: 51504 - protein, 380 aa, Oryza sativa; identical to SEQ ID NO: 28802

SEQ ID NO: 51505 - protein, 287 aa, Oryza sativa
MQALLLSPAAAPRPPLPAPRRPSLPPRATSILTPAPRSPALRVVDAFAAGRWGGRAASRLPAAAAAAAAAAEAGPPDPAPSPAEDEAERAMLAQVSKRLEKTAQYFKTLGTLGFWSQLVCTTVSAGILSFSAVATGNATSPFTFFATSIGIVAAFISVFWAFGYIRLSQRLKRTANKPAKAPPRADVVKNLKNGIVLNVLGMGAAILGMQATVGALVAKALTTSAVPYYQGISPGQSPVLSLDVFLVQASANTILSHFLGLSSTLELLRSVTLTKVEAASTPRSQPA

SEQ ID NO: 51506 - protein, 416 aa, Oryza sativa
MKLFVKTLKGTNFEIEASPEASVAEVKRIIESTQGQNVYPADQQMLIHQGKILKDDTTLEGNKVAENSFLVIMLSKAKASSSGASTASKAPVSQSQPATPVASVARTPPPQAPVVTPEPAPPSAQPPVASATPAAAATPAAAVTASSDADVYSQAASNLVSGSNLEQTIQQILDMGGGTWERDMVVRALRAAYNNPERAIDYLYSGIPENVEPPQPVARAPAAVQQGNPQVPSQAQAAPPPPVQPAGGASGPNANPLNLFPQGIPSAGSNPGAAAGAGAGAGALDALRQLPQFQALLALVQANPQILQPMLQELGKQNPQILRLIQENQAEFLRLVNESPDSGAAGGNILGQLAAAMPQALTVTPEEREAIQRLEAMGFNRELVWRSSSHATRMKSWLPTIFWIMAMSLRINNRCC

SEQ ID NO: 51507 - protein, 104 aa, Oryza sativa; identical to SEQ ID NO: 31115

SEQ ID NO: 51508 - protein, 102 aa, Oryza sativa
MEAILPQQGSGWCCQRRNGGEIRPLRKSWPGERRGTARSWGYRATPPDRREFGRRRRWNHLVDAEAAKMTLMMSLLLQYMFVVSVMDEHHHFAWHCVLPLQS

SEQ ID NO: 51509 - protein, 220 aa, Oryza sativa; identical to SEQ ID NO: 30039

SEQ ID NO: 51510 - protein, 318 aa, Oryza sativa; identical to SEQ ID NO: 32874

SEQ ID NO: 51511 - protein, 250 aa, Oryza sativa
MRVAATTRPASSSAAAPLPLFLLLAVAAAAAALFLVGSASLAMAGHVLGGAHDAPSAANSVETDALARFAVDEHNKRENALLEFVRVVEAKEQVVAGTLHHLTLEALEAGRKKVYEAKVWVKPWLDFKELQEFRNTGDATTFTNADLGAKKGGHEPGWRDVPVHDPVVKDAADHAVKSIQQRSNSLFPYELPEIVRAKAEVVEDFAKFDILMKLKRGNKEEKFKAEVHKNLEGAFVLNQMQQEHDESSSQ

SEQ ID NO: 51512 - protein, 451 aa, Oryza sativa
MFHSDNVYDIPNVRVNGQVCFTNFPSNTAFRGFGGPQAMLIAENWIQHMATELKRSPEEIKELNFQSEGSVLHYGQLLQNCTIHSVWDELKVSCNFMEARKAVIDFNNNNRWRKRGIAMVPTKFGISFTTKFMNQAGALVQVYTDGTVLVTHGGVEMGQGLHTKVAQVAASSFNIPLSSIFISETSTDKVPNATPTAASASSDLYGAAVLGACQQIMARMEPVASRGNHKSFAELVLACYLERIDLSAHGFYITPDVGFDWVSGKGTPFYYFTYGAAFAEVEIDTLTGDFHTRTVDIVMDLGCSINPAIDIGQIEGGFIQGLGWAALEELKWGDDNHKWIRPGHLFTCGPGSYKIPSVNDIPLNFKVSLLKGVLNPKVIHSSKAVGEPPFFLGSAVLFAIKDAISAARAEEGHFDWFPLDSPATPERIRMACVDSITKKFASVYYRPKLSV

SEQ ID NO: 51513 - protein, 145 aa, Oryza sativa; identical to SEQ ID NO: 49741

SEQ ID NO: 51514 - protein, 182 aa, Oryza sativa
MATGNGEAAVVEKEGEGTMVPEALEKKVVLDAAEKEEEEKDSEAEAEAEARISKLVGDMIDNVCADHGIPLPKVDIKTVRKMAEYMNKHFAITNKEELKIWDEGFINELDGDEDKYSLFKIIRASERVGFYGLLDLASDMVARKIKAGKAIDEIRKFLGVEKDFTKEEEEKIRRENAWAFEE

SEQ ID NO: 51515 - protein, 348 aa, Oryza sativa
MLINNPSRVKEYLPITGLADFNKLSAKLIFGADSPAIQENRVATVQCLSGTGSLRVGGEFLARHYHERTIYIPQPTWGNHPKVFTLAGLTVRSYRYYDPATRGLDFQGLLEDLGSAPSGAIVLLHACAHNPTGVDPTLDQWEQIRQLMRSKALLPFFDSAYQGFASGSLDQDAQSVRMFVADGGELLMAQSYAKNMGLYGERVGALSIVCGSADVAVRVESQLKLVIRPMYSNPPIHGASIVATILKDSAMFNEWTVELKGMADRIISMRQQLFDALKTRETPGDWSHIIKQIGMFTFTGLNSDQVAFMRQEYHIYMTSDGRISMAGLSGRTIPHLADAIHAAVTKLK

SEQ ID NO: 51516 - protein, 565 aa, Oryza sativa
MERESSTPASSWLGIDEAAPFAGKKATKDAAAADAFVRRWPKVVNATLVAFIMTMPPLLILLGGGRPGAPAVWIKSTVASLAARGEPKKDVLLGGLLLPGFDEQSCVSRYQSVYYRKNMTRPPSPHLLRRLRQQEALQRRCGPGTEPYRRASERLRSGQNAGDDFVATVDGCGYLVLISYRGLGNRILAITSAFLYAMLTGRVLLLDPGKTMADLFCEPFQATSWMLPGDFPLEHFRDLGEDAPESYGNVAVNRSGSVAGLRFVYAHLDHAATPANRLLYCDDHRQFLHRVQWVILRTDSYIAPGIFLNPAYKEELDMMFPNKDAVFYLLSRYLLHPTNDVWGMVTRFYHSYLKNADERLGVQIRVFDGDEPFQHILDQILECTSQEHLLPGVVVSGHGGGVAPPPIARSKAVLTTGLNSWYHDSIRDMYWRSPSATGEVVSVHQPSHELHQHFFRSTHDMKALAEMYLLSLTDKIVTSGWSTFGYVGAGLGGLTPYIMIKPENHTVPNPPCVRAMSMEPCDHGPPYFECTKKEIDKIIDTGNLVPHVRSCEDVPWGRKLADPIS

SEQ ID NO: 51517 - protein, 447 aa, Oryza sativa
MKGAQGASNNSAKHKKRKSAVQRWRPISTEAAAPKADLNEMSGPVSKQVEENSASDGTTNVVIEVSTYNASLPENKLATEDTMEDASFNKDIDRSNLSEKCSSSVQVDAPLMRFVKGKGGTMQKQIEDETGVKIIFPSSKEETCVVLEAKTTEDIRKASEKIAKVLEEAVKSPILDYSHFISLPLAIHPSLVEKLNHFQCSILGTSSNVDSDKGEDLSEGSMDEIDHEQKQERSPSVSIKMQAHEESVRVKMDIKGSQPDFGIDKSIFIKPKTFHLTVLMLKLWNKDRIAKASDVLQSVSSQVMEALENRPISIQLRGLTCMKGSPARARVVYAPVLEVGEEGRLQRACKVITDAFVKSGLVLERDARQELKLHVTIMNVRHRKSKRWNQRNDSFDARNIFRKYGEHDWGEYLIPEIHLSQRFKFDERGYYYCCSSIPLPAAEMQTE

SEQ ID NO: 51518 - protein, 67 aa, Oryza sativa
MPRSFWIRLRTCYMLCTNKVSACKLFFRLWQDRKRHSQVSVDQSEAGLLLCTVHWWSLKSKAYRSIK

SEQ ID NO: 51519 - protein, 442 aa, Oryza sativa
MGGSGKWVKSLIGLKKPDREDCKEKLQVPSVNGRGGGKGRKWKLWRSSSGDHGSLWRGSRGGGGGGGHHRSASSDASDDASSAAADPFTAAVATVARAPAKDFMAVRQEWAAIRVQTAFRGFLARRALRALKGLVRLQAIVRGRQVRKQAAVTLRCMQALVRVQARIRARRVRMSTEGQAVQKLLEARRTKLDILREAEEGWCDSQGTLEDVRVKLQKRQEGAIKRERAIAYAYSQQIEGATKCNQQPKPTSYGRLNQSGMLLKHQHFDKSNGNWSWLERWMAARPWENRLMEEYNQTNSSSPDLLSSKNCEDSFGILGDFSEPNSVKVRKNNVSKRVCAKPPVVSHHQRIKAQSISSLSTELHNDESSASSSSCFASTPISFSTFVTTEKTEDSIRARPNYMNMTESIKAKRKACNAQRTTAGKLMEDRKASGVELKVAQV

SEQ ID NO: 51520 - protein, 330 aa, Oryza sativa
MPLAAAVAASAVVPPRPPPPPPRRARPLRSFTGLILTRDLAALTVARCAPSPPAPAAEAEAEAVAVDEAPPAKPRPRRYPRQYPGEAVGVAEEMRFVAMRLRNPKRTTLKMDDTGAEEEVGDGVSEDASASEEEEEEEDDDDVVEEEEEGAGLEGEWMPSMEGFVKYLVDSKLVFDTVERIVAESTDVAYVYFRKSGLERSARITKDLEWFGGQGIAVPEPSTAGSTYATYLTELAESNAPAFLSHYYNIYFAHTTGGVAIGNKISKKILEGRELEFYKWDSDVELLLKDTREKLNELSKHWSRKDRNLCLKEAAKCFQHLGRIVRLIIL

SEQ ID NO: 51521 - protein, 310 aa, Oryza sativa
MASATAPQPVSSPSAAAGAASNNPHKRKKPAARGKGKGKGKGRLAKTPRRSDDPGDLPRRRSKPSDRFLKLLRKRARDYNSDDSDDEERLSDEDEEEEGASGSGDDEAAGAVTRFEQGCRAFRVAFTKIMAKKLPDDPLGPILSAHKKLVAAKLAEDAEEHKPKGEGRREKRMAAEKGHVIPTNHLDSKEKELIKIATQGVVRLFNSVSKAQNCRKGLNPSRSKDAKVLAKETKQAFLTELSKTSNQSQKGKASSNFSKNNSKDEDEPGWAPLRETYMLGSKLKDWDKMQTSDVVNEQTEIPLDDSSDEE

SEQ ID NO: 51522 - protein, 283 aa, Oryza sativa
MITMVVGEVANFAAYAFAPAILVTPLGALSIIISAILAHFMLRKKLHIFGILGCILCVVGSTTIVLHAPAEREIESVTEVWDLATEPAFMFYVSVVLAMVAILVCRFVPLYGQTHVMVYIGVCSLVGSISVMSVKALGIALKLTFCGTNQLIYPQTWAFTLVVLSCIVTQMNYLNKALDTFNTAVVSPIYYTMFTSLTILASVIMFKDWDRQNPTQIVTEACGFVTILSGTFLLHKTKDMADGLSTSSSFRLPTSSSFRFSKQTDEECEGIPLRSSESFRSPP

SEQ ID NO: 51523 - protein, 94 aa, Oryza sativa
MQELIARAQERQKLRLELERKTARELERKMAREQLQEMERTARPVYDSIDPSVMKQLGISGDAQYIVSPVKSRHSLHRRGGGGLLQKLGFFLKE

SEQ ID NO: 51524 - protein, 323 aa, Oryza sativa; identical to SEQ ID NO: 29278

SEQ ID NO: 51525 - protein, 454 aa, Oryza sativa
MVSEKSPSAAAAMRPDLAACNAVLGGCCRLLGSVTEAERVLEIMSAIAVSPDVDSFGCLAFLYAWRDIPSRVDELDKLLDALGFGKKIFFKNLISGYLKSCSFESVSSVILRVVEERRVGGSNAFDLESYTEVAQRFVDNGRIRELAQLIIKAQETESLQQSLAVEDSVGFGIVNACVELGLLNKAHSILDEMTAQGASVGLGVYSSILKAYCKEQRTAEAAQLVSEISAAGLQLDAGSYDALIDASMTAHDFLSAFSLFKEMREARLPDLRTSYLTIMTGLTENNRPELMASFLDTVVDDPRIEIATHDWNSIIHAFCKVGRLEDARRTYRRMVFLRYEPNNQTYLSLINGYVSAEKYFSVLILWTEVRRKGADFNHELIDAFLYALVKGGFFDMAMQVIEKAQELKIFLDKWRHKQAFMETHKKLKVAKLRKRNFRKMEALIAFKNWAGLNA

SEQ ID NO: 51526 - protein, 434 aa, Oryza sativa; identical to SEQ ID NO: 35373

SEQ ID NO: 51527 - protein, 43 aa, Oryza sativa
MAAAPPTRSGGRRLLPSLCVGSNSPPPWLPLTSPTWSRRWFDF

SEQ ID NO: 51528 - protein, 398 aa, Oryza sativa
MASSSSAAALWTAAPHPHGSCIRIHAIFHQRHQRRGRRPVVVASSVRPLQAASLAVATAPVAVASRRTAAEEAVYEVVLRQAALVEEATHRRGAGAPRWAEEDAVDWGLLLGDAYHRCGEVCAEYAKTFYLGTQLMTPERRKAVWAIYVWCRRTDELVDGPNSSYITPKALDRWEKRLEDLFEGRPYDMYDAALSDTVSKFPVDIQPFKDMIEGMRLDLWKSRYRSFDELYLYCYYVAGTVGLMTVPVMGIAPDSKASTESVYNAALALGIANQLTNILRDVGEDSRRGRIYLPLDELAEAGLTEEDIFRGKVTDKWRKFMKGQILRARLFFDEAEKGVAHLDSASRWPVLASLWLYRQILDAIEANDYNNFTKRAYVNKAKKLLSLPVAYARAAVAS

SEQ ID NO: 51529 - protein, 431 aa, Oryza sativa
MTVTWTSGYDIKEAYPFVEWGMKWSPPTRTAAGTVTFDRESLCGEPARTVGWRDPGFIHTAFLTDLWPNKEYYYKIGHMLPDGKIVWGKFYSFKAPPFPGQKSLQRVVIFGDMGKAERDGSNEYSNYQPGSLNTTDTLIKDLDNIDIVFHIGDITYANGYISQWDQFTQQVEPITARVPYMIASGNHERDWPNSGSFFNGTDSGGECGVLAETMYYTPTENRANYWYKTDYGMFRFCVADSEHDWREGTEQYAFIESCLATVDRKKQPWLVFIAHRVLGYSSGFFYGAGGAFAEPTARQSLQRLWQRHRVDLTFYGHVHNYERTCPVYDGRCASPERSRYSGAVGGTIHAVVGGGGSHLSNFTAEAPPWSVYREMDYGFVKLTAFNYTSLLYEYRRSSDGEVHDSFTVHREYRDVLACVADSCPPTIPPAT

SEQ ID NO: 51530 - protein, 60 aa, Oryza sativa
MAAAEGSRSAPTAIAISPFKIWKTSISVIAEWGVICKTSPSQLKQQSRVWVKVTGVLYRQ

SEQ ID NO: 51531 - protein, 226 aa, Oryza sativa
MASEQAAESYTVEELVAVNPYNPDILNDLEGFVNDQVSNQTYNLDANLSLLRLYQFEPERLSVQIVSRILIKALMAMPGPDFSLCLFLIPEHVQMEEQFKTLIVLSHYLETARFRQFWDEASKNRNILDVVPGFEQAIQSYAIHVLSLTYQKVPRPVLAEAINIEGLALDKFLEHHIANSGWVIEKGARSQLIVLPRNEFNHPELKKNTAETVPFEHVTRIFPVLS

SEQ ID NO: 51532 - protein, 358 aa, Oryza sativa
MAEESRRRSGGGVRVCVTGGAGFIGSWLVKKLLGAGYTVHATLRSIGDEVKVGLLRRLVPGDAPPERLRLFEADLYDAATFAPAIAGCQFVFLVATPFLHDATSTKYNNTAEAALDAARVILRQCEESSTVKRVIYTSSMAATSPLKEDSTGFKDSIDESCWTPLAVDYPYRSARFDEYILSKLLSEKELLGHSHAGERRRPAVEVVTVPCSVVAGGTLQGQSTTSLDCVVSPVSRDEGRFRALRLLQRLMGSVPMVHVDDVCDALVFCMEQPSLTGRFLCSAAYPTLDDIVEHFAGKYPHLDLLKETETLPSIQAHTDKLGELGFKYKYGMEEILDESVECAVRLGCLDASKLSLQG

SEQ ID NO: 51533 - protein, 726 aa, Oryza sativa
MAGAIRVAMEVGADGVAVVTICNPPVNALHPIIIQGLKEKYAEAMDRDDVKAIVLTGAGGKFCGGFDINVFTEVHKTGNVSLMPDVSVELVSNLMEAGKKPSVAAIQGLALGGGLELTMGCHARISTPEAQLGLPELTLGIIPGFGGTQRLPRLVGLPKAIEMMLQSKFITAKEGKEGGLVDALCSPDELIKMSRLWALEIANYRKPWIRSLARTDRLGSLSEARSVLNSARQQAKKVAANLPQHQACLDVMEEGVLCGGHAGVLKEAKVFKELVLSPTSKALVHAFFAQRLTTKVPGVTDVQLKPRKIRKVAVIGGGLMGSGIATALLVSNTSVVLKEVNPQFLQRGQKMIAANLEGLVKRGSLTKDKMNKAMSLLKGALDYSDFKDVDMVIEAVIEKIPLKQSIFSDLEKVCPPHCILATNTSTIDLNVVGEKTNSQDRIIGAHFFSPAHIMPLLEIVRTEKTSPQAILDLITVGKMIKKVPVVVGNCTGFAVNRTFFPYTQGSHLLVSIGIDVFRIDRVISSFGMPMGPFQLQDLAGYGVALAVKDIYAAAFGTRNLDSNLVDLMVQNGRQGKSNGKGYYLYEKGGKPKPDPSVQVVIDEYRRCAKTMPGGKPVTLSDQDILEMIFFPVVNEACRVMDENVVIRASDLDIASILGMGFPKFRGGLVFWADTIGAPYIHSKLSKWTEIYGDFFKPSSYLEDRAKRSLPLSAPNATQQASSRSRM

SEQ ID NO: 51534 - protein, 71 aa, Oryza sativa
MHPQGLPPPICPEHANADVMFWLLRSISGISSTTNIDSGSDKYSCIVVRSTSARPGNAGSFTSPLLAVTSK

SEQ ID NO: 51535 - protein, 207 aa, Oryza sativa
MATVDGTTAPSSGGKTATVALESGGGRYGGPAPAKCSGANLALRALLFAVSLSALVVLVTAKQTVMVPFVIRPPQFILAPVPAKYTHSPALIYLLAALCATCFYSLITAISSVRLLSSSACSAKTLFYLILLDVFYAAVMASATGTAGAVAWVGLKGNSHTRWNKICNVYGKFCRHIGSSTFLALIAAIVLVLLAFLNAYSLYRRSR

SEQ ID NO: 51536 - protein, 338 aa, Oryza sativa
MAMPSSASATARMLTVPALLLLLSSAALLVFLILPSLSPSPAAHLCACSPPTTTHTTTTVTTTTTTASPAPVTTSPADVAWLKSQLASNSLPLLASHDAWHRLRKGINPRTREQQLFDINRHHGISHYPDEEATNHTALPCPGELLVEEHHSNYGEPWAGGRDVFEFLANASALTPRDQVLEIGCGTLRVGLHFIRFLEAAKFHCLERDELSLMAALRYELPAQGLLYKRPMIVRGEDMDFSRFGDTVMYDLIYASAVFLHIPDKLVWTGLERLAGKLRPQRGRIFVSHNIKFCSRLGGDGCTRRLTELGLEYVGKHTHDSLLFNHYEIWFEFRRPKV

SEQ ID NO: 51537 - protein, 212 aa, Oryza sativa
MMTDLRYPLKGNTIPFWAVPLIAIVLPWVVFGGIYFKKKNVYDLHHGILGILYSVLITAVITDAIKDGVGRPRPDFFWRCFPDGIPKFDNVTTNVICHGEKSVIKEGHKSFPSGHSSWSFAGLGFLAWYLAGKLKAFDRKGHIAKLCIVFLPLLVASLVAVSRVDDYWHHWQDVFAGGIIGLTVSSFCYLQFFPYPFDADAVWPPCILPTAS

SEQ ID NO: 51538 - protein, 478 aa, Oryza sativa
MVRRLSVRSPRLQRARRPPPSAPPTTAPMDPPSPPPPPPYPPAAAEGGPAADSQAAELPRLTVTQVEQMKVEAKVGEIYRVLFGNAPNANSLMLELWREQHVEYLTRGLKHLGPSFHVLDANRPWLCYWIIHALALLDEIPDDVEDDIVDFLSRCQDKDGGYGGGPGQLPHLATTYAAVNTLVTIGSERALSSVNRDNLYKFMLRMKDTSGAFRMHDGGEIDVRASYTAISVASLVNILDGELAKGVGNYITRCQTYEGGIAGEPYAEAHGGYTFCGLATMILLNEVDKLDLASLIGWVAFRQGVECGFQGRTNKLVDGCYSFWQGAALALTQKLMTVVDEQLKSSYSSKRPPGDDACGTSSSTEAAYYAKFGFDFIEKSNQIGPLFHNIALQQYILLCAQVLDGGLRDKPGKNRDHYHSCYCLSGLSVSQYSAMVDSDACPLPQHVLGPYSNLLEPIHPLYNVVLDKYHTAYEFFSS

SEQ ID NO: 51539 - protein, 247 aa, Oryza sativa
MAMLVRCPTSTLPAANHRQKSGVLLRRPTRRSARRFQLHAEKPASPGAGNETSSSSENAVLRAAWYGSELLGIAASFFRPSQPPTEGDSAGAVEEAASEPQGRAQVAEAVKDDFARSYFVTGNLTLKAYEEDCEFADPAGSFNGLQRFKRNCTNFGSLLEKSNMKLTKWEDLEDKSIGHWRFSCVMSFPWRPILSATGYTEYYFDAGSGKACRALERPQDGTPAADFQAESMGMGETHRRMKHRCSS

SEQ ID NO: 51540 - protein, 367 aa, Oryza sativa
MATPQISRKALASLLLLVAAAAAVSTASADDVLALTESTFEKEVGQDRAALVEFYAPWCGHCKKLAPEYEKLGASFKKAKSVLIAKVDCDEHKSVCSKYGVSGYPTIQWFPKGSLEPKKYEGQRTAEALAEYVNSEAATNVKIAAVPSSVVVLTPETFDSVVLDETKDVLVEFYAPWCGHCKHLAPIYEKLASVYKQDEGVVIANLDADKHTALAEKYGVSGFPTLKFFPKGNKAGEDYDGGRELDDFVKFINEKCGTSRDSKGQLTSEAGIVESLAPLVKEFLGAANDKRKEALSKMEEDVAKLTGPAANRYGKIYVNSAKKIMEKGSEYTKKESERLQRMLEKSISPSKADEFVIKKNILSTFSS

SEQ ID NO: 51541 - protein, 253 aa, Oryza sativa
MGGRKKPGSKKMPAPAVMRIRSPPPDPHRRARAAPRRCIPPLASDSESSASSPTTSPAAAAAALPGIAQARHEFFAKHTVYHYGAPPTAQRNEQRESAGGCQSVRGGVRRQPADGLAAAAGRGHLRGFLLAPSRIGGGARGAVDAPGLIGDRFLDSGHGSLAGTGMDAPAGGERIGVRPMESSDDDSTFCSRCARAQRGAASATALVTTAVAAATSARCHSTTAGRDPGAATCVVDGAPPPPGGVYATTRTIA

SEQ ID NO: 51542 - protein, 720 aa, Oryza sativa
MILRTPPQRKRRADSDVDAAAATATTRSPVSDRRLVLYDRPTALVPAGVPGEPMDDMVCTYHCRQMVKSEFMVALDTAEKQVQEYRATLDDMEERLSKSEDERATCQDKLNYVEQELAATKGRESAMQERLLKEVGDFQERYCDQIKKIGELETQLKKEIDSRIAAESSSASAKESVKELEGNLQRLSENSEREKKALKKKLSYLQDDTKLSISKLNAELERMRLRALNSEDEAKLLNEQLEDLKKQLDESVRENNEMEHRLLNCSSLSYERTPSDDQKLIKLLQEELRNYEKEVDEARRLKSSHTNVELLKEKILEEQGCRERAEMELSKLQEIEAKAQKLELELASCTALLSNIPDVSSFGDIPQKIADLQKQALTNLNKVGEVTSQLKELKVALEFADLSKQRAEGEATLAKERAESATREIKRLELLLAAISEERDRLRKDHAVSKSRDGDDASSKNMESDLSRMEKVVTELESTIRDQRELISQQHTELNLMNEKLSIESRKAKSLERDGDQLRSQVALLESKLGHGDYSASSTKVLRMVNTLAVDNEAKQTIEALQAELKKTKERLQAVEELKGQADVGTVVDVNIAEKLAQLKNQIATLEKREERYKAVFAERISVFRKACCSLFGYKIVMNDQQQSNGIPVTRFILHSVYAQSDDEKLEFDYESGSTNIVVNDYTSQHEIAQQVDIFIRKMNSIPAFTANLTMESFNKRSIC

SEQ ID NO: 51543 - protein, 257 aa, Oryza sativa; identical to SEQ ID NO: 28675

SEQ ID NO: 51544 - protein, 226 aa, Oryza sativa
MAAAAVTVKLGGWSSYCYCPTTTRRSKPAAVKMMMALCPTSFRIELPRRTIRAAILNKRHTVPCYQRQEGASSPAPQIEAKSMEEVYDALAEHLFSVLKNIEHLDSKYIVGIAGPPGAGKSTVASEVVQRVNKRWSQKHENGSSLISTEEIATMLPMDGFHLYRSQLDAMEDPKEAHARRGAPWTFDPSRFLKCLQTLREEGSVYAPSFDHGVGDPVENDIFVKPQ

SEQ ID NO: 51545 - protein, 445 aa, Oryza sativa
MAATIQSVKARQIFDSRGNPTVEVDICCSDGTFARAAVPSGASTGVYEALELRDGGSDYLGKGVLKAVDNVNSIIGPALIGKDPTEQTVIDNFMVQQLDGTKNEWGWCKQKLGANAILAVSLALCKAGAIIKKIPLYQHIANLAGNKQLVLPVPAFNVINGGSHAGNKLAMQEFMILPTGASSFKEAMKMGVEVYHNLKSVIKKKYGQDATNVGDEGGFAPNIQENKEGLELLKTAIEKAGYTGKVVIGMDVAASEFYTEDQTYDLNFKEENNDGSQKISGDSLKNVYKSFVSEYPIVSIEDPFDQDDWVHYAKMTEEIGDQVQIVGDDLLVTNPTRVAKAIKDKACNALLLKVNQIGSVTESIEAVKMSKRAGWGVMTSHRSGETEDTFIADLAVGLSTGQIKTGAPCRSERLAKYNQLLRIEEELGAAAVYAGAKFRAPVEPY

SEQ ID NO: 51546 - protein, 318 aa, Oryza sativa; identical to SEQ ID NO: 31741

SEQ ID NO: 51547 - protein, 243 aa, Oryza sativa
MVGEFPELALMGSCVLAMLMKGEDMYIMNVGDSRAVLATMDSVDLEQISQGSFDGSVGDCPPCLSAVQLTSDHSTSVEEEVIRIRNEHPDDPSAISKDRVKGSLKVTRAFGAGFLKQSKWNDALLEMFRIDYVGSSPYISCNPSLFHHKLSTRDRFLILSSDGLYQYFTNEEAVAQVEMFIATTPEGDPAQHLVEEVLFRAANKAGMDFHELIEIPHGDRRRYHDDVSVIVISLEGRIWRSCV

SEQ ID NO: 51548 - protein, 352 aa, Oryza sativa
MGGLSMDQAFVQAPEHRPKASVAEADGIPVIDLSPLLAAGDGDADGVDALAAEVGRASRDWGFFVVVRHGVPAEAVARAAEAQRTFFALPPERRAAVARSEAAPMGYYASEHTKNVRDWKEVFDLVPRQTPPPPTTAVADGDLVFDNKWPDDLPGFREAMEEYGEAVEELAFKLLELIARSLGLRPDRLHGFFKDDQTTFIRLNHYPPCPSPDLALGVGRHKDAGALTVLYQDDVGGLDVRRRSDGEWVRVRPVPHSFIINVGDIIQVWSNDRYESAEHRVAVNVEKERFSIPFFFNPAGHTMVEPLEEVVSDESPARYNPYNWGEFFSTRKNSNFKKLDVENVQITHFRKN

SEQ ID NO: 51549 - protein, 301 aa, Oryza sativa
MTRCAVVAAVAAVLLVAGAAAAGGGEEEEAPSTCARRGPGFVDALASRCPCIRIEPSPPVEVRGEAIAKELNLRHRGVTYSVLFYAAWCPFSSKFRPIFEALSTMFPQIYHFTVEESSAMPSLFSRYGVRGFPAILLVNETTMVRYWGPKDLSSLVDFYKETTGFDPIAYFDVDHQDSTGDFRPVTPGDRSLRKIAKDEPFVLLAVLFIILKVAAHFVPIVVSHLKTFLVVRVQNLNLGIRRGSSQLLERALNVLDVKRLCSKLRLSNKTRDLRKGASNARAWASLFTSVSLGESSSSRQA

SEQ ID NO: 51550 - protein, 128 aa, Oryza sativa
MKKALRLRSLASSKGGSPRSGGCGGAKSAPPRWPATVGELTRVQMRISEPAATSSRRPRARHIAQGRAARAAPADAVPDVVELSVAKNKFKAFDLGGHQIARLCSNSTALSFFPPLLLQLLCYLLMDL

SEQ ID NO: 51551 - protein, 412 aa, Oryza sativa
MAGLPFLLALHIALLLLLPCSCQVGDSCSSARDCGAGLYCGNCAATGKTRPSCIRDLAIQPTSIVKGLPFNRYSWLVTHNSFSIIGEPSHTGVERVTFYNQEDTVTNQLRNGVRGLMLDMYDFNDDIWLCHSLQGQCYNFTAFQPAIDTLKEVEAFLSENPTEIITIFIEDYVHSTMGLSKLFTAADLTKYWYPISEMPTNGKDWPSVTDMVAKNHRLLVFTSDSSKEASEGIAYQWSYLLENESGDPGITGSCPNRKESQPLNSRSASLFMQNYFPTIPVENEACKENSVGLPQMVQTCYTAAGNRIPNFIAVNYYMRSDGGGVFDVQDRINGVTLCGCNTIAACQAGAPAGACKDTGAPNRTSSSVNGNVYSGTIEFKSPASAASISNANIPSKFVGLLLLGLVLIIKPF

SEQ ID NO: 51552 - protein, 217 aa, Oryza sativa; identical to SEQ ID NO: 35655

SEQ ID NO: 51553 - protein, 418 aa, Oryza sativa; identical to SEQ ID NO: 32265

SEQ ID NO: 51554 - protein, 364 aa, Oryza sativa
MARYLLRPPTAAAAAAAAASSHRRNGTTSPRGPVLGLRALASRAGKARPVMAVASEQPAARGKCPKVAAPTTGPIPAAELLGVIQDAARAGAEVIMEAVNKPRNIHYKGVADLVTDTDKLSESVILEVVRKTFPDHLILGEEGGLIGDALSEYLWCIDPLDGTTNFAHGYPSFSVSIGVLFRGKPAASTVVEFGGGPMCWSTRTVSASSGGGAYCNGQKIHVSKTDKVEQSLLVTGFGYEHDDAWVTNINLFKEYTDISRGVRRLGSAAADMSHVALGITEAYWEYRLKPWDMAAGVLIVEEAGGMVSRMDGGEFTVFDRSVLVSNGVVHDQLLDRIGPATEDLKKKGIDFSLWFKPDKYPTDF

SEQ ID NO: 51555 - protein, 96 aa, Oryza sativa
MMSARLRLNFFGGGFRRWKLASSHRPCGAMAVAHGRGKSSTGPSDLRLNRSRRRLSAALAIKFIIFSSSSCTVGRRKHLQEQCVWPCVEVGENRIQ

SEQ ID NO: 51556 - protein, 500 aa, Oryza sativa
MGGGGGGGRKPRNFATFRLFPRAGAADPNDRVFVRVDSNDYTVPGFGDDDAFDSSSLSLTGDAAAGDHFSSASGPLPNHVRREILELGLPDDGYNYLHHLRELRPSAAAAASSFAPNQTAPPLPLDVKAYDASRVRIASGNVEDEMDEGRTMCKVAAKTAPVRRIERAVDPDIARLLDETDVSHGGSEDEGLEEDFVIMANRAEGDEEEDDDDEEEEVMDSVFLSDVEEEEEFEDDEGEPKPRVRRLLDEQFDLLALEEYGDSDDDDDDPGVRNGECELPTEVIDELKLFHSQNVSVTEEYRTPADFVRRKLDSSTAEEVDESANVIQKCAEYAERYLNETAEEEEVVLVSESSDESEVWDCETIVSTYSNLDNHPGKIQTPGNPKNRLPKVFPGETATTKDIIRLQGKERLPVEYLPQRKRNGEKEKKAKPTETPSAESFKKGAQKETKEEKKARKAAVKEEKREARKAKKELKGLYKFETQKAQKVAAVTGPASIRLM

SEQ ID NO: 51557 - protein, 285 aa, Oryza sativa
MMGVVYRDLKPENVLVRGDGHIMLSDFDLSLKCDVVPKLLRPARSAAAGGKPPLPPPSSCVPPTIQPVLSCIFRGVHKCHHAKECAGGGAAAGNNGDGDGNDEEAETETAEPEVVVVEPVAARSKSFVGTHEYLAPEVISGQGHGSAVDWWTLGVFMYEMLYGRTPFKGESNEKTLINIIKQPVTFPRLAGAAAAGEWEEMKTAQDLMLQLLAKNPKKRLGSTMGSAEVKRHPFFKGVNWALVRSVRPPEVPAPPAPAPKKVMTMSKKERQEPYNYRPENHFDYF

SEQ ID NO: 51558 - protein, 418 aa, Oryza sativa
MTALASPFLLPHRRRKRPLDDSHFHGPQRHRRRRLCLCPAAFPSPPIPPEAASSPAFDMGGFLSFLRGKPRHDDAGLGVYRGWVDVRSRDLSVATAMEDDDAGFGPRLVVRRRVGDPRKAALEAAAPRPRVKREPYYKEALERMRSHDKRLGELASLVNLEEEKLAELRKAAEPPKEDLSELFTPLTAEEENEVHNCLFGRGSSTEILALHEPSNIEVSREKFRCLRLTAWLNDEVINLYLELLKEREAREPKRFLKCHFFNTFFYKKLACGKNGYDYKSVKRWTTRRRLGYELIECDKIFVPVHKDVHWCLAVINMKERTFQYLDSLGCVDHHVPRVLARYIAEEVKDKSNKEIDTNTWHEELVDDIPLQQNGWDCGMFMLKYIDFHSRGLSMSFSQENMEYFRKRTVMEILRLRAD

SEQ ID NO: 51559 - protein, 327 aa, Oryza sativa
MPRRTFNYICGLVRDEMMVRSSSYTFLDGKVLSLEDRVAVALIRLNSGGSLVTVGSAVGVNHSTVSLITWRFVEAMEERASHHLRWPDSSEVEKIKSMFEKIHGLPNCCGVVDTTHITMCLSSAEPNCKVWLDHEKNYSMVLQAVISPDMRFMDIVTGWPGSMKESSILHSSGLFKMCEKGARLNGSKMVVSDGSEIGEYIIGDAGYPLLPWLLTPYQEKDLSDSKLEFNKRHAAAITVAPSTLANFKDTWKFLHGEMWRPDKHRLPRIIHVCCMLHNIIICLQDATIDEAAMSNDHDANYKQQVCQLADENAVRVRDKLSEHLVSR

SEQ ID NO: 51560 - protein, 437 aa, Oryza sativa
MRRFVGALRPLRTLTLSPIPTALRVLSTASASSSSASAAASSSDSDSAAAPDADFDSSEFALPPSGPTPPPPPQQARNPVSALRKLRFDPSLRARADEALFGKERSGVDDAVEEERSREVALALLEAALEPPDDDLGPGEVREEDQMSLSVGIVGAPNAGKSSLTNTMVGTKVAAVSRKTNTTTHEILGVLTKGITQICFFDTPGLMLGHHGLPHRDVTVRVESAWSSINLYDLLIVLFDVNRHLKTPDTRVVKLIKRLGAEVNPNQKRILCMNKVDLVEDKKDLLKVAKEFEDLPAYERYFMVSGLKGEGVKDLVQFLMEQAVRRPWDEEPTTMTEEVMKTISLEVVREKMLDHIHQEIPYVIDHRLMDWKELKDGSLRVEQHFIAPKQSQRQILVGKNGSKIGRIGIEANEELRSIFKRDVHLILQVRVAKKRSA

SEQ ID NO: 51561 - protein, 478 aa, Oryza sativa
MRIPTETETETGTGARIPSHRRRKGSSDGSRAVHRRKPTPTKETEIPGGHGRPKRSSSALSLDGAGDSNPTWVILNRVGARRDSFRGDRTTSVASRTSGGKEISVSFELAPPPETSLLTLDWPQGPRPSEGTTSYPYVIAAHGNVVLLEIISTAKCPRPIDIDYFVYKAKPNGEPSLTRLPVCYWKGASGRDNPRPRIMSRVAMGVLSCSKDSFVVAEMERRSYQPSAANIYMFFSGSDGWRVFRDVRIDHINGAGWWSTDAVLSYRRRYLIWVDYLRGMIVAKLAHPGGGDPQEPALWYVPLPVDPVMGNPYDSERGRGCPEASRNVCATHHGIKFVNIINQCGGSFSITLWSWCEDGTWREDATLDAAQLWDLDCENRLPNVQPEFPIVDMENPYTVCFLLNEGNYIVPEATTWMIKVHMKKKILLGCTSYSKNGSLSHQNTTYMTARRMSERLSFISSEMPYYLSGQTMKRKLIN

SEQ ID NO: 51562 - protein, 179 aa, Oryza sativa
MAAAAAEFMELALEQAKFALDNLEVPVGCVIVEDGKVISSGSNKTNATRNATRHAEMEAIDILLREWQGMGLDQPQVAEKFARCDLYVTCEPCIMCAMALSILGIREVYFGCANDKFGGCGSIMSLHQSSSAELSGEEIPGPKGYKCTGGIMAEEAVALFRNFYEQGNPNAPSLTDLSV

SEQ ID NO: 51563 - protein, 467 aa, Oryza sativa
MGGAEDAPRAAAANGHGNGATVEEKLDELRRLLGKADGDPLRIVGVGAGAWGSVFCALMQDAYGHLRDKVQVRIWRRPGRAVDRATAEHLFEVINAREDVLRRLIRRCAYLKYVEGRLGDRTLYADEILRDGFCLNMIDTPLCPLKVVTNLQEAVWDADIVINGLPSTDTREVFGEIGRYWKERITAPIILSLAKGIEASLDPLPRIITPTQMISNATGVPLENILYLGGPNIASEIYNKEYANARICGADKWRKPLAKFLRQPHFIVWDNSDLITHEVMGGLKNVYAIGAGMVAALTNESATSKSVYFALCTSEMIYITHLLEEEPEKLAGPLLADTYVTLLKGRNAWYGQKLAKGELTLEMGDSIKGKGTIQGVSAVNAFYELLSQDSLSVVHPEANRSVAPVEMCPILKALYKILIKRELPPDSILQAIRDETMYDPRERIEMAQGHSLYRPSLLGQPKGDAKA

SEQ ID NO: 51564 - protein, 277 aa, Oryza sativa; identical to SEQ ID NO: 35250

SEQ ID NO: 51565 - protein, 424 aa, Oryza sativa
MAIRARSSSYAAAAVALALALASVAAVAGEVFFQEKFEDGWENRWVKSEWKKDENMAGEWNHTSGKWNGDPEDKGIQTSEDYRFYAISAEYPEFSNKDKTLVLQFSVKHEQKLDCGGGYVKLLGGDVDQKKFGGDTPYSIMFGPDICGYSTKKVHTIFTKNDKNHLIKKDVPCETDQLSHVYTLIIHPDATYTILIDNVEKQSGSIYEHWDILPPKQIKDPEAKKPEDWDDKEYIPDPEDKKPEGYDDIPKEIPDPDAKKPEDWDDEEDGEWTAPTIPNPEYKGPWKQKKIKNPNYQGKWKAPMIDNPDFKDDPYIYAFDSLKYIGIELWQVKSGTLFDNFLITDDPELAKTFAEETWGKHKDAEKAAFDEAEKKKEEEEAAKAGEDDDDLDDEDAEDEDKADEKADSDAEDGKDSDDEKHDEL

SEQ ID NO: 51566 - protein, 35 aa, Oryza sativa
MYIHHHTRKKHTLYISRGASFLLNQKRTNFLQMEK

SEQ ID NO: 51567 - protein, 454 aa, Oryza sativa
MAHKAAALVLLLVSVSVAAAASGDQESDRIRELPGQPAKVRFSQYSGYVTVNQAHGRALFYWLVEAVPAAGPIAPLVLWLNGGPGCSSVGYGASEEVGPFRIRPDGKTLYLNPNSWNKAANLLFLESPAGVGFSYSNKTLDLYVAGDAKTASDAYAFLVNWLERFPQYKYREFYIAGESYAGHYVPQLAQLIYEQNKGIQNPIINLKGFMVGNAVTDDYHDYLGTFEYWWTHGLISDNTYHNLKKTCLLESSEHPSPECLKNLNLASSEEGNIDPYSLYTKPCNNTASLKLGLGGRYPWLSRAYDPCTERYSSIYYNRPEVQIAMHANTTGIQYSWKTCSDIVGSYWADSPKSMLPIYQELIAAGIRIWVFSGDTDAVVPVTATRYSIDALKLPTMVNWYPWYDHGKVGGWSQVYKGLTLVTIAGAGHEVPLHRPREALILFRHFLQNTPMPTQ

SEQ ID NO: 51568 - protein, 187 aa, Oryza sativa
MSRNPGCTVFIGNLDEKVPERVLYEILIQVGRVVDLHIPRDKETNRSKGYAFAEYETEEIAQYAVKLFSGLVRLHNRTLRFAISGQDKQSSNGNIPVTPKVNPIPPPKPAQLTRSSDTPASQHTVVNGRIAGISPNHSYSAHSEAPSGISSRGLSNGTYEYSRRVFGSVLNDVSRRTDRQPIPYPSY

SEQ ID NO: 51569 - protein, 346 aa, Oryza sativa
MATASGDQSAGSAARASKLRYPLRSASRGKGAADAPPTSGSVARSFIPCRPKPSLDVSKSVCGLDLSSVKDNSAKPPRRHSIQTKPGVSPRPTPTGTITPVSLVRSRRSDSQGKFDTPISEVSMSTARRKFSTLSSTSYWMTQIRLAEAASKHSISLGFFKLALESECEPLDRMRDELKAYVVRHGLATELEEPVKDILQVYNIVEDLEKLKITVNSSEQPKKSDKAAHSATNVSPKGNLKPRSLNSDAAQSKEAAKKDNIQKKPDAKVRGSYNRNPAKEAITKNTGKKAKKQVKGQKEDCNGGSEALPVGTEQEPVDVVKEVTNEDKENMGDSEMPMDLGIAQEI

SEQ ID NO: 51570 - protein, 509 aa, Oryza sativa
MTLLCVPLVSRTVEAMQADAAAAAAAGADLVEIRLDFIEGFRPREHLPSLLRGCPLPALVTYRPNWEGGQYDGDDATRFEALRLAMELGVDYVDIELKVADKFISFISGSKPEKCKLIVSSHNYESTPSCEELADLVARIQAVGSGIVKIATTASDIADVSRMFQVMVHCQVPMIGLVMGEKGLMSRVLSPKFGGYLTFGTLDATKISAPGQPTVKELLDIYNIRRIGPDTKVLGLIANPVKQSKSPILHNKCLQSIGYDAVYLPLLADDLARFLSTYSSPDFSGFSCSLPFKVDAVQCCHEHDPVAKSIGAINTIIRRPDGKLVGYNTDYIGAISAIEDGIGGPGSKDAAISPLAGRLVVVVGAGGAGKAIAYGAKEKGARVVVANRTYEKAVSLAAAVGGHALRLAELETFRPEEGMILANATSLGMYPNVDGTPIPKKALSFYDVVFDAVYAPKVTRLLREAEECGIKVVSGVEMFVRQAMGQFEHFTGGIEAPESLMREIAAKYT

SEQ ID NO: 51571 - protein, 324 aa, Oryza sativa
MAEGGGGGGGSAASAALKDQGNEQFKAGNYLKAAALYTQAIKLDPDNPTLYSNRAAAFLHLVKLNKALADADTTIKLKPQWEKGHFRKGCVLESMEHYEEAISSFQIALQHNPQNTEVSRKIKRLTQLAREKKRALDVENMRSNVDVAKNLDSLKTELAGKYGDAELGQSIFTFVVNVIESAIKVWHDTGKVDARVNFLLDDQKTDTEKHAPVVNIDKAFDSPHTHSSCFTFLRQYSEESFSKAACMVAPKSAISYPQVWKGQGSRKWKLDQSDGFFVQFESPILRKIWFVPSTTEKGRVLCRSPELLDISIHEVLPRIFKETA

SEQ ID NO: 51572 - protein, 63 aa, Oryza sativa; identical to SEQ ID NO: 48879

SEQ ID NO: 51573 - protein, 291 aa, Oryza sativa
MAYSGGGGKLSAVDAILAEAADLVALEQIAKLNTAHLAADGDSALPSSLESRFRKLKSLPAAPLPPPPPAKSLGRSATAPPHHTDPPPSETPDPAPPAPPAPAAQERRPEDAAKEAQEKENSSPPPSQAHPPPAVTVPTAAAADDNEEDLEKLFRPGRGRPTLRERNRGRDDGSPSPPRQACCFGFSPKKTLQRTPTGSGRKSRRAGVAAAADDDVLGIGDAGEWGDENRRIVTELKQQQRKLKKALEEQVKVSRETAKMAQWVKQASARMTHTAAIDDLLSDCDDEDELK

SEQ ID NO: 51574 - protein, 303 aa, Oryza sativa
MNNLLTDSFELPRGGSSRDGDIEMGMQADPSDNLKGFLKKVDAIESLIAKLTNLLHKLQTANEESKAVTKARDMKAIKQRMEKDIDEVGKIARMAKTKVDELEKDNLSNRQKPGCGKGSAVDRSREQTTGAVKKKLKERMDDFQVLREAIRQEYRDVVERRVFTVTGSRPDEETVDNLIETGRSEQIFQEAIQQQGRGQILDTVAEIQERHDAVRDLERKLLELQQIFMDMAVLVDAQGDMINNIETHVSNATNHIQQGVSALQNAKKLQKNSRKWMCYAIILLLIIVVIIVVAVIQPWKKGA

SEQ ID NO: 51575 - protein, 325 aa, Oryza sativa
MRLYSSAVNLRRPSKRTMYSQSSQFHGGLTQSLGLRKCSRSQTSSYNVKLGLVDCSLHRNIKSSDRPSLRYFVSLVGRQFRCGLSGKEGSLNMKLDMPSRDNFSSMSWKWRGLHQKIGGTTSGLCLGFAVSGIANAEVPVEISISNSAASTSSTHGKEVYTDYSVTGIPGDGRCLFRSVIHGACIRAGRPIPNEDLQRKLADELRAMVADEFVKRREESEWFIEGDFDTYVSHIRHPHVWGGEPELFMASHVLEMPITVYMHDEDAGGLITIAEYGQQYGKEDPIQVLYDGFAHYDAVQIPAKKCSREMTSEFLKFQGSNGRIWS

SEQ ID NO: 51576 - protein, 67 aa, Oryza sativa
MLGEVSSRLLRTSLLSPFSPLRFSWVSFTVRLRIAFPSELLASTVWSAACARSGGPRASTLSAKVIQ

SEQ ID NO: 51577 - protein, 494 aa, Oryza sativa
MSAAAKAAALEVVLAAKSSRIASLEARVSFLEAENARLRRAMADRSTGKGGPNLRRSEEMAGGRVARDVIEVSDGEEEGMAVDVRKGRGAEEGMDAVATPRKRAALRVVIGESGDEYEIDDAKGDGDGDGGDHGSVSCGDNVGLEDDDVTTALPDRKRAAALVVTSDSEDEVESQGGHGRRGKDGSRKRALRGVRDNGNEDKGVTRSRKRALRGISDNEDEDEDEDGVDGAHVVVTEIESSDDDMIPIREVVKKMRKERASKGGGGFGETNGSSTPATRRSARLAKGQPKRAQSARRVLNFVEPKDCEESASDSDEDDDLDDFIINDSDCSENSANSAEPEESDASAPSEGSSSELEESDNEIDYKDVMACIGRKRNAKEWKYEAEMLSAFAAHPELCLKAVCALYRKQTKDEQEVKATILHNKQGFNQIDAARGSSIAEFLLDGDTFGPLKKTVHDLEQYDRYALEFCHKLAARYSKQLFSIYQNKEDPYFHP

SEQ ID NO: 51578 - protein, 126 aa, Oryza sativa
MSAMETDINAPPPPAPAPAGAGEGSSSAAGPSSRKPNKRFEIKKWNAVALWAWDIVVDNCAICRNHIMDLCIECQANQASATSEECTVAWGVCNHVFHFHCISRWLKTRQVCPLDNSEWEFQKYGH

SEQ ID NO: 51579 - protein, 219 aa, Oryza sativa
MARTEKVAGDGCSGGGGGGGEGQVEVEVGVGMGMDGKGMIECRICQEEGDEGAMDSPCACTGTLKFAHRKCIQRWCDKKGNITCEICNQVYSPNYVLPPTKCCSAEMDMDLRQSWVGRIDPHDSHFLAIAIAEQQLLQAEFDDCVSSNSSGATCCRTVVLILMLLLLVRHVVVFVRDVSMLQDATVLFSATLQFAGFFLPCYVIARSCYAFQHRRRRQV

SEQ ID NO: 51580 - protein, 76 aa, Oryza sativa
MDQLKELGWAKRWSSQPYVSCCTTSLQELTTLGIKHVENLAIPSVRNDVRPAKLKNVCVALFNYLEIAMVQQSMMI

SEQ ID NO: 51581 - protein, 359 aa, Oryza sativa
MKPPRRRYGLLAVVVTLIVLASLQIQFHHLKEDRLTGDRTFATTTTDPVHWRTGAEGLPRGIVHSNSDMYLRPLWDSGANPKNKNDNHNALLAMAVGISQMQNVDIMARKFLNQNYTVMLFHYDGNVDGWHNLEWSDKAIHILARNQTKWFAKRFLHPDVVAIYGFIFLWDEDLGVDNFDPRRYLDIMVSEGLEITQPALDPDLSTDIHHRITIRNKMMKVHRRIYDNRASMNCSDGSKGPPCTGWVEGMAPVFSRAAWRCVWHLIQNDLIHGWGLDMKLGYCAQGDRAEKVGVIDSEYVVHQGIPSLGGPSLSSKTPRRSLDLRTHIRRQSSAELEKFKERWNRAVREDEEWTDPFDT

SEQ ID NO: 51582 - protein, 488 aa, Oryza sativa
MAEAEAGRKEKKEVVRLERESVIPIMKPKLIMKLAYLIEQQSDREEFLKLCKRIEYTIRAWYHLQFDDMMELFALFDPVHGAQKLQQQNFSTEEVDTLEQNFLTYFFQVMQKSNFNILSDDEVELAHSGQYLLNLPIKVDEAKLDNKLLSKYFKEHHHDNLPEFSDKYVIFRRGIGLDRTSNFFFMEKVDMIIARAWRWFLEKTRLQKLFSRKKSVRPKTDSKKNDDLVGEEEDKELYVERIRLETMNLSLRNLIGKVTIQEPTFEEVIVLYRRKSPKGQNDRSIHVKHFKNIPMADMELVLPEKKNPSLTPMDWVQFIVSVVIGLVTLVSSLEMPKADFWVVVAVLSALAGYCAKIYLSFQQNMATYQNLITQSMYDKQLDSGKGTLLHLCDDVIQQEVKEIIISYYILMENGKATIEDLDLQCEELIQEEFGLQCNFEVMDAVQKLERLGIITRDSIGRICCLSLKRANEIIGATTEELVMKARQS

SEQ ID NO: 51583 - protein, 420 aa, Oryza sativa; identical to SEQ ID NO: 38582

SEQ ID NO: 51584 - protein, 182 aa, Oryza sativa
MTKEGVLPDVATFNSLAEALCSSGDVEFAVALLADASSRGLCPDISTYKVMIPAVAKAGRIDEAFRLFYAALEDGHRPFPSLYAAIIKALCKAGRFADAFAFFGDMKSKGHPPNRPVYVMLVKMCVRGGRFVEAANYLVEMSEAGFAPRAPTFNSVVDGLRHCGKHDLAQRMEQLEMSMNGN

SEQ ID NO: 51585 - protein, 527 aa, Oryza sativa
MGVSADGLVLKAACERCGSSSDLHGTGCRHATLCVSCGSAMARSGDCCPVCAAPIASLIREYNVLVDTTGEKQYTIGKFTTGVPPFSDRENAGSRSWSLHPEGQQGRQPTGNIWENCSNRKSCILEDDTGDYQYQGQIQGLQSAASTYYLLMMHGKDVHAVPADSWYNFSKISQYKQLTLEEAEEKMSRRRSTATGYGRWMMKAATNGAAAFSSDVTQLDDANEGETDQVHLKKGNKNGDENKSDKGSGEERAHVPMTKGREEEGSKDRDFDLDDEIEKGDDWEHEEIFTDDDEAVDVDPEEGGDLADPEIPAPPEIKQDDNEKHGGVGLSKSGKELKKLLRRAAGQNESDDDDEDTDEDESPSPVLAPKQQDQLKSEPQEDNHSKPTVLGHPYSTPHVSKSNQKRRQRGDDSKTCATPKKPKIEPDTKKIVVKEETSCSLEPTSEPFASARSDTNVSPITVEEIRVVLRLYAPIAMRDFSKDFMPRFSPRLRSPEDREVFLANLRKISHLQKINGQKYIILLEEYK

SEQ ID NO: 51586 - protein, 441 aa, Oryza sativa
MNIILELNHLKQVSLPTRPVVCKGLFIVIALIVLRAIVSPFLAVNPSEKEGFYDPTADLLPGIRRGKFIEVPQIIWGLNNQKIAFARACLTARFLNRSLLMPSLSASLFYKEVDLLRPITFDKVFDFTKFNARCQGFVRLARYSEVSNQTKPFKLQKGSGRRWTVEKDLDQLLQYRRGEADDSEVIEIIGKHPFLWPDHWPVKDYARIFDCLALVPEIETEVVKAISKIREAGIKARHEAGISHNKHVKDGTMNPPVPYIAVHMRIEKDWMIHCKKWEQRSNSKEICSSKEEIIHKVSQITGLRRPVVVYLAVADSLLEDDSITSGWRVGMVAFEKKRLGVTDIYNRQPYLIKSAIDFEVCARADVFVGNSFSTFSNLVVLSRTQRLYNMGEASSCGENVGLSSYAYNVIGDDGGPQRWMTDMSDTSLQNLSYGTNNISCH

SEQ ID NO: 51587 - protein, 384 aa, Oryza sativa
MGVGRVMNDAKPYLAMILLQVGFAGMYVVAVASLKRGMSHFVLVVYRNLFATAVMAPFALWFERRVRPRLTLIIFLKIMGLAILEPVLDQNLYYMGANLTSAGFASALINVLPAVTFVMALVLRMEKVKLKSVHSQAKIAGTLFTVAGAVLMVLYHGPVVQFPWTKGQHHDGGSGAGGAAGGGFLQGTIFIVVACVCWSGFFVLQSNTLQSYPAELSLTTLICLMGSVLSGTVALVAERHNTHAWLIGFDTRLFTCVYAGIVCSGVAYYVQGIVSRQRGPVFVTAFNPLCMIITAIMGSIILKEEINLGSVIGAVIIVIGLYALIWGKGADKVEQTDAGAAAAGSNKGGGELPLTAVPNGHGSKHGNGGHVYDVETPPAANGHY

SEQ ID NO: 51588 - protein, 451 aa, Oryza sativa
MMSRDRRYDSFKTWSGKLERQLTHLAGAGPEVPEEEEDGCDGDAISSHHTKSMPQVDRFFAALEGPELDKLRSSEELVLPSDKTWPFLLRFPVSAFGICLGVSSQAILWKTVATSTPTRFLHVTTKVNLVLWCVSLALMCVIAAIYACKVVFFFEAVRREYYHPIRVNFFFAPWIACLFLAIGVPPSVATELPRWLWYALMTPILCMELKIYGQWMSGGQRRLSKVANPSNHLSVVGNFVGALLGASMGLKEGPVFFFSVGLAHYTVLFVTLYQRLPTNETLPKELHPVFFLFVAAPSVACMAWAKITGEFGLGSRVAYFIAMFLYASLAVRINFFRGFRFSLAWWAYTFPMTGAAIASIRYSTEVDNAFTKALCVALSVLAMLTVLALLATTIVHGFVLRNLFPNDISIAITERKVKPIVELHEMLGSNDSAAGRSNDDIEAGVATVESS

SEQ ID NO: 51589 - protein, 166 aa, Oryza sativa; identical to SEQ ID NO: 35214

SEQ ID NO: 51590 - protein, 533 aa, Oryza sativa
MAGHQYNNSQMSRMDHMDRLNNEPPPFGQKLFMHPRSDPANGAGSSGYVGNTMRSNDLPSSSYAGQAYGQQNRAPIHASYSGHAPAGSSSGSYAPYNTQHMPASSYPHGSEDNFIPSSHVDGRRVALKRRNPIIHPTDGFGVGNYYAGSSSNTQFSRPMPPNPIPPPESCVRMPSHLGSNHWNDHRYVNHEGSQRNVRGRHDHSTIHLEQSPAAACPSSSINVPPYHPNANGPFGSAPVQRDRAPLSVHPRILPPGPDGSSIAFRERPYYPAPQSTNISAPVPTLPISCDSAPFAHGGYAPRSAHRNNLRTYPPPAFASSSNPGAVSHEPAIPSYPPAAPSYPPATSAASSSVQPFHAEAAAHLRHPRHVSVGGSGSARSRRMRDSYHGFHHLMIEDNNLGRSAAERFMMLDQLVIHESREAFDPHWDMRLDIDDMSYEELLALEERIGHVNTGLADEKISGCVMEVACCSSSHLQDDQDNERCVICLEEYKHEDTLGRLKCGHGFHCNCIKKWLQVKNTCPVCKAAAADEGS

SEQ ID NO: 51591 - protein, 95 aa, Oryza sativa
MQLYMTYQACPMGDLQMGDSVVSTIDIRALYCNKSPGKSSSSSMYGASSSSKRKACELNHGDGGSAHDDVRDYGVDHVDDNGEYYGDDHDDVMHG

SEQ ID NO: 51592 - protein, 385 aa, Oryza sativa
MAEAGVAAASLFGADRRLCSADILPPAEVRARIEVAVLNFLAALTDPAAPAISALPLISRGAANRGLRRALLRDDVSSVYLSYASCKRSLTRANDAKAFVRVWKVMEMCYKILGEGKLVTLRELFYTLLSESPTYFTCQRHVNQTVQDVFSLLRCTRQSLGIMASSRGALIGRLVVQGPEEEHVDCSILGPSGHAITGDLNVLSKLIFSSDARYIIVVEKDAIFQRLAEDRIYSHLPCILITAKGYPDLATRFILHRLSQTYPNMPIFALVDWNPAGLAILCTYKYGSISMGLESYRYACNVKWLGLRGDDLQLIPQSAYQELKPRDLQIAKSLLSSKFLQDKHRAELTLMLETGKRAEIEALYSHGFDFLGKYVARKIVQGDYI

SEQ ID NO: 51593 - protein, 327 aa, Oryza sativa
MVVLAGPPAVDHIPLLRSPDPGDVFSGVPVVDLGSPGAARAVVDACERYGFFKVVNHGVATDTMDKAESEAVRYFSQTQPDKDRSGPAYPFGYGSKRIGFNGDMGWLEYLLLALDDASLADACTVPSCAVFRAALNEYISGVRKVAVRVMEAMSEGLGIAQADALSALVTAEGSDQVFRVNHYPPCRALQGLGCSVTGFGEHTDPQLVSVLRSNGTSGLQIALRDGQWVSVPSDRDSFFVNVGDSLQVLTNGRFKSVKHRVVANSLKSRVSFIYFGGPPLAQRIAPLPQLLGEGEQSLYKEFTWDEYKKAAYKSRLGDNRLAQFEKK

SEQ ID NO: 51594 - protein, 379 aa, Oryza sativa
MGLLELFITACVPVLNMLLVTGVGSFLATDFVGILNKDARKYLNNIVFYVFNPSLVATYLAQTITLEGLAKLWFMPVNILLACTFGLILGWIVVHVTRAPARLRGLILGCCSAGNWGNIFLIIIPALCKEKGSPFGAPDVCHTYGLAYSSLSMALGAVFLWTVAYNIMRATSKVADEGNARTNDTKVSNSGSSTGTASEENLSIPNDNNQCTLPLISNSSVPSSKTKVTLSERAKRFVSSMFGAIDFKKIFAPSTIAVIIGFIIGGTPLIRNAIIGENAPLRVIHESADLIGGGAIPSVTLIMGGNLLNGLRGEASVQPSVIASVIVVRYILLPSLGTLLVKSAVHLGLIHPDPLYQFILLLQYAVPPAMNIGRKERME

SEQ ID NO: 51595 - protein, 359 aa, Oryza sativa
MAGDGLPRIAVVGAGIFARTQYIPRLREIAHLVLLKTIWSRTKESAEAAAELARDFAPEIQPRWGDAGLEEIMGDASISAVAVVLAGQVQVDLSLKMLKAGKHVIQEKPASGSTMEAETALSVYNSFPNQFPYKPIWALAENYRFEPAFVESRKLMSDIGDMMNIQVIVEGSMNSSNPYFNSSWRRNFVGGFILDMGVHFIAGLRMMVGSEIATVSSISRHVDKALPPPDNICSLFQLENGCAGVFVFAVNSRTPKILWRVDGTRGTVQIERGIASGKHGYQVLFTNENGQCQTTFYPFCGVNEELKAFVHDIVQANKDGDHKAEPRSSYVEGARDVAVLEAMLESSAKQGTMVQVKKF

SEQ ID NO: 51596 - protein, 292 aa, Oryza sativa; identical to SEQ ID NO: 36983

SEQ ID NO: 51597 - protein, 330 aa, Oryza sativa
MPRYDDHYGSTRLYVGRLSSRTRSRDLEYLFGRYGRIREVELKRDYAFIEFSDPRDADEARYNLDGRDVDGSRILVEFAKGVPRGATGGSREYMGRGPPPGTGRCFNCGIDGHWARDCKAGDWKNKCYRCGERGHIERNCQNSPRNLRRERSYSRSPSPRRGRGHGRSRSYSRSRSRSYSRSRSRSLSGSPRGRRDRDDRRSRSLSYSRSPRRSISPAANGKERNPSPNGRRSPRSPQDRVSPPPKDNDERNGDSPWGRENSRSPSDGYRSPVAANGRSPSPRNNGSPSPMDNNSRSPRDNGSPSPRDGNGDGGSRGGSRSPRASESPEA

SEQ ID NO: 51598 - protein, 352 aa, Oryza sativa
MEVGDLHKVWEIRALKRKPDEPAARALLDRVAKQVQPIMRRRKWRVKVLSEFSPKNPRLLGLNVGGGVEVKLRLRHAGRDYDFIPYEEVLDTMLHELCHIARGPHDAQFYKLWDELRKECEELVSKGITGSGQGFDGTGRRLGGFTVHPPPPSLRQATLAAAQKRARNGALLPSGPRKLGGNNDIMSALSPIQAAAMAAERRMYDDLWCGSHDQSGIDDSEDVVILEDTPNLPTQLGKSTKDGFSSSSENPSTSSGFPTAAQNGSSSCRITTDAGDSSLWECVACTLLNQPLAPICEVCSAAKPKTTKAKYATWSCKFCTLENSTKIDKCSACDQWRYSHGPPAATYCPSYD

SEQ ID NO: 51599 - protein, 279 aa, Oryza sativa
MPGNSFVPTGNGAPDTRNLYYSFDSGVVHFVYMSTETNFVQGSDQYNFIKADLEKVNRSRTPFIVFQGHRPMYTSSNEARDFAHRQQMLQNLEPLLVTYKVTLALWGHVHRYERFCPMKNFQCVNMSSSFVYPGAPVHLVIGMGGQDYQPFWQPRKDHPDVPVYPQPERSMYRGGEFGYTKLVATKEKLTLTYIGNHDGQVHDMVEIFSGQVSNNNGVPEVIDDTKLSTGVSTKLKIPLFSLEIVGSVMFALVLGFSLGFLIRRKKEAAQWTPVKNEET

SEQ ID NO: 51600 - protein, 269 aa, Oryza sativa
MTTARFVSPSLSRVSPSPAGRVSGSSWLSRAGVALPARPHGLSLHLRPPAMASAAAAGNGSPSAPEDSTALSRIGEVKRVTKETNVHVKINLDGTGVADCSTGIPFLDHMLDQLASHGLFDVCVKAKGDTHIDDHHSNEDIALAIGTALLEALGDRKGINRFGHFTAPLDEAAVEVILDLSGRPHLSCGLSIPTERVGTYDTQLVEHFFQSLVNTSGMTLHIRQLAGKNSHHIIEATFKAFARALRQATEYDLRRRGTVPSSKGVLSRS

SEQ ID NO: 51601 - protein, 79 aa, Oryza sativa
MNTKVASYSTWIIDCSIDSVCKLADVLELFFSENGGVKAVAAVAADQLVLQLEGDTGNGDEVSEVRIDGNIQSYKSSST

SEQ ID NO: 51602 - protein, 329 aa, Oryza sativa
MREASGMSGGEDVRKVSRQDIQLVQNLIERCLQLYMNQKEVVETLSFQAKIEPSFTELVWQKLEEENREFFKAYYVRLMLKNQIMVFNKLLEDQYRLMCKEQPSGVPSMPPTTNGSNMGTLNQNACFLPDTTPSTAMPDSLLPNGSSSGIVNGTPSSDQFIYAGKVIHGLPSSMDASSSLLAAHNSTAGRFNGDNGTTIKTEASYSGNSDFGFCNESAFLEPCQSIGDASGGSFSSSELNGQPLGDPIMDMDSSSFGFLSQIPRNFSFSDLTEDFSQSAEILENYGRSPFIPSEPNNFSESTPGDHAEIGNRRLDTISEGVSYEDFGSD

SEQ ID NO: 51603 - protein, 644 aa, Oryza sativa
MADHPSSSPTAATSPPPRKRPRDASPSEEEEGGLPGGPPSPSPSPAGYIFMCSGATKPECYARGVMGQPRGRLPAVSRIRRGAALFLYDFDSRHLHGPYRAASDGGLDLAPAAFGGRFPAQVKFTIDGDFMPIPESSLRSAIKENYSNGKFSSELTLAQVENLRTLFRPIIVQPEPGLPNNFDDRQPARPCSMSPTAPSLVCDKPHSAAENDENGCSSGSSMSSPAGYIFMCNGVTKAECYRHRVMGLPLGSLDVVSRIRRGTALFLYDFDAKHLYGPYHADSNGGLTLVPDAFRGRFPAQVKFTVDGDFMPIPESSLRTAIKENYSNGKFSPELTLVQVEKLRALFRPIIVMPESALFHNDSDRHPVPPAVYLPPASHPSQPAAYVHQQHQTSYIPPLTAHPMPPESYAHSYAQMPPPNMQFTTPPYHMSTAEYPYQAAHTAYSSLPSANNISMANNLYGQQSLSDHVSATGYYTAPYYAAHQIGMHPVDPPRSHYLGTTSERITYGTEHEAATTNLQPISHYGSIPSGATAAPEAAATNSELVCNSGATPSASATGAAMTNLQLVRNYGSMPSSVIGAAAHSSEGSQFEQAATYITHAPGTYYCYGASSAIYSYPGNTASCDGNNVAAAPSVYAVAAPPAYQ

SEQ ID NO: 51604 - protein, 271 aa, Oryza sativa
MGIVEEAHNLRVVGEGKRGVIVLAHGFGTDQSVWKHLVPHLVADYRVVLFDTMGAGPTNPDYFDFSRYATLEGYALDLLAILQELRVASCIYVGHSVSAVIGAIASISRPDLFSKLVLLSASPRYLNDVDYYGGFEQEDLDELFEAMGSNYKAWCSGFAPLCVGGDMESVAVQEFSRTLFNIRPDIALSVAQTIFQSDVRSLLPLVTVPCHIVQSTKDLAVAVVVSEYLHKHLGGDSIVEVMPSEGHLPQLSSPDIVIPVLLRHIQHDIAV

SEQ ID NO: 51605 - protein, 87 aa, Oryza sativa
MHLVADARVDRGDRRGAQVRAVQRGGEAQRGVARRRQPWLRRNQEGLPGERQRLLRPPRALLRHDRQATQGQALSCRDRVKNTKFRV

SEQ ID NO: 51606 - protein, 195 aa, Oryza sativa
MVDVSRVQKELTECNRDREVSGVSIALHDGSTISHLTGTIAGPQGTPYEGGTFVIDIRLPGGYPFEPPKMQFITKVWHPNISSQNGAICLDILKDQWSPALTLKTALLSLQALLSAPAPDDPQDAVVAQQYLRDYSTFSATARYWTEAFAKNSSTGMEEKVQKLVEMGFPEDMVRSVLKSVNGDENMALEKLCSG

SEQ ID NO: 51607 - protein, 351 aa, Oryza sativa
MTKEMADDVEYHEEFVTNPRGLRLFTCGWLPASSSPKALIFLCHGYGMEVSGFMKACGVELATAGYGVFGIDYEGHGKSMGARCYIQKFEHLVDDCDRFFKSICELEEYRDKSRFLYGESMGGAVALLLHRKDPTFWDGAVLVAPMCKISEKVKPHPLVVTLLTQVEEIIPKWKIVPTKDVIDSAFKDPIKREKIRKNKLIYQDKPRLKTALELLRTSISVEQSLSQVSMPFFILHGEADKVTDPEVSRALYERAASADKTIKLYPGMWHGLTAGEPDHNVHLVFSDIVAWLDRRSHHQDRASITPPAACTDSAAAAAADSPVSPEPPRQGAAGGFLCGLTGRANPQQCRM

SEQ ID NO: 51608 - protein, 303 aa, Oryza sativa; identical to SEQ ID NO: 51574

SEQ ID NO: 51609 - protein, 185 aa, Oryza sativa; identical to SEQ ID NO: 51441

SEQ ID NO: 51610 - protein, 338 aa, Oryza sativa
MGAASRRLAVLELVSIVAILLISSPAAAAELSVDFHAASCPQLESIVRSSVQAALQQEIALAAGLLRIFFHDCFPQGCDASVYLRGGSNSEQGMGPNLTLQPRALQLVEDIRAKVHAACGPTVSCADISALATRDAVVVSGGPSYAVPLGQKDSLAPASLDLVGDLPGPGTSRVQDLIDLFASRGLRDAADLVALSGGHTVGRTRCAFFDDRARRQDDTFSKKLALNCTKDPNRLQNLDVITPDAFDNAYYIALIHNQGVFTSDMALIKDRITAPIVRQFATDKAAFFTQFAKSMVKLSNVPRTDRNVGEIRRSCFRTNSQSLVDFATSDEEGFAASA

SEQ ID NO: 51611 - protein, 197 aa, Oryza sativa
MENLKATELRLGLPGTEEEAAPPPSTPRAGSKRALAGEPDQAKIKPAAAAKAQVVGWPPVRSYRKSCLQPTTTTTKSKPPPAAAAAETQQKEDVAGAGGLFVKVSMDGAPYLRKIDLKVYKGYRELREALEAMFLCFSGGAAADAAVNPSDFAVTYEDKDGDLMLVGDVPFEMFISTCKRLRIMKGSEARGLGATRG

SEQ ID NO: 51612 - protein, 328 aa, Oryza sativa; identical to SEQ ID NO: 34781

SEQ ID NO: 51613 - protein, 118 aa, Oryza sativa; identical to SEQ ID NO: 30163

SEQ ID NO: 51614 - protein, 499 aa, Oryza sativa; identical to SEQ ID NO: 36759

SEQ ID NO: 51615 - protein, 182 aa, Oryza sativa
MELELGLAPPNSGHLVVDELSSSSSSGGGSGSAPVSASSAGKRGFREAFQETLLLFDDGSCCNTSDDDCRRRKKTVVGWPPVSSARRACGGANYVKVKKEGDAIGRKVDLALHSSYDELAATLARMFPTNDHQGEKKMANDDHGDAAGPVVTYEDGDGDWMLVGDVPWDDFARSVKRLKILG

SEQ ID NO: 51616 - protein, 385 aa, Oryza sativa
MAGGGGGGGWWWVERYGPCVGMVMVQWFYAAVDMALKAAYGMGMRPIVFVAYRQGIAAATLLLASLAARGWDLRRHMAVGAPAFALLFAASLASATGLYFYFLGLQLASPSMARATTNLAPGITFAIAAVIGLEKVDLRSSRSLAKIAGTVVCLAGAMAMAFFKGPKLLGAVLVAATTDDDWVKGGIYLIGNAFCVSIWYILQVPVCRSYLDPLSLATWMCFLATLQCAVMAFFLESNYLQIWKLASIWELPCILCGGVFASGANFFLQSWCISVKGPLYSAIFTPLSAVITTILSTIFLHEELHIGSILGAIAIIIGLYVVLWGKADDAKSEGLTILSNDSKRITEPECTGVKVECGTNLSVPLLSESLTRLNEQMDNLAKCST

SEQ ID NO: 51617 - protein, 186 aa, Oryza sativa
MASLIIWDEASMTKRQAVEALDMSMRDIMGCPRSPFGGKTIVFGGDFRQVLPVIRKGTRSQITEATLRRSYLWDCMVQLKLVRNMRAQSDAWFADYLLRVGNGTEEVNKEGNIGLPSDICLECKGNETDLERLIDTVFPNLNDNLTDPNYIICRAILSTRNEFVDRINMEMIERVRGDVMTYHSFD

SEQ ID NO: 51618 - protein, 331 aa, Oryza sativa
MGLKVEDDPPSSGSVADADDSTDRLCRVCHCVEPDLRGHSALAFLGILPPPSSPDEDADDVATATATNNNVLEFVSPRGEIFVCTAATTDLESGPLHHHHHLMDLGCSCKNDLALAHYACALKWFITHGSTVCEICGHVAVNVRPADFNKVLASLKEYEALRERTSTGDLSYLHYGADSGVDPDAVAAIRRQRLSEISSWFNPQNSHLAISQGQTEQTPASPSNNSIHHGAVVTTVVHTRWSLEGTGVFLAIGLGVIVLAWLVAPHVGKKAAVICLHMLLGGLCALTIIISLRFVFPRIQYGSMRCWAILFVFWFLVFGVWASRTHSIRSS

SEQ ID NO: 51619 - protein, 441 aa, Oryza sativa
MAKKNKEPASDDAAAIRTLFSADNPFRRKPSDDQPAPPAPTAAAPRGKHPEPEVAEPSAKSRRDEPRRKRKRDEVEAGHERRRLGGAPAPPLPVVGEKRKVPEEVAAAAGAGQEEEEAFDDESKLLRTVFVGNLPLKTKRKALTKEFAAFGEIESVRIRSVPLTDTKIPRKGAVIKGKINDSVDNVHAYIVFKDEQGARAALSHNMALFDGNHVRVDMACPPRKKLKGEGPLYDRKRTVFVGNLPFDIKDEEVYQKFCGSSGSEGDVEAIRVVRDPDTSLGKGIAYVLFKTREAANTVVRKQDFKIRDRLLRLAHAKSADATPKKTTDAGKTKGGSKHKTALTPSSKSHEGSDKTKRKASTLSYQGLRASKSGVVKKAKVSQRPSYQGKQQGRTSETGHDASSQKAKRPAVAARKAKQLAKKRKLDAQTPENTHRSKKAKK

SEQ ID NO: 51620 - protein, 211 aa, Oryza sativa
MGGMDAAAARAYLSRLVHHHLYDDEPIDVAAAAVSLLQRSGLHQGGGGGESAPAAAASIAALPTVEVSEPATACAICKDDLPLAAPARRLPCGHLYHSECIVQWLEMRNSCPVCRSRLPSDEPQDAAAPSDPGPAPMRITIRLSTNRRRVRTSSDAAPPVAASPTQLAQAVTGEGGGGPANSTETVSSEWPPPSESDAVMSDAREGQRFFD

SEQ ID NO: 51621 - protein, 235 aa, Oryza sativa; identical to SEQ ID NO: 47995

SEQ ID NO: 51622 - protein, 65 aa, Oryza sativa
MRRINNHKLPLMHHSSSSSSSSLKLLHTFHRWRSRSGSHSKSNTSMRSNWVCMVCPNLSILFLCK

SEQ ID NO: 51623 - protein, 466 aa, Oryza sativa
MAARAAAAAFLLLLIVGAATAAPDMSIISYNAEHGARGLEEGPTEAEARAAYDLWLAENGGGSPNALGGEHERRFLVFWDNLKFVDAHNARADERGGFRLGMNRFADLTNEEFSATFLGAKVAERSRAAGERYRHDGVEELPESVDWREKGAVAPVKNQGQCGSCWAFSAVSTVESINQLVTGEMITLSEQELVECSTNGQNSGCNGGLMDDAFDFIIKNGGIDTEDDYPYKAVDGKCDINRENAKVVSIDGFEDVPQNDEKSLQKAVAHQPVSVAIEAGGREFQLYHSGVFSGRCGTSLDHGVVAVGYGTDNGKDYWIVRNSWGPKWGESGYVRMERNINVTTGKCGIAMMASYPTKSGANPPKPSPTPPTPPTPPPPSAPDHVCDDNFSCPAGSTCCCAFGFRNLCLVWGCCPVEGATCCKDHASCCPPDYPVCNTRAGTCSASKNSPLCVKALKRTLAKLNTA

SEQ ID NO: 51624 - protein, 127 aa, Oryza sativa
MTGGGGGGGGTAAQAYGEAWYWDERYRKEAGPFDWYQKYPALAPLLAVYVRRHHRLLLAGCGNSVFGENMVDDGYQDIVNIDISSVVIDQMKKKYRDKPHLKYMKMDVRNWLNSSQVHSMLLLAKER

SEQ ID NO: 51625 - protein, 69 aa, Oryza sativa
MGRVMELLDARSTWRWVAADDRLWAPKAYLMRAGAVIHSHGMETCIATMLNTGAKEFRVNLLVSFPHES

SEQ ID NO: 51626 - protein, 491 aa, Oryza sativa
MKLDVNALRYLSKDDFRVLTAVEMGMRNHEIVPAELVDRIAGLKHGGTYKVLRNLLKNKLVHHDATKYDGYRLTYLGYDFLAIKTLVNRGVFASVGRQIGVGKESDIFEVATEDGTVLAMKLHRLGRTSFRAVKSKRDYLAHRRSFNWLYLSRLAALKEFAFMKALGDHGFPVPTAVDCNRHCVIMSLVQGYPLVQVKELQNPDDVFDTILGLVVRLAEHGLIHCDFNEFNIMIDDDEKVTMIDFPQMVSVKHRNAQMFFDRDIECIYKFFRKRFHLSSEKCEEQDGSDIDDDENSRPSFLSIQKAAGSLDKELAASGFTRKEQVEMDKYIDQNAEEESSDDDSTSEQDNEDGDDVAVKIGSLKIAEQDSAEVPDCTLASKDSNEPETFAKENETSTSCSGENNSINPSPSSNGDAKEPTESQDNDDSDDDSSDDPDGEDDDALAKQLNKQRKRAIAAAHGRRRPISSRNAYKYKGKGTMNSKIERQACKW

SEQ ID NO: 51627 - protein, 251 aa, Oryza sativa
MADYHFVYKDVEGASTEWDDIQRRLGNLPPKPEPFKPPAYAPKVDADEQPKSKEWLDEREPDELEDLEDDLDDDRFLEQYRRMRLAELREAAKAAKFGSIVPITGSDFVREVSQAPSDVWVVVFLYKDGIPECGLLQTCLDELATRYPATKFVKIISTDCIPNYPDRNVPTILVYNNSAVKGTYVGLQKFGGKRCTPESVALALCQSEPVLNDGQSGGDSSRDNVIEGVRRKFIEKVVAQHEEREEDDDSD

SEQ ID NO: 51628 - protein, 268 aa, Oryza sativa; identical to SEQ ID NO: 30367

SEQ ID NO: 51629 - protein, 163 aa, Oryza sativa
MMSSRERKKAAALQEKLQILRSITHSHALSNTSILMDASKYIKELKQKVVRLNQEIACAQDALRQNRVTVETLRHGFLVNVFSGKSCPGLLVSILEAFDELGLSVLEATASCTDTFRLEAIGSENLMEKVDEHVVKQAVLRAIRSCSGSGGDHHDDDDDDDDE

SEQ ID NO: 51630 - protein, 351 aa, Oryza sativa; identical to SEQ ID NO: 51607

SEQ ID NO: 51631 - protein, 182 aa, Oryza sativa
MPRLHLLLLAVLAVAAAAAEAAAEKKPTAYEVLESYDFPVGILPKGVTSYTLEATTGDFTATLDTGDDDDSSSSTCEFAIEGSYSLRYQRAITGRIATGHLTDLRGVAVKVLFFWLNIVEVTRRGDRLEFSVGIASADFTVDNFLESPQCGCGFDCDDDGISSSSSLPPPLEPSLLRLRGAF

SEQ ID NO: 51632 - protein, 322 aa, Oryza sativa
MAAARVAMWVACVLAMAAACQGRLRVGYYKRKCAPAEYVVRAVVGNAVRQNPGVGAGIVRMFFHDCFVQGCDASVLLDPTAANPQPEKLGPPNFPSLRGFEVIDAAKAAVEKACPGVVSCADIIAFAARDASFFLSGGGISYRIPAGRLDGRVSLANETLAFLPPPVFNLTQLVASFQAKGVDADDMVTLSGAHTIGRSHCSSFADRLSPPSDMDPGLAAALRSKCPASPNFTDDPTVAQDAVTPDRMDRQYYRNVLDRKVLFDSDAALLASRPTAAMVARNAAARGRWERRFARAMVKMGGIEVKTAANGEIRRMCRVVNE

SEQ ID NO: 51633 - protein, 463 aa, Oryza sativa
MWEAEEIEDEETLEALLEASRSAQGRAALSDALADTLHLLPASTHRLLLLRLRLLRNLLAGDDLNQGTFVLLSGPAAVVSSALSSPSDSPDVARAGLQALGNAALAGEHHRAAVWDALFPGSLLELARVREKGVLDPLCMVIDTCCSGEGGRGRLEELCHEELGLPILVEIVTTAWQVGHDEEWLEWLLFKICVEEQKFETLFVALCSRNDAEHSDGDECKTEFNAKHAYLLGKLSKCLANRPKEVSVSISFALDIFNAQKHAAEIVDFTCRVNSPLPTGHPAIDVLGYSLVLLKDICAWESPPSDTQAPVDSLMQTGLVKHLLTYLRELEPPSMIRKSMARGQGDHQPALGTAKVCPYIGYRRDVVAVIANCLHRSKKVQDEVRHLDGIILLLQQCVVDEENPYLREWGLFAVKNLLEGNEENQKEVSGLKMQEAVITPEIADIGLRVEIDKETGHPKLVNN

SEQ ID NO: 51634 - protein, 365 aa, Oryza sativa
MENAAGGRRAQQTQVTEERQKKMKHKAAQEIADGSSTSDTVHGAADGVCFPCGTSTATAHLLQPKHSQPQHEGYNSSYQKVLANADMDRDSNSSTMQTQVPTNTREGPTFTQLLLGDEDFDLPPYVPEAEENNQFYQQTMNENLNMNQLGNNGIETAELEPQEHIMTFASSFGVGSQLLGSQAIEVVDVVGGLTSQWGTQLHGGHLARVISYIRAFHDPEQQILSNLVTHQSIETMLNHYAQTAEMSYSMRYPENAVTRGPQNVSGFPQTNGQINTLNNMNSEFHFLLEQAKNPENNSMRLINIRGHLCAFSIDPFGSRFIQHKLERATPAELAMVYEEIVPHAHMLAIDVFANYAVQKIFPNGN

SEQ ID NO: 51635 - protein, 190 aa, Oryza sativa
MHGYSNLACSSSSPPPVAAAGNGAGCRARRSLELTNTKETNAWEGLAIGAVTLARTFSTGSHRISSSSRSGAGERVGRTAGGGGGLPGAVRRAFSMRRHPAGLGKGDGYYWRIHDNMDGDSDDDGDNPAAAAAEEEERDKKEQLAESADEKKKEQLAEAADEKVSVTATATPKKKKGGRIMKACKKLLRL

SEQ ID NO: 51636 - protein, 247 aa, Oryza sativa
MEQLFVDDPAFASSMSSLEADIFSGAGQLPSSPWLDLDLDDDVQDLSMAPTTANAVSSGYGSGGSGSHRKLSHNAYERDRRKQLNKLYSSLRALIPDADHTKLSIPTTVSRVLKYIPELQKQVENLERKKKELTTTSTTNCKPGVLGSQLMSEGMAPIVSATCINDMEIMVQVSLLSNVAGSVLPLSKCIKVLENEGLHFISSSTSSGFGNRTFYSIHLQRSEGTINEECPAFCERLEKVVRNKAKL

SEQ ID NO: 51637 - protein, 535 aa, Oryza sativa
MSMQASNRPYRYPDNSQIPYYSRSSMHVGQNGTYHVQQNHEDLYASSDDGSQNGNSKAQGLQAQYCTLDSSSGNFVYPAHSSTSSHISGSPISQQDSHSEHTSGSPASASCVTEVPGLRFTTIEEIENAMFGPEPDTVSSDCSLLTDSAFYQDNWREHLGINTGDLKQVIAACGKAVDENSWYRDLLISELRNMVSISGEPMQRLGAYMLEGLVARLSSTGHALYKSLKCKEPTSFELMSYMHLLYEICPFFKFGYMSANGAIAEAVKGENFVHIIDFQIAQGSQWATMIQALAARPGGPPYLRITGIDDSNSAHARGGGLDIVGRRLFNIAQSCGLPFEFNAVPAASHEVMLEHLDIRSGEVIVVNFAYQLHHTPDESVGIENHRDRILRMVKGLSPRVVTLVEQEANTNTAPFFNRYLETLDYYTAMFEAIDVACPRDDKKRISTEQHCVARDIVNLIACEGAERVERHEPFGKWRARLSMAGFRPYPLSALVNNTIKKLLDSYHSYYKLEERDGALYLGWKNRKLVVSSAWR

SEQ ID NO: 51638 - protein, 318 aa, Oryza sativa
MSAAAASPPPPAAAGEHLRFHLRGFLSPETCKELEFVHRSCGTAGYRPSVVSTSLPHLAATGCGHLLLPFVPVRERLRDAVESAFSCHFDLFIEFTGLISWCKGASIGWHSDDNKPYLRQRAFTAVCYLNDHGKDYKGGILQFQDGEPSFITPVAGDVVIYTADNSNTHCVDEVTEGERLTLTLWFTRDSAYDEDPKLLSFLSQTSLNYEPVHQSSYIPLPASDIMYWFAYDHSGFDVRCARVHILGFSFHSSIDEDNKSVAPAEDDPIELLGKPVRLGRGDDVFDKVFANGLHALQVSTYFHFLSSFSLQIMSIRLQ

SEQ ID NO: 51639 - protein, 447 aa, Oryza sativa
MSAAAADWLPAADVTAAGRPVLTAGEVERHLVAQGDVEPEESPRLGPLRARLLVLTSHRLIFLHEPSRSARALPLAAVVHAYPPHRKHGHNPLRSIFSSSSSSSSSHHPRVRLQISLPPSRSEVVAVVVSKGEADVFYGRLLEAVRARAWEVVAAVAAAPAGGSSAAQGAPAEEDLAIRMPVVGVSGILRMEQEAWESAGQNLQDAFQDLNALMSKAKEMMELAEKMRQKLLTNSSAQSNSNDEEMGSKQDMQDWLLSVGIVSPVTKETAGALYHQQLSRQLADYIRTPLEKAGGMMALVDVYCLYNRARGTELISPEDLLQACSLWEKFDVPVMLRKFDSGVKVIQTKTHSDDEVFARISSLAQKEDALQKGISPSDAAFTLGIAPALAKEHLLNAESIGILCRDVSPDGLRFYINLFNEIDPQNMYMPKTHGVYHTWISVTAASQ

SEQ ID NO: 51640 - protein, 901 aa, Oryza sativa
MREEGGIASPGEKPIPNGASPNHSQSPKICSRITDNETQGTATAKSLNEKLVLETVSDDSSTQHCQSPQPDVFTNVKDEDMQDSVKSLSEKLASALLTINAKDDLVKQHTKVAEEAVAGWEQAEAEVSTLKRLLEASTQKSASLDDQVNHLDDALKECVRQLRQAREEQEEKIRDAVAKKTQELDSHKSELQNHIYELKQQLEAAKLEAATVAVQHDLQDKLQAAEKENKGLKIELLTLAKDLKRLSLERDLSNEAAETASKQHLESVKKIARVEAECRKLRHLTRRTSLANDSRPAPNNACMESLTDSQSDSGERMLTVDSEMRNSDSWASALIAELDQFKNSSASSRDVVNNHVEIDLMDDFLEMEKLAALSEVERVSSSFGTETDSDQAVAIDKASKVETETLKSQVTDLQAKVEKLETEKRDLEMALAEARVQLDASCDALMAANNKLAELQMQFNLANESKIAALGQADQLDAERGSLALQLESKSIEVEKLQAVVASLEESTDKKELESQLESTSVELADLCKTVASLQEQIDAERTLSLQHKAYADMADADKKSLEAQLQSAHADIGKLRGSIETLESELQKEKTMYEELVVQMESMKIESEKKLGVESAKEALEARLLVVNSEIAKLHGTVNDLECDAAKEKAFSSELKMQLEAVEGIRKMLESELESSHQETMKLQEKISLLELRLKDQTALLVEFTAKAEDAAVGRKAMEGQLEGAKLEITKLTNRVSLLQGKIEQEKLLSEEYEAKCRKLEAQLSRDSREARLWRLANTNGDLKVKQDKELSSAAGKLVECQKTIANLGRQLKSLTDLDSVTAEPEKLESGDALLDFREPDVEVPPAGFANGLYDLDLPKSNGSCLSPIPRVQSSSTHSQTSVFSGGLSSLGSYRNKTRK

SEQ ID NO: 51641 - protein, 553 aa, Oryza sativa
MDCYMLKSRRLVGVADAWSVDDGADGISGFPDAMSAAAHKQMVTGAEEAMLGKLELDSQSNLFSNSDDFLLSGSSKLGISASEDIDLPGKQGLPESTTDRPGSNGSSRVPRLRVLGTAGMAGFGKAVDILGTIGCLVTTSLSTDGGFISRAKTKGCPISILAFEVANTILKGATIMQSLSEDTVTYFKQVVLPSEGVQNLISSDMSVLMRIVANDKREELKIFSQEIVRFGNRCKDPQWHNLDRYFVKLESENPPQKQLKETAVAEMQKLMDLVHRTTDLYHELHALDRFEQDYRCKLTVKGNSYQKDNLPGENIEVVRIELKSQRNYVKSLKKRSLWSKTLEDIVEKLVDIVQYLHFEINASFGSSDEGELSSESTEDCQRLGPAGLALHYANIIIQIYSVVSRSGYIPPNTRDALYQGLPPRVRSALPNRLRTSSVPQELNIDQIRATMDKTLKWLVPMAINTTCARGFLRFSEWARSGTERVGRRPGQPDVVETLYHADKAKTEDYILDLVVWLHHLVNQSNRPANAKDKDKEQSTSPLTKSDLDKAQQE

SEQ ID NO: 51642 - protein, 336 aa, Oryza sativa; identical to SEQ ID NO: 48168

SEQ ID NO: 51643 - protein, 396 aa, Oryza sativa
MDVDSDPAAAGKPTQMDLEDQTDAKGKGKSEELADSIGSLSIGPERTNFKKKPVIIIVIGMAGTGKTTFMHRLVCHTQASNMRGYVLNLDPAVMTLPFGANIDIRDTVRYKEVMKEYGLGPNGGILTSLNLFSTKFDEVISVIERRADQLDYVLVDTPGQIEIFTWSASGAIITEAFASTFPTVVAYVVDTPRSTSPVTFMSNMLYACSILYKTRLPMILTFNKVDVAKHEFALEWMEDFEAFQTALDSDSSYSSTFTRSLSLVLDEFYKNLRSVGVSAVSGAGVNSFFEAIEASAKEYMENYRADLDKRIAEKERLEAERRKENMERLQRDMENSKGQTVVLSTGLKDKNRATDMMDDADEEEEEAALEDFRISEDDEDEDEDEGEDEEVEHFGL

SEQ ID NO: 51644 - protein, 389 aa, Oryza sativa
MSHRKFEHPRHGSLGFLPRKRSSRHRGKVKSFPKDDVNKPCHLTSFVGYKAGMTHIVREVEKPGSKLHKKETCEAVTIIETPPIVVVGLVAYVKTPRGLRSLNSVWAQHLSEEVRRRFYKNWCKSKKKAFTKYALKYDSDAGKKEIQMQLEKMKKYASVVRVIVHTQIRKMKGLKQKKAHLMEIQINGGTIADKVDYGYKFFEKEIPVDAVFQKDEMIDIIGVTKGKGYEGVVTRWGVTRLPRKTHRGLRKVACIGAWHPARVSYTVARAGQNGYHHRTEMNKKVYKIGKSGQESHAACTEFDRTEKDITPMGGFPHYGVVKGDYLMIKGCCVGPKKRVVTLRQSLLKQTSRLALEEIKLKFIDTSSKFGHGRFQTTDEKQRFFGKLKA

SEQ ID NO: 51645 - protein, 554 aa, Oryza sativa
MSSRVLLMHQVTVWELIRVLFSERATGNQLEPTGDEDQEGMILDKKEGTVAIDLEALPLVRRADFSNWLQDSVCHRVQGEAGSLNDARYLEHIILLLTGRQLDTATEVAAFRGDVRLAILLSQAGGSMLNRSDLSQQLDLWKTNGLDFDYIQEDRLKIYELLSGNVQGALVDSSIDWKRYLGLIMWYQLSPDASLDIIIHSYHQLLGEGKVPYPVPVYIDEGPLDESLQWSSGDRFDISFYLMLLHANQDEKFGMLKTMFSAFSSSYDPLDYHMIWHQCSILEAIGAFSSNDLHVLDLSFVYQLLCLGKCHWAIYVILHMPHLDDAPYIHEKLIREILSQYCESWSKDETQRVYIAELGIPVEWMHDALALYNEYYGDQQSALENYILCGNWKKAHTIFMTSIAHSLFLSSKHQEIWDITSSLEVHKSEIADWELSAGIYIDFFILRNSMQEKSTMDDPDQLEKKNESCSTFFGRLNDSLIVWGSKLPVEARACFSKMAEELCELLMNSPGEGLTPDLYMGCFQTMLNAPVPDDHRSSYLQEAVSVFTDILCRD

SEQ ID NO: 51646 - protein, 419 aa, Oryza sativa
MPPLILVMAALLLPAAADATSSVLLGINYGRVGNNLPPANAVPPMLSSLGVGRVRLYDADPATLRAFANTGVELVVGVPDECLAAVSTPSGAASWVRSVVQPALPATKIAVLTVGNEVLTGANSSSLSRSLLPAMQCLHDALAQLGLDKQVAVTTAHNLGVLATSYPPSAYFRKDLLPLLCPILDFHARTGSPFLVNAYPYFAYAEDPTGVELEYALLEPTYAGVADPSSGLHYPNLLVAQVDAVYHAIAAANTAAARAVEVRVSETGWPSAGDANETGATPQNAARYNGNVMRLVADGKGTPLRPSVALRAYMFALFNENMKPGPTSERNYGLFKPDGTPVYELSYRLPKDNTNSGGGGGGIGGGSGTIGGGGEYNGHGEDGGYYSISASAKPAGWWTWWTQAAVAACVAVLMRMMAL

SEQ ID NO: 51647 - protein, 300 aa, Oryza sativa
MVVSMEMGPHGGGGAAAGKPVPAPFLTKTYQLVDDPCTDHIVSWGEDDTTFVVWRPPEFARDLLPNYFKHNNFSSFVRQLNTYGFRKIVADRWEFANEFFRKGAKHLLAEIHRRKSSQPPPPPMPHQPYHHHHHLNPFSLPPPPPAYHHHHLIQEEPATTAHCTVAGDGGEGGGFLAALSEDNRQLRRRNSLLLSELAHMKKLYNDIIYFLQNHVAPVTTTTTTPSSTAMAAAQHHLPAAASCRLMELDSPDHSPPPPPPKTPATDGGDTVKLFGVSLHGRKKRAHRDDDDGVHDQGSEV

SEQ ID NO: 51648 - protein, 172 aa, Oryza sativa
MASLTELSFNWTGFVNAMISNISFTLRSVYSKKVMTDMDSTNLYAYISIIALLVCIPPAIIIEGPQLVQHGFKDAIAKVGLAKLVSNLLVVGLFYHLYNQVATNTLERVTPLTHAVGNVLKRVFVIGFSIIAFGNKITTQTGIGTCIAIAGVALYSYIKAKIEEEKTQMKSA

SEQ ID NO: 51649 - protein, 206 aa, Oryza sativa
MNSLSNGLLKGLRRVLEQQRKPIDFYRKSQAWSSTVSFSDIDEKSEMGGDDDYTDSRRELEPQSVDPKKGWGFRGVHRAIICGKVGQVPVQKILRNGRTVTVFTVGTGGMFDQRVVGDADLPKPAQWHRIAIHNDQLGAFAVQKLVKNSAVYVEGDIETRVYNDSINDQVKNIPEICLRRDGKIRLIKSGESAASISLDELREGLF

SEQ ID NO: 51650 - protein, 336 aa, Oryza sativa; identical to SEQ ID NO: 44951

SEQ ID NO: 51651 - protein, 217 aa, Oryza sativa
MKKASRFLKGLLSAIVAAVKARSAAVRAKTSAVRTRLIVLGILRNKKLLLSAINRKIHAIVSSGGGGGSSHGEYGGGGESYGGEQQQHLSGIHLVGGGGYRKAAVLHSLPSFVVEQERSAVVLLSSLPSFAMDRDVYGGGGEAEAEEEQGVGGKQQQQSVIELARGAAAAEAGGGAEFRLEDEIDHVADVFIRRFHEQMKLQKLESFKRLCEMLDRS

SEQ ID NO: 51652 - protein, 555 aa, Oryza sativa
MPATATCPKALHAHLLRSGALFADPSAAGPLAAAASLASLPYALSILRAHPTTFSYNSAIRALARGPRPHLAISLYHSMLSHSRSHPNNYTYPPLLAACARLADSDSSSAAAAAAAGVALHASLFRRGLESPDRFIRASLLSLYAAAGDLPAARQVFDLSPPNHYVQVLRLFRTMRTADHVTLLALLSACAHLGALHTARWAHAYLATTCSFPITTNLATALLNMYMRCGDVQTACSLFHSTPTRHKDVHTWTVMIAGLALNGFSTDALHLFTHMKDHNIQPDSVTLTAVLSACTHAGMVDEGKRILRRMPLDYHLQPTIEHYGCTVDLLGRAGLLEEALALIRAVPFKADVALWGALLVACRCHRNFEMGQMVAMEILRLDPQHAGAWVFLSNVYAAAGKWDLVQEVRSSMKQHRIHKPPGSSVVELDGVVYEFLSGDHSHPQSDQIYAMLDEIGKTSSLKGHKPATKLVTFDIDEEDKEVCISQHSEKLAVAFGLINTRRGAVIRIVKNLRICEDCHSVMKVVSEVYDRVIVVRDRNRFHHFKSGSCSCLDYW

SEQ ID NO: 51653 - protein, 254 aa, Oryza sativa
MPMEKKHRHARSRSFSGGAIVSFLKSTAASFTATTTTASAPPPPHGRSSFNHRNAFSGPIVSIVPPEARGGGGGSRREHRSGYRTPEPSSPKVSCIGQIKKANAKKVKASCKNGACPLPPRPPADAAAARRQKSSLVRRMLFRRSRSRKASSSSSRDGGFFKGRTAGRAGAAVAAAPAPAGLGQMKRFTSGRAAFEDFDWREAERMASDDDDDVLVAHSAPLVLGGGLVASEPRKEVNLWSRRPMAPPTPLRLP

SEQ ID NO: 51654 - protein, 239 aa, Oryza sativa; identical to SEQ ID NO: 49666

SEQ ID NO: 51655 - protein, 475 aa, Oryza sativa
MLAPSAGGASSARHVRELLRRCGSVHRLNQLHAHLVVHGVDDVTSQILASYCALPAGGGVWYARQLFDRIPDPDRFVYNSLIRAYCNSHCPQEALPLLRGMIRRGILPNEFTLPFLLKACARVQAWEHVMVTHGVVVKLGFVGQVFVGNALLHSYASAGSLGDSRRFFDEMVDRNVVSWNSMINGYAQAGNTREACSLFEGMRRQGLLADEFTLVSLLFACSAEGNLEFGKLVHSHLLVRGCRIDLILANALVDMYGKCGDLLMAHTCFDMMPFKNAVSWTSMLCALAKRASIDAARDWFEQIPEKSIISWNAMISCYVQGGRFHEALDLYNRMKLLGLAPDEFTLAAVLSACGQLGDLASGKMIHDCIRDNFHNPGVALFNSLLDMYARCGQVDTAISLFSEMPSKNVISWNAIIGALAMHGRAQDALMFFRSMVFDAFPPDEITFVALLSACNHGGLLEAGQYYFQAMICLQC

SEQ ID NO: 51656 - protein, 632 aa, Oryza sativa
MLAVWIGTQADEAFPEAWHSDAATVRGEGVASVRSKAYVSPKLWYLRVNVIEAQDVQPQARGRAPEVFVKAQVGNQILKTSVVAAPTLNPRWNEDLVFVVAEPFEEQLLLTVEDRVTPRKDDLLGRAALPLALFEKRLDHRPFVQSRWFDLEKFGIGGAIEGETRRELRFASRVHVRACLEGAYHVMDESTMYISDTRPTARQLWKPPVGVLEVGILGAAGLQPMKNRDGRGTTDAYCVAKYGQKWVRTRTMLGTFSPTWNEQYTWEVFDPCTVITIGVFDNNHLGNGNGNGNNAGGGGGGSPPARDARVGKIRIRLSTLETDRVYTHAYPLIVLQPSGVKKMGELRLAVRFTCLSLMNMVHLYTQPLLPRMHYLHPFTVTQLDALRYQAMGIVAARLGRAEPPLRREVVKYMLDVESHMWSMRRSKANFFRAVSLFSGAAAAARWFADVCHWKNVATTALVHVLLLILVWYPELILPTVFLYMFMIGLWNYRRRPRHPPHMDTKMSWAEAVHPDELDEEFDTFPTSRQQDVVYMRYDRLRSVAGRIQTVVGDMATQGERLQSLLGWRDPRATCLFVVFCLVAAVVLYVTPFRVVALVAGLYLLRHPRFRSRLPAVPSNFFRRLPSRADSML

SEQ ID NO: 51657 - protein, 607 aa, Oryza sativa
MDAGDTSAAAAVAPTPARLREALAALSKAFESGDCSDGSAAAAVSDLLNAAADAADAEADAEDEAAAGVVEEMLREVHAFLSSPSSNQLAIDALSLELVKPVAKLGALMRNCWDIANAIIEFFVSNCNPRDMLSILCEAVDAPLASNGSVYFVLLFKELAKVLVLIQRRHTEQVKVTLPAVLRVMNAVIPECDEEHGKIIVDMYNAALRIGNAIQEMCKKMVNQTNEELCSVLSLYSLQNIALVSRCKQQHILSACGSVVLQHSKILTFCGFTYLGLLTGNDVTSATDKISKDEDADLLECFSFAMNGANLAVIWTYMDDEISKYAGAELESALKDVKGNHTRMWQAINILRYVLSSTHYPWVIKSHSLDLLLTIANESRIEEINDHVDVSSSGPQIFATLKAIESVMISAPDALMRKKAFATLKQVISMVPSSQRFNILQALIKNSIFPSLTALLLDLVKDEVSREIRRADQDIVESDQLQDGGEWPPPWFSHALELVELILKPPEGGPPCLPDHGEQVLSALNLLRFVLIIDSRGSRSRKMFGEETMRKVYSEWLMPLRPIVAGIQSESEEDGSDVANHIMCSLNPVQLVLYRCIELAEEKMKGF

SEQ ID NO: 51658 - protein, 226 aa, Oryza sativa; identical to SEQ ID NO: 30420

SEQ ID NO: 51659 - protein, 749 aa, Oryza sativa
MSCSKVLLSKKGVLGTVWVAAVSGVAALSRDQVVRTNVVACVDKILPDDNDKTTYRVLGLLLLGIVRIYSKKVEYLCHECNELLGSYGSAHCNELSIPTGGATNRVSKQAKKPVRARRLVVRQEGAYKVKIPMQAVRTTRAETRATSQITEVRDTHATPDLPTFTIPKRFELDSFDLGIPEDRDDDDVDHHQLPHQGTMLEDENHHTSCLFESYKMMTCSYADLDSACIMPVRVTIPTEMMSVISEVNSLLCLSSIGGEPENHNAESACFTPVKDILPPEMVDMMAEVNDPSDKSTRGKKPQRELNRDENGNSACHIPLSGSKEVQIPENIVENVTFPSRDANCPTIEESENGSLHGTNTNPSCDGFEEPGSLEQPTLRCKTKLINELSPSTPEPMTEGGTGLPCSPKFMVTTPAKKEKHRVTRKRRRGLYNKDYIPTDRGDKRKVRRRGTWVLYDENIVLPNETLRNTIEDASDLVQQRRKAPHTCLYTWKEGKIRSLPVTFMDPLILYPTSVYVRHTITADTPENSCRESVKSRRRLSLELSESNNICDDAKNVEGESIPDEPRKRKLDELTDSVQATVGCYTESAQYHNDEDYRFNDDTVKEKDFSIGGHESHSTELQERLNALKSKNPQLDEALDADIDSMEEDTHMDEQHARDEGLLRSTRTRTVARYFHQLLVDQKCQQRNNSVCLGQALEGTKRKTSARFFYETLILKSGSLIEVNQEQTYGDIIVSATPRLEAALRSSEKQ

SEQ ID NO: 51660 - protein, 304 aa, Oryza sativa
MMPTATSASAAAAAAASPTQSSSSSAATSPSSDLSAFLNSMLGPLNLRTDERMPGTTSAAGTATPEDEPDGFDAVTFFQNYLQNLMDGGANIQVLLDDASVGLAPGIGRVGGASFGDYFVGPGLEQLIEQLTENDPNRYGTPPAAKSALSTLPDVVVTDAMVAAADGAECAVCKEDFSPGEGAKQMPCKHIYHADCIMPWLDLHNSCPICRFELPTDDPDYEGRKKSNPQPTAGVDAGAASGSSTAAEEREESGESARLVERRFNVSLPWPFSGLGSQTPQQDGSNGGAGASGSKDGGASSDKK

SEQ ID NO: 51661 - protein, 306 aa, Oryza sativa
MNYIVGAFKPPCDISIAFSDARSRKQIAVKNDNGRTVMVPVFQSLETISGEVSVVPVPGKRIEHLGVKIELLGQIELYLERGKFYDFTSLVRELDIPGEIYEKKTYPFEFSTVEMPYESYNGTNVRLRYILKVTISRNIMGMGSIVEFREFCVRNYSPAPTINNSIKMEVGIEDCLHIEFEYSKSKYHLKDVIIGKIYFLLVRIKIKNMELEVRRRESTGAGSSAYVETETLAKFELMDGAPVRGESIPVRLFLTPYELTPSYRNINNKFSVKYYLNLVLVDEEDRRYFKQQEITMYRLLETPQAS

SEQ ID NO: 51662 - protein, 263 aa, Oryza sativa
MGSKDSQVEATLQDGNKEDEEDDWEAIADRGENDETLTLARSLEQQAKVSPSSSSEKISTPSSGPKRRGRGSFLYDKSVLYSDQCGLENDMDEQESNDQSGSKGRVDEQKHKSNAAAKQYGTRHVLVLYDFPPSTLAADLEKIFDKFGDHGVAIRWVNDTVALAVFRTPSAANEAQACIPPRYKVRPLKEDDDLLTKNDGIDLEPPTPRPKTSARTAQRLIAHGMGLRQFTNFGSDELKKQEEARRSRIAARQALRDDAWGSD

SEQ ID NO: 51663 - protein, 344 aa, Oryza sativa
MVGAVQEGIVREMNGGFEVMSGYDRSSMAPKQQQREEESKWYEEEIDDDLKLCYALNSVLHRGASKYQEIALIDTKHFGKALIIDGKMQSTEVDEFIYHESLIHPPLLFHPNPKTVFIMGGGEGSAAREVLRHNTVHRVVMCDIDQEVVDFCRTYLTVNWDAFASDKLCLIINDARAELEKSREKFDVIVGDLADPVEGGPCYQLYTKSFYQHFVKPKLNDRGVFVTQAGPAGVLTHKEVFSSIYNTLRHVFKYVKAYTAHVPSFADTWGWVMASDYPFSMNAQQINERIKERIDGELVYLSGESLISSTILNKSVYQSLLNETHVYTEDDARFIYGHGRARCA

SEQ ID NO: 51664 - protein, 725 aa, Oryza sativa
MAATATKTIDFAAERALAKDFLANFAGPRGEPKYLNILQDVANRKIRAVQIELDDLFHYKDADDEFLQRVTENTKRYIGIFADAIDELMPESTEAYAVDEDRDILMTQRVDEGADGGADGTDPLQRMPPEIRRFFEVYIKAFSKVTPLTIRQVKASNIGQLVKISGIVTRCSDVKPLMQVAVYTCEECGFEIYQEVTARVFMPLFECPSQRCKLNKAKGNLILQLRASKFLKFQEVKLQELAEHVPKGHIPRSLTVHLRGELTRKVAPGDVVEMSGIFLPMPYYGFRAMRAGLVADTYLESMSITHFKKKYEEYELKGDEQEQIDRLAEDGDIYNKLARSLAPEIFGHEDVKKALLLLLVGAPHRKLTDGMKIRGDLHICLMGDPGVAKSQLLKHIINVAPRGVYTTGRGSSGVGLTAAVQKDPVTNEFVLEGGALVLADMGICAIDEFDKMEESDRTAIHEVMEQQTVSIAKAGITTSLNARTAVLAAANPAWGRYDMRRTPAENINLPPALLSRFDLLWLILDRADMETDLEMARHVVHVHQNLESPALGFTPLEPPVLRAYISTARRVVPSVPRELEEYIATAYSSIRQEEAKSNAPHSYTTIRTLLSILRISIALARLRFSETVAQSDVDEALRLMQMSKYSLYSDDRQRSGLDAISDIYSILRDEAARTNSMDVRYAHALNLISRKGYSEAQLKECLEEYASLNVWQIHPNTFDIHFIDA

SEQ ID NO: 51665 - protein, 649 aa, Oryza sativa
MPLGQRAGDKSESRYCGVEVLDFPAGEELPAVLSHSLSSSFDFLLAPLVDPDYRPTPGSVLPVAASDLVLGPAQWSSHIVGKISEWIDLDAEDEQLRLDSEITLKQEIAWASHLSLQACVLPPPKRSSCANYARVVNHILQGLTNLQLWLRIPLEKSEPMDEDHDGAKDNSDMSDTVDSWEWWNSFRLLCEHSSQLCVALDVLSTLPSMNSLGRWFGEPVRAAILQTNAFLTNARGYPCLSKRHQKLLTGFFNHSVQVIISGRSNHNVSQGGVLSGDENHTEDTAVRHALSPYLDYIAYIYQRMDPLPEQERFEINYRDFLQSPLQPLMDNLEAQTYETFEKDTVKYTQYQRAIAKALVDRVSDDDVSTTKTVLMVVGAGRGPLVRASLQAAEETGRKLKVYAVEKNPNAVITLHSLIKLEGWESLVTIISSDMRCWEAPEKADILVSELLGSFGDNELSPECLDGAQRFLKPDGISIPSSYTSFIEPITASKLHNDIKAHKDIAHFETAYVVKLHRIARLAPTQSVFTFDHPNPSPNASNQRYTKLKFEIPQETGSCLVHGFAGYFDAVLYKDVHLGIEPNTATPNMFSWFPIFFPLRKPIYVPSKTPIEVHFWRCCGATKVWYEWAVTAPSPSPIHNSNGRSYWVGL

SEQ ID NO: 51666 - protein, 584 aa, Oryza sativa
MATAAATQSQPVRVVLRVRPHLPSEANSAEAPCVGLLGSHPGGEVTVQLKDQYTSRNECYKLDAFFGQESRVCEIFDQEVSAVIPGIFEGTNATVFAYGATGSGKTYTMQGTEDLPGLIPLAVSTVLALCTGTWCSVEISYYEVYMERCYDLLEPKAREIMVLDDKDGNLQLKGLAWVPVRSLEEFHEIYSIGVQRRKVAHTGLNDVSSRSHAVLSIRITTDVVKGKLNLIDLAGNEDNRRTCNEGIRLQESAKINQSLFALSNVISALNKKEPRIPYRESKLTRILQDSLGGNSHAVMIACLNPVEYQEAVHTVSLAARSRHVTNHMSSASKQETPKDKVDMEAKLRAWLESKGKTKSIQRMDGLLSPNAIKTPLSMSHKKQSASGRVSGRGKAMDQDGGKIKKVLFDSAARIPAENFHREGTQDIVNTTKKVVLPSLTPCKEDKTGSSLRKALSPISSNMDPQKQRTADDSNCLMLLELRTPMGSCNIVGKVTGATPLDKFIALGSNLKESLIQQYLDFLNVANKEELQKLKGIGERRAEYILELREDSPRPFKSLSDLGNIGLSSKQIQDILCKTATGIFK

SEQ ID NO: 51667 - protein, 412 aa, Oryza sativa
MAGQFVMEYCGEVISWKEAKRRSQAYENQGLTDAYIIYLNADESIDATKKGSLARFINHSCQPNCETRKWNVLGEVRVGIFAKQDIPIGTELSYDYNFEWFGGAMVRCLCGAGSCSGFLGVKSRGFQEATYLWEDDDDRFSVENVPLYDSADDEPTSIPKDILIKDEPNTQDGNNNTIQNTGIPIIASSSEFTPMNVEPSIASSNEFTPMNVEPLNVSSNELTPMTIEPLNAIPMGVDFTQNGSIEYGAQCAEDALQNSTRGVANLQNQSAPRDNNHTELVAVKRRPTLRGGKAKRGMRKQLNVVGICDRLASEVAREEILYCEEMKNEAAAEIDSLYDEIRPAIEEHERDSQDSVATSLAEKWIEASCCKYKADFDLYASIIKNLASTPLRSKEDAAPTEQNGLMYLENGP

SEQ ID NO: 51668 - protein, 212 aa, Oryza sativa; identical to SEQ ID NO: 43822

SEQ ID NO: 51669 - protein, 97 aa, Oryza sativa
MDLAAMSEAKVLVLASSLLCAKKTSLRPWILSCGKNNGLASTMAAIMSLACRSSRRISSPPTGAYTTMRTQRRWGLRAPPPNLLICQPRRLGEEGMR

SEQ ID NO: 51670 - protein, 1280 aa, Oryza sativa
MEGDMDATMTTLGPEDDTGAQGLILPSRDRVMYRPPPGKSALGLDLLAHRKREAEGGNAFKPPPQKVVAAATSIDEDEKPGPAESDEKSLSSGHRGSVSRRYRGANSDERTSFKEPTITDEDGRGPSPSHRDGSYRQDTHKSRSSQGSHSRSTPRRYDDYEDRGSRDKHGERERSASIGYSSSGRRGHHDDRESHNRRDERERSTSVDYMNKRSRHEHSSRSSRTPARSDWDSGRWEWEDTPRREYRDDRSNSHRQHPSPSPMLAAASPDARLVSPWLGGNTPRYAASPWDNVSPSPAPIRASGSSKGSSYPRSGGRSHQLTFSSTSASNDRESDRSPSDADGNYEISEEMMQEMDYNADRAWYDCEEHNTMFDGDNSMYLEDDSSYKKREAQLPKRLTRKDGSLMTLAQSKKLSQMTADNAQWEDRQLLRSGAVRGTEVQTEFDDEDERKVILLVHDTKPPFLDGRVVFTKQAEPVMPLKDPTSDMAIVARKGSALVREIREKQSMNKSRQRFWELAGSKLGNILGVEKTAEQVDADTATVGDQGEIDFKEEAKFSQHMKVKAEAVSDFAKSKSLSQQRQYLPIFTVRDDLLQVVRENQVVVVVGETGSGKTTQLTQYLHEDGYTTTGIVGCTQPRRVAAMSVAKRVSEEMETELGHKVGYAIRFEDMTSPNTIIKYMTDGVLLRETLKDADLDKYRVIVMDEAHERSLNTDVLFGILKKVVARRRDFKLIVTSATLNADKFSKFFGGVPVFHIPGRTFPVNIMFSKTPCEDYVEAAVKQAMTIHITSGPGDILIFMTGQEEIEATCYALAERLEQLISSSTKTVPKLSILPIYSQLPADLQAKIFQKAEEGTRKCIVATNIAETSLTVDGIFYVIDTGYGKMKVYNPRMDMDALQVFPVSRAAADQRAGRAGRTGPGTCYRLFTESAYQNEMLPNPVPEIQRTNLGNVVLLLKSLKVENLLDFDFMDPPPQENILNSMYQLWVLGALNNVGALTVIGWKMVEFPLDPTLAKMLLMGEQLECLDEVLTIVSMLSVPSVFFRPKDRAEESDAAREKFFVPESDHLTLLNVYLQWKSNQYRGDWCNDHFLHVKGLRKAREVRSQLLDILKTLKIPLTSCHMEWDVVRKAICSAYFHNAARLKGVGEYVNCRNGMPCHLHPSSALYGLGYTPDYVVYHELVLTTKEYMQCVTAVDPQWLAELGPMFFSVKETDTSLLDHKKRQKEDKTAMEEEMEKLRQEQAEAARLEKEREREKRAKQQQQVSMPGLKKGSTYLRPKRMGL

SEQ ID NO: 51671 - protein, 739 aa, Oryza sativa
MAVRASLACFPSDAALQESSGIPWGVAVTPFSAADERGAAPATGAEGHLLPRCDSYYAYFSTLCPLHRWSWSCAICSADNDLTPDASARYARDGGQDPPEMRSAFVDLLLPGEEGEAATTTPVYVAAIDLSSSEEFLELVKSALLAALEAIPPGSLFGLLTFSSKIGLYDVQGPIPIVKNAFIPPDSDGTLLVDLEDVMPLRSFLAPVDGCKDRIAEALETIKPTSSWEITATASEVQDHALHHARGFGLAMDAVVNYLCTEYGSLFELARIFTFLSGPPNYGPGQIETRSDVDHNAAKMLGSDHTFISEQTNFYTNLAASAVQAGVCVDLFAITNEYTDLSSLKVLSVESGGSLYMYSSTDESTLPQDIYKMLSRPYAFGCVLRLRTSSEFKIADSYGHFFPDPQYMHVQHINCCDSFATYVYDFEFQKDSQFSRKSSPPILQIAFKYTTIVQQGDTSDDVSNSVSRSKFTLQRRLRVRTIQYNITANIWDLYDFVDPDVVLTILVHQVILASLSDVLEARIWLRDWLVNFIAQYNKAYKVVRSGGTGMSDIDVDFIHCSQLQPLSRLVFAFLLSPLLQLHGQGIHPDYRTYLQCLFSALEASSLRQAICPTLISYSSPDVEAEVHQSLSRSVFNSESPIFLLDAYTDLLVYYSPTVSSTIPFPPPRDCLLRSKIDRLKQERNITPKLVFIHGAHDDTTAFERYLIEDQSVDGSLVASATGFRSFLEGIRSRIAEYSR

SEQ ID NO: 51672 - protein, 256 aa, Oryza sativa; identical to SEQ ID NO: 30372

SEQ ID NO: 51673 - protein, 181 aa, Oryza sativa; identical to SEQ ID NO: 34007

SEQ ID NO: 51674 - protein, 475 aa, Oryza sativa
MLLHGLEVTRSVSKPHGRNLFLQSLVEEGQNPSTSNGASNSQKSVEDKDLIDCLENSVNFWTDYSKVQYHPQSLYELHGSWTDFDKFDNYGSAQEVVSDWSQIEEMNERLRFFVEECDHIQGIQFIVDDSGGFSSVAAQFLENIADDYTNTPVLLYCVRDPMTLGSSRRNQRESIMRALHDAVSFSKLSSFCNLMVPIGPPSLSRSYMSSYLYIQDEKPFHASAVCAAAIHSITVPFRLQRTGPSSDLAHSSGNLDIGELLHILSDQGRQNMVTALDVAMPAPSLTDRDAMGNIEMKLHSLTPEISDEDEDPYSVESLVVHGALDKGGQRTSISQVKGSVCSVYEARETKPKFSHLSASLCPLPVPLPFPSIFRGNIGRHGEILSDHAEESQPKGSLDIESIPMAARLRSSSAVLPFIERRSGSLQKHGVARGAIGSLVLRDWGFGREEVEDMAEHLAKLLGPFHPEMDLTSDSD

SEQ ID NO: 51675 - protein, 543 aa, Oryza sativa
MPNVRSSPVADLPGWPLFSPPKLQLQKCTKCPREFCSSINYRRHTRVHRRTLQIEKDFLKNRDNIAAFWDKLTLDQAKTILSLADVDIEGVTGPSILAALSTWMCKPGYASLPLPYARAGNQLLDLIETTASRLPVSSNELFSMLDEASENTFLSTNPTACIQKFIFNGEADKVAPELKNAVACTSYMLEQTLVEAWSADKAAEALRCQKLLVEEEEAAQKRQAELIERKRMKKLRQKEQRLKDLKDEDVTDRFPGSVDGTTDSSGILSLKEATSDPGLYEQEDTQLPTPVASEDNSSFADLPVEHDIHDPGHEVNPSVTLNQQVFSRHRVGRTENFAQNSFASGGSAIGSKHPASVRHSHYRGANAGAVSNGNKTWTWKVRTEIEEHSPKDELNIDDGQEIVLNKKSRVLIGSISVAIEDGSECLEDNQYSKEYPTPASQLNIGNHPVTKVMQPFNHGEEGNGYNAHNDVEVSITPTAQDHSSSGVMTDGNNCSSCCNAGLAEGGGLRGAIFSSKEAAAFLSQRWKEAINADHVKLVLCPEG

SEQ ID NO: 51676 - protein, 222 aa, Oryza sativa
MAAKVHPNVAAAPQPPCISSIVSQQQEEEEPPVVLTVWRKSLLFNCHGFTVFDAKGNLAFRLDCYDSTSSRRADLVLMDAAGKPLLTIRRKRMSLSDSWIIYDGDGAATSTATPLLSVRRRRVGLRASKSKAIAHVTPLSSSLPLPEAYVVEGSYGRRSCAVRDARGDAVAEVRRKESVGDDVFRLVAQPRLGAPLAMAIVIAIDEMLRGGSSSLLRRTCSA

SEQ ID NO: 51677 - protein, 824 aa, Oryza sativa
MTAPAVLPNELEGISRSQRVELFRDASCNIEKEVLSSLANGQDSHASGTNPGFRVGEIRLSNRDIYFGTLLGNTPEGSGRYVWSDGCTYDGEWRRGMRHGQGKTMWPSGATYEGEYSGGYIYGEGTYTGSDNIVYKGRWKLNRKHGLGCQTYPNGDMFDGSWIQGEIEGHGKYTWANGNTYVGNMKNGKMSGKGTLTWKNGDSYEGNWLDGMMHGYGIYTWNECGYYVGTWTKGLKDGKGTFYPKGCRVPVNDELYINNLRNRGVLPDIRRQNHGSRILHSSSVDMGNMKVGLTRESSGPSSRRNSSEQPHSKNVSLERRWSLEVAIEKFIGHDATGSSGLERSESINDSDLPMLEREYMQGVLISEVVLDRSFSDSSKKAKRRQKKIVRETKKPGETIIKGHRSYDLMLSLQLGIRYTVGKITPIQKREVRASDFGPRASFWMTFPKEGSRLTPSHPAEDFKWKDYCPMVFRNLREMFKIDAADYMISICGNSALRELSSPGKSGSVFFLSQDDRFMIKTLRKSEVQVLLRMLPKYYHHVRTYENTLITKFFGLHRVKPSSGQKFRFVVMGNMFCTELRIHRRFDLKGSSLGRSTDKIEIDENTTLKDLDLNYSFYLEPSWREALLKQIETDSEFLRTQRIMDYSLLLGVHYRAPQHLRTRASYHRSMAADRLTVLSEEDAQEDDAFNYPEGLVLVQRGGDENSVVVGPHIRGSRLRSTAAGFAEVDLLLPGTARLQIQLGVNMPARAEQNPKEEESKSFREVYDVVLYLGIIDILQEYNMSKKIEHAVKSMQYDSISISAVDPQFYSERFLKFIQTVFPENS

SEQ ID NO: 51678 - protein, 925 aa, Oryza sativa
MAEAVILLVVKKIGAALGNEVINQASSLYRNLFAQLAELQGSMSRICRELRLMHEFLCRMDVRNRNDQAYEIWVDEVRKLAHGIEDIVDEYLHLVRQRHDKGWSFYLKKGINQPEALRSLNRMVCLIKEAESSLVHLFQVKDRWIPNASPGYANNSGYIVEKSQHLASTSRSICEDLVGIEENRDTLFNWMREDGMACSTIVLHGMGGLGKTALTANVYKHEQEYYDCHAWVSVSQTYSLMELLKKLSVQLFHEENIQSNIGSIDIINLQEILRRFLEEKKYLIVLDDVWTPEVIIDMSRALAQNFKGSRLLITTRIGNVAEFASEGRVLTLEGLSEGKSWELFCKKAFRREANHECPTELKNLATQMLNKCKGLPLAIVSVGSLLSVREKNPTEWRRIYDQLSWELNNNPGLDHVRNILYLSFIYLPTYLKSCFLYCTLFPEDYILHRKMLLRLWIAEGFIEEKGENTFEDVAEGYLIELVHRNMLQLMECNSFGRIKSCKMHDIVRELAIDLSQKQSFGLAYYEYGNRCSTMDTSIRRLAVAKCSNNILSSICLPRLRSCIVFDKAMPSLRIIKSISDKSKYIVVLELRGLAIEKVPDAVGCLFNLRYLGLRHSKVKFLPKSVERLSNLLTLDIFNSYIQELPQGIVKLKSLRHLLVERINDPSWRDFRSRHGVCIPKGLSNFTNLQTLHAIEAQDRTVKDLGELTQLKSLRVWNVKEIHCERLCVSILKMRFLYHIHIAACDESEVQLNKLDPPPLSLQKLCLRGRLAEGTLESPLFQTGGQKLRGLFLVWSQLKQDPLPPISRLCNLTQLNLTRAYVGELLIFRSGWFPSLKFLLLRDLPNLHRLEIEEGAGIGIRVLQLRHLDKLMDIPPGIEFLPSLQRLCFVHISEDFLALLNRCSRLKHIQWWYSTHDQPLTKKSQS

SEQ ID NO: 51679 - protein, 330 aa, Oryza sativa; identical to SEQ ID NO: 29084

SEQ ID NO: 51680 - protein, 524 aa, Oryza sativa
MDAVAGAGQLVGLAAATLLTAAFLVAVKMGWRRRRRQREVAPEGGCRVVGGDGGDRTDIVIVGAGVAGSALAYTLGKDGRRVHVIERDMTEPDRIVGELLQPGGYLKLMELGLEDCVEEIDAQRVLGYALLKDGRNTKLSYPLEKFHSDVAGRSFHNGRFIQKMRQKAASLPNVHLEQGTVTSLLEEGGTVKGVQYKTKSGEELKAYAPLTIVCDGCFSNLRRVLCSPKVDVPSCFVGLVLENCQLPHPNHGHVILANPSPILCYPISSTEIRCLVDIPGQKVPSMATGEMAKYLKTVVAPQIPPELHDSFIAAIDKGSIRTMPNRSMPAAPLPTPGALLMGDAFNMRHPLTGGGMTVAFSDIVVLRNLLKPLGNLHDAPSLCKYLESFYTLRKPVASTINTLAGALYKVFCASTDQAKNEMREACFDYLSLGGVFSNGPIALLSGLNPRPLSLVAHFFAVAIYGVGRLMLPVPSPKRMWIGARLVSGACGIIFPIIKAEGVRQMFFPATVPAYYRAPPPMESG

SEQ ID NO: 51681 - protein, 481 aa, Oryza sativa
MATSGPARGWLPALARRIASVTGTLNPPASRVSRFPGSRNMASGSGVEGEGLGIPYRRRFIPFANDPIHTTKDNIISMDKHLPITQGKDSAATKEFISCYDHCRPTTYGDEDASRTAVEVTGGKQDPRGAVQNLIDGEVAVQELIDGEEIARNQRASEVSDNDGYEEFNDRAVNYHCDCHVWTPLIASSHRDGSIYDTRGTFGSGWKWDYRIADRNETRLEAMMLSHPTKDCYMRDGTCIWHPANGMLQIFSVKLAKTPVVDGSIELYGYIAVRDLQDPLLNYIVKIGRDDPIIVEQGSLIEMTGPKRGIDFSCAVLVEYDMRIKTGEREEDDLQLIDGATDLDHILTSHVPVRNRIYGDCGAVDITQANLLYAFEATVEVVISEVQTSFDLCLSCFTSGLHEEIRLFDGAISESRDLRRYVIAVMEHECMDLKFKVGLGSGCFAEHCRSFKATNHGCASEQIKIEFASISVKVTWSAMEF

SEQ ID NO: 51682 - protein, 458 aa, Oryza sativa
MGISSESPNGSQQIVQKETRDETTPLLPVKVEEEGFHEFNGASFSGAVFNLSTTIVGAGIMALPASIKMLGIIPGILMIIVVALLTEASIDMLVRCSHQGKITSYGWLMGEAYGQWGRIALQASVVINNIGVMIVYMIIIGDVLSGTSSTGVHHRGILEGWFGAHLWNSRAIVLLATTLFVFAPLVSFKRLDSLRYTSALSVALAVVFVVITAGIAIIKLFNGTVAMPKLFPELDGLSSIWKLFTAVPVLVTAYICHYNVHSIDNELEDRTQIKPIVRTSLFLCSSVYIATSFFAYLLFGEGTLDDVLANFDANLGIPFSSVFDDIVRVSYAAHVMLVFPIVFFALRLNLDGLLFPTSRHISRDNKRFAIITISLLTVIYLAAIFIPSIWDAFQFTGATAAVLIGFIFPAMVILRDPYGIASKRDKILAVTMIVLAVLSNSVALYSDAMNIFRKEEEA

SEQ ID NO: 51683 - protein, 339 aa, Oryza sativa
MEMVALILGSGTLMDIVGIPVDSAMRVPAEQFLTLRAYGAPPVIVALAAQGAFRGFMDTKTPLFAVGVGSLVNALLDAIFIFPLGLGVSGAALATVTSEYLTAFILLWKLNNKIVLLSWNIIGGDVVRYLKSGALLIARTIAVVLTFTLSTSLAAREGSVPMAGYEICLQVWLTISLLNDALALAGQALLASEYAKGNYKKARVVLYRVLQIGGITGVALATILFLGFGYLSLLFTDDPAVLDVAQTGVWFVTVSQPINAVAFVADGLYCGVSDFAFAAYSTLFAGAVSSAVLLVAAPKFGLGGIWAGLALFMSLRAIAGLWRLGSKGGPWKIIWSETE

SEQ ID NO: 51684 - protein, 402 aa, Oryza sativa
MKQFKPSVEQALESSLRRIEESTAALAAADDWVLTYPPSGIRTFARSSASSLLLQPKLSNSGHRFSSMVQDFFEDVGPLHSLQLGGSAMDGLLKIFNSYVNLLISALPHSLDDEANLEGLGNKIVRVAETEEQQLALFANASLLAEELLPRAAMKLSSVNHTGVNDIRKKSVDRQNRVAEQREWKKKLQRIVDKLKDSFCRQHALDLIFTEDDDTRLSAEMYINMDNTVEEPEWVPSLIFQELYAKLNRMASIAADLFVGRERFATFLLMRLTETVILWLSEDQSFWEEIEEGPRALGPLGLQQFYLDMQFVILSGRGRFLSRHVHQVILKIIDRAMAAFSATGMNPDSVLPSDDWFIDVANDTISRISGNPRTANGDREVNSPTASVSAQSISSVRSHGSS

SEQ ID NO: 51685 - protein, 237 aa, Oryza sativa
MYSDSVSGRKRSVMDRLGSGGGGGGGGGGGGGGGGGGSRPRPDSVKRFRQADGTWRRELYMDSVGVQSSSGVPSRNIQGNQKPHLQQNTQVMRKSSVPDLREKLSGVQRPQLNSTVQIPKSVPEISTSAKPVQKREPVQKREPPVNAALPATKKVNEPSAPKQCQEKTDSSLDRLLKSLDVEKYSINFQAEEVDMKALLHMNEEDMKSLGIPMGPRKKILSALASKKKKLSKSLPTS

SEQ ID NO: 51686 - protein, 162 aa, Oryza sativa
MESPPESSSSSPVLLNIGGKRYATTVETLTQREPSSMLAAMFSGRHTLPRHPDTGMVFVDRDGKHFRHVLNWLRDGAVPDMSESEYQQLLREAEYYQLLGLADCINDRLGWKNDENFSEAELTRKDVIKCIQAPRVRFRGVNLSGLDLSKLDLSEVDSAMHA

SEQ ID NO: 51687 - protein, 337 aa, Oryza sativa; identical to SEQ ID NO: 29664

SEQ ID NO: 51688 - protein, 389 aa, Oryza sativa
MAFHYAAMPSSSSSSLSGVSSQPPLHLPRLRSPHQASRRLSALPFSRALPLSLRLRLRIPRPQLPPLPLAFSHGGGGDNDGDDNNNNGGGDGEGDGGAPDNRREALFVLAQLGRKLESLPSDLAAAVEGGRVTGEIVRRFAEMEGSALLRWLLQFQGFRERLLADDLFLAKLAMECGVGVIAKTAAEYEKRRENFVKEIDIVIADVVMAIVADFMLVYLPAPTVSLQPPLATNAGHIANFFHNCPDNAFQIALAGRSYSILQRLGAILRNGAKLFTVGTSASLIGTGVTNALIKARKAVDKELDDEVEDIPVLSTSVAYGVYMAVSSNLRYQILAGVIEQRMLEPLLHNHKLLLSALCFAVRTGNTFLGSLLWVDYARWVGVQKVQEEA

SEQ ID NO: 51689 - protein, 586 aa, Oryza sativa
MERVLKSARESGSLNLSNRSLREVPKEVYNNLDTGAQDEKWWEGVDLQKLILAHNNLEVLREDLRNLSSLVVLNISHNNISSLPAAIGDLPLLKSLDVSSNQINAFPEEIGFATALVKVDCSNNCLTDLPVSLARCLELSELNASNNTISVLPDELAGCSKLFRLNLEGNKLVTLSDKMFMSWTMLTEMNAAKNLLTAIPDGIGALSKLIRLDLHQNKITLIPPSIKDCSSLAEFYMGNNLLTSIPEDIGMLSNLGILDLHSNQLKEYPVGACRLKLSFLDLSNNSLSGLPAELGTMTTLRKLLLTGNPMRTLRSFLVSGPTTALLKYLRSRLSSDEGASGSGSTPTKDDQIAAARRLSLSSKELDLSGLGVTSVPPAAWETNDVMKLDLSKNSIEDLPNELSLCSSLQSLILSNNKIKRWPGTVFSSLASLSLLKLDNNPLAEILATDLEALSKLEVLDLSGSASSLPEPSAVSKLPHLKELYLRRMKLHGFPDSLLGLKLLRILDLSQNYLTSVPEGIKDLTSLIELDLSDNNITTLPPELGLLEPNLQVLKLDGNPLRSIRRTLLERGTKAILKYLKEKLPAE

SEQ ID NO: 51690 - protein, 335 aa, Oryza sativa
MANCGRRFAAAGAPATARRCNLELFLEATTPVVPTTACSSKKSMNGWKQSDEENALPFFSLGDLWDGFRESSAYGIAVPIVLNGCSDGVVQYYVPYLSAIQLYGRLRRHFYHSRPSGEDSDGDYCQDTGSEEMSDLEHDSCPSSTDAFSVQDTTCETSTSEASSDESESTRISHEQLIFEFLESEPPYQREPLADKICSLARGFPELNTLRSCDLSPTSWMSVAWYPIYRIPTGPTLCDLDACFLTYHPLSTQLTGGICPEPKGNNSGVPVTTAMCLPTFAMASYRLKVAAWAPGGRDRQLVASLSHAADAWLGLLGVHHPDHRFFAARRVVSRR

SEQ ID NO: 51691 - protein, 201 aa, Oryza sativa
MEIYREIRSSTLERTLKRLGVEYVTKEEMQQVEAQSMEAKIAEWTQFSRITVKLLFGAERILCDQVFEGKYTWKDHCFAEVTAKSLSILLSFGDAVVQSQILPDKLYILLDMYKATLELQSKVDAIFEGNACSENQKSALTLTKSLAQTAKKTIGDFMEYILNHSVTSTTVDGAVHYMTSYVTDYIKFLFDYQTDAAINHQ

SEQ ID NO: 51692 - protein, 377 aa, Oryza sativa
MAAAAAAGAAAGGGFVGERRKLFVGGIPTSAQEAELRGHFGQYGAVRSVIVMRDKETGHGRGFGFVEFEEEEDAARALGDGEHPRHLICGRVVDVKRARARPQRNHDDQSSQHQHFGQGQDQGHQPAPVSGTEDGGDGMNYASKKVFIGGLRDNITEEEFKTYFESFGTVTDVVVIYDSMTNGSRGFGFVTFDSEEAVRKVIEHSFHDLKGTRVEAKIAIPKDASYYRNGRGRGSRNFGGRGHAGFDGPSYQPYNDRYGFYNSYNMPQPVPPHPYYPGVYYGMGGGYPYANAYSNMGAPANIPPGMMTRRPVYGAYPPMFPGYGVIYRGYVGAAPSIQHDSNGGSDSKKDQTSVDVQEVDSAASVATKLEFMKLGSQ

SEQ ID NO: 51693 - protein, 383 aa, Oryza sativa
MGSKNQFDLLVDVDNDDPSHLIAAAEKKAAAAAASPKLASSPAPAPAKLPTKPAPPAQAVREARNYGAPRDGAGRGGPGRGRGGGRGGRGGPRRDFGEGDANGFEGGYGGGGGFGDGGLARGEDGEGRQAERGRGPRQPYHGGGRRGGYSDGQSGDDYGRPRRAYERHSGTGRGYELKREGSGRGNWGTVTDEGLAQEVAEAVNTEEAPATAEDEKKPEDVPQSEVDKDKESPENEEEEKEPEDKEMTLEEYEKVLEEKRKALLALKAEERKVEVDKELQAMQQLSVKKANEEVFIKLGSDKDLKKKEKDEKDERTKKSLSINEFLKPAEGERYYNPGRGRGRGRGRGDRGGFYGGYNGNGGRRQAAAPVIEDQAQFPSLGGK

SEQ ID NO: 51694 - protein, 461 aa, Oryza sativa
MLESHVLKKVSHEEERGNFSAVSIADIDRTMKKYADNLLHALESVSSRLSQLEGRTHHLENSVGELKLIIGNYNGSTDGKLRQFENTLREVQAGVQILRDKQEIVETQVQLSKLQLSKAEDAQSEKAGVGQADSRQQPTLPQPQHQAPPPSHPPALPALPAPNAPPPPAPQSRPPSQFPGHLPHSRVQSVPPAPPTPLAPTIPQESYYPPSAVQPTDATHQQYQAPPAPQSQAPPAPPQHYQTPPQYAQYSQPPPASANPSTAVPPSVHQQPEEVAAPYGPPPQSYPPNVRLPSPYVPPPSGPAPPFYGPNPGMYEPPAVRPNSGPPPSYNTGYKPQGGGGFPEPYGYSGSPSHRGNAGMKSPSPFHPTGSAGSGNYSRLPTAQMLPQAASASSTPSASSGNRVPIDDVVDKVATMGFSREQVRAAVRQLTESGQNVDLNMVLDKVMNGADAQPQRGWHGR

SEQ ID NO: 51695 - protein, 279 aa, Oryza sativa
MEMEDSGRGVVGAGKRGVAETFSRLREQGKTAFIPFITASDPDLATTSKALKILDSCGSDVIELGVPYSDPLADGPVIQAAATRALKKGATFDSVIAMLKGVIPELSCPIVIFTYYNPILKRGVSNFMAIIKQAGVHGLVVPDLPLEETALLRNEAVMHGIELVLLTTPTTPTERMKEIAKASEGFIYLVSSVGVTGARSNVNLRVEYLLQEIKKVTDKPVAVGFGISTPEHVKQIAGWGADGVIIGSAIVRQLGEAASPEEGLKRVEEYAKNMKAAMP

SEQ ID NO: 51696 - protein, 439 aa, Oryza sativa
MLTHRNLLHQIKNLWDFVPAVPGDRFLSMLPPWHAYERASEYFIFTYGIQQVYTTVKYLKEDLQRYQPQYIVSVPLVYEILYSSIQRQISSSSTARKFVALALIKISLLYMEAKRIYEGTVLSNNPVKPSFIVYMVNWLSARIVAALLWPLHNLAKTLVYKKIHSAIGISKAGISGGGSLPMHVDKFFEAIGVKVQNGYGLTETSPVVAARRPFCNVLGTVGHPVKHTEIKVVDMETGEVLPDGSKGVVKVRGPQVMKGYYKNPSATNKVLDQEGWFDTGDIGWIAPHCPTGPSRKCGGMLVLEGRAKDTIVLTTGENVEPAEIEEAASRSDLINQIVVVGQDKRRIGALIVPNYDEVLATAKRKSILDGNNELAKDKVLNLLYDELRTWMVDCSFQIGPILIVDEPFTVDNGLLTPTLKLRRDKVTAKYHREIDALYK

SEQ ID NO: 51697 - protein, 343 aa, Oryza sativa
MTPPPPPPRRPVCVTGAGGFTGSWLVKLLLSRGYAVHATLRDPDDPKNAFLKQLENAPENLRLFKADVLDGGSLTAAFAGCEGVFHPATPVPEHKTVDPEKEMLAPAVKGTRNVLEACSAASVQKLVVVSSICAVCFNPSLPRDRLIDETCWSDKKSCKENENWYCLAKTEAEEMALEYSEKNGLHVITVCPGVIFGPLLQTVLLNTSSKVLLYIMKGGPDALSNKFFPIVDVRDVADALLLVYDKAGPSERYICSQEQMDMRDLLDLMKSMYPNYSYTAKVVDVDMTTSVELTSEKLKKLGWKPRKLEETLVDSVESYKKAGFVDDEPCRLPHLYRAPDAQE

SEQ ID NO: 51698 - protein, 379 aa, Oryza sativa
MRRITWLATAAAALCCLVAAASATAQCRFPAVFNFGDSNSDTGGFWAAFPAQQAPFGMTYFRRPAGRASDGRLVVDFLVQAMGLPLLSPYLQSVGSGYRHGANFATLASTALQPNTSLFVTGISPFFLAVQLNQMKELRTKVLTSNGNNDQLPAPDVLHNALYTIDIGQNDLTSNLGSQSIETVKQSLPSVVSKISSTVQELYNIGARNIMVFNMAPIGCYPAFLTKLPHTSNDMDGYGCMKTYNSAVTYYNELLNNSLAEVRKKLQDASIVYLDKHAVTLELFRHPKAHGLKYGTKACCGYGDGAYNFNPDVYCGSSKLLNGQTVTAKACADPQNYVSWDGIHATEAANKIIASSLMSGSYSYPPFDLSKLCHLQPIA

SEQ ID NO: 51699 - protein, 27 aa, Oryza sativa
MVLYLSGRGKLRASCLSSTYYTTNSTI

SEQ ID NO: 51700 - protein, 197 aa, Oryza sativa
MLLSVDPWIDALVGCCNILMQKSDPVMLDGFTKLPEDVLLNILDRLNTPDAVRTCLLSKRTLHLRHMLSNLHIRINSFVPRCGYATLKDTIPMNAAVAGATDNILSFRRQDIPLRKLSIGFYLRYYDCLTIGKAVARAMATHNIHSAEFNILTEKPPDYSTIDDRRRDGKQLMTFFCSCTDAFAGLTRLHLRNLKLC

SEQ ID NO: 51701 - protein, 239 aa, Oryza sativa
MSREEDEKLLFPSFAFPAECFPEAATSGGEQKKARQRRRRKVKPEAAAALAGESGGDEQAKKRRLSDEQARFLEMSFKKERKLETPRKVQLAAELGLDAKQVAVWFQNRRARHKSKLMEEEFAKLRSAHDAVVLQNCHLETELLKLKERLADVEEEKAKLAAVAAATTGGGGGGGGGSSSPTSSSFSTVTYHPALAGQFGVEAAAEEADLTYMSEYAYNSYMLELAAAGYCGGVYDQFS

SEQ ID NO: 51702 - protein, 817 aa, Oryza sativa
MDGVDKDKGNGKVHFRDSSPQEAFRTYKRRRQPRPEPQQQPQPQPQSEPEPQQQPQPQPQPQPQPEAEAEAEAEAKAADVLARQVTETFWKSRDIGWKHGIMIDENRQHWKCMYCHLTRYGGGVSRLKRHLAGDLDVKMCPKVPADVSEKIREHLRKKRERRKKRAAQNRDNCVTAKSTSDDIKSGKDPLPVDSEVLTGVDTVLEEVTNQTNHDNQDLTYPKATMLLRGIRDIGWEHAVDLDGNKRRWKCKWCSLCRSGGVTTLKAHLTDSSCPNIPKEISKKVLNFIEEKRAARHLFNSAAKSPFNVKFDEDAVNLSEIQVEGTPPLTDDRQPLGNSLHIQTSECTINEFEKVAAGSNQQGAEHSNQLLNHGEQLMKSSDQPEEHCTLEHGRCQVLDNNKQQTMDNKTDNPEHKEVLKHPKKTRFNIRKHIVIVDESARHWRCRYCGLDGYGKTSRLHFHLAAVFRHPKCPSVPKEVFAKARHHIHLKRRLNVKKAGQQARSRPHILGQSSQQQQNNNPVLSNYPTRLRDNAWEHSLIHDKEKGHWKCKWCSLEGYHGITRLKWHLVGWQNRPQCLNVPEDVAKTIRDKMISREKQKEGRLNLDVIDSCNMPCSSESLQFDQENFAEVMQGKGSSEDFNQAERQSNTLNTVCNTTHPPQNSNNYQGLQENGLYSSKNKSEKQTERYDCWSHWRYVLDGLMHLPGALEGPGIQSCIRDVLLYGSAEFGTVGDKVEMDSNRKVSSDGNIAKCQSVLVDVLKSENFALLCNVLGRTVHQDEQRTKYFDFTMIDSRMKNGDYGRAPLLFKHDLKMVTPLL

SEQ ID NO: 51703 - protein, 382 aa, Oryza sativa
MAEQANQPTVLQKFGGQFHLGSSFSEGVRARNICPSVSSYDRRFTTRSYMTQGLVNGGINVPMMSSSPIFANAPAEKGGKNFMIDFLMGGVSAAVSKTAAAPIERVKLLIQNQDEMIKAGRLSEPYKGIGDCFGRTIKDEGFASLWRGNTANVIRYFPTQALNFAFKDYFKRLFNFKKDKDGYWKWFGGNLASGGAAGASSLFFVYSLDYARTRLANDAKAAKGGGERQFNGLVDVYRKTLKSDGIAGLYRGFNISCVGIIVYRGLYFGMYDSLKPVVLTGSLQDNFFASFALGWLITNGAGLASYPIDTVRRRMMMTSGEAVKYKSSMDAFSQILKNEGAKSLFKGAGANILRAIAGAGVLSGYDQLQILFFGKKYGSGGA

SEQ ID NO: 51704 - protein, 75 aa, Oryza sativa
MRKCAGASNTTASGSVSEAMANWWMLPQKAFWPPAGSMANGEMIRYVLNQLINPWLGPGRESVCRTSFFVLGSCL

SEQ ID NO: 51705 - protein, 83 aa, Oryza sativa
MYVSRFLYCFSAVNFETWHLELIAGLVIIISSSRYILLQTWPDFRYSSETANRQVYTTLQSVFPFCFIFLLMKVCHWQIQFLK

SEQ ID NO: 51706 - protein, 213 aa, Oryza sativa
MGRGYSYSPSPPPRSYRRRASSPIPRDRYGGRGRGLPTSLLVRNLRRDCRPEDLRRPFGQFGRLKDIYIPRDYYSGEPRGFGFVQYYDPDDAADAKYYMDGQVILGREVAVVFAEENRKKPSEMRSRDRISGSRGRSYDQRYSRSPRYSPPPRGRSPYRSPSYSRSPSPRYARRRMRERSYSPVESRSRSRSPVEEGYGGGSTRRERSLSVSE

SEQ ID NO: 51707 - protein, 68 aa, Oryza sativa
MLLASRYRVYVLPVSTKSFLCILQCTVMLFYLICFDFCMYKDCLMITIVYMLYISINNVYQVFPHNLI

SEQ ID NO: 51708 - protein, 418 aa, Oryza sativa
MERRAQPVSAAVAPVTGRRKGAAASRKWMVVPAVGEERRVEFGKHQIMKMTGLPGRDLRVLDPVLSYPSTILGRDRAIVVRLQGVKAIITATEVLVPDHDDVLLASFLLDLRSRLSLPDAAPSTNPAAADRGNGTEQGDQGSVPGLAISGAGNAKIPPFEFKVLEVCLEHACKDLESQTRSLEKEAYPALDKLGSKVSTLNLDRVRNLKSRMVDLSGRVQKIRDELEHLLDDDMDMSEMYLTRKLSFQGLSGSLSRADSHKYASVDHDDDREEEDHDDETESGRESSVYVKPDIEELEMLLEAYFVQIDGTLNTLYHIREYADDTEDYINIMLDEKQNQLLQMGVMLTTATVVVTAGIVVVSLFGMNIHIDLMKDPETPEMVRMSNMHFWETTFGTVAGCIAIYLLAIYAGRKSKILQ

SEQ ID NO: 51709 - protein, 570 aa, Oryza sativa
MEDLLDTEIGKHDYDWLLTPPGSPHAPILEVVEKAPSSDVPKRITTRSSSTTRASRLSIPETENGHSTVPTRPARSNSVSRPSIQSTLISSNNRSSVVNASISSVCSPPTTPSKRTSTLSSSKPSVPASRQVPTRPSTPTKTRPCTPVKPRPSTPVKPRPSTPNKTRPSTPVKTRSSVPNTMSTSTIAKTTSAQNSRPSTPTSRPRIMSNSSSSTSSAASRPSSSSGRTSTISRTSSSTSTVPSVSRSSSRSSTPTRQPITRSSAPLAGHSPSVGRIFGSNNITSIGRPVTSNGRSSAPSSAPSSRPSSPNSRARAPVRPLDIPDFPSETPPNLRTKLPQRPLSAGRARPGVGLGPKSAPNAEQVRSAPVKKMTVPAITRSKFPDAPSRVSSLTNGHRSRQSEGSAVEGQHTKPLRSITGTDNGFGRTISRKSLDMAIKHMDIRQNLGGIRGASLFPPSIRSAGAKVRSARMSDPAHLSLNGDCHFTDNGSINGHFSGDSNGTLSNNGGRAPRAPDRRPRRRRHRRGHHPRQRRGQHSQGAWDVGSGRGGGGDAVRRGGAGQQAGVRADA

SEQ ID NO: 51710 - protein, 402 aa, Oryza sativa
MASAACSSSASALVRLTGPIHLCSAPPRGSARRRHASVRCSFAPVETARIKVVGVGGGGNNAVNRMIGSGLQGIEFYAINTDSQALLNSQAQYPLQIGEQLTRGLGTGGNPNLGEQAAEESKEAIANALKDSDLVFITAGMGGGTGSGAAPVVAQISKEAGYLTVGVVTYPFSFEGRKRSLQALEALEKLERSVDTLIVIPNDRLLDVVDENTPLQDAFLLADDVLRQGVQGISDIITIPGLVNVDFADVKAVMKNSGTAMLGVGVSSSKNRAQEAAEQATLAPLIGSSIEAATGVVYNITGGKDITLQEVNKVSQIVTSLADPSANIIFGAVVDDRYTGEIHVTIIATGFPQSFQKSLLADHKGARIMEAKEKAANLTYKAVAAATVQPAPAATWSRRLFS

SEQ ID NO: 51711 - protein, 167 aa, Oryza sativa
MLQRSTRQRAPGHGRTSSLCRIDATDMGCKLPSNSLAYHPARAVLLILACLLSRCPLIFRRGTHSVVHCNNVTLKYSYMNSEYCKLRLIDLSRGVRIIREGSDYYLIYQGEIQRYLGSRQHVSCDSKDAPAQSSEDEQRQISDRILFFLGDLEAACADAKRVKVRRP

SEQ ID NO: 51712 - protein, 56 aa, Oryza sativa
MSKIYTTFWNTIFFLWISYPKHSHCYLRFQRLEGSFHQLPWFQKFFCHSTFLLWRS

SEQ ID NO: 51713 - protein, 301 aa, Oryza sativa
MYLQQPVNFLFVAPGTSSGPQGPSQIVAAVPVSSSAPHGQTSSANHPSDGNTTSCSVAAQKNSDLSNYSGSAPSLGNVVPEGEIKSSGFASQIKESHELSQGNGNKGNNVNMASSTSSPQLVTVPVGLCLPSMDSSKISADAINSTNSGSMISNGNVSFGLCQSQSTNADPRSTPEGSSIRAAAIAAGARIASPSDAASIIKAAQSKGAIHIRPGEGVPNYLKPLAPQPLSSLPPGSIPNSVHPSSSHAQPGQCSFGDSAAAKDAIFGSTDSSDDDEYDEDDDTDDNDEDEGITGDEVEQE

SEQ ID NO: 51714 - protein, 305 aa, Oryza sativa
MALKTLQVPSSFARPINRSFIGSSSSSSSSSQFSLRPKPASARLAASVAGGRRLECRGGSSLHGCVDEGAAAASRRRQEQAVEIPIVLFPSVVFPGATVQLQAFEFRYRIMVHTLLQEGVTRFGVVYSGGGVGGGVAAGEVGCVAHVVECERLVDGRFFLTCVGGDRFRVVGAVRTKPYVVARVQPLADAPPSQERGGDGGGDMVRHLVERVEEQLKNVAALSDKLGWSRPPLPFRATCSPSSLSFAVAREVVEDREEQQALLRLDDAAARLAREGRYLERRSRYLAAIAAIKDALDGHLYCNDK

SEQ ID NO: 51715 - protein, 339 aa, Oryza sativa; identical to SEQ ID NO: 30393

SEQ ID NO: 51716 - protein, 400 aa, Oryza sativa
MADGEDAAAARRRASVTEYRKKLLNCRELESRVSTVRENLKNAKKDFTKTEDDLKSLQSVGQIIGEVLRPLDNERFIVKASSGPRYVVGCRSKVDKEKLTSGTRVVLDMTTLTIMRTLPREVDPVVYNMLHEDPGNVSYSAVGGLSDQIRELRESIELPLMNPELFLRVGIKPPKGVLLYGPPGTGKTLLARAIASNIDANFLKIVSSAIIDKYIGESARLIREMFGYARDHQPCIIFMDEIDAIGGRRFSEGTSADREIQRTLMDLLNQLDGFDELGKVKMIMATNRPDVLDPALLRPGRLDRKIEIPLPNEQARMEVLKIHAAGIAKHGEIDYEAVVKLAEGFNGADLRNVCTEAGMAAIRAERDYVVHEDFMKAVRKLNDAKKLESSAHYSADFGKE

SEQ ID NO: 51717 - protein, 135 aa, Oryza sativa
MQYGAAAEQAWYMPAAAPAPMVESAVARVERLASESAVVVFSVSSCCMCHAVKRLFCGMGVHPTVHELDLDPRGRELERALARLVGYGGPAAASPPVVPVVFIGGKLVGAMDRVMAAHINGSLVPLLKEAGALWL

SEQ ID NO: 51718 - protein, 310 aa, Oryza sativa
MADDVVEAAASSSPSTQGGGGGGIHVVAKNAMNSSKQFSSALAPVAVLLAVAVGAVSLLPSLAQAVWEVPHLFLLGLVVSYGVFAQKISTGGSGGGGGGGGGDDGARAWNSRYLSDDPLVVVADNAASDDGGGGGASGRPLSLPVRRLKPPPPAPTMPRIESEAGDASDDGIGAETDSSASTAGFWGAAPSPPSVLDAVCRSRKPAATATAAAPSAMSKGFPSYISPAPRCDQSFSDDGEVTDWDDDDDEKADVQDEMAASPQRSYVDHDDYNGDGDELSELAAEVEDEVDRKADEFIAKFREQIRLQRL

SEQ ID NO: 51719 - protein, 526 aa, Oryza sativa
MGRSMLPEQQEDVSRKSKKEKKSKKDKKRKLEAEAEVVVVEAAAATSTDEATKSSKKKRAKGDLGQGEEAENGGGKVVAVTGKGSADAKYAPLSSFAATALPPQVLDCCKGFERPSPIQAYAWPYLLDGRDFIGIAATGSGKTIAFGVPALMHVRRKMGEKSAKKGVPRVLVLSPTRELAQQIADVLCEAGAPCGISSVCLYGGTSKGPQISALKSGVDIVIGTPGRMKDLIEMGICRLNDVSFVVLDEADRMLDMGFEPEVRAILSQTASVRQTVMFSATWPPAVHQLAQEFMDPNPIKVVIGSEDLAANHDVMQIVEVLDDRSRDSRLVALLDKYHKAQRNRVLVFVLYKREATRVETMLQRRGWSAVSVHGDKAQHDRTKALSLFKEGSCPLMIATDVASRGLDIPDVEVVINYSYPLTTEDYVHRIGRTGRAGKKGVAHTFFTQENKGLAVNLSMFCGRLVRSFLLHLQNLAHTSRKRNRKYMDLVSKKSKQMLLNQQRLRLVILMRTSNICWSFLRCVLKF

SEQ ID NO: 51720 - protein, 279 aa, Oryza sativa
MLHHYYSGGAGHHQDVAAAGSPGDMASSTFSLFFPMSNGQCWPPSTVEESAAYDDHSTVTTSPSSPSSSSTGSVDCTLSLGTPSSRRAEPVAAAAPAANHGAPVPAHYPSLSAATVSWDATAESYYCGQQGRPATGAAKCAAGAGHDALLDRRCANCGTASTPLWRNGPRGPKSLCNACGIRYKKEERRAAATTTTADGAAGCGFITAQRGRGSTAAKAAPAVTTCGEETSPYVVGGGGGGGEVADAAYLAWRLNVVPPAATATAFSVWPERASLYHYN

SEQ ID NO: 51721 - protein, 402 aa, Oryza sativa
MGAADKWLLPLVSVSFVSLLLFLSALSGFSASSSLFARLPPPSYVRRGAAAPPSFAYVLSGGRGEGRKLLRLLLAVYHPRNRYLLHLSADAPESERVELAAAVSRAAPAVRAFGNVDVVGRPTAGTPMGSSGLAATLRAAAALLRLDSEWDWFVTLNAADYPLVTQDDLIHVFSSVPRHLNFIDHTSDIGWKETQRVQPIIVDAGIYLAGRNQFFQATEKRDTPDGFKFFTGSPWVILNRRFIEYCIFGWENLPRTLLMYFTNVMLPQEGYFHSVVCNSDFRNSTVNSDMRYMEWDDPPQMEPHFLNTTHYDEIVESGVPFARKFRENEPLLDKIDERVLHRWRHRPVPGAWCTGRKRWFNDPCSQWSNVNIVRPGPQAEKFRKHMNQIIEESASGNNSCKQ

SEQ ID NO: 51722 - protein, 150 aa, Oryza sativa; identical to SEQ ID NO: 35379

SEQ ID NO: 51723 - protein, 651 aa, Oryza sativa
MGSSSLLLFPSSSSSATHSSYSPSSSSHAITSLLPPLPSDHHLLLYLDHQEQHHLAAAMVRKRPASDMDLPPPRRHVTSDLSDVTAAAAPSSASAQLPALPTQLPAFHHTDMDLAAPAPPPPQQQVAAGEGGPPSTAWVDGIIRDIIASSGAAVSVAQLIHNVREIIRPCNPDLASILELRLRSLLTSDPAPPPPPPPSHPALLPPDATAPPPPPTSVAALPPPPPPQPDKRRREPQCQEQEPNQPQSPKPPTAEETAAAAAAAKERKEEQRRKQRDEEGLHLLTLLLQCAESVNADNLDEAHRALLEIAELATPFGTSTQRVAAYFAEAMSARLVSSCLGLYAPLPNPSPAAARLHGRVAAAFQVFNGISPFVKFSHFTANQAIQEAFEREERVHIIDLDIMQGLQWPGLFHILASRPGGPPRVRLTGLGASMEALEATGKRLSDFADTLGLPFEFCPVADKAGNLDPEKLGVTRREAVAVHWLRHSLYDVTGSDSNTLWLIQRLAPKVVTMVEQDLSHSGSFLARFVEAIHYYSALFDSLDASYSEDSPERHVVEQQLLSREIRNVLAVGGPARTGDVKFGSWREKLAQSGFRVSSLAGSAAAQAVLLLGMFPSDGYTLIEENGALKLGWKDLCLLTASAWRPIQASGR

SEQ ID NO: 51724 - protein, 585 aa, Oryza sativa
MGFDVGVVAFNPEGWGPPDTAPAPASLGGGAAAASIPFAPFSRSDKLGRIADWTRNPAGPAALAAASRDSVFDFTSVDDSLAAAAEDSSFRLVDAKPPPRHPRFGPKWRFNQRPQLPQRRDEEVEARRREAEKERARRERHFQNNRSHHHPGFRGNQSSSAKSSVDIQPDWTMREQIPFANFTKLSFSVADQPEDLLLCGAVEYYDRALDRVNPKAARRLERFKSRNFFKVTTTDDPVIRRLAEEDKATVFATDAILAALMCTPRSIHSWDIVVQRVGNKLFFDKRDGSQLDLLSVNETAQEQLPENKDDINSAHSLAVEATYINQNFSQQVLLRDGEKVTFDEPNPFASEGEEAASVGYRYRRWKLDDEISIVARCEVHAVNADPGGGRQFLTLNALNEFDPKITGVDWRQKLETQRGAVLATELKNNANKLARWTCQALLAGADMMKLGYVSRVHPRDHYNHAILTVMGYKPRDFATQINLNTSNMWGIVKSIVDICMKFEEGKYVLVKDPAKPQVRIYEVPSDAFENDYVEEPLPEEEQVRPPSDDVDATAEEMDAAAEAEANNAAASAGGEGEKSAEAAAA

SEQ ID NO: 51725 - protein, 208 aa, Oryza sativa
MEDGTELRFDHGAPYFTVSNDEVARVVSGWEARGLVAEWKAMFACFDREAGKFTDFEKEGTIKKYVGVPGMNSICKSLCLEDGVVAKFGVTIGRMDWIQDRSSWLLASLDGRDLGHFDYVVATDKNIASPRFSGLTGRPPPLDLSLLPQLSMMIQDIPVRPCFALMLAFSEPLTKVPVQGFSFNNSDYLSWAFCDSSKPGRAHVPLNS

SEQ ID NO: 51726 - protein, 544 aa, Oryza sativa; identical to SEQ ID NO: 42954

SEQ ID NO: 51727 - protein, 233 aa, Oryza sativa
MARSPEPPRYYAAAGYHRPSPFSSVAASCVVAALFILLAAGGAAAALFLLYRPQAPAIAVTAVQLPSFASRNGTVAFTFQQLASVRNPNRSPLAHYDSSLRVAYAGGEVGSMYIPAGQIDGGRTQYMATSFTVPAFAVTSSATAAASSSPAQTITVPASGPSPAAVGAVALQQEQPPPQQQQVAALPVMEVDSLLVVKGKVTILRVFTHHVVAAKVCRIGVSPADGRVLGFRC

SEQ ID NO: 51728 - protein, 244 aa, Oryza sativa
MASEAAKVVVPESVLRKRKREEVWAAASKEKAVAEKKKSIESRKLIFSRAKQYAEEYEAQEKELVQLKREARMKGGFYVSPEEKLLFVVRIRGINAMHPKTRKILQLLRLRQIFNGVFLKVNKATINMLRRVEPYVAYGYPNLKSVRELIYKRGYGKLNKQRIPLTNNKVIEEGLGKHDIICIEDLVHEIMTVGPHFKEANNFLWPFKLKAPLGGLKKKRNHYVEGGDAGNRENYINELIRRMN

SEQ ID NO: 51729 - protein, 291 aa, Oryza sativa
MRPIRLPEPPGVGGMETPEIFTGAAAATVVVRRAVVIGNGSPGAENQCLGLVRALGLADHLTLYRVTRPQGGINEWLHFLPVSLHKLIDQVLRQFFRNTRLAPVVEGRKHYRVPNGGSVGVGLSSVLEADAKKIVAVARDTFEKEGPTLIVACGWDTISYSSSIRHLASGNVFVIQIQHPRSRLDRFDLVVTPRHDYYALIAGGQEEIPRLFRRWITPQEPPGRNVVLTVGALHQADSAALRLAAIAWHDELAPLPKPLLIVNIGGPTSRSPYLSHVAHSIVSVFGYVVLL

SEQ ID NO: 51730 - protein, 92 aa, Oryza sativa
MGEFSKESCPSVKNILLLDSEGKRVAVKYFSDDWSSNASKLAFEKSVFTKTLKTNARSEGISFLALLHVLSLHTMAHAFATLTIWHITHSAS

SEQ ID NO: 51731 - protein, 858 aa, Oryza sativa
MQQVEGRNCLPAEVRIGLETLKRRRLERMRLTAQNNAGDGPPVPARSGGDALRTPANCGVRLHANNGTALPSRTTQNKDPFAKRRVDKFDMSSLEWIDKIEECPVYYPTKEEFEDPIGYIQKIAPVASKYGICKIVSPVSASVPAGVVLMKEQPGFKFMTRVQPLRLAKWAEDDTVTFFMSERKYTFRDYEKMANKVFAKKYSSASCLPAKYVEEEFWREIAFGKMDFVEYACDVDGSAFSSSPHDQLGKSNWNLKNFSRLSNSVLRLLQTPIPGVTDPMLYIGMLFSMFAWHVEDHYLYSINYHHCGAFKTWYGIPGDAAPGFEKVASQFVYNKDILVGEGEDAAFDVLLGKTTMFPPNVLLDHNVPVYKAVQKPGEFVITFPRSYHAGFSHGFNCGEAVNFAISDWFPLGSVASRRYALLNRTPLLAHEELLCRSAVLLSHKLLNSDPKSLNKSEHPHSQRCLKSCFVQLMRFQRNTRGLLAKMGSQIHYKPKTYPNLSCSMCRRDCYITHVLCGCNFDPVCLHHEQELRSCPCKSNQVVYVREDIQELEALSRKFEKDICLDKEISGFDSYKQAEKNEPFFEITRNLRNTEVNLIEDAFSGATAADAAKSSPATSTLTSFAQHDVPVLAEAIVCANQADQLYSTTEQTISSPLVKGTDAVGANSSSMADANNGTGSCNASAVEYSGNSDSESEIFRVKRRSGVSVKPASDAKTSNLSDQQVLRRLKKVRPEIQQHNKRPEDYGHCSVPSGRMSMKNLNSSSSCGEEHWRMKRRQLETQQDESSYSAKQKSYSYPSTSYSFRGEFVEMSRDAAAEVRPKRLKIRLPSSSTNRVVEQGSSGQRFTRDDKSLGCWPAI

SEQ ID NO: 51732 - protein, 453 aa, Oryza sativa; identical to SEQ ID NO: 42095

SEQ ID NO: 51733 - protein, 746 aa, Oryza sativa
MNMSPRIPVVDLEDGWRDVLAGVAKLKCILDGSNVVHFVPDEYMHLYTTVYNMCTQKPPNDYSQVLYDRYKQALDDHIESVVLPSLNEKHGVFLLREIVQRWEKHKLMVRWLRRFFDYLDRYYVTRRSLDSLKDLGWSSFRDLVFDKLKSTVATIMIGMIDDEREGNLIDRPLLKNALDIYVEIGDSQLNYYSDDFEQSFLNGTTDYYSKKAQTWILENSCTEYMLKAEECLQKEKDRVANYLHSTTEPKLFAAALFELIDRRAEEILNKENSGCKVLLCDEKTEDLARMFRLFSRITDGLLPVSKIFKEHVIAEGMSLLKHATDAANSRKDEKKGVVVGLPEQDFVRSVIELHDKYMAYVTNCFQSNSVFHKALKEAFEVICNKDVVGCSSAELFAAYCDSILKRGGSEKLSDEAIDESLEKVVKLLTYLSDKDLFVEFHRKKLGRRLLFDKNTNDEHERILLSKLKQFFGGQFTSKMEGMLKDITLAKEHQSSFEEYVSNNPESNPLIDLNVTVLTTGYWPTYKNSDINLPLEMVKCVEVFKEYYRSDKQHRKLTWIFSLGNCVVIGNFDAKPVEFVLNTYQAALLLLFNEADKLSYSDIVSQLKLSDDDAVRLLHSLSCAKYKILNKEPSNRVISPEDEFEFNSKFTDRMRRIKVPLPQIDEKKKVVDDVNKDRRFAIDASLVRIMKSRKVLGHQQLVAECVEQLSRMFKPDIKIIKRRIEDLISREYLERDSENAQTYKYLA

SEQ ID NO: 51734 - protein, 573 aa, Oryza sativa
MDLLQSSYTPDDEDDDEQQPLSSPDASPLRLPAKSAAPAVDDTALALSAAAASTSRPLDPSLHLVPFNPTADQLWAPVLGPQHPHAPISSASGNRNHKLGHVEDAAVLPFLFDEQYNTFHRFGYAADPSGLHIVGDAQPSAEPDTVYNLAPSEHKRRRLQSKDEEGANQEPLPPEAKNPASDEWILRNKQSPWAGKKEAPPAELTEEQRQYAEAHAAKKAEKEARGEGKGEKSDMVAKSTFHGKEERDYQGRSWITPPKDAKASNERCYIPKRCVHEWVGHTKGVSAIRFFPKYGHLLLSASMDCKIKIWDVLESRTCMRTYMGHSKAVRDISFSNDGTKFLSAGYDRNIQYWDTETGQVISTFSTGKVPYVVKLNPDEDKQHVLLAGMSDKKIVQWDMKSGQITQEYDQHLGAVNTITFVDNNRRFVTSSDDKSLRVWEFGIPVVIKYISEPHMHSMPSISLHPNSNWLAAQSLDNQILIYSTKERFQLNKKKRFAGHIVAGYACQVNFSPDGRFVMSGDGEGSCWFWDWKSCRRFKTLKCHNGVCIGCEWHPLETSKVATCGWDGVIKYWD

SEQ ID NO: 51735 - protein, 628 aa, Oryza sativa
MDFRKVLDQTVREIRREVNLKVLKVPEIEQKVLDATSDEPWGPHGSDLADIARATKSYGDSEIIMNVLWQRLGNTLANWRHVYKALAVIEYLLANGTERAADGIVDNSSRIAKLTRFEYLEPNGKDVGLNVRKKAEAVLAILDDREKLQEVREKAAVTRDKYFGLSSTGITHKSSAASFGSGSYSSGSHYGSTGGSREVGSFKDIHTGTEWKKNKKETVSNYSSNREGSKEITNSATSYKSKKSERHGRRNQNSLTLHSKLSANISTTSEAPSSKKGENEDDDDFNPRGFSTSTGTGTTRSNHLDLFGPSLMDDLVDSTTSTSTATPNFSTPAVPEVDLFADAAFQSANAPLEAATVSHTQDKIDLFAGRLSSADSFTSDTEFSVRGSPNKSSEKKMSSVVHPSTSAFDPFKQSFATSFPSDSEFSVHDPTSKSSQGKTPTPEHSSTAAFDPFAAIPLKSFDGSESFGTFSSNTASNITELPRDSSGGPKSSDHGPLEDANFDAFTSHLGSSTTSATESMNKPIKKLGQDSMSASKSVAKKETFQVKSGIWADSLSRGLIDLNITSSQKKVDLSDVGIVGPLSGGSEDKGPGATMGTAPGLVSSSFPSKTETSSGSGHFQHQQFGSFK

SEQ ID NO: 51736 - protein, 549 aa, Oryza sativa
MSLLLKKVCELLMAELNLDKKLTKSIGDLRTELTMMHGVVRWIGEVPPEQLDGQVRLWARQVREISYDMEDAVDAYLVRVADGEPEAAKQNRRLSESLKRAARLFTKGRALHQIAGAVEEAQGRGKSLSDLRQKYGGLKLHGAGEGCAAIDPRLTALYVEVAKLVSVDKARDELSELLLSSSGGSMQQQQQLRTVSVFGFGGLGKTTLARAVYESIREQFDCAAFVSVSRNPNITKIFRKLLFELDREQYSDINDLDRDDVQLIDELRSFLQSRRYLIVIDDLWDENVWKFIKCVLYENNLSSRIITTTRKINVSKACCSSGDDKIYEMKRLSDDDSKKLLYTRIFTHENNCPHELKQVSTDILKKCDGVPLAIITIASLLAGNNNRPIKTKDQWHNLLNSIGRGLTVGEGVDDMQKILSFSYYDLPPHLKTCLLYLSIFPEDYEIERDRLIWRWIAEDFVQCENNWDNLFEVGESYFNELINRSMVEPVGIDFEGRAQACRVHDMMLDFILSLSKEENFITIIDDSEHRTSWQHKNDNKIRRLAIQNT

SEQ ID NO: 51737 - protein, 257 aa, Oryza sativa
MAASCHEVEVPGKPTETGTALLEAATGSIQGFGPVNQIHQHLCAFHFYADDMTRQVEAHHFCAHLNEDMRQCLIFDGPDAGARLIGVEYIVAEPLFLTLPDDEKPLWHTHEFEVKGGVLFMPGVPGVVERRDLERVCKTYGKTIHFWQVDRGDALPLGLPQIMMALTRDGQLRQELAKCTCKIIHVQLCFFLQSIVSRHSLTTCVGDWCVHCRCGGEVQRVVRQGEGEPSVHERPGSRHPPAGECRRQGLEDRSPGG

SEQ ID NO: 51738 - protein, 307 aa, Oryza sativa
MASRDFLGVFGGGGGERRAANGSGSAVGGESDEIELSLGLSLGGRFGTDMSPDAKRARLARSSSIASVCSVSAADGDPSPAAPLPLLRTSSLPTETEEERWRRREMQNRRRLEARRKRLERRISVGSSSVPNKPGREDGGDGAVNRLQLRRSIGSQGSSSANPQDQGPDGSAICQSTEARSPSTSDDTNQNSALPPTASTGKPLNGTVTQQSPLRTLGSLTMRTSSTGDIGKIMMDMPMVSSKVEGPNGRKIDGFLYKYRKGEDVSIMCVCHGKFHSPAEFVKHAGGGDVSNPLRHIVVNPSPSVFL

SEQ ID NO: 51739 - protein, 97 aa, Oryza sativa
MTHVCIIHLEWRVRGTDMNKCGDSLASRNIKALPLVVGGHLYLVFAVCILCNGRMEQSAKSVLQAVVANTACCCFANSQYQNNSFNTKSTLFFCPFL

SEQ ID NO: 51740 - protein, 1207 aa, Oryza sativa
MGRKKNVAIDDDEYSFDALAADEDQGEDDDEAPAPAPAPVEPDAAAKSDAEDDDLDFDFSKAKKKKKKKDKGARPVPLEHDDLDLDKPAPPPPAAAADEADDDEAAAAAASKKPQKKKKKKGGFTVDNEDIDKLLAEIDDTSPPTEEAEPVEEVPAPDADDALGKKSKKKKKKGGFTVDDEDVDKILAEFEDQPPPVDDPEPEPEAVKDVGNVAASTSVDDAEGKKSKKKKKKSGRTAQEEEDLDKLLAELGEGPTPAEKEKEVLPQAPPAAAMVKEDTETAEDGKAGEGEVESAAAKKKKKKKEKEKEKKAAAKEADAKKEEEKAVEAPKGKVDMKKLPKHVREMQEALARRQEAEERKKREEEERLRKEEEERLKKEEEERKAEEAKRRKKEREKEKLLKKKQEGKLLTGKQKEEAKRLEAMRRQFLEQSELQVADGAVPETKKRPIYDSKKKKGQQKTLETAKVVEEQPQEVNETINDEEEYVLVDQESQLQVEESEKTEPDQDVEELKPEEEEDEDEWDAKSWDDIDVNLPKTSAFEEEEANPVAKKVAEPVQKQENSKAQSTVATVKKVANSNKGETEDGESSSANARRNRGASKKGPIKEDETKNGSDLRSPICCILGHVDTGKTKLLDCIRRTNVQEGEAGGITQQIGATYFPTENIRERTKELKADATLKVPGLLVIDTPGHESFSNLRSRGSSLCDIAILVVDIMHGLEPQTIESLNLLKSRDAVFIVALNKVDRLYGWKKCTNAPIGKALRQQNEDVKREFNMRLTDIVTQFKMQGVNTALYYKNKEMEDTYNIVPTSAISGEGIPDLLLLLVQWAQKTMEERLTFVDEVQCTVLEVKVVEGHGTTVDVVLVNGILHEGDQIVVCGMQGPIVTTVRALLTPHPMRELRVKGTYQHHKKIRAAQGAKISAQGLEHAIAGTALYVLKPDDDLDRLKDAVMEEMTRVRNRIDKSGEGVYVQASTLGSLEALTEFLKSPAVNIPFCDFSIGPVHKKDVMKASVMLERKKEYATILAFDVKVMPDARDLAEESGVRIFVADIIYHLFDQFTAYIKNLREEKKKESAEEAVFPCVLKIMPNCVFNKKDPIVLGVDVLEGIAKVGTPLCIPTKEYIDIGKIASIEINHKQVDMATKGQKVAIKIIGSNPDEQQKSFGRHFDMEDELVSRITRRSIDLLKENYRDDLSMDDWKLVVKLKSILKIP

SEQ ID NO: 51741 - protein, 148 aa, Oryza sativa
MLGLPSIDGRFRVTAGGGEVGPALQRRSTSPQPAAPSAPSLCRSITVPTSKANRLRSLAPPLIQGSSTLQAVILPANKDKNSGCRRKIQADRTPCQLLLFAAQSRKFLADSTKFLFGIGNFFHNDYPLQIVQIYTPWVNLRTVVESDV

SEQ ID NO: 51742 - protein, 441 aa, Oryza sativa
MNIILELNHLKQVSLPTRPVVCKGLFIVIALIVLRAIVSPFLAVNPSEKEGFYDPTADLLPGIRRGKFIEVPQIIWGLNNQKIAFARACLTARFLNRSLLMPSLSASLFYKEVDLLRPITFDKVFDFTKFNARCQGFVRLARYSEVSNQTKPFKLQKGSGRRWTVEKDLDQLLQYRRGEADDSEVIEIIGKHPFLWPDHWPVKDYARIFDCLALVPEIETEVVKAISKIREAGIKARHEAGISHNKHVKDGTMNPPVPYIAVHMRIEKDWMIHCKKWEQRSNSKEICSSKEEIIHKVSQITDLRRPVVVYLAVADSLLEDDSITSGWRVGMVAFEKKRLGVTDIYNRQPYLIKSAIDFEVCARADVFVGNSFSTFSNLVVLSRTQRLYNMGEASSCGENVGLSSYAYNVIGDDGGPQRWMTDMSDTSLQNLSYGTNNISCH

SEQ ID NO: 51743 - protein, 476 aa, Oryza sativa
MPPDVEVIRHEHIDHPSSTRDRSVVVSSNSLSNTVSAYTDMKNTSSLCLLLLVVLCSLTCNSGQAQVLFQGFNWESWKQQGGWYNMLKGQVDDIAKAGVTHVWLPPPSHSVAPQGYMPGRLYDLDASKYGTAAELKSLIAAFHGKGVQCVADVVINHRCAEKKDARGVYCVFEGGTPDDRLDWGPGMICSDDTQYSDGTGHRDTGEGFGAAPDIDHLNPRVQRELTDWLNWLKSDVGFDGWRLDFAKGYSTDIAKMYVESCKPGFVVAEIWNSLSYNGDGKPAANQDQGRQELVNWVNAVGGPAMTFDFTTKGLLQAGVQGELWRLRDGNGKAAGMIGWLPEKAVTFVDNHDTGSTQKLWPFPSDKVMQGYAYILTHPGVPCIFYDHMFDWNLKQEITALAAIRERNGINAGSKLRIVVADADAYVAVVDEKVMVKIGTRYDVGNAVPSDFHQTVHGKDYSVWEKGSLRVPAGRHL

SEQ ID NO: 51744 - protein, 155 aa, Oryza sativa; identical to SEQ ID NO: 30723

SEQ ID NO: 51745 - protein, 133 aa, Oryza sativa
MSSSKTRLGLQNSCMCFFFFILNIALCNQYHGFKLIHIYIGLDLVRFRAGDQKRDYEWIQRFSVEESRTHCRLLSLIVAAASNSKFIFENNHDTSTRRTQKNHEILVSEQYHSGSTVYFLFFSNIISPVTDLY

SEQ ID NO: 51746 - protein, 396 aa, Oryza sativa
MAPLRGAKRRKRQPEKALPAAGQAMPAPAPGGDWWDGFARRLAAGQFSKDCQNFESVFKMSRKTFDYLCSLISGDFTRKTQSFRNFRFGDKAILGVEDQVGVALLRLTTGESLLSIGNRFGMNHSAISNITWKFIEALEERAANHLKWPTPEEMATVKSKFEKIQGLPNCCGAIDTTHILMCSSAQPNSNVWLDGENRNSMVLQAIVDADMRFRDVVSGWPGSLNDSCILRTSGFYRLCEKGARLDGQTELPGEPAGSVVRDYILGDASYPLLPWLMTPYREKDLSPAKADFNKRHAATIMVVQGALAKLKERWQVLKGELWRPDKHRLPRIIYVCCLLTNIMIDLEDAARGGMPPSHNHDDGYRQQFSDVADVGAAALRDQLCQYVSRIGSSLPA

SEQ ID NO: 51747 - protein, 50 aa, Oryza sativa
MLLGVSCICGSLFNEPSSSFGESDGSGTNTIAVTNHTIFRRAAQSISYNT

SEQ ID NO: 51748 - protein, 479 aa, Oryza sativa
MASPAVATRHPSPSFFGPDPRRRRGHSPSNLGFRRSGLQLKVTAIFGWIKGDTRTRELNPSAESYTLTGSASEADTKPREVSVAVVSSIMDIPSADWDACAVDSVDPDNFNPFLTHAFLSSLEESGSAVKETGWLPLHVVARDENETVVGVVPLYLKSHSRGEFVFDQSWAEAYYSYGLEYYPKLQSCVPFTPVTGQRILVRDTPYRDQVFEALVKELKSLTTKLKVSSLHITFPSEGEFSKLKDSEFLQRIGMQYHWRNRDYRSFDEFLMDLKQPKRKNIRQERKKIPAQNLKMKRLRGDEIKSEHWDTFYKFYRNTTDNHWGRPYLTREFFHRLGEKMGDKVMLIVAEHDDKHVAGALNLIGGDTLFGRLWGCLPDAYFPNLHFEACYYQAIEAAIELNLSKVEAGAQGEHKIQRGYLPVTTYSCHYFLDPGFGAAIGNYLVHETAQVKHVIKVLHDSGPYKEDILNEFLLTQGDGV

SEQ ID NO: 51749 - protein, 152 aa, Oryza sativa
MATDPRGRRPRHHAAVNEVLSTLAAANSTLADVQRRLDADFRAAYPDHANPVKLVARLKRIQEEVAAVKGLCRDLLTQKQELIDAMRTSLAVQRSAVQRLLASSGLPPMSEEDAATDANLNQIIDEWTAHVGPDTGDDKDEDTNQIFFAAVV

SEQ ID NO: 51750 - protein, 466 aa, Oryza sativa
MAARAAAAAFLLLLIVGAATAAPDMSIISYNAEHGARWLEEGPTEAEARAAYDLWLAENGGGSPNALGGEHERRFLVFWDNLKFVDAHNARADERGGFRLGMNRFADLTNEEFRATFLGAKVAERSRAAGERYRHDGVEELPESVDWREKGAVAPVKNQGQCGSCWAFSAVSTVESINQLVTGEMITLSEQELVECSTNGQNSGCNGGLMDDAFDFIIKNGGIDTEDDYPYKAVDGKCDINRENAKVVSIDGFEDVPQNDEKSLQKAVAHQPVSVAIEAGGREFQLYHSGVFSGRCGTSLDHGVVAVGYGTDNGKDYWIVRNSWGPKWGESGYVRMERNINVTTGKCGIAMMASYPTKSGANPPKPSPTPPTPPTPPPPSAPDHVCDDNFSCPAGSTCCCAFGFRNLCLVSGCCPVEGATCCKDHASCCPPDYPVCNTRAGTCSASKNSPLSVKALKRTLAKLNTA

SEQ ID NO: 51751 - protein, 350 aa, Oryza sativa
MASFSTVFLLLSLVCLASPCAAQRVICEAPPCTTASQVKTTPTNRASHVRLPEGVTGAESLAFDSSNRGPFTGVSDGRVLKWGGDSAGWTTFAYNRNYRSNPTCASSSEETESTCGRPLGLAFHLKTGILYFADAYKGLMRVGPRGGQADVLATEADGVPFNYLNGVDVDQDTGDVYFTDSSTTITRRYQENIMRNRDATARLMKYDAKTKQVTVLKDRLPYANGVAVSHDGRYLVVAHTGPAQVFRYWLKGAKAGQYELFADLPGYPDNVRRDAKGGYWVGLNREKITFNVPAAASPAKHLVGVRLNGDGVEVEELTAASRAVTLSEVVERDRKLWLGSVDLDYVGLLQ

SEQ ID NO: 51752 - protein, 466 aa, Oryza sativa; identical to SEQ ID NO: 36945

SEQ ID NO: 51753 - protein, 596 aa, Oryza sativa
MRRHGWQLPYHPLQVVAIAVFLALGFAFYVFFVPFVGRSELQYVLMGLYTPLITCVVTLYIWCAATNPGDPGIFKAKKHPKLGKDGKQIQEISEHESCQGGKSFSDGCSIVNNSERLSNMFEGNDSSSRPGLHGVLCLICNPFFCLWKRFFHSDDQSSEQHMSEEGMFFCSLCEVEVLQHSKHCRVCDKCVDGFDHHCRWLNNCIGKRNYKRFFILMASAVLLLIMQWLVGILVLILCLLKRGEFSGQMISKLGSSFSTAAFVIVVMTCTLLAMLATIPLAQLFCFHVLLIKKGISTYDYIVALREQEEQQEVTEHQSPQMSIISSVTGFSTTSSFAPLQRGSWCTPPRLFLEDQHVIPPEMPQNSSSKKAKHADVTKRKPSGPVKISPWTLARLNAEEVSKAAAEAKKKSKVLQPIARHEDPKHDKRRPDKRGQFLPELSVDHTTRTSDSCTDSNCSDMDMETCGSLAPLQHEVRSVFQPSIASSIRNLTSSPQSSLDSPDLHPFRVSMSGADELRSFMSLAASESTAPKSIALSRSTSGGYEASGGEESDRIPSKIVHRSSNWANAILNSGRREMAADLNLPTSERFLTNTRFS

SEQ ID NO: 51754 - protein, 640 aa, Oryza sativa
MKGVDDAFLGVGDKPGLDIWCIMGSNLIAIEKSLHGKFYTGNTYIILSTVELKSGVRQHNVHYWVGEEAKEEDCLTASDKAIELDVALGSNTVQYRETQGEESDKFLSYFKPCIIPIQGSLSSHMRIYGDKSKDTTMFRCEGEHVARVTEVPFSRSSLDHKAVFVVDTESKIFLFSGCNSSMQTRAKALDVVKHLKENRHCGRCEIATIEDGKLVGDSDAGDFWNLFGGYAPIPRDVQDTVMTELMTTSSKKLFWINKRNLVPVETNLLEREMLNSDRNYILDCGTEVFLWMGMTTLVSERRTSVTALEDYVRCEGRQSNARSVILTEGHETVEFKMHFQHWPKNAVPKLYEAGREKVAAIFKHQGYDVTEIPEDKPRHFISCNGSLKVWLVDNGSVTLLCTEEQEQLYNGDCYIIRYSYIEDGKDYHLFFAWSGLNSINEDRVAAASLMSGMIDSVKGHAVVAQVFEGREPEMFFLVFKSLIIFKGGRSMAYKNFVSQRSDANGWYQKNGVALFRVQGLKHDCIRAIQVDLAASSLNSSHCYILQAGGSFFTWLGSLSSPSDHNLLDRMMDKLCPLKQSLLVREGSEPDRFWEALGGRSEYLREKQVKDWPADPHLYTCHFEQGPSRQRRYSASLRMTW

SEQ ID NO: 51755 - protein, 81 aa, Oryza sativa; identical to SEQ ID NO: 44444

SEQ ID NO: 51756 - protein, 149 aa, Oryza sativa
MSPLYSHHLNDQLQMSYVAGTNQSAIPLGGMARYSVGMDSGIHGATRTESRTLYVEGLPSNCTKREVAHIFRPFSGFREVRLVNKESRHAGSCNLLCFVDFSSPPEARAALETLQGYKFDEHDHESSNLRTQFSLTPRRRSIGGPCVRN

SEQ ID NO: 51757 - protein, 337 aa, Oryza sativa
MARHAKTDSDVTSLAPSSPPRSPRRSAYYVLSPAASHPDVVVASGGAGGGGGGVAAAEKMSFAGSTPAESPLHYHYHHSGAAVHHSRESSTGRLLFSDQLRSGAAAGVPWRRLAQGSGAGSVGDDDDDEGGLAGAASQWRCYALGAFAFVAVFAFFLLVLWGASKSYKPHVVVKSVVFETYHIQGGTDRTGVPTKMMSVNATVRLRFRNRGTFFSLHVTSTPFHLFYDDLTVATGHMAEFYQPRRSGRVVTVSVVGKQVPLYGAGAELHSKPNNGRLGPAVVPVRMAFVLRARAHILGLLVRSKFYRRVLCRLDVREASLGKPVHGVAADCEYHDGR

SEQ ID NO: 51758 - protein, 456 aa, Oryza sativa
MVAKEHKVTIMDHEKGKVTEQVVDDPMQIPRSMMEGWHPQQIDQLPDSFTGGWVGFFSYDTVRYVEKKKLPFSGAPQDDRNLPDVHLGLYDDVLVFDNVEKKVYVIHWVNLDRHATTEDAFQDGKSRLNLLLSKVHNSNVPKLSPGFVKLHTRQFGTPLNKSTMTSDEYKNAVMQAKEHIMAGDIFQIVLSQRFERRTYANPFEVYRALRIVNPSPYMAYVQARGCVLVASSPEILTRVRKGKIINRPLAGTVRRGKTEKEDEMQEQQLLSDEKQCAEHIMLVDLGRNDVGKVSKPGSVKVEKLMNIERYSHVMHISSTVSGELDDHLQSWDALRAALPVGTVSGAPKVKAMELIDELEVTRRGPYSGGLGGISFDGDMLIALALRTIVFSTAPSHNTMYSYKDTERRREWVAHLQAGAGIVADSSPDDEQRECENKAAALARAIDLAESAFVDKE

SEQ ID NO: 51759 - protein, 47 aa, Oryza sativa
MLNVAAPVTRRMFSTCPVKRTLSCGTLCSQVLFRMNCQRKLLECFSI

SEQ ID NO: 51760 - protein, 344 aa, Oryza sativa
MESLPVPSVQSMVAADGGAHVPPRYIRPRDEAVATDGETEIPVIDFQRLQLGHDEEMARLDRACQDWGFFQLINHSVPEDVVDGMKANARGFFELPAETKKQFAQERGQLDGYGQLFVVSEDQKLDWADILFLNTLPVQNRNFRFWPNQLAKFRSALDKYSAAVKSIVDFLLVTVANNLGVDPEVIANKCGTDGIQAVRMNYYPPCVQADKVIGFSPHSDSDLLTLVLQVNEVDGLQIKRNETWFPVRPLEGAFIVNVGDILQIFTNGRYKSAEHRAVVDMKKERLSIAAFHSPSVHAVIGPLKEMVAHEHEAVYRSIGHDEFMKLFFSSKLEGKSFLDRMKKL

SEQ ID NO: 51761 - protein, 725 aa, Oryza sativa
MEAALKTYFGFSGFRSYQREIIQKVLEGRDCLVVMATGSGKSICYQIPPLVTKKTAVVVSPLLSLMQDQVMSLKQHGVKSEYLGSTQTDISVSGQAEKGAFDVLYMTPEKAVSLPSRFWSNLQAAGICLLAVDEAHCISEWGHDFRTEYKQLHMLRDLLVGVPFVALTATATQRVRGDIATSLTLRIPHIVVGSFDRPNLFYGVKSCNRSMAFINELVKDVSKNCTVGGSTIIYCTTIRETEQVHEALVAAGIKSSIYHGRMGNKAREESHRSFVRDEVLVMVATIAFGMGIDKPDVRCVIHYGCPKSLESYYQESGRCGRDGLPSVCWLYYQRSDFMKSDFYCAEAKSQTHRKAIMESFMAAQKYCLLATCHRKFLLQYFGEDRTTDCGNCENCTRTKNERDLSKESFLLLSCIKSCGGRWGLNLPIDVLRGSRVKKIVENNFDKLPLHGRGKDYPPNWWKALGGLLLAHDYLKETVHDTFRSISVSPNGYKFLSTADKGDGASLFLQLTAEMIELEGHGGSQCKEEGLNPLGPSESEKISEDELKIYQVLLNVRMQLAQDIGTAPYAICGDQTLRNFAKFRPSTIARLANIDGVNQHFISHYGSIFIQNITQLAKELNLPVDDLSAVESIPAAPKPTQNNLPRSLGGAKFCSWELWQKMKFSFQKVAHYRRAVPIKEKTVISYILDAARDGCEMDWSRFCEEVGLTHEIALTDPSCHYKAWIT

SEQ ID NO: 51762 - protein, 526 aa, Oryza sativa
MAASTSLALVLAVCCCCCYAASVAPLSSADSSGEFLQCLAAGVPSQLVVTRGSSSFASVLASSVRNPRFLAPGTVRPLCVVKPTNASHVQAAVLCGRRHGVRLRVRSGGHDYEGLSYRSVRQEVFAVVDLAGLRSVRVNRRAATAWVDSGATVGEMYYAVAKADAGLAFPAGLCPTIGVGGHFSGGGIGMMMRKYGLSVDNVLDAMVVDANGRLLDKKAMGRDYFWALRGGGGESFGIVLSWKVRLVAVPRTVTVFNIQKTLAQGAVDAVTKWQTLAPAALPDELTIRVVVQNKQALFQSLYLGTCDQLLPVMGSRFPELGMTRADCREMSWLQSMVYINGGTSSTPVEVLLNRTTSLSVYTKNKSDYVKQAIPSASWEKIFPWFDGAAGAGLIILEPHGGRVGSIADGNTPYPHRSGVLYNIQYVAFWPTTTATPAVPDWIKNVHAFMEPFVTSNPRDAYVNYRDLDIGENAVAGGVTSYENGRVWGEKYFGAANFRRLALTKGKVDASDYFRNEQSIPPLVSTK

SEQ ID NO: 51763 - protein, 859 aa, Oryza sativa
MLRAKQLGTLTQCARSFYVNGSRCGSTDGASCTCPEDETSAPKRQTANGIEQKFHSTRRPSVKAQTPSVQHVVGSIGRATGYPAPAVHIVPSNSSQETEPASGNTSNHPRTPQVLGNDYVQPSKRTARSISHSAIAGAGVYTELVNLKSTSNNGGTNQASQMASSYSYQPLSDAQPSNIKSHNQHSLPEAKMPYNPSVQNNLGKGVSRSGYAKSNQSFSGPPAMVANSPSQIKNQRHPGQRHTNYHSNNFSTDARWDEVQTQNLSAPAMYTGSGHKSQALAGTIKSHGGGPQSNLRSLKSLRSVEQYYHTLQQMKWGPMTEHVLDNLHCKIDAFQANQVLKLLHDHTIALGFFQWLKRQPGFKHDGHSYTTMIGILGQARQFGTMRKLLDEMNSVHCKPTVVTYNRIIHAYGRANYLREAVKVFEEMQKAGYEPDRVTYCTLIDIHAKGGYLEFAMDLYTRMQEVGLSPDTFTYSAMVNCLGKGGHLAAAYKLFCEMVENGCTPNLVTYNIMIALQAKARNYENVVKLYKDMQVAGFRPDKITYSIVMEVLGHCGHLDEAEAVFIEMRHDWAPDEPVYGLLVDLWGKAGNVDKALGWYHAMLQDGLQPNVPTCNSLLSAFLKINRFQDAYSVLQNMLAQGLVPSLQTYTLLLSCCTEAQAQMGLCCQLMAITGHPAHMFLLYLPDAEPGGQNVRDHTRYFLDMMHSEDRESKRGLMDAVIDFLHKSGLKEEAGFIWEVAAQRNVYPDSVREKDPSYWLINLHLMSEGTAVTALSRTLAWFHRQILTMGKCPERIDIVTGWGRRSRVTGSSLVRQSVQKLLHLFEFPFVTTRGNTGCFVGCGEPLNRWLHNPYVERMHLL

SEQ ID NO: 51764 - protein, 510 aa, Oryza sativa
MRLHLALLAALLTLAAAAQPPFRGYYYLLDCGAAASTTDSRGLEWLPDGGYVTGGEPHQLPDQGLLDPALATRRDFPHEPGKKFCYELPVDRNRRYLLRPTFFYGASSPPPPVFDLIVDGTFWTAVNTTDDVLAGSASYYEAVFGASGRNMSFCLGVNPDYTSAGPFINALQVIQLHDSVYNATNFTTSAMGLIARTKFGSTDGVERYPNDTFNRYWQPFPDSKHAVSSTHNVTSADFWNLPPPGVFNTALVAEQDAPLVLQWPPIPLQNDSYYVALYFADTVSESSRTFNVYINDYSFYEGLTVTSAGLSVFATQWILSGLTRVILAPISGLPPLINAGEVFGLFPLGGYTFPRDAHALEAIKRSLQNIPDDWNGDPCMPHGYAWTGVTCDKGQIPRVISLNFSSMGLSGYLSSDIARLTALTDISFANNSLSGPIPNLSNLRNLTRLHLQDNKLNGTVPQTLGIITSLRELFLQNNELDGAVPLNLLLNQGLTYQFLPGNNFFPRPPR

SEQ ID NO: 51765 - protein, 500 aa, Oryza sativa
MATARVSLILLVVVLAASACAEGLRLPRDAKFPAAQAERLIRSLNLLPKEAGPTGAGDVPSVAPGELLERRVTLPELPQGVGDLGHHAGYYRLPNTHDARMFYFLFESRGKKEDPVVIWLTGGPGCSSELAVFYENGPFTISNNMSLAWNKFGWDTISNIIFVDQPTGTGFSYSSDDRDTRHDETGVSNDLYSFLQVFFKKHPEFAKNDFFITGESYAGHYIPAFASRVHQGNKANEGIHINLKGFAIGNGLTDPAIQYKAYTDYALDMNLIKKSDYDRINKFIPPCEFAIKLCGTNGKASCMAAYMVCNSIFSSIMKLVGTKNYYDVRKECEGKLCYDFSNLEKFFGDKAVKEAIGVGDLEFVSCSTTVYQAMLTDWMRNLEVGIPALLEDGINVLIYAGEYDLICNWLGNSRWVHSMEWSGQKDFVSSHESPFVVDGAEAGVLKSHGPLSFLKVHNAGHMVPMDQPKASLEMLRRFTQGKLKEEWLAELPEQPMYAAM

SEQ ID NO: 51766 - protein, 106 aa, Oryza sativa
MGRPSSTERLVCVVLAVLAVLSPLYIDRRRPAAWDSDDDEEGGGVSALLLPALLIVLILAINVTCFVDRRVVRFDPYWIHRVGGSSCGLMATLLLLGFVLKCKASL

SEQ ID NO: 51767 - protein, 612 aa, Oryza sativa
MGFARVELRCPRALDPRPSWTLGDVLTELDALEATRRTAQPTPLKQPPEWASSGSVREKAFVMRVEEEDDTDEDDYDSDGESRALVAKATGARFSCNDLESSDAEESEDEMDGRIAPYHLMEKRSLEKSILLELEREHHLKVQEEVRSKLSALEVCHQSEIQRTVSAFARLQKYAESRKEIDRRLDVHFQRKIAEVLDKHLSMVQRDHEQKSQIVERRIRDDAALEEAKRKEQAMKDEKIRQERAKQEAEARQKAAAKLAVEAQKAAAEAAAKEAAEAQKAAAEVSKSSQNSQNNVAGTMRANKSEIKSELPGIKVFADHSALEAELRRRALLDQVPANIHSSKEFSRYDRQIAKSIGKLMPTTDSVKARAGELIKALDGQDCPRPIACRIFANKIISIVKSRNTKDKTFGNLAFACGYVMLLVTSQVPDAMDYLLAEFHRVCMYTVPKHLHALNAQVRNRDYYRLIGYQEENGQLESTESYLTYVAAYVKLYAAMIQTEIRGVRHPHGLAEGWKWLAMFLNTLPATTATACALHAFLKVAGFALHKKYGSQFMKLLDVILRCFLPALKEQGSRIQAEAASNLQNYLTDKVYLEEPEGQYLAQQLLSKELFT

SEQ ID NO: 51768 - protein, 189 aa, Oryza sativa
MLGLRGARAAQLPYASAAVAPTPTPSFSGFARRLPLLASAALSPLPPSFSFSSASAVRRDRDPPMRPVSGALSRSRPTTRVFCSAAATAPREGKELLVQHLLVGEQDVRLLVDLEKNIITGGADLSDLAVEYSLCPSKENGGMLGWVRRGQMVPEFEEAAFGAPLNKVVRCKTKFGWHCCKCLLRENNA

SEQ ID NO: 51769 - protein, 611 aa, Oryza sativa
MIRLWVVVTWLVLWAAAAVHPGEQPLSRIAVERMVLAVNESAHVRASPLVLGLKGETNEWVEVEFFNPNPSNTDWVGVFSPADFSSAICEAYGVPQYYPMLCTAPIKYQYANFNNNGYSKSGKGKLKLQLINQREDFSFALFSGGLENPKLVAVSNKIAFANPKAPVYPRLAQGKSWNEMTVTWTSGYDFKEAVPFVEWGAKGGQRVLSPAGTLTFDRNSMCGAPARTVGWRHPGYIHTSYLKELWPDSLYTYRLGHRLPNGTHIWSKSYSFKASPYPGQDSVQRVVIFGDMGKAEADGSNEFNDFQPGSLNTTYQIIRDLKNIDMVVHIGDICYANGYLSQWDQFTAQIEPIASTVPYMIGMGNHERDWPGTGSFYGNLDSGGECGVPAQTVFYTPAENRAKLWYATDYGMFRFCIANTEEDWRPGTEQYKFIEQCLSSVDRQKQPWLIFLAHRVLGYSSCTFYEEEGTFEEPMGRESLQELWQKYKVDLTFYGHVHNYERTCPVYQNKCVVSGSDHYSGPFTATTHVVVGGAGAGTSDSEFTTSNIKWSYYRDFDYGFVKLTALNHSSLLFEYKKSSDGNVYDHFTISRDYRDILACSIDNCPRTTLAT

SEQ ID NO: 51770 - protein, 228 aa, Oryza sativa; identical to SEQ ID NO: 31697

SEQ ID NO: 51771 - protein, 222 aa, Oryza sativa; identical to SEQ ID NO: 30537

SEQ ID NO: 51772 - protein, 113 aa, Oryza sativa
MNPSVLSLAACSTSKKSSTSLSEFLLVSPLLSLRTFTAPAFAPSSAFLIREAARCDGLETVRLLLEEVALNPFGDDGLFSLFNDRFLDALTLSLRRAIKSRPGVSLGLLSFSL

SEQ ID NO: 51773 - protein, 84 aa, Oryza sativa
MMVMVVATAVWKFMAFLNKAVATARCRGWRPRRWCSCSDWRRTPEFTLRRVLHGFGILGLGIGDFGVFFLQECELWIWDVNWGM

SEQ ID NO: 51774 - protein, 704 aa, Oryza sativa
MKKPNVAAKVKAAAAGGADGGSSKGSPSTPASLRVTKLVKGKAKVKAKASREKAAAPAAAAGKEAASLGDAGGNADASPAAPALRPAAVADADGASKGSPSTPASVKKTSRLNKVKAKAKAAAAAAASGSPSVGAAGGNADASPAAPAPRSATVADGSAARVISTPAAATAEASTPKRRLKLKPKLAEANANANAVVATKNGVGADNNDGDAIKKRKREIAGERTSNVKERRKEEEGSKKEERLDSKGGGLIFMCNAQTKPECFQSRLFGYPRGKIGIVEKIRPGMRLFLYDFDLKLLYGVYKAVSKGGLDLVRDAFSGKFPAQVKFKIDKDCLPLPESRFKDAIRENYSAKSKFNPELNSRQVHRLIALFESVSVPQPAPQKPLGEMHHYEGKTQPHQYEERRSSLPVMHVPPPKDLYRATRFDPHPVDYRIDHSLSNAHDGPHIHYQQTLVARESQRVPLDIEPRLVPHALEPRHGPSIPEIQHVPHAYYRHLAPSDVPYYRSQVDPLPDRVAARTVADPFLSRDYTAVPATRSDGAARVEELRRIGDIASLGARVEELYSPGELAARGSRVEELYRPGEIVARGSRVEELYRPREVAAHSARMEDLYRPGEIPIRGARVEDLYRPGEISARAVRVEDLYRSDQRITHAVDLPLHAPYPTAHYEVPNPAYSDISQRYASTRLNAPGASVSSLYSFPGAPAYR

SEQ ID NO: 51775 - protein, 643 aa, Oryza sativa
MSVSMKDLDPAFRGAGQKEGLEIWRIENFKPVPIPASSYGKFFMGDSYIILKTTALKNGSLRHDIHYWIGKDTSQDESGTAAILTVELDAALGGRAVQYREIQGNETDKFLSYFRPCIMPQPGGVASGFKHVEVNEQEHETRLYVCTGNRVVHVKEVPFARSSLNHDDIFILDTKSKIFQFNGSNSSIQERAKALEVVQYIKDTFHEGKCEVAAVEDGRLMADAEAGEFWGFFGGFAPLPRRAPVEDNEKYEETVFKLLCFNQGKLEPINYESLLHELLKTNKCYLLDCGVELFVWMGRTTSLQERKSASEAAEKLLSDDNRTKTHVIKVIEGFETVMFKSKFKEWPQTPDLKLSSEDGRGKVAALLKRQGLNVKGLMKAAPAKEEPQAYIDCTGSLQVWRINDKDKILLPSADQSKFYTGDCYIFQYMYPGDDKEECLIGSWFGKKSIEEDRVTAISLASKMVESAKFQAVQTRLYEGKEPIQFFVIFQSFQVFKGGLSSGYKKFIAENGIDDDTYLEDGLALFRIQGSGPENMQAIQVDAAASSLNSSYSYILHDGNTVFTWTGNLTTSLDQEVVERQLDIIKPNSQSRSQKEGSETDQFWSLLGGKSEYPSQKIGRANESDPHLFSCILPKGNHELTILL

SEQ ID NO: 51776 - protein, 950 aa, Oryza sativa
MGGASKLLSSLLLTSSPLRLRPSAGAFALFLSPPASRRHLLLSSPAPLRTLSTASASAAAGGASSDSYSSGSCHSPFPEWSRLVDRLSAAGYGARAPSPADELDLDPECGLSSDAEAAVSSFLAFARDRPDLLRSLPRKDVEVLVANAAPALFKDGEASELRLRQYLAGEGSDVTQSERAETIDIVRYLLSYAYGSPVSYLKDKELTDSAVRNILAEFVSFSGFPQTSSYAESTARQNTLGSRPPGQNIEMKRGDWICTRCSFMNFARNARCLECNEHRPKKMLTGGEWECPQCVYYNYGRNMSCLRCSCKRPGTIPPNPAGAGLDGVAQFLNTSIVGKSEIERKLAENDQKAERWLNKVSQLDDSADLSSLAADEDFPEIMPIRKGVNRFVVSTRKTPLERRLANAQYSSNNSPQDGSSDSKISKTLDRILGRSTSTSVQNNQSGDGDVNTSSNKTTSNLGGIDPVPFVPLSADQFAKPQNSFGDGQSDTQISTEADSMAKSQMDSMERRDDKRSFGTTEEWSKKVAELSNVKDFPSAISDQDFPEIMPMRKGENRFVISKKKDRSLTSPQYKRRSVLEHADNSNFIPFVPFPPDYFAKKNKPVENSSDAGIVPEGPPSAEKLPETKYSSGNLGNFQNSSQVMGSQAANNMNNENRNGNYPHQNLSTSGYGYGESITYQHQPQSQGMVGRSGGASETGTRNANNNQGSFSESRDRSTYNRGSHSAQPPYKSGYGNNNNAWSSNNNGSNNAWSSTRDYDNGGRSDNNPYYNSSTWSSNSTYSNNAAWSSNSSYNSNSAWSSNSSYNSNSAWSNNSNNSWSGSYSDNGGTGSGSSASRPNQTAGYSSYGESANRGYTGKSLEGSAVKDPDPLDMSEEAKAERWFRRAAQIKDISELANIPDEDFPEIMPMRKGVNRFVVSKRKTPLERRLTSPQYRRNLPIVSSEPNEDAN

SEQ ID NO: 51777 - protein, 360 aa, Oryza sativa
MKSKSSRKAADEDEAKSKKLRSSRGKQRPKQRRRGRCSSTSSRSESPPRKRSKKLKVSDKKSTKNKGRRRHHSLSPSPSPSSSSVSYSTRSSSGGGGGASERSVSPPRRSRSRDVRKKKKERGRDSKRVRRSRRSTSYSTSGESNSSSRSRSRSNNSKSRNRKSGGNKDHASRNKIVQDYDNGHAHRAENVKSVEIADRDEKAMADTSKGSSIEISHSIIDHEKNESVEKMESAPTKDADETQDILPAGSGSPDAQDLELILRQKALENFRKFRGAALMAGKPQTNGTGKEVVTDSPKSSDTKIAEASSVDKPFQRQRSGLSVNCSVGSPRLEDFGNHITPRKQESSAGKSVGVESPGTF

SEQ ID NO: 51778 - protein, 349 aa, Oryza sativa
MELHRKDHLPKNANIMQAQHYPMGKSSGFNTGSSCPPRKQHKQTANSVQNTGPENVGPKPVNSPRLPLNPRPREQVIQQNHEPQAQKSVRLQSSSGPESHKVQSPKSSQRTDTTPESYKVQSPKPSQRTDTAPESHKVQSPKSSQRTDTAPDPYDPYGLHGLLRVMKLKEEGPASLALGIDLTTLGLDMNSSDNLYKTFGSPWSSEPVKEEYSYEIPDCYSSMQPPPLQALHFLRFHLMTLFYIFYSMPQDAAQLYAANEICKYGWVYHKELRQWVKRAPNTTPLVKTTTYEQGLCYLFDANIWDAIPKDNFILRYDDIEKIPALPPLLPATQNPATQNGSVRINKPLQ

SEQ ID NO: 51779 - protein, 112 aa, Oryza sativa
MTRFPSPEIVASGEVGPVTGSSPLATHAGVSFGTWLNHIPRYQFEALWEDLLLVGKKPSANLPLLETSMSLPASVSPAEMVSVTLQDAGMCSVKRRNRTVMGRAMVNKSRTS

SEQ ID NO: 51780 - protein, 831 aa, Oryza sativa
MLTSGLLRPVDDAHAIDEAALLRYAAEHVAGFPSPARGLALTQFGHGQSNPTYCIEASAPGGVTARYVLRKKPPGAILQSAHAVEREFQVLKALGTYTDVPVPKVFCLCTDASVIGTPFYIMEHLEGLIYPDNKLTGVTPTKRKTIYLAAAETLAAIHKVDVTAIGLQKYGRRDNYCKRQVERWGRQYLSSTGEGKPARYQKMLDLAHWLKEHIPKEDSSAGFGTGLVHGDYRVDNLVFHPTEDRVIGVLDWELSTLGNQMCDVAYSSLPYIIDATTSTGYSYGGFEYTGIPDGIPPLEEYLAAYCSISARPWPAASWKFYVAFSLFRGASIYAGVYHRWTMGNASGGERARFSGKIANAMVDRAWDIINRENVLREQPARGMHASNGPSQEFQRKHEGSISTKDQGKFVPSEKVMQLRNKLMKFMEDYIYPMESEFYKRAHSTSRWTIHPEEEKLKALAKREGLWNLFIPLDSAARARELLFEDMSHGSPGSSEELLLGAGLTNLEYGYLCEIMGRSIWAPQIFNCGPPDTGNMEVLLRYGTKEQQKQWLVPLLEGKIRSGFAMTEPQVASSDATNIECSISRQGDFYVINGTKWWTSGAMDPRCQILVLMGKTDFSAPKHKQQSMILVDVKTPGVQIRRPLLVFGFDDAPHGHAEITFENVRVPATNILLGEGRGFEIAQGRLGPGRLHHCMRLIGAAERGMNLMVERALSRTTFGKKIAQHGSFLADLAKCRVELEQARLLVLEAADQLDRHGNKKARGILAMAKVAAPNMALKVLDMAMQVHGGAGLSSDTVLSHLWATARTLRIADGPDEVHLGTIAKLELQRARM

SEQ ID NO: 51781 - protein, 264 aa, Oryza sativa
MAMATTSSKNERWSLAGATALVTGGSKGIGRAVVEELASLGATVHTCARTEAPLNRCREELTAKGLAVTVSVCDVSLRADREALAGTVRELFGGKLSILVNCAGMSFLKPAVELTPDDCSQVMGMNFESCFHLSQLAYPLLKASQRGCIINISSIASVVAFCSLPNAVYSAAKGAMNQVTRNLAAEWANDGIRVNCVAPGFIRTPLLSEFVEGNELGRAEFSRVPMGRLGEPEDIASLVAFLSMPASSYITGQVICADGGRCLS

SEQ ID NO: 51782 - protein, 261 aa, Oryza sativa
MEILPKLYRAARHAYSNSAAAKDGPLMEIDLMRHSKALLILCPDMLTAWNSRKMVLSVNYDFTKLKDELQLCALILSCSPKNESTWSHRRWVIKKVSEHNQDVSELIERESVLVKEIAEKSKMNYRAWRHRCWLIPYMTREQVLNELKKSTRWNELHVADNCCFHYRRSLLLALLDSCHVEDTEDSLDRKSEVHLLWKVCCISLESIPASLWFPLCHLSLCFSLYICYKGETRLCIFFREYARSARLCILFYFTNIDFSGA

SEQ ID NO: 51783 - protein, 267 aa, Oryza sativa; identical to SEQ ID NO: 37060

SEQ ID NO: 51784 - protein, 818 aa, Oryza sativa
MMEAEEAFPPQRNPRRARRRDLNALDPSLEESDGEDIGVPEVGMVFNNHTEVNRFYRRYARRVGFGVSVRRSSFSQEGTCLYLELMCCKGGRPRYEPKFRKRASSTTNCPAKIRVKLWGDKLLHVELAILDHNHPVSPAMARFLNSYKQLSGPAKRRLRMGGPGAMPVEEPSKMPVDKLGALEELLFGESKHHSFVERGRLKFQPGDSEALRLFFTRMQAKNANFFNVIDLDDEGCVRNVFWVDARSRSMYEFYNDVVTLDTSYVVGKYDMPLATFIGVNHHGQSVLLGCGLLSDETAETYSWIFKAWVACMYGNLPKAIITGHCRGIQSAVAEVIPGVHHRICLFHIMRKATERLGGLSEYAAISKAFQKAVYDSLTIDEFEGNWNALITYNGLQGNDWLRSIYECRYSWVPVFLKDTFWAGMSATQRNENIIPFFDGYVDLKTTLKHFLGKYEMALQSKYEKEAQADFETFHKQRPPVSKFYMEEQLSKVYTHNIFKKFQDEIEAIMYCHVSFINVDGLISTFDVKEWIFLEDGKRTMSKIFTVTNNTDKNDLTCICGGFQFNGILCRHSLSVLKFQQVREIPPHYVLDRWKKDFRQLHVMGRPSSDVVPNNRVDRYDYLSMRCLQLVDSAVLSDKYRLALRLVREMEKFMLNSNTHDDTQPRIKSRIPKANKPNTVVGQNLVNVGTYNGNDRPKATTEASSLTQGLDVQKGGAEKGIVPAGYIGLPANVQQFVGSQTAIRPSIVYMVPSGVDPQAFGNGVLMPVVYQQMFQVPQQPNGTMPDTSANGKRKRPRAQKPTEASEQSNGTPATGPTSG

SEQ ID NO: 51785 - protein, 620 aa, Oryza sativa
MAQAAVQSSLNGDLLIGRAAGVPRMKRKTPSELRGEQLKRRASDKPANDQSLHSAAFDRASNGFRNPEQSKISKYISTRVTEVFPVKKSRNLGKENFKNNEKAPKSADAVTTSDFASPSLPCGYGDSAKLDSAVPSHTEAAKPSFRKVEKCSENALRSVSELHIGDEQQSGTNKFDMEKVLKGFGARDAFVASKLTDPNIQVGVVPSKSLDLCPSEIAVPGKRAPLDLTLKTTLQFVSSSSVKWCHKISTSFGRSSIVGPIAQSYHHGCQNSGCSRPERNKEFLFSKALQSWVYPQSLLPASIISAMVSSTVRGESDFLLKRHQDWEDSFQNLYYMLRKNLLNIFYVYTPQFVALFIGGNCLDKKQTCNAYLSQSTRGIRSLLRRHGVCFSMPLCNTEVEQVTEDDLIELSEIQKRNLGQALHIDAMSEVDNTTQSLLSFVGNKSVHGLYDFLLNYKSFLNSLSATDIPVLYSPVPFQNGCLHIPEVKCKEMRKADIGLVSGGFDAGEPGSTFASLTGNICYSMEIKDPVLPPWVVSGICAAMSSDANSFDLMMATEPSSMGLNAALSCVSSNSQSKAHSSEGCESLGIPEATLVPSLRSASSLRRLSYKDGEYIAYTTV

SEQ ID NO: 51786 - protein, 870 aa, Oryza sativa
MLGGIIGGLTGNKNARLKGSLVLMRKNALDINDFGATVIDGISEFLGRGVTCQLVSSSLVDPNNGNRGRVGTEASLEQWLTSLPSLTTGESKFGVTFEWEVEKMGIPGAIIVKNNHAAEFFLKTITLDNVPGHGAVVFVANSWIYPASKYRYNRVFFSNDTSLPSKMPAALKPYRDDELRNLRGDDQQGPYQEHDRVYRYDVYNDLGEPDSGNPRPVLGGSPDRPYPRRGRTGRKPTKTDPTAESRLSLLENIYVPRDERFGHLKMADFLGYSIKALVDGIVPAIRTYVDLTPGEFDSFKDILKLYEGGLKLPSIPALEELRKRFPLQLVKDLIPAGGDYLLKLPMPHVIREDKKAWMTDDEFAREILAGVNPMVIARLTEFPPRSRLDPARYGDQTSTITAAHVERGLEGLTVQQAIDGNLLYVVDHHDHFMPYLLDINSLDDNFIYATRTLLFLRGDGTLAPLAIELSLPHLQDDGLITARSTVYTPAARGGTGAGAVEWWVWQLAKAYVNVNDYCWHQLISHWLNTHAVMEPFVIATNRQLSVAHPVHKLLLPHYRDTMTINALARQTLINGGGIFEMTVFPRKHALAMSSAFYKDWSFADQALPDDLVKRGVAVPDPASPYKVRLLIEDYPYANDGLAVWHAIEQWATEYLAIYYPNDGVLQGDAELQAWWKEVREVGHGDIKDATWWPEMKTVAELVKACATIIWIGSALHAAVNFGQYPYAGYLPNRPSVSRRPMPEPGTKEYDELARDPEKVFVRTITKQMQAIVGISLLEILSKHSSDEVYLGQRDTPEWTSDAKALEAFKRFGARLTEIESRVVAMNKDPHRKNRVGPTNFPYTLLYPNTSDLKGDAAGLSARGIPNSISI

SEQ ID NO: 51787 - protein, 305 aa, Oryza sativa
MALPCSYGSHCAALPFPAVVSRAASSPPPRSRGRRPSLPPAGCFHAAPRDAALVSGSAAGGVSRRRCELFDPHQHIVPFAESWAWQQSIVTRRKGLVGTDEDHSDTLIALQHPPVYTLGTDSTEDYLHFDVKDAPFEVHRIDRGGEVTYHGPGQLVMYPIINLRYHQMDLHWYFRSLEEVIIRALQSAFSIKASRVEGLTGVWVGDKKVAAIGIHVSRWIAYHGLALNVTTDLTPFQLIVPCGIKDRGVGSIKEILQIASDGKEIDETALIDKAYRTLLKEFAEVFQLSLYHNPNWDLQESKNFS

SEQ ID NO: 51788 - protein, 248 aa, Oryza sativa; identical to SEQ ID NO: 30794

SEQ ID NO: 51789 - protein, 185 aa, Oryza sativa
MGLLSIIRKIKRKEEEMRILMVGLDNSGKTTIVLKINGEDTGVISPTLGFNIKTIKYHKYSLNIWDIGGQKTIRSYWRNYFEQTDGLVWVVDSSDIRRLDDCRAELHNLLKEERLAGASLLVFANKQDIQGALKPSEIAKVLNLEAMDGSRHWQIVGCSAHTGEGLLQGFDWLVQDIASRIYVLE

SEQ ID NO: 51790 - protein, 865 aa, Oryza sativa
MVTMSAAASWTAEDDVLLKNAVEAGASLESLAKGAVCFSRKFTLQELQDRWSSLLYDSETSGQASALIVKYETELSTSNPTKAHKLFYVRRKHLSLRKRKIESVKNQYYAMRKRICHDPCLAADFGYVITPCSCPVGSDCVCDGLFNLLEDNHLIHNVNQAPDVVNGYGHIGESYADGQDVHAKDNGHYISHRRHDKAAGTVASDGSTNCESANGCSDVGKLYGYNFMPKNIQSSERNIASPKDLSDVQDCVQPQQPILCEESANGMTGLKALLNTDQDCIKQNQFSGNSNEILQDPGSLKAMSEHWCSQAPSAPTRKKFQGVNAPDMLTDVHHKEQEILAFSDDKKKETTNIDTFSCKVNVENGMSGSGLDDATEGEVMHSCLMDASQGEDFELLNSENILDSSLDPNLEGLGDRHANVILKDISKEHLLDIPHVSSACGNNTDPIHEKHDVADISGVDMIYTTEVPFPCAGIVCILNTEDPEIPCNDDIFTPGPVASTSTCDQNSQHNMHLVSAKPIPPLNAADLNHTDLVSDVQPLLLTMKLEPYTLEQKETLVGLNESCTVRSKSPVMPVDASNANACTSTFHSAAEFVKKSTCGLVQHECFDNLGSVSLDECIGVLDEMNSKVPDESGISCDATTQNSISAHALPDVEFLNPITTTSSPEGGGSDSEDGIPNYFDIEALILDQDLIPWDQESDFIQLEVSRFQSLESRKDLIRLERGARSNTNRSIMSHGAFAVLYGQHLKYYIKDPEVTLGRETSEEHVDIDLGKEGKANTISRQQAIIKMDKGGSFHITNIGKAPIFVNSKEVPCNECTHLISDALLQIRHMKFIFHINQDAVRQHIVRSRRGTSQGKYAVFNWDEKP

SEQ ID NO: 51791 - protein, 110 aa, Oryza sativa; identical to SEQ ID NO: 42216

SEQ ID NO: 51792 - protein, 54 aa, Oryza sativa
MSCEDHMGIHSYLMIMLLLPVNKLITIRIGRFPPLELLPCLLVLHLRCLLSIVH

SEQ ID NO: 51793 - protein, 708 aa, Oryza sativa
MEMGMTPEQIYGQNVYVPATANPYPYGYTEVGSPTEWYNNQSSLGYDGQDIYFPGFQTEGTQCMYYAAPDNGSGHPSYSPYPINSSFIVDGSYLPLEYVGDAADQTCQIVPSPYYVPTILPYAHDNVLGNTTAPLHPPVYVPTLPSYTVTSTSHALPSVPPVATKNDVIANPPIQSTIVTSKQFLDHASDPKVQLRNPIPLKKELADGSMMPVKYPHTSQAFSNFPERRSAAKHSPQEKFSVNNGSGFVGSNVQRWAAAEKFEPNSNLSGRIGSASPKMKLSNVDGLGGADKPCGQKSSAIIAKSYTSRLSVGDPEGTIVIRCNQYNSDDLRVDYPFAKFLVIKSIGEDDVHKSIKYGVWSSSSSGNSKLDIAFKDANRIAKRNSTKCPVFLFFSVNGSGLFCGMAEMVGPVDFHKDMDFWCQDKWTGSFPVRWHIVKDVPNYTLQHILLQNNENKPVTHSRDTQEIPYVPGISMLKILKAIKVKECLLDDFMKYEEDEARSKHYFRRSKLSHNAPDFVPVAQRRKDVTDVRQPKSGNVLIDRTPVIQNMSVKPQGSNAIKPQDQCLQVVEKQASDDGKENRHQENRNVRQANDKVVKTGTKQPQASTVKTSVDSKQQYWKKVEFPGQNPNSAVHGSSKAHEKHLNESKAPEKHSNGANCSSATVSLKTAREETIVARVSSLAISYQNSSVDVVKIGSMPVLVNKANV

SEQ ID NO: 51794 - protein, 1325 aa, Oryza sativa
MAPPFVFPSTLRDLERDGDGGGDDEPALRPQNPVAVGALRAADLEEFVKGTSFDLSDKELFCIEEQDVFDRVYSLVRDFTCLPPALKFNLVETLRSNLSVLLPNIDSLSRASMSSPSDGIPVTDRIASHRNALKIYSFFLLSIVVAEESGADSCNGPKVAVHGRKKNAVYAWNWEAQRGRIMNLIANSLEVDLSLLFGPGGADEQYLSFVSKCTFVLCENQNVLKDEEIRNGLCRIIGAIATKHQRVSQTSASVLHLIHKFDFTVVLLAESVAAAEKRFGDGSLAILLIREIGRTDPKDYVRDSAGADNAGRFLVELADRLPKLMSTNIGVLIPHFGGESYKIRNSLVGVLGKLAAKAFKDVEGDSDAHSLRLRSKHAMLEILLERCRDVSAYTRSRELQVWAELCEENAISIGLWNEVASVASGRLEDKSAIVRKSALQLLITMLQHNPFGPQLRTATFEATLERYKEKLQGMEPPSPEKDELLNDSSLGEVIAGQDESVSDSCLPSSQDPKDQDPTIVDITNLEQIRALVASLEAGLRFSACITSLMPTLVQLLASSSATDVENTILLLMRCRQFQIEGSEEALRKMLPLVFSQDKSIYEAVESAFITIYTKKSPTETAKSLLNLTIECSIGDLAALESLVSSLVSKGEISSNTITALWDYFCFHINGVKPVQSRGALSILCMAAKSSPSILGTHLQDIIDIGFGRWAREEPLLARTACIALQRLSNEDKVKLISTGSRVFAALQGLITSLSLPEKIWYGAADKAISAIYALHPAPEIFAAQIVKKSLNSVFGVLGTDCMSNENETQNGSMLSSTPATNLGRFLFIISHIALNHLVYIETSVKKIQKQKRKNDKSEPTAEDLQADASKNSEAQGINAELGIGASVDIAIESLAEKAEREIVSNSEKNLIGYCAPFLAKLCRNLALLQKFPGLQASAMLALCKLMIIDAEFCEANLQILFTAAESAPSEVVRSNCTIALGDLVVRFPNLLEPWTEHIYARLRDPSASVRKNTVLVISHLILNDMMKVKGFINEMAVRIEDEDERISSLAKLFFHELSKKGSNPIYNLLPDILGRLCNQQLKDETFCSIMQFLISSIKKDKQMEALVDKLCNRFAGVNDVRQWEYISYCLSQLTFTEKGLKKLVDNFKIFEHALSEDSVMNHFRTVIAKCKKFAKPDLKVCIEEFDEKLSKVHQEKKEQEATARNAEAHKQRIGSLDKLMVTKRTGKDKGKSAEVAEETSEVVDPSTESNSEDKENMPECSDNICSEKSHTSSTFTESDGDSTEVQSARTSCKGVSRSRINKMREPEDSEDSAPMRRVSRRRPVR

SEQ ID NO: 51795 - protein, 287 aa, Oryza sativa
MAQQQQQQGSGSGSASASSSSSGLHLLASPFGDTTYTKVFVGGLAWETTSERLRRFYDRFGEILEAVVITDRHSGRSKGYGFVTFRDPESARKACEDPTPVIDGRRANCNLASLGRAQPAVPLGRPRSAGSYFGVPVPRGVYVGGYGQHRTLPLGYYQGFPVPQYSYTTYGTEYIYPQGTLNPYVGQQYVPIYGVSSAANTASQPFSQFSPSISGGGNGYVAIHGYNVPGNPFVQLTGSNFSSASPTPRPTIQAPFLVAPVPTHPHLVLPAHSPQFTQASGSDQRAS

SEQ ID NO: 51796 - protein, 362 aa, Oryza sativa
MVTSKEFAWDQAAMDQKIKSDVGEVVLAGDEEEDGDVVLPGFRFHPTDEELVTFYLRRKVARKSLSIEIIKEMDIYKHDPWDLPNASTVGGEKEWYFFCLRGRKYRNSIRPNRVTGSGFWKATGIDRPIYSAAVNSNSGESIGLKKSLVYYRGSAGKGTKTDWMMHEFRLPPAIAAADASPCMQEAEVWTICRIFKRSITYRKQQQQQAWRPPATVTVKAPPPGDSSSNTGSFESDGGGDEFMNCGLTPAISQQQQHGGRHQMMSTMSCNGGYFFNDGIHHSHSHHKLHSQWGSLQMAPPEPKPEPEQKPLSSPAMTIAFHQNDHGFPAAAADFYKDGYLEEIARMMEVADPSPTGFYDCRY

SEQ ID NO: 51797 - protein, 914 aa, Oryza sativa
MAAQGGEAAAGSDAKPTAGTGMEQPSPSPYQPSASDHHLWSSSTGAPWNYSMNNSNQNTVYYDPQRDVSVPGSTENVTSGATHVVQSAMGITGATDSYAPYSNSVQPGYNAPQYPNYYYNCPQSTNESSVQQGVDQSSGAAYQPLTSFQNSGSYVGPTSNTYYNAGAHQTAPGYATSNNYYQSNSWTGGSSGDNHVQSYQSYTPSDTNAAQSSSSLPNNSYHYHQQYNQWPYYYDQSAPSSGGPAVAVSSVSDANTASVSSGYVYPSTQPPPPGTTWRSDAGATAVPPPQAPGTPVFQNQHVNQAAGPPGYQNQYVNQAPGTPGFQNQYVNQAPAVPGFQNQYANLAPTYQPGTTYYSQLPLSNQADQQKASRWQGPISNVSSVNHVSESSQPTFQGSATSDALRVNKIQIPTNPRIAPTLPMAMPKVEKRNLEADSSKKPAYVSVAVQKNDVKAAQDGHEAVTQGSIPVSLRTYVGRNVSRCKDDAQRSAVQNILKEIITKATADGILHTKNWDIEPLVPLPENITSTNLTSSAKDLSPFSFSTSRRSPSRRAKSRWEPVVEEKVANKVELISKESAKTNTYNSSETTKRAGRSWDIGKFLQSRQAPLSQYNQRPSKKKRIGGNSSLTENGNVSSDSDKEQDLTKYYANAITIANSPEEKKRREHRSKRFGRSQGAASSKSRSSVPDKDGTSNTYARRSMPMLLSRSNGDDVSFAVEDLDWDALTVKGTCQEIEKRYLRLTSAPDPATVRPEDVLEKALHMVETSQKNYLYKCDQLKSIRQDLTVQRIQNELTVMVYETHARLALQSGDLPEFNQCQSQLKRLYAEGIKGCHFEFSAYNLLCVMLHSNNKRDLLSSMASLPKEAKQDRTVKHALAVHSAVSSGNYVLFFKLYKTAPDLNSCLMGKYDLPLSVI

SEQ ID NO: 51798 - protein, 504 aa, Oryza sativa
MASSSKLLALTLTSSFLRSSLLPAPSRRLPTGPLLSLRFCSAAGDVADAPAAAAAPDHPWPEWGDFLEKLRAKGYFEQPTLASRADAAEGEVAATAAAAAAAAGEDPGASADNYPSKDLNRLKNACLKFGRERFDLLSVLPKQDIRAIVECGCPNIFRKPVNSAKRLREFLQIDEGDACSACKLRGSCDKAYVIPNAEDEARTVDVMRILLNYAIDPTSLSGENSVNGGVQESARKLLSELTMLSDTTIDPSIPKPVFQTSSKTKTFDKGIAKPKFSAGKGRETTETEMKKGDWLCPNCNFLNFARNRHCLECKADGPKKIETATTEMKTGDWICPQCHFMNFARNKMCFKCEESRPKRQLIPGEWECPSCSFVNFRRNKVCLKCKHEGPENDTHDSQHGHNRWRNTRGADRSRSFDDSFDREDDGSDPDEGERRRAKVRTRAASTLGRSTGKSKIFDSIHEDGNGREDDSEDVLPYEGQRRHIVSKRATPAQRRFTAGRSEDI

SEQ ID NO: 51799 - protein, 354 aa, Oryza sativa; identical to SEQ ID NO: 29469

SEQ ID NO: 51800 - protein, 246 aa, Oryza sativa; identical to SEQ ID NO: 32602

SEQ ID NO: 51801 - protein, 324 aa, Oryza sativa
MELRELHRPLYEQREHVELRAVGAGQGRVRGGGVLAGRRHGGEQRGCRVEQRQWRRRRGEAVQAGRDELAQLPAGPGLAVAGGQEHPRRGAVVADLRRVPVHGAAADAVPHLRRRPVEHQPLGQRRLPRPAPGLHLRRRQLRRRHDVVRRRRRGGHEEVARRHGGARVGGADAGGDRAGALLQEARPVLVLRAHLRAGRGVRARRRRRGRRVQAKRRRARRRHPPGDRDHRARPRLPPGARVPGAAGQVVQGEEVLELVPPQRRPRRRRLRRRQHLHRPQHRARGQRRPRRLRDLPRRAGARRRLPRGQALAEPKERVIHRRRV

SEQ ID NO: 51802 - protein, 253 aa, Oryza sativa; identical to SEQ ID NO: 40525

SEQ ID NO: 51803 - protein, 155 aa, Oryza sativa
MIRRCLSSKHGELELTYAALVGTVEATMVSFQVTEGSWPDHLRGVVVCKTASVEGGDIVLLDSRDGKMPINCNGAIELSRRVVSAELGGELSVDLVALQANNSSEIVSRGRVVFTPDEAGRSSGVFDLVFCKVEATVCWSLLATLGQMLSGNPWA

SEQ ID NO: 51804 - protein, 375 aa, Oryza sativa; identical to SEQ ID NO: 31880

SEQ ID NO: 51805 - protein, 215 aa, Oryza sativa
MASKPQSPLRITHDGEFYARLLTKESSQGNPSFRYYGAGTGAVPFVWESHPGTPKVDASSPFAEAGGVPAITPPPSYHLRAAAAMSSSPQPHGRSGRRNVVNGRGKYCGYCRLKWIKIGFIAAVFRRLALGKPSRASSSSSAVQPSPSTRWLFSGSGSVETSDEPQPPAISPASTKQGGLLCLGVRPSPWMVQLCGVQSIRRVDTGSSWATHGWA

SEQ ID NO: 51806 - protein, 616 aa, Oryza sativa
MPLLIVQPVPISTGPIACASTARPAAAAHDDDGHLFDDLVLGYGGDDKTSADADDPARKLEWLRSQVIGADAEFASPFGTRRVTYADHTASGRCLRFVEDFVQRNVLPYYGNTHTVDSYVGLHTSKLASEAAKYVKRSLGAGAEDVLLFCGTGCTAAIKRLQEVTGMAVPPTLRSVALDVLPPSERWVVFVGPYEHHSNLLTWRESLAEVVEIGLRPDDGHLDLDALEAALAAPERAGRPMLGSFSACSNVTGIRTDTRAVARLLHGYGAYACFDFACSAPYVGIDMRSGEEDGYDAVYLSPHKFLGGPGSPGVLAMAKRLYRLRRTAPSTSGGGTVVYVSAYGDTVYCEDTEEREDAGTPAIIQKVRAALAFRVKEWVGEACIEAREDHMLALALRRMQASPNLRLLLGGDRPSGGRCLPVLSFVVYSPRDGSEQDERPQLHCRFVTKLLNDLFGVQARGGCSCAGPYGHRLLGITPARAKAIKSAVEKGYHGVRPGWTRVGLAYYTSTREAEFVLDAIDFVASFGHRFLPLYAFDWETGDWEYNHSFGRVLANNNAISNAAAAASSGRVKAEDEYRSYMAFARSLADSLGGCLDNTPARHVPKGIDPQLLYFPM

SEQ ID NO: 51807 - protein, 624 aa, Oryza sativa
MLRRCVRDLYPLRPLRRIPRPISSEVPSPAFLRPRSKSTKASQQSSTQNTVPGPQGEPSQSGSNVPKVLLGTLMVGAAAMAAYQAGYIDDQFKDIIFPSTMKEKNIRKIYDDLKAPSEQKVDEKQVVSDPNVDIVQNSNNEAHPQKDLPTEGMGPPEIPTTDEQTVSSEEKEKETLAQGTPQIPDEHGAAAKPLSQDIPVIDINPSVDDKATGEVLPEQTDKTTTSVSPVQSSLATAGPSHHVHTDTDGPKDPSSAGAVEHKSLAETYLLQEPDNSKDMGAKESKHDGVISTGTSDDGKIVLDIIEAIHAAERKQADADAYMYSEEKRKLKEKYEKELKDTRARELMYAEEAAILDKELKKEKLKSAAVIKELQENAEQKLRDELQQKDEETSQQVEKVRELAKAELAAALAKERASQIEQIAEANLNIDALCMAFYARSEETRQSHPVHKLALGTLALEDALSTGSPIRTEVDQLRKSLEGIDKDSLLELALSSIPEDVLEYGSDTPMDLKQKFNSLKETVRHFSLIPAGGGGMLTHAVAHVASSIKIKEDQSGDGIESLLNRVENLIIHGDLSAAAEALERGLQGSEAAEIASEWVKQARKRAIAEQTLTLLHSYASSITFS

SEQ ID NO: 51808 - protein, 195 aa, Oryza sativa; identical to SEQ ID NO: 35317

SEQ ID NO: 51809 - protein, 227 aa, Oryza sativa
MSEQQDSTSKSSSSSISSSTQESEEEVSITIGSLLAQAKNNSGHSLGRRLSQLGSIPHTPRVNGKIPNLDNATLDHERLSERLGNYGLAEFQIEGDGNCQFRALADQIFRNPDYHKHVRKLVMKQLKEFRKQYESYVPMEYKVYLKKMKRSGEWGDHLTLQAAADRFGAKICLLTSFRDTCLIEIVPRDVTPTRELWLSFWCEVHYNSLYATDDLLTRKTKKKHWLF

SEQ ID NO: 51810 - protein, 344 aa, Oryza sativa
MEFLVAQALLLLVVVSNSLLLPSLGLAVSGQEAHEVAMAGLHDQQPPSPAAVAARVSVAQADLPMVASSVLGAESWLRAHVLAHYPSNHVTAIAVAVACARGGSRHGQDLRASRAAKNLHHALVRWGLVDEIKIDASSAPCAEEVGGGALKRRLYGMHHLPPPLPPTSVASPPPPGVPLSFAPNAPPEVVPSVPPAAAPPSTPVVVVPAPATSPPMSMPATPPEAAAGGMAPCSAPPTAAMSPQPCSGEGGNGGGQWCVAKPTVPLDRLQEAMDYACSQDGVDCQEISGGGSCFYPDNIAAHASYAFNSYWQKMKHIGGSCSFGGTAVLINSDPSYLQCRFMMS

SEQ ID NO: 51811 - protein, 380 aa, Oryza sativa
MHIVTKQHFPLYKFLMAFPAKLETVSFSRKKVSTTFSFQMTFLILDQLVHHFDLDLRCTGPFAGCCFLICPSREEADKAVNAYHNKRTLPGASSPLQVKYADGELERLEHKLFIGMLPKNVTDAEMTDLFSQYGNIKDLQILRGSQQTSKAGCAFLKYETKEQALAAIEALNGKHKIEGSSVPLVVKWADTEKERQARKAQKAQFHPSNMSNPNAMQQSSLFGAMQMGYVPQYNGYGYQPQGTYGLMQYPLSPMQNQAAFPNMVQSVNQGSSIRGVNSELSPNSAPRSFNSMQLGSPYSPVPSMQYPGSYPGNAINSRPFVNSHNSMKVPNANASSPTSSSTSSNPGPQIEGSSWSQFIYLPHPSRIWRPRSCRCLSGFW

SEQ ID NO: 51812 - protein, 406 aa, Oryza sativa
MEMAIDTPSPSPSASSAAAGRQTRAAESVRLEHQLLRVPLEALKSTVRTNHRLAEKEIAAVLSSAAAAPGGGGGGSGDAAAVDHLTSLVSRLHGLKRKMEEGARAEELQVQRCRARLNRLASASSGDDAEWEELRLKRILVDYMLRMSYYDTAANLAETSGIQDLVDVDVFLDAKRVIDSLQNKEIAPALAWCAENRSRLKKSKSKLEFFLRLQEFVELVKAKNFMHAIAYARKYLSPWGATHMKELQRVTATLVFRSSTNCAPYKVLFEQNQWDSLVDQFKQEFCKLYGMTLEPLLNIYMQAGLTALKTPFCFDGNCPKEDPLSLPGFRKLAEPLPFSKQHHSKLVCYITKELMDTENPPLVFPNGYVYSTKALDEMAKKNGGKVTCPRTGDICNYTDLVKAYIS

SEQ ID NO: 51813 - protein, 159 aa, Oryza sativa
MWESVALTLAGAAGNNVGKVLQKKGTHILPPLSFKLKVIRAYALNRLWISGFLMDMCGAALMLTALSQAPVSVVQPIAGCGLAILCVFSHFYLKESMNGLDWVAITLAGLGTIGVGVGGEEQKVDKIPLFNIPWLVLSIVILFVGSSQHLASYLQKAKA

SEQ ID NO: 51814 - protein, 442 aa, Oryza sativa
MEKGEGEAQSRRWLMTDDASVGWLLGHGKKGTNVIVATTVSIGTILLVAVFIAVFIYRRKTTKTMIPPDNTGNEEDNDYVDPPTLNLTVLRAATRNFSAENKLGEGGFGEVFKGILEDGEEVAVKRLSKTSSQGFHELKNELVLAAKLKHKNLVRLLGVCLQEEKLLVYEYMPNRSLDTILFEPEKRQQLDWRKRFMIICGIARGLLYLHEESSQKIIDRDLKPSNVLLDEDMIPKISDFGLARAFGGEQSKDVTRRPVGTLGYMSPEYAYCGHVSTKSDMFSFGVIVLEMVTGRRSNGMYASTKSDTYESADSTSLLSYVWEKWRTRSLADAVDASLGGRYPENEVFSCVQIGLLCVQENPADRPDISAVVLMLSSNSTSLQTPSKPAFFFGSGSIASLDAAGGHAFFGGRGSEVAAISSNKMSSNPVSENEVTISELQPR

SEQ ID NO: 51815 - protein, 865 aa, Oryza sativa
MSLRRLCFVLPMDADEVVVVAGAAGEEQPRRRGMAASGRLASYVRRKVGRALRCGLCGAWCHHRSSGVCSFEDIAGVDAVGAGKLGGGAGGSPRIFSYSELYIGTSGFSDTEILGSGGFGRVYRAVLPSDGTTVAVKCVAGRGDRFEKSFLAELAAVARLRHRNLVRLRGWCVQDEEELLLVYDYMPNRSLDRLLFRPAAAAAPAASAPALSWDRRRRIVSGLAAALFYLHEQLDTQIIHRDVKTSNVMLDSEYNARLGDFGLARWLEHAMSGEDAPPPQLEVSPSPHSARSSSFASANYQFRLMDTSRIGGTIGYLPPESFQRRAMATAKSDVFSFGIVLLEVATGRRAVDLAYPDDQIFMLDWVRRLSDEGKLLDAGDRKLPDGSYPLFDMGRLIHLGLLCSLHDPRSRPSMKWVVENLSGSCSGDLPPLPSFLALPKYVSLTSPSDSGTTTNATDSTVTSASKLYGTAAGTTIYLTAENGHRSRGGLADNSGGSSQRSTRPLVVIPSVDTPREISYKEIVAITNNFSESQMVAELDFGTGYEGFLDNGYGGNGARRDRVHVLVKRFGMKTCPALRVRFANELRNLAKLQHRNLVQLRGWCTEHGEMLVVYDYSPGNLLSHHLLRRDGAGAAAVLPWRHRYSIVKALASAVLYLHEEWDEQVIHRNITSAAVFLDPDRNPRLGSFALAEFLSRNESHGGAGGHHVALPATSSAARGIFGYMSPEYMETGEATTMADVYSFGVVVLEVVTGEMAVDVRSPEVLLVRRAQRWKEQSRPVEAIVDRRLDGQVDRPELERLVRLGMACTQSDPAARPTMRKIVSIMDGNDEILKKFEQRKQQSKEEWETTNAAALSLVRRLHALAIH

SEQ ID NO: 51816 - protein, 867 aa, Oryza sativa
MGSGSISRGFRGEFKNWHIIPGLCETSPVMENQFSIFVSRDGGNKKYSSVLSPGHHEGLKKCNDSGISSWDWNLSGQHSTYHALFPRAWTVYDGEPDPDLKISCRQISPFIPHDYKDSSLPTSVFVYTLVNTGKDRAKVSLLMTWANSIGGFSHHSGGHFNEPFIAEDGVSGVLLHHKTAKDNPPVTFAIAACETQNVNVTVLPVFGLSGEGHDSAKQMWDRMKQNGHFDRENFEAGTSMPSSSGETLCAAVSASTWVEPHGRCTVVFGLAWSSPKIKFQKGCTYNRRYTEFYGTSERSAVNLVHDALTKYRIWEEEIEKWQNPILKNEKLPEWYKFTLFNELYFLVAGGTVWTDGQPPVIDEKPSPGSNQQKSSKRGTRDTKQESVKDNHVKLTAEQVTNGGDLANGEEQSVSKYAAVHGPQMAKATNGLGSQEPIPYLLSKNGPENVGKFLYLEGVEYIMWCTYDVHFYASFALLDLFPKIELSIQRDFANAVLYEDRRRMKFLADGTSGIRKVKGAVPHDLGTHDPWHEMNAYNIHDTSKWKDLNPKFVLQVYRDFAATGDMSFGRDVWPAVCAVMDYMNQFDRDGDGLIENDGFPDQTYDAWTVHGISAYCGGLWLAALQAAATMAHRLGDRPFAEKYKLKFIQAKAVYEAKLWNGSYFNYDSGTSSNSRSIQADQLAGQWYAASSGLPPLFDENKIRSALQKIFEFNVMKVKGGRLGAVNGMTPNGKVDETCMQSREIWTGVTYGVAANMLLHGMEHQGFTTAEGIFIAGWSEEGYGYWFQTPEGWTIDGHYRSLIYMRPLAIWAMQWARSPPKAILDAPKVNLMDRIHLSPQMIRAMNEINVRKIAPDNRCFPSSAFRCEC

SEQ ID NO: 51817 - protein, 411 aa, Oryza sativa
MVSLPVGRSPRTHSPKELDSPRPENEVGKLATSQNSPVRRRSRSPGKHETNRRRASSRELSPHGRQNSPSPPEKKARREHRHGDGSPRRRSVSPRRRALPKRRDSPRRDSPSRRRDSPRRDSPSRRRDSPRRDSPSRRRDSPRKDSPLRRRDSPRRDSPSRRRDSPRKDYPSRRRDSPRRDSPSRRRDSPRRDSPLRRRDSPRRASPSRRRDSPRRDSPSRRRDSPRRSSPSRGRDSPRRDSPSRRRDSPRRRHRSKSRSPSRKTDGSRHRREHGRSRLRSPHSRSHHRRSPRRHSPRRRSSPSSHRHHSPRRPWSPPANRKTGLGKPGRNLFVAGFSYAITERDLEKKFSKYGRVTSARVVRDKRSGDSRGFGFLSLEKDEDADAAIRACDETEWNGRIILVEKSKAPTW

SEQ ID NO: 51818 - protein, 224 aa, Oryza sativa; identical to SEQ ID NO: 35157

SEQ ID NO: 51819 - protein, 623 aa, Oryza sativa
MHWLLKLRKFPRKVGQCKMELPGLETMFRDHPGMIQVFLGQSGGHDIEGNELPRLVYVSREKRPGYNHHKKAGAMNALVRVSAVLTNAPYMLNLDCDHYINNSKAIKEAMCFMMDPLVGKKVCYVQFPQRFDGIDRHDRYANRNVVFFDINMKGLDGIQGPIYVGTGCVFRRQALYGYDAPKTKEPPSRTCNCWPKWCICCCCFGDRKSKKKTTKPKTEKKKRSFFKRAENQSPAYALGEIEEGAPGAENEKAGIVNQQKLEKKFGQSSVFVASTLLENGGTLKSASPASLLKEAIHVISCGYEDKTDWGKEIGWIYGSVTEDILTGFKMHCHGWRSIYCIPKLPAFKGSAPLNLSDRLHQVLRWALGSVEIFFSNHCPLWYGYGGGLKCLERFSYINSIVYPFTSIPLLAYCTLPAICLLTGKFITPELTNVASLWFMSLFICIFATGILEMRWSGVGIDDWWRNEQFWVIGGVSSHLFALFQGLLKVIAGIDTSFTVTSKGGDDEEFSELYTFKWTTLLIPPTTLLLLNFIGVVAGVSNAINNGYESWGPLFGKLFFAFWVIVHLYQFLKGLVGRQNRTPTIVIVWSILLASIFSLLWVRIDPFLAKNDGPLLEECGLDCN

SEQ ID NO: 51820 - protein, 538 aa, Oryza sativa
MAGGGGGGGGAAPAPKHDELTPHPVKDQLPGVSYCITSPPPWPEAILLGFQHYLVMLGTTVIIPTALVPQMGGNNEDKAVVIQTLLFVAGINTLLQSFFGTRLPAVIGGSYTFVVPTISIILAGRYANEPNPHTKFLRIMRGTQGALIVASALQIIFGFSGLWRNVARYLSPLSAAPLVMLVGFGLYELGFPSVAKCVEIGLPELILLVIFAMYLPHAIHMMKSIFDRFAVLFTIPIVWLYAYLLTVGGAYRNAPPKTQFHCRTDRSGIIGGAPWIRVPYPFQWGAPTFDAGEAFAMMAASFVALVESTGAFIAVSRYASATPLPPSVLSRGIGWQGIGILLDGLFGTGNGSSVSVENAGLLALTRVGSRRVVQISAGFMIFFSILGKFGAVFASIPPPIFAALYCIFFAYVGSAGVGFLQFCNLNSFRTKFILGFSVFMGLSVPQYFNEYTSVAGYGPVHTHSRWFNDIVNVIFSSKAFVAGFVAYLLDNTIHRHDSSVRKDRGHHWWDKFRSYRTDTRSEEFYSLPFNLNKFFPSV

SEQ ID NO: 51821 - protein, 533 aa, Oryza sativa
MAGGGAAPPPKQEELQPHQVKDQLPSVSYCITSPPPWPEAVILGFQHYIVMLGTSVIIPSALVPQMGGGNEEKARVIQTLLFVAGINTLCQSFFGTRLPAVMGGSYTIVAPTISIILAGRYSNEADPHEKFLRTMRGTQGALIIASTIQIILGFSGLWRNVVRLLSPLSAVPLISLAGFGLYELGFPGVAKCVEIGLPEIILLLVFSQYLPHVIHVAKPVFDRFAVIFTIAIVWLYAYILTASGAYKNARPKTQVHCRVDRSGIISGAPWIRVPFPFQWGAPTFDAGESFAMMMASFVALVESTGTFIAVSRYASATMIPPSVLGRGIGWQGIGTLIGAFFGTANGTAVSVENAGLLALTHVGSRRVVQISAGFMIFFSILGKFGAIFASIPLPIFAALYCIFFAYIGACGLSFLQFCNLNSFRTKFIVGFSFFMGLSVPQYFNEYTSVAGYGPVHTGARWFNDMINVPFASKPFVAGLIAYFLDNTIQRRDNGVRRDRGYHWWDKFRSFKTDTRSEEFYSLPFNLNKFFPSV

SEQ ID NO: 51822 - protein, 607 aa, Oryza sativa
MAGDKTAAPPPPDAAAFSPDGELFAAVSDRRVQVWRTGGGEIIEGWTDPISAPDDSYSCIACCSVQKKHKKDGNLILVAVGTTNGQVLVLDSTGVIWKNAPHTCKVVSLHFARHGRVLYTAGMDGIICELNSRTGESKDTIKATKKPINSFTLSHDEKFMGVSSKITRLFSVSEKKEILRIPSDVGPVQLMSVSDDGRFLVSHVDNNKEVQVWSCDQNSCTIVSTASLTMQNQPKIVECTRSTSYGDGGIVLAVSKKGVAHVWHLQTLSQNEVLPTKISVKNSLDKKGRIPIISAKLCDTNEDNTVKVHVVFGSPNFLQFKVVELDDTCKDINLVAEYDELAKQDMVSPQERNLEQEAKANSKDAEPVQGKAKKRTSSVLDSTNDTTKEVNPEYNLDEPTMEEKLASLNLLNKSEITEEQPPSLAPPSADSVHVLLKQALRADDHTELLKCLYNRDEKVIVKSVSLLTPADVVKLLKFFVLLIQSRGAKLVCMLPWLQALLCRHMSSIVSQESSLLLLNSLYQLIDARTSTFKSALQLSTTLDYLFSGVSDGETDEEDAVPPIIYEDKDTDDEESEVDAMETDEGSQELGDVTDASEHSDGSDIMTD

SEQ ID NO: 51823 - protein, 181 aa, Oryza sativa; identical to SEQ ID NO: 35235

SEQ ID NO: 51824 - protein, 181 aa, Oryza sativa; identical to SEQ ID NO: 32597

SEQ ID NO: 51825 - protein, 347 aa, Oryza sativa
MGIGRARWVALLVGLAAAAVVATLGASEGDADPLYRACVDECEKTGSLRETSVRHCQVPTDDHPADKSWYAHEPLYLQWKEWNCKSECRYHCMMERESEREQLGLGSVKYHGKWPMKRASVFQEPISAALSALSLLVQFNGWLSFFLLLSYKLPLRPETQMTYYEYTGLWHIYGLLAMNAWFWRAIYHSCDTVWTEKLYYSSFAAFIGYSLILAILRTLNLKDEASRVMVAAPILAFTTTHILYLNFYELDKGLNTKVCTAASLAQFLLWAVWAVMTKHPSCFKILFVIIGNVFSIVLETYDIPPRWGYVDGRVFCVAISIPLTYLWWKFAKEDAEMRTSTIIKKTR

SEQ ID NO: 51826 - protein, 301 aa, Oryza sativa
MAAARMKNTTMGCAFLLAAFAMAAAFVPVAESRTTPVEKTTTTQAEDGVKKPDCVPAFDPRSFPGHGGTTTPTPIPGHHGGGGSSGTTPSHGGGPSGGALPSPSHGGAAPSHGGGYGASPPVTPSPGGGYGGGSPAPSHGGGAYGSSPSTPSGGGSSPTPSHGGGAYGGGGAPATPASHDGHGLIPTTPGTCDYWRSHPMEMWSALGRWPSSVGHFFGSGSGGAGTGMSIQDALANTRGDGAGELMREGAAALLNSMTRSGFPYTAEQVRDAFAAAAGGGSDGAAAAQAAAFKKANEGGRA

SEQ ID NO: 51827 - protein, 170 aa, Oryza sativa; identical to SEQ ID NO: 35086

SEQ ID NO: 51828 - protein, 868 aa, Oryza sativa
MQQPQASSMTAAARRRQLQGSVLAGKMVLVRKALDTNLNSGDVVCQLVSSTVGDPDNGNRGMLGQEACVHINSELHPTPYEASTFSFEFIWDMKKQGVPGAVIVKNYCDEEFFVNTITLDIVPGYGTIVFTAESWVYPDEIYDHLPRVFFSNQPYLPNQMPAPLVPYREEELRNLRGDDNPGPYKDHDRVYRYDVYNDLGEPDSGNPRPVLGGSDEHPYPRRCRTGRRRTNTDPDSESRNVGFPLTNHFYVPRDEVFNDRKKAYFDTNNLKLYIMQKYATFLLHADQQTPFEFDSFADVLSLYDEGSINLPGWLNTFLQPLLGIIPFKLLQQVLTPDSEFILKFPMPAVIREDKTAWQTDEEFAREMLAGTNPVVIRRLGETEFPPKSKLDTSKYHNQNSRITAAHVEKCLEVEGLTVEQVLADGRLFILDHHDHFMPYLLDANHQPDTFVYATRTLLFHRNDGTLQPAAIELSLPRFEAGSTLISSVGEVYTPASDGVEGHIWQLAKAYVTVNDYSWHQLVSHWLNTHAVMEPFAIATHRQLSVAHPIHKLLHPHYRDNLFINALGRQSLINAGGSSENTVFLGKYGLSMTSEVYRNWNFTEQALPEDFIKRGVAKRRSNGELELLIKDYPYAVDGLAIWSAIETWVRDYCAIYYADDAAVQGDAELQSWWKDVREEGHGDLKDHKWWPEMKTVAELVQSCATIIWIASALHAAVNFGQYMYAGYVPNRPSVSRRPMPKPGTDLYRELELHPEKEFLLTITKQDLSIAGIALVELLSSHSDDEVYLGQRDSPNWTSDLDAMNAFDRFRERLLEVEKNIVAKNDKGSGFKNRTGPVNIPYNLLFPYASGDAEANTGVTGKGIPNSASI

SEQ ID NO: 51829 - protein, 947 aa, Oryza sativa
MERSTPGTMAARSWLLLLCFVAVATAGVLQARAQPDSNGFISVDCGLPGKTGFVDDKTKISYAADDGFTDGGACHNISAEYITPGLAKRYHTLRSFPDGKRNCYTLRSLVAGLKYLFRTTFFYGNYDGLNKLPVFDLYVGVNYWTMVNITGPGDAVIVEAIVVVPDDFVQVCLVNTGAGTPFISGLDLRPLKNTLYPQSNATQGLVLLGRLNFGPTDYTDVIRYPDDPHDRIWFPWVDSTKWSQISSTKKVQDLDNDMYETPTAVMQTAITPRNASRNIEFSWDPVPLPNDPTPGYIAIFHFSELQLLPGNAVREFYINLNGKPWSLTAFKPEYLYNDATFNRNPFLRYPQYNISINATANSTLPPLINAVEVFSVIPTATIGTDPEDVAAITAIKEKYQVVKNWMGDPCVPKMLAWDKLTCSYAISNPARIIGLNLSSSGLSGEVSSYFGNLKAIQNLDLSNNKLTGPIPDALSQLPSLTFLDLTGNQLSGSIPSGLLKRIQDGSLNLRYGNNPNLCTNGDSCQPAKKKSKLAIYIVIPIVIVLVVVIISVAVLLCCLLRRKKQAMSNSVKPQNETVSNVSSNGGYGHSSSLQLKNRRFTYNELEKITNNFQRVLGRGGFGYVYDGFLEDGTQVAVKLRSESSNQGAKEFLAEAQILTRIHHKNLVSMIGYCKDGEYMALVYEYMSEGTLQEHIAGKNNNRIYLTWRERLRIALESAQGLEYLHKACNPPLIHRDVKATNILLNTRLEAKIADFGLSKTFNHVNDTHVSTNTLVGTPGYVDPEYQATMQPTTKSDVYSFGVVLLELITGKPSILREPGPISIIQWARQRLARGNIEGVVDAHMHGDHDVNGVWKAADIALKCTAQTSTQRPTMTDVVAQLQECLELEDRRCGMEDTYNNFYAGNNNDPNSSYNMYNTDQSTDVSQNNTMEHNFERVPTMATGPVAR

SEQ ID NO: 51830 - protein, 291 aa, Oryza sativa
MSSRRDVLAVVLVAALLPPALSRGLWLGHHGLGHGHGRWRAPHVGGHGQGQGPQQHAPLGGGGWSSAHATFYGGGDASGTMGGACGYGNLYSQGYGTNTAALSTALFNNGLSCGACFEVRCDAGGGGSHSCLPGSVVVTATNFCPPNNALPSDDGGWCNPPRAHFDMSQPVFQRIALFKAGIVPVSYRRVACQKKGGIRFTINGHSYFNLVLVTNVGGAGDVHAVAVKSERSAAWQALSRNWGQNWQSAALLDGQALSFRVTTGDGRSVVSNNAVPRGWSFGQTFSGAQFN

SEQ ID NO: 51831 - protein, 734 aa, Oryza sativa
MAAAAAIAAALLRRYTSSQHHRRILLLPLLSHLQRAAPRSPSPWDPPPHHRFFFSSDVTAEGDSKPRPPLDGKQLWREVSTSEPATGASRLPKATWDAVVALLRRFGKDPAMSDQALALYIPASAFPTLARRFRHFLPARLSLESAEHLLSLPADDAHALLLPAFAEFCVTHLADELRKHESVMAAADLTAPHAWYPFARAMRRRVVYHCGPTNSGKTHNALTRFAAAKSGVYCSPLRLLAMEVFDKVNALGVYCSLRTGQEIKEVPFSNHVACTIEMLSTEEPYEVAVVGEIQMMADPVRGYAWTRAVLGLKADEIHLCGDPSVLKIVRKICADTGDDLEVHQYERFKPLVVEAKTLLGDLKNVRSGDCIVAFSRREIFEVKLAIEKFTKHKCCVIYGALPPETRRQQAKLFNEQDNEYDVLVASDAVGMGLNLNIRRVVFYSLAKYNGDRMVPVAASQVKQIAGRAGRRGSIYPDGLTTTFLLDDLDYLIQCLQQPFEEAKKVGLFPCFEQVESFAIQFPDLTFNELLDKFRENCRVDSTYFMCHQESIKKVANMLERIQGLSLKDRYNFCFAPVNIRDPKAMYHLLRFATNYSQSRRVSIAMGMPKGSAKNDTELLDLETKHQVLSMYLWLSHHFEEDHFPHVQKAEEMSINIADLLAKSLAKASWKPTSRQQAKPRRENEEDNDVEQASDDNAKNDSEDGCERSISRIKPFMRKRLDRPSQDPSSLNFVA

SEQ ID NO: 51832 - protein, 409 aa, Oryza sativa
MRRGSSSSSGFGGHLLWLVLVLWSWRIAAAQAQQAPKTDPIEVSALNTIMGRWGLTAPSEWNISGEPCSGVASDNSDWDNYPKDPAIKCDCSSNDNTICHIIKLRVRKLNVVGRIPAELQNLTFLQDLNLNQNYLTGAIPSFIGKFASMKYLGLGFNPLSGQLPKELGNLTNLLSLGISLDNFTGELPEELGNLTKLEQLYIDSSGFSGPFPSTISKLKNLKYLKASDNEFTGKLPDYLGSLTELEDLAFQGNSFEGPIPASLSNLTKLTNLRIGDIVNGSSSLGFISNLTSLTNLVLRNCRISENLETVDFSKFAALTMLDLSFNNITGQVPQSILNLGMLQFLFLGNNSLIGTLPDVISSSLKVIDFSYNHLTGTSPSWATQNNLQLNLVANNIVLGSTKNRLFVCG

SEQ ID NO: 51833 - protein, 197 aa, Oryza sativa
MAMARSILLLLLLAAAASASADAPFLVAHKKVSLSRPKPGVERLAVSLDLYNQGSATAYDVSINDDTWPKEAFELVSGEMSKTLERLDPGVTASHAFVLETKVQGMFQVHLRLLPIVFPQRLRFRRPIQPPSLHLMFLLRGLQKRSLNGLRGLWRSTGRWCPLLAWLECLSTWLQARQNPAVQKQARRGVDILAYHI

SEQ ID NO: 51834 - protein, 216 aa, Oryza sativa
MRDGATLDQNNNGAQDKYQGQSERCETQMTKEAGNHLRPSCMSSFSMRTVHEWWPNSILAGRLFRWLEESCDDDITGVWFKHDKPTSIEISAKEIKMQVIRGGILHADLCSALIRLYQQLDAKMNTNPCGQRWRHFFLPQFAKALMFERNFSSMKAVSDMFDQHISGYKIQNCQLLISPVQLASDTWACYIWDMGEEANAHFGPCLATPGGLRCEC

SEQ ID NO: 51835 - protein, 1034 aa, Oryza sativa
MVLVTTRFPSIAQMVKTTKPIELQGLGDSEFFTFFEECIFGHDKPEYYEDNIIDIARKISKKLKGFPLAAKSVGRLLKYRISQERWIEILERNEWQHQTNNDDIMPALQISYDYLPFYLKRCFSYCALYPEDYHFNNIEISHFWEALGIIDSGSHKNRAEDIGLKYLDELEGNGFLVKKVDDRTGRQYYVMHDLLHELAQNISSQECINISSYSFRSDNIPWSIRHVSITLQDNYEDSFEREMENLKRKIDIGNLRTLMLFGEGNASMLILFKDLLKETKRLRVLFMHANSLQSFPHNFSKLIHLRYLKLEIPYDVELSLPNAVSRFYHLKFLDLGYSKCILPKDINHLVNLCLLNARKELCSNIPGIGKMKYLQRLEEYHVKKRDIGFELSELGDLTDLEGELKIFNLEKVATREEANKAKLMSKRNMKKLELAWGMVQRTTRSDVLEGLQPPSNLKALVIKNPGGSIGPSWLCGNICVNYLKSLHIEGVSWGILAPFGQLMQLEELTLNNIPSTRRFEPNFGGVTQQSFSHLKKVEFVDMPELVEWVGGAHCHLFSKITSIRCENCPNLSMLLVPSSRFSVSYAQDINTRWFPNLCSLEIENCPKLSLPPIPHTSMLTCVIVSERKTDLLRLQENKLISHGYRGALVFDNLDKVEDMSIEEMPHVSLTDLQKLSSLTRLAVKGCESMLFSEVEEGVIFPSVQQLEISDCRLTRNSLTKLLNRFPALTEFHLIFSSFEVGEEAVLQLPSSNLLSYVRIWCCKNLVLPVADGGGLHDLSSLQEVEIRGCGKMFDRCSMVEAGARSNKFFPASLRELNISDELSIQSMALLTNLTSLTHLTLINCDNLTVHGFDPLITCSLKELVVYKKADDEIHLYSLADDLFLEVATRMTKVIPAGGSYFQQLEKLEVDSISAVLVSPICSLLAANLRELRFRYDLWMESFTEEQEEALQLLTSLQCLKFRKCLRLQSLPEGLHCLYSLYKLNIAGCPEIMSLPKDGFPVSLERLRIRDCSIDLMVQVKELEASNPDLHIRLH

SEQ ID NO: 51836 - protein, 406 aa, Oryza sativa
MGASFVSYNCDRTQSSNCAGRCSCNSDVNCDPSKLGSDNGAQPCQYQVVVAEYSAKVSSSNVSEATSANPSEVRRIFTMGLPYTAHHGGQILFGPTDGYLYLMMGDGGNKGDPFNFSQNKRSLLGKIMRLDVDGVQSQSQIINQSLWGNYSVPKDNPFSDDRDLQPEIWALGLRNPWRCNFDSERPSYFYCADVGQDLYEEVDLISKGGNYGWRAYEGPYIYHPEWTPGGNTSLNSINAIFPVMGYSHSAINKNTGSASITGGFVYRGSSDPCLYGRYIYADLYASAMWTGTETPESSGNYTSTLIPFSCSKNSPIPCESASGSNQPSLGYIFSFGEDNNKDVFLLTYKGVYRVVRPSLCGYTCAAEKPETNNNGTSPSGSSSFASGRRIGKLAVVMAFVLCALFF

SEQ ID NO: 51837 - protein, 456 aa, Oryza sativa
MQGAMARVRGPFTPSQWVELEHQALIYKYLAANSPVPHSLLIPIRRSLTSPYSPAYFGSSTLGWGSFQLGYSGSADPEPGRCRRTDGKKWRCSRDAVADQKYCERHMNRGRHRSRKHVEGQPGHAAKAMPAAVAAAAASATQPSAPAAHSGGAVAGLAINHQHQQMKNYAANTANPCSLQYSRDLANKHNESEQVQDSDSLSMLTSISTRNTGSLFPFSKQHNPFEVSNSRPDFGLVSPDSLMSSPHSSLENVNLLTSQSLNEQQSSVSLQHFVDWPRTPAQGALAWPDAEDMQAQRSQLSISAPMASSDLSSASTSPIHEKLMLSPLKLSREYSPIGLGFAANRDEVNQGEANWMPMFRDSLMGGPLGEVLTKNNNMEARNCLSESLNLLNDGWDSSSGFDSSPVGVLQKTTFGSVSSSTGSSPRLENHSVYDGNSNLRDDLGSVVVNHPSIRLV

SEQ ID NO: 51838 - protein, 657 aa, Oryza sativa
MGEEEAMVCTTQDTQRRRLEKEKHGKTVDKETQKPITSGTDQEGSVSWHRCFVHFTNNLVQPGETTQVNAHDVSCNASSSQKGGQTIEVTRPPYQNPCMMNKPPEISSGQRIDPLSFSMENSSSQMQDSESSKEPTNDYLNSQARKSIGKLIFEAGLEPGILHLPSFKDMVDVLAWAQVAIPTYESIMEEQLREIQCHARDLKKHWEMNGCSVILDTWESRCGKSFISVLVHCSKGMLFIKSMDVSDIIDDVDELAVMLFRVVEEVGVLNIVQVITNDESPYMQAAEHAVLKRYGYSFFFTLCADHCINLLLENIAALDHVNEVLIKAREITRFIYSHAVPMELKGKYIQGGEILSSSNLKFVAMFITLGKLVSERINLVEMFSSPEWASSDLASRSSFRHVYEVVKTDNAFWSAAADILKLTDPLITVLYKLEADNCPIGILYDAMDCAKEDIKCNLRDKHGDYWPMVDEIWDHYLHTPVHAAGYILNPRIFYTERFSYDTEIKSGTNACVTRLAKNHYDPKKVAIQMDRYRRKSAPFDSDSAIQQTMEIPQVRWWSAHGTDTPELQTFAIRILSQTCFGASIYNIDRSISEQLHVVKRTYPEQERFRTMEYLHYNLRLAHCEPCVRGASGAQQHSRLTSQLGDWISSGQTTSYYK

SEQ ID NO: 51839 - protein, 542 aa, Oryza sativa
MAAATAAVFALLMASALAGAAAGGDIVHHDDEAPKIPGCSNDFILVKVQSWVNGKEDDEYVGVGARFGPQIVSKEKHANRTRLMLADPIDCCTSPKEKVSGDILLVQRGKCKFTKKAKFAEAAGASGIIIINHVHELYKMVCEKNETDLDINIPAVLLPRDAGFALHTVLTSGNSVSVQQYSPDRPVVDTAEVFLWLMAVGTVLCASYWSAWSAREALCEQEKLLKDGREVLLNVENGSSSGMIDINVASAIMFVVVASCFLIMLYKMMSSWFVELLVVIFCVGGVEGLQTCLVALLSRWFRAASESFFKVPFFGAVSYLTLAVSPFCIVFAVLWAVHRHFTYAWIGQDILGIALIITVIQIVRVPNLKVGSVLLSCAFFYDIFWVFVSKRWFHESVMIVVARGDKTDEDGVPMLLKIPRMFDPWGGYSIIGFGDILLPGLLVAFALRYDWADKKSLQTGYFLWSMVAYGSGLLITYVALNLMDGHGQPALLYIVPFTLGALISLGWKRGELWNLWSKGEPERVCPHHMHMQPQPKTPPLVQ

SEQ ID NO: 51840 - protein, 412 aa, Oryza sativa
MMLAGHESNLSHAYGEIRNSTLMQCLCLFGVQIDLNSYNPRASPSESGFNMLLDLDGQKMEIWIQALRVIIGTVLPEERQACTQIFGSDSKVEEDCFARATMRFIQQLFAFGSLIANVKDEQYEKVPLLVQMLEEFLKLKPSIEALRYGDAKDAISQEADMLLEKLREEAVRLLLKFSEAQINHESYDNETIVLNGSVLSFPQYTMGVIKLLAGYSDTLNIILPVEVGGVGTVTTSPWKSYVLTLLTRLQLNIEEKSKSYKDECLRNVFLMNNAMYVLEKARSPDLKILLGDNWVTKQLVQVEQHATAYLRASWTEPLFQLKDKGINYTERSLILTKKFKNFNSIFGEISRVQTTWKVPNPQLRQHLRLVILQQVIPAYRAFVGRFGMLLNSKFIKYTLEDIENNVLDLFEG

SEQ ID NO: 51841 - protein, 349 aa, Oryza sativa
MVMVKLNAAVAAAAVVLSLLVVVAVHPAAADAGGDWYGKKSIEETVRKEVEKAIKHNPGVGAALVRLVFHDCWVNGCDGSVLLDKTPYSSSTEKAAANNIGLDGFDVIDAIKSKLGAAVSCADIVVLAGRDASAILSGGRITYDVGTGRKDGVVSSAAAADAVLPESTFDFAQLKDNFASKGLTQGELVILSGAHSIGVAHLSSFHDRLAAATATPIDATYASALAADVERQKGVQRTDNPAEKNNIRDMGAAFQSAAGYDAAGVDTAAVGALDNSYYHNNLQNRVLFKSDWVLRTDGDAAADLAEYRDNATKWDVDFAAAMAKLSKLPAEGTHFEIRKTCRCTNQNYY

SEQ ID NO: 51842 - protein, 443 aa, Oryza sativa; identical to SEQ ID NO: 49242

SEQ ID NO: 51843 - protein, 486 aa, Oryza sativa
MASPLAGVVRLAAASRALLLALSLLSRLLFRPYDTSASLHPPCLLPSPSPNSTTTAANSIASLAVWDGVHFLRAAECGYEYEQSFAFLPLLPASLNLLARSVLAPLVPVLGYRAVLVVSGYVLNNVAFVAAAAYFYRLSVLILKSPSAAYRASVLFCFNPASVFYSSLYSESLYALFSLGGVFYVFTGANTIAMIMLALSGSARSNGALNAGYFCFQALLHAYDAAFQKKQPMLAVQVLVTGFLRSVFVFIPFFAFQAYGYLNICLHGNMEELRPWCKSKVPLLYGFIQSHYWGVGFLRYFQVKQLPNFLLASPVLSLAVYSIVHYTKMLRQLFESNSIHELIVATVEGRSIEAYKSSDVDTVLKSKVSTNVTNKAQGNAVAKRRKSVATETDSNDQIIEVNKDVCPIVVLPFILHLAFMTFTAFFVMHVQVSTRFLSASPPIYWAASHILVSPSSSKRWGNIICAYFIAYILLGSLLFSNFYPFT

SEQ ID NO: 51844 - protein, 265 aa, Oryza sativa
MADPAAEETVPAPPPTPAVDPAEGASDAPQPVELPADTAAASPEKVSSPPPEPAPAVRSRGFRLLGEDTSVHKALGGGKTADVLLWKDKKTSAVVIGGATVIWILFEVLDYHLLTLLSHVMIGALAILFLWSKATTFIKKSPPDIPVVQIPEDVAVNVSRALRSDINRALHLFREIALGHDLKKFLGVIVALWVLSEVGSCCDFLTLIYVAVLMLHTVPILYDKYQDKVDHFAGRAHSEACKHYEVLDAKVLSKIPRGPVKPKKN

SEQ ID NO: 51845 - protein, 276 aa, Oryza sativa
MSKGPAPFLNIGKRAKDLLYKDYNFDQKFSLTTTSNSGLGLTATGVKIDELFIGDIQTQHKSGKTTVDVKIDSESRVSTTVTVDEALTGLKTSFSFRVPDQKSGKLDLQYLHDHFALNSTIGLTSTPLIELAATIGTNELSAGAEVGFDSTSASVTKYNSGICYNKHDFSAAVLLADKGETLKASYIHTFNETNGATVAAEVTHKLKTKENYFTIGSSHAIDSSTLLKTRFSNGGKVGVLCQHEWRPKSTVSISAEYDPKVVRSPSRFGVAIALKP

SEQ ID NO: 51846 - protein, 307 aa, Oryza sativa
MAFFLPLAFSLFLAVISAYVLQLLADARRRLPPGPWPLPLIGNLHQLDHLPHRSLARLAARHGPLMSLRLGTVRAVVASSPEMAREVLQRHNADIAARSFGDSMRAGGHCENSVVCLPPRRRWRALRRLSTVGLFSPRRLDAMRALLEEKVAELVRRVSGHAARGEAVDVGHAAHVAALGVLSRTMFSVDLDPEAAREVSDIVDEASVLGTGPNVSDFFPAIAPADLQGVRRRMARLVKRMYAIIDEQIERRMHGRTAGEPRKNDLLDVMLEEGESKEDSNEINRDAIRGLFTVSTCTTCGRILICE

SEQ ID NO: 51847 - protein, 296 aa, Oryza sativa
MLISPMLAAPPPPAAAASPRCRGFLPAAAATGSRRHRGGCRLLRRSAPPRVGAVTSTVRTRREEGRLDRDELRRLCQEPNPEAAVNLLDEMLVRGGAGALADLAPEEQAAVLQACGEARSLASLRRAHRLLSKSLPGIATPILHMISTLYCKLGARGDARRALEGASRPRGKDHEQEQEHGDEAKRREAYEKVRELHEEIRAAGYVPDTRYVLHDIDEDAKARALMYHSERLAIAFGLVSTPPGTPLRVIKNLRICGDCHNAVKLIAKVTGREIVVRDNKRFHHFKDGACSCGDYW

SEQ ID NO: 51848 - protein, 485 aa, Oryza sativa; identical to SEQ ID NO: 35662

SEQ ID NO: 51849 - protein, 135 aa, Oryza sativa
MRTAAVLLMALALTLAAAGTGTGAELETAAIRRRQSRFLASAKNSPPLSYYDCKRKPPSVCLEPGSPGATCCKGACVDTGSSFAHCGSCNHVCKYGETCCGGHCVDLLSDRKNCGDCFVRCPSKKCSFGLCDYAG

SEQ ID NO: 51850 - protein, 58 aa, Oryza sativa
MRRHAPPLLMIELRMACTRLNFFSVEYLSQFFSHQFTMDRWGRMFVPCLGRSVWICLS

SEQ ID NO: 51851 - protein, 209 aa, Oryza sativa
MAGSSEQQLVANAAATTVAGNGSRFAVTCGLLRQYMKEHSGSNGGGGFLPAVTAMSLMTGGADAEEEAPEVRKTMELFPQQAGTLKDTQERKEITEKAQLTIFYGGSVVVFDDFPAEKAGELMKLAGSRDSTAAAAVSDAGAAAGQPCLPDMPIARKVSLQRFLEKRKNRIVVAEPLPESEKKEAESSKRAKKDDGGASWLQVNPTLSL

SEQ ID NO: 51852 - protein, 738 aa, Oryza sativa
MHVMQCHAAAAAAAATVPAYCALIRPLASAGRVDAVDAAVASARSRLSPATIHPLYVASIRAYARAGRLRDAVDAFERMDLFACPPAAPAYNAIMDALVDAAYHDQAHKVYVRMLAAGVSPDLHTHTIRLRSFCLTARPHIALRLLRALPHRGAVAYCTVVCGLYAHGHTHDARQLFDQMLHTHVFPNLAAFNKVLHALCKRGDVLEAGLLLGKVIQRGMSINLFTYNIWIRGLCEAGRLPEAVRLVDGMRAYAVPDVVTYNTLIRGLCKKSMPQEAMHYLRRMMNQGCLPDDFTYNTIIDGYCKISMVQEATELLKDAVFKGFVPDQVTYCSLINGLCAEGDVERALELFNEAQAKGIKPDIVVYNSLVKGLCLQGLILHALQVMNEMAEEGCHPDIQTYNIVINGLCKMGNISDATVVMNDAIMKGYLPDVFTFNTLIDGYCKRLKLDSALQLVERMWEYGIAPDTITYNSVLNGLCKAGKVNEVNETFQEMILKGCHPNPITYNILIENFCRSNKMEEASKVIVKMSQEGLHPDAVSFNTLIYGFCRNGDLEGAYLLFQKLEEKGYSATADTFNTLIGAFSGKLNMHMAEKIFDEMLSKGHRADSYTYRVLIDGSCKTANIDRAYMHLVEMIKKGFIPSMSTFGRVINSLTVNHRVFQAVGIIHIMVKIGVVPEVVDTILNADKKEIAAPKILVEDLMKKGHISYPTYEVLHEGVRDNKLTRKHRMLLLNNLSHS

SEQ ID NO: 51853 - protein, 219 aa, Oryza sativa
MSSSYKIALVLSLLAAPLLCALAAGDGQHRPPSKPILTRLAKDPSTSLYTASVKNGGGQLVLDLAGPLVWSTCPGKHRTIPCGAGVCAVANRNHRPNCPYTAAGSNGGDGGRCACSATAYNPASGQCGYGDLTTVQLSANATDGKNPLFQVWLSAVASCAPQPLLGSLPAGAAGVAGLSRAPLSLPLQVAGQLKVEKKFALCLPTAGDVGAAIFGGGPF

SEQ ID NO: 51854 - protein, 853 aa, Oryza sativa
MVRFTAEELRASMDKKDNIRNMSVIAHVDHGKSTLTDSLVAAAGIIAQDVAGDVRMTDTRADEAERGITIKSTGISLYYEMTDAALRSFEGKRDGNSYLINLIDSPGHIDFSSEVTAALRITDGALVVVDCIEGVCVQTETVLRQSLAERIKPVLTVNKMDRCFLELQQSGEEAYQAFSRVIESVNVTMAPYEDKNLGDCMVAPEKGTVAFSAGLHGWAFTLSNFAKMYKAKFKVDEAKMMERLWGENYFDHTTKKWTTTAPSTSSKTCQRGFVQFCYEPIRRIISACMNDDKENLWDMLTKLKITLKAEEKELTGKKLMKRVMQAWLPASDALLEMIVFHLPSPAKAQQYRVDTLYDGPLDDPYATAIRNCDPKGPLMVYVSKMIPASDKGRFFAFGRVFSGTVATGNKVRIMGPNFVPGEKKDLYVKTVQRTVIWMGKKQESVDDVPCGNTVAMVGLDQFITKNATLTDEKAVDAHPIKAMKFSVSPVVRKSVACKNASELPKLVEGLKRLAKSDPLVVCTIEESGEHVIAGVGQLHLEICIKDLQEDFMGGAEIIVGPPIITYRETVTKNSCRTVMSKSPNKHNRLYMEARPLDKEDLQQDEPSLCKAIDDERIGPKDDIKERGKILSEEFGWDKDLAKKIWAFGPETKGPNLLVDMCKGVQYLSEIKDSVVAGFQWASKEGALAEENMRGVCFELCDVTLHSDSIHRGGGQLIPTARRAMYAAQLTASPRLMEPMYQVDIQVPKTAVGNVYGVLNSRNGELVEESERTGTPLSNLRFYLPVAKSFDFTEKLRAETSGQAFPQCIFHHWQTMRSDPFQEGSEAAKVITDIRKRKGLKDIITPLSDYEDKL

SEQ ID NO: 51855 - protein, 250 aa, Oryza sativa
MEVKCLLLLALFLLLGTHGGEAQPLVPAVMTFGDSSVDVGNNDYLKTIIKANFPPYGRDFKNQVPTGRFCNGKLATDITAETLGFESYAPAYLSPDASGKNLLIGANFASAGSGYYDHTALLYHAIPLSQQLEYFKEYQSKLAAVAGSSQAQSIINGSLYIISAGASDFVQNYYINPFLYKTQTADQFSDRLVDIFKNTVAQLYSMGARRIGVTSLPPLGCLPAAITLFGYGSSGCVSRLNSDARTSTAR

SEQ ID NO: 51856 - protein, 245 aa, Oryza sativa
MAPPAAGAAIPRDALLRIAAPLRDSLAAAPYAPPEGSSTSTKSLLSSLLPSSHPQAPAGGGGARSKEAAGLLLFCAAARAASPEYPALHWVPVALSDAAAAAVEEMAAAGGWGDVGEMVVGMMPEVVPPLKDVVKATCVDTEDEEIGKEKPPKEHAVVAAHQFRWLVSQVTYPKLGDLCWLVIPCALTALDHWSPEVKEQGMVSFMHIAKSVKATELNLYEDAILDACCHNIPADDELWYRAVEV

SEQ ID NO: 51857 - protein, 344 aa, Oryza sativa
MSKLQLRPPLLATLHCSLLVLLIINGAAAAGKTGELTVIWGRNKDEGSLRSTCDTGLYTTVVISFLTVFGHGRYRTDLAGHPLAGVGADVKHCQKAKNVTVLLSIGGAGDQYSLPTAKSAQDVAEHLWHAYLGGGRRGRVPPVRRRRARRRRRLRRPRPVGPLRRARQAPEELRSREAGSAPDGVAGVLAGAVRRRGGDDEDAVAVRAAARAVLQRELVRLQLLRDAAVLGRVEDVDVEVPGGAGAGGVAGDGGDERVRGPADAAGERAIVGAGRCQLRRRHALGSLLRQDHRIRPCHQRHCLIAMLLQCLYYMVHCVVYQPALRHLLLSVPVYWHMHVRMGQA

SEQ ID NO: 51858 - protein, 401 aa, Oryza sativa
MADRYFPNDLPDFVAEAPDGGRGLLSLPYSSLSERLLRAALRIKDKVMEETWTRARRQVTDYTLYTGALGTALLLFKSFQVTGNRADLALAGDIVKECDAASRGLPRRFLTFICGRAGVCALGAVIAKHCNDQLLLTHYLSSFDEIIVTEKVPNELLYGRAGYLWACLFLNTHLGEKTIPHEHITSVAKDIIDEGRKLAKKGNCPLMYEWHGKKYWGAAHGLAGIMHVLMHTELKLDEKDDVKNTLLYMIRNRYPTGNYPSSEGSESDRLVHWCHGAPGVALTLAKAYQVFHDEHFKQTAAEAAEVVWNRGLLKRVGICHGVSGNAYVFLSLYRLTGNVEYLYRAKAFACFLLEKADQLIADGAMHGGDHPFSLFEGRAGMAYLLLDMVSPSESKFPAYEL

SEQ ID NO: 51859 - protein, 370 aa, Oryza sativa
MIRRFLYIADHCFTGPSLSHRLRRVNPSHLFYPDGHPLATKPERATVEVEDARLPPPAMAFCSPGTTATAMGMEFMRRNDGSIVGIDHTGRAVLYDPAARAVRTLPALAAPKLMPVSAAVGDDLYVMETTPLPDGAGCFEALVRLEDNPAESDSDKWEVGDNYLWQPLPPPPPPPSPCVNAYAAGFEGSSRGMICGYAVAGDGDGGTRILVSTTTNGTYSFDTASSAWSKAGDWELPFRGQAEHVPEHGLWFGISDMDHTILGAWNLSSTIQQPQPPVASLQLKGFSVESHSDDRRRELEVYTSQVVHLGGGKLCVAKMFSVNRRERGKINFAMLTGVEVVRCRGGKLRIVKHKSCRYNFGEDYTPDYLL

SEQ ID NO: 51860 - protein, 951 aa, Oryza sativa
MEPQLTPGAVQAIAEHPDGTGTIQPVLQVVDVRPVTAKNAPPTPKPAERFRMMLSDGVNTQQSMLATALNPLVKDATLRPGTVVQLTDFMCNTIQGKRIIIVVKLDVLQNDCIVIGNPKHYEPKSLTKEQDPNLQASVAQTNNGTYSGGASMLGPSVAPRAEQAASNSSYGGPYNSAQGMLGSSIGRTVEPGPANVSAVGSYGAISAQNTTNANMMQPTSQLNIMNANTMQPTSQLNTMNANTMQPTSQLSSLNPNQNQRFAAPASGGVFGPPGNAYGQPSRPSYQQPPPVYMNRGPASRNDSATRIIPITALNPYQPKWTIKARVTAKSDIRHWSNARSSGTVFSFDLLDAQGGEIRAQCWKESADKFFGQIEVGRVYLISRGSLKPAQKKYNTLNHDYEITLDIGLSTVEVCSDDDNSIPRLQYNFRQISELENMANETIVDLLGVVTSVSPSATIMRKIGTETRKRSIQLKDLSGRSIEVTLWGNFCDAEGQQLQLQCDSGSNPIIAFKGARVGDFNGKSVSTIGSTQLIINPDFPEVERLRQWYMTEGKTAPCISLSREMLNMGRTDARKTIAQIKDENLGRLEKPDWITVKAAISHVTTESFCYPACPKLLPVGRQCNKKAINNGDGMWHCDRCDESFQNPEYRYMLRFQIQDHTGSTYASAFDEAGEQIFGRKAGELFSIRNVDQDDAQFAEIIEGVRWHLYLFKLKVKEETYNDEQSLKCTAVKVEKLDPSKESNVLLGAIDNLLLDPKGQSDLAPNAGFTDPVGGHGAPTSSNAYAMNTGGVNQFGQQASISAGMSTPLAATRNLQTCSICGANGHSAQICHVGADMDMQETSAGGSSMGNYNSIAGNGSSECYKCKQPGHYARDCPGQSTGGLECFKCKQPGHFSRDCPVQSTGGSECFKCKQPGHFARDCPGQSTGAQHQTYGNNVAASRGYNRQSFVGGY

SEQ ID NO: 51861 - protein, 214 aa, Oryza sativa
MKITALLVLKSPGDGDSSSGGGGGEQEQEQQAAVVVANATDVSHFGYFQRNPAREFILFVARTVAARTPAGRRQSVQHEEYKVHCYNQNGLCAIAFTDDHYPVRSAFSLLNTVLEEYHKTFGERWRTAKADNTQPWQYLDDALTKYQDPAEADKLLKIQRDLDETKIILHKTIDSVLSRGERLDSLVEKSSDLSAASQMFYKQAKKTNSCCTIL

SEQ ID NO: 51862 - protein, 189 aa, Oryza sativa
MAGGGRADDERRIGVAMDYSASSKRALDWAIANLLRRGDHLVVLHVLHHGGEEAKHALWGKSGSPLIPLSEFRDPTAMQQYGVHCDAEVLDMLDTAARQLELTVVAKLYWGDAREKLCDAVEEQKIDTLVMGSRGLGSIQRYNSYFCLQCCCLINQESKLQALTIELAFGPVANIPVQIDKLCRERCTA

SEQ ID NO: 51863 - protein, 402 aa, Oryza sativa
MVLEATMICIDNSEWMRNGDYSPSRFQAQADAVNLICGAKTQSNPENTVGVMTMAGKGVRVLVTPTSDLGKILACMHGLEVGAEANLAAAIQVAQLALKHRQNKRQQQRIIAFIGSPVKYDKKVLETIGKKLKKNNVALDIVDFGETDDDKPEKLEALISAVNSSDSSHIVHVPPGENALSDVLISTPIFTGEEGGSGFAASAAAAAATGAAGFEFDVDPNVDPELALALRLSMEEERARQEAIAKKAAEESSGAENKDHASSSNADSVMAEAEPASNAADDKKDQPKEDDDAQLLQQALAMSMEEGSSGAAAADAAMAEAAVDDQDLALALQMSVQDAGGSSQSDMSKVFEDRSFVTSILNSLPGVDPNDPSVKDLLASLHGQGEQEKKEDKSDKPEDEKK

SEQ ID NO: 51864 - protein, 355 aa, Oryza sativa; identical to SEQ ID NO: 30634

SEQ ID NO: 51865 - protein, 203 aa, Oryza sativa
MTDLDDNIVAIPNPSGRGPGYRYFGAAKKLPGVRELFDKPPEVRKRRTRYEIHKRINAGYYGYYDDEDGMLERLEAVAEKRMRNEVITEWHRVERVRREAMKGVVSGEVASAGGRGGEAAREVLFEEVEEEVEEERRLEEEKREREKGEEAGKEFIAHVPLPDEKEIERMVLERKKKELLSKYTSDALQVEQEEAKEMLNVRR

SEQ ID NO: 51866 - protein, 190 aa, Oryza sativa
MVALSIFMVMGRLCPPAESIDPPVRGHSRRRRSIHHPRNCPAPLPRKPRKRAPRKPISAADDKIGDLDARLGNGGEDSCSMLIFRSSRDRVHVPISRHPAIRRGRGSPSSSHHRARLLPCAAPCRSSSSTASPATTTARRSGVGADGQLGLPMLPLRLPPCSHHRRHRLPHLLSCLAPPASSPPAAALPE

SEQ ID NO: 51867 - protein, 384 aa, Oryza sativa; identical to SEQ ID NO: 37105

SEQ ID NO: 51868 - protein, 243 aa, Oryza sativa
MAAAANLEDVPSMDLMNELLRRMKCSSKPDKRLILVGPPGSGKGTQSPIIKDEYCLCHLATGDMLRAAVAAKTPLGVKAKEAMDKGELVSDDLVVGIIDEAMKKPSCQKGFILDGFPRTVVQAQKLDEMLEKKGTKVDKVLNFAIDDSILEERITGRWIHPSSGRSYHTKFAPPKVPGVDDVTGEPLIQRKDDTAEVLKSRLEAFHKQTEPVIDYYSKKALVANLHAEKPPKEVTAEVQKVLS

SEQ ID NO: 51869 - protein, 543 aa, Oryza sativa
MGEVKENEVVEIFEHDHDNKIRSPENSVPPAMVLDLNEGFGEGSEEGGVGEDGDEEDDDEDDDDDDDDDGGSTSEVAGGGRSSSNNSSTNHNSGSDKDHDMNSSSSKADGGGDRVPTVRQYNRSKLPRLRWTPDLHMAFVHAVERLGGQERATPKLVLQMMNVRGLSIAHVKSHLQMYRSKKLDHESGHERGAISSVFSPMEFHMRRGDHRFHHHDMFFQRAAAAGVSPFSSRMLHENGGGFFASRNPGLPESSRLYGLFQRRQQAPMQKFDFKNCNSFSRNQEWAFNQQHAAARAAGAVNGHGPAKGLIHEMIFRKEGKPTSHLFDVRDAIASTRVTSATTAAAADHRLDGAGKAGNFDWIGSSSSRPLTRTMSAAAAATMGDHHHLRWRGGAAGSGNTTASSDPVVASEAALGSLLERAKTKATEAMRLETPVKMTAAAVAAEEINGRTPDLQLSLSPNAGDHRSAGEKRKFLSEQEVDSDKQQLPLTLSLSLRGGGDNGGGGGAEAAGRLEEEMTGSSSSKKAALGLSTLDLTMSIKALE

SEQ ID NO: 51870 - protein, 474 aa, Oryza sativa; identical to SEQ ID NO: 35629

SEQ ID NO: 51871 - protein, 703 aa, Oryza sativa
MPEEDPASAMEETAVANGGAADDVAAPDKDNDIKEKAGKDNEVAVENKNAEEQNKGGSENGTKGPSDGDVEMAEAETAKESDVKQLDTEDAKKDGAQDADANEEKNTKDTEGEDVKMAEAEAEAGNADVKDTAEKEDKDENTNTEKQELKDAKESGSEKQEELKEQDKSGSEKQEELKEQDKSGLAEYEEKKAEEESGAEKQGEEEAEEKGSADNDNEEGDKNANISDEHLKKDGGKDGNKDEAEEEEVSEADKKVEENKEETPKNKKARSARDRSQGKDKKQDGSKSREAKSLLNTASPYGTDRPQRERKTVERLVEVIEKEPNRNFVVEKGRGTPLKDIPSVAHRISRKKPADLKFLHNVLFGRKGKTVDFKGHILQFSGFVWHESDEKQRAKAKEKLDKCVKDMLLELCWILAIPTPKANIRKEDIVAKLLDFIAEPHAMADSGHSDDQGSNSRKRKRGSTPKSSSKKFDDDDDITPSKKRNKALEYDTDEDEDDADPMKSDSEEDDYDSEKEKAKKNSSDAKDTASKKKAATGSSHKTGTPRTVSKSSSKTPSSKVSKEKESPEDSAKVFSRKKKSVTPKRPSSSEKEIKDKKSSGKKVTKGKGESAEVGLPSKDELRKTITEILKKVDFNTATFSDILKKLEDRYKIDLTPRKSAIKIMIQGELTRLSKEDDDEDEDEDGNEDAEKKKPQHQAKEVVA

SEQ ID NO: 51872 - protein, 133 aa, Oryza sativa
MADFNKAISSAKTEEEKTKIKSDQQKSTMTMRAYNNILAMAQPLRAKSPLFIGDKKITLSWMEQPKKPAPTTTGGKRSQPATNGNTPASKKGRGEGAARNQLVNRAFEGLSRGGRGSGRGRGRGGRGRGWGYR

SEQ ID NO: 51873 - protein, 730 aa, Oryza sativa
MVDINPDHIFEVPDTPDRIQQSTCPVSSPAARRGIAKAAGTPLPSRRIKFKITNNSIQGQSSRGNASSVSPAPLDAGDIFKQAELARLLPVAEDPEARSSLLKSGRTIETSVENEKVPKKSGLDQSMNISNNINCRGSGERDRSCQIRKGDISARDANSCNADFLCLGSGLPTTTVGKPRNRMGTITFKKPKEVVGANVCSVSSPREGKGEEITDKGTTGISSSTPSIVPQRHVGQRKLVRNGCISPSNIAKRSLKVDEKREICSTSGLLHYPDTQVDASGKGNVIDLTDSSPIIRRQGNTATDMEKRSGRKSAIGRAGETVIPLAANQVNSIFSEGNKNKGKEISHDVVGAKQSGEAYMRRVCPRSMGDSSSVANNDHTGIGSEQGWRTTHNNTSNIPMPLSGKMTNSCGRESGSSEQSNLDRASAAGDSNNSIEGGDNNNSIGGAKTLQTASFVNRTIRISSRKRKRIASSYHPGESSSSVDVDQPRVASSDSTAGRNHTTHRHHIPVVDIDDICSPEVRPSLSGIGSSNRTSVDPNIREQLESDELLARQLQEQLYNETPHVVPTEEIDAIIAMSLQHEDNAQPTSRTARRFQSTTRGPRVLRSTVPQHANRVRYDSNNRRIIYQRALSRYPAAHIQPNIDLNDYDALLALDENNHQHAGASESQINNLPQSVIQSNIEEPCAVCLDNPSIGDTIRRLPCFHMFHKECIDEWLRRKKLCPVCKSGIT

SEQ ID NO: 51874 - protein, 373 aa, Oryza sativa; identical to SEQ ID NO: 35290

SEQ ID NO: 51875 - protein, 445 aa, Oryza sativa; identical to SEQ ID NO: 51545

SEQ ID NO: 51876 - protein, 954 aa, Oryza sativa
MEGAVFSLTEGAVRSLLCKLGCLLTEDTWLVQGVHGEIQYIKDELECMNAFLRNLTISQIHDDQVRIWMKQVREIAYDSEDCIDEFIHNLGESSEMGFFGGLISMLRKLACRHRIALQLQELKARAQDVGDRRSRYGVELAKATHEEAHPRLTRHASLHIDPQLHALFAEEAQLVGIDEPRNELVSWLMEEDLRLRVLAIVGFGGLGKTTLARMVCGSPVVKSADFQCCPLFIISQTFNIRALFQHMVRELIQEPHKAMAIAGCKHGLITDDYLEGMERWEVAALTKNLRRYFQDKRYIVILDDIWTVSAWESIRCALPDNLKGSRIIVTTRNADVANTCCSRPQDRIYNIQRLSETTSRELFFKKIFGFADDKSPTDEFEEVSNSVLKKCGGLPLAIVNIGSLLASKTNRTKEEWQKVCNNLGSELENNPTLEGVKQVLTLSYNDLPYHLKACFLYLSIFPENYVIKRGPLVRRWIAEGFVSQRHGQSMEQLAESYFDEFVARSIVQPVRTDWTGKVRSCRVHDLMLDVIVSRSIEENFASFLCDNGSTLASHDKIRRLSIHSSYNSSQKTSANVSHARSFTMSASVEEVPFFFPQLRLLRVLDLQGCSCLSNETLHCMCRFFQLKYLSLRNTNVSKLPHLLGNLKHLETLDIRATLIKKLPASAGNLSCLKHLFAGHKVQLTRTASVKFLRQSSGLEVATGVVKNMVALQSLVHIVVKDRSPVLREIGLLQNLTKLNVLLRGVEENWNAFLESLSKLPGPLRSLSIHTLDEKEHSLSLDNLAFVESPPLFITKFSLAGELERLPPWIPSLRNVSRFALRRTELHADAIGVLGDLPNLLCLKLYHKSYADNCIVFCHGKFVKLKLLIIDNLERIEKMQFDAGSVTNLERLTLSFLREPKYGISGLENLPKLKEIEFFGDIILSVVTKVASCVKAHPNHPRVIGDKWNIVTEYA

SEQ ID NO: 51877 - protein, 182 aa, Oryza sativa
MGIVFTRLFSSVFGNREARILVLGLDNAGKTTILYRLQMGEVVSTIPTIGFNVETVQYNNIKFQVWDLGGQTSIRPYWRCYFPNTQAIIYVVDSSDTDRLVTAKEEFHAILEEDELKGAVVLVYANKQDLPGALDDAAITESLELHKIKSRQWAIFKTSAIKGEGLFEGLDWLSNALKSKSS

SEQ ID NO: 51878 - protein, 127 aa, Oryza sativa
MSEAVARGPRGAEGGSTSSGPETTDDGATKLWIKLAGRGDTAREEKAPLPLPPPIFLTTGDLSSFPNDSSGASPLPFCVATSPSPTSAQPLCRHYRRRPFSDPLSPFPEGRGTKDCGPKAANLIMNL

SEQ ID NO: 51879 - protein, 336 aa, Oryza sativa
MPPADAEPCVKDIREIALPVAPQSPPPPAEHSDVDDDHSNSPNLSDVEMLRMKMEGMSKGMRERMAEYSRRLEAVAGGDNNNAADDCQSRKCGSRHSRKPSASSQRSWSGGSTNAGASRDTAASHGRSRHTVAPEKHHHHHQQHKIMSEECKMVGSGSCCDCREIVGKIMEQVRTESEQWTEMQDMLEQVRLEMQELQSSRDTWQRRAIASDISLRSLNSQVLEWKHRAQVSEQHVEDLQKKISELESKLHTFKAHFPSPGQPNQEWSEACKMEKPIRSNKAQHPPRPSHEPGGGREKEKHVLICRVKHSPSVAAKRQPFQEIGNISLPRHAPMKR

SEQ ID NO: 51880 - protein, 314 aa, Oryza sativa
MASASSVSLMLLVAAAMASAASAQLSATFYDTSCPNALSTIKSAVTAAVNSEPRMGASLVRLHFHDCFVQGCDASVLLSGQEQNAGPNAGSLRGFNVVDNIKTQVEAICSQTVSCADILAVAARDSVVALGGPSWTVLLGRRDSTTANESQANTDLPAPSSSLAELIGNFSRKGLDVTDMVALSGAHTIGQAQCQNFRDRLYNETNIDSSFATALKANCPRPTGSGDSNLAPLDTTTPNAFDSAYYTNLLSNKGLLHSDQVLFNGGSTDNTVRNFSSNTAAFNSAFTAAMVKMGNISPLTGTQGQIRLNCSKVN

SEQ ID NO: 51881 - protein, 262 aa, Oryza sativa; identical to SEQ ID NO: 32020

SEQ ID NO: 51882 - protein, 325 aa, Oryza sativa; identical to SEQ ID NO: 28808

SEQ ID NO: 51883 - protein, 407 aa, Oryza sativa
MSLFGSPTVLLAGPGANHFVFSNQDLIFTETKAINALVGRSILTLSGEELKQVRGALHGYLRPEMVTKYMRKMDEEVRRHIDLNWVGHKTVTVAPLARRLAFDIICSVIFGQGVGPIREALAADFETMVKAMLSIPVNIPFTKFNKGLNASRRIRKVLRQIARDMEGALQQGYSSSADDFFTYMLVLRSKGTHSLTVEDIVDNAIVLLAAGYETSSVLITFLIRCLANEPDIFGKITDEQEEIARSKGPNEPLTWDDVSRMKYTWKVALEILRTISPIFGSFRTAIKDIEYRGYHIPKGWQVFHAQSITHLDGKFFNDPIKFDPTRFDNQSLIPPYCFVPFGGGPSMCPGNEFPRTETLVAMHYLVRQFRWKLCCKEEGYRKDPLPTPVLGLPIELETRTPPEYAHA

SEQ ID NO: 51884 - protein, 214 aa, Oryza sativa; identical to SEQ ID NO: 30074

SEQ ID NO: 51885 - protein, 267 aa, Oryza sativa
MSIWRVPNYDVLEKCTEDILSLIKPVEGDRNKRIYAIQELADTIYSAGALRGASVKPFGSFVSQLYAKSGDLDVSVELFNALNLPISKRKKQDTLREVRRALQKRGIARHMEFIPNARVPVLQYVSNQYGISCDISISNYPGRIKSKIFYWINTLDDRFGDMVLLVKEWAKAQNINDPKNGTLNSYSLCLLVLFHFQTCEPAILPPLKEIYEGNIMEDISDKISLWEYGLPVMDSDYLFVSALLFNCCIHIQGGRTIMRNILMRFAP

SEQ ID NO: 51886 - protein, 414 aa, Oryza sativa
MAGMAPEGSQFDAKHYDSKMQELLHQGDNEEFFTSYDEVFESFDDMGLQENLLRGIYAYGFEKPSAIQQRGIVPFCKGLDVIQQAQSGTGKTATFCSGILQQLDYGLVECQSLVLAPTRELAQQIEKVMRALGDYLGVKVHACVGGTSVREDQRILASGVHVVVGTPGRVFDMLRRQSLRPDHIKMFVLDEADEMLSRGFKDQIYDIFQLLPPKIQVGVFSATMPPEALEITRKFMNKPVRILVKRDELTLEGIKQFYVNVEKEDWKLDTLCDLYETLAITQSVIFVNTRRKVDWLTDKMRSRDHTVSATHGDMDQNTRDIIMREFRSGSSRVLITTDLLARGIDVQQVSLVINYDLPTQPENYLHRIGRSGRFGRKGVAINFVTRDDERMLFDIQRFYNVTIEELPANVADLL

SEQ ID NO: 51887 - protein, 215 aa, Oryza sativa
MLPSSQMAIQLTLLLISCSLYSMYSSSSSSSSASSSSSSFSTSSSYLALLVLVISTGLSLLFTNLRQMIRARSHRGKPHPSMEDQAVHQEEESIIVPQDEVADDAPEDLTGSLSESSDSPVSEECTEEGSVSDDGDDDDDESLIEISLVDGHYLGQEKKKCAWKEQDLLSEFLPDLLLDKRDFMDILSEIGEEDNLIEIDIARGSIKCSSFGIKA

SEQ ID NO: 51888 - protein, 157 aa, Oryza sativa
MELDLPPKQQAPPLADLAVAIHRAAEATTALSAPSSSSQAAAAAVVALRDAHAAIGGFLYRLDVSVPASSSSSDDQPMADGCEEEGEGEQQMVEEVEEGLRECALQGSKRRKRPVPPSWPLGRRSSGGCVVPEAAPAPLDVEGRRRAAMDLLLQFHG

SEQ ID NO: 51889 - protein, 242 aa, Oryza sativa
MASPQCCANPPTLNPAGGEGKVVESFGGIKAYVAGAAESKAAVVLISDVFGFEAPNLRKIADKVASSGYFVVVPDFLHGDPLVPESTEKPFQMWIKEHGPDKAFEEAKPIIAALKEKGVSSIGAVGYCWGAKVVVELVKAHEIQAAVMCHPSFVTVDDMKEVKCPIAILGAEIDRMSPPEVEKQFEQVLSSKSGIGHFVKIFPGVEHGWTVRYKNDDAAAVKSAEEALADMIDWFNKNLKWI

SEQ ID NO: 51890 - protein, 696 aa, Oryza sativa
MLLGALRMEERKGLMGRERDQFPVGMRVLAVDDDPVCLKVLETLLRRCQYHVTSTNQAITALKLLRENRDMFDLVISDVHMPDMDGFKLLELVGLEMDLPVIMLSVNGETKTVMKGITHGACDYLLKPVRIEELRNIWQHVVRRKFGNRERNNLDFSKECNKPQSADTDHGPYQPTCGSSDQNGRSSRKRKELHGEDDDEGDDNDYQENDEPSAAKKPRVVWSVELHRKFVAAVNQLGIDKAVPKRILELMNVEKLTRENVASHLQKYRLYLKRLGAVASQQASIVAAFGGRDPSFLHIGAFEGLQSYQPFAPSAALPSFNPHGLLTRTSAAAAFGLQELAAPSSTIQTSTGNVTVGHCLEENQQANLAQGLTAAIGQPQLQQNWIHQEGNGLSDVFSGSSLTNTLSSTLQRVPSSSLPPQELLECKQAKVSMPPSIRIPPSSSALLERTLGVSTNLGDSSISQQGALPIDGGFSADRLPLHSSFDGAVATKLDTSLAASQREIGQQGKFSVSMLVSPSDNLALAKNAKTGASSSGSTIILPLDTARHSDYLQFGGASNSLQKMDGQKQDHIQSSNIIWSSMPSTQLPSDTQIHNTQNQRLDSGSFNHKIGAHLADQTNASASILPQMKFDTRISEEKMKQKNTYDLGSSKLQGGFNSSGCNFDGLLNSIIKVEKDDLPFMDNELGCDLFPLGACI

SEQ ID NO: 51891 - protein, 117 aa, Oryza sativa
MVVQGDILLVLKVARVIATSSIDAGRVKHSLEAGSAALGGGVPPAEHGAVYCVRTGRPGCAVGRVQLRLVDIGDQVFGELEQVGLVGALWHVCDGVRVAAEGKLFSYQQIRGREEKH

SEQ ID NO: 51892 - protein, 258 aa, Oryza sativa; identical to SEQ ID NO: 30725

SEQ ID NO: 51893 - protein, 233 aa, Oryza sativa
MDGGGVEAAMDGGGVEAATTAAWMARHRGMYERATRHPFTVSIRDGTVDLSAFRRWLGQDYMFVKEFVAFLASVLLKCCRQSDGSDMEIILGGLASLSDELSWFKKEAEKWSVNLAEVSPLKSNTEYCRFLQSFSEPEISYVVAITTFWIIETVYQDSFAFCIEEGNKTPPELLGTCQRWGSPEFKQYCQSLQRIADRCLAEASADAARSAEEAFLRVLELEIGFWDMSSSRS

SEQ ID NO: 51894 - protein, 240 aa, Oryza sativa; identical to SEQ ID NO: 30198

SEQ ID NO: 51895 - protein, 272 aa, Oryza sativa; identical to SEQ ID NO: 45144

SEQ ID NO: 51896 - protein, 50 aa, Oryza sativa
MPPRRRCPGGRLPWRRRPVLSSGVLTTETLIGFGAENFLCPLNNKACSLY

SEQ ID NO: 51897 - protein, 67 aa, Oryza sativa
MVEQVGAFRRRGQASVVWCSLAALASRLRWMRTRDAPVVHRSPGSTSLAVEEEVIGDGEEHTTKSSL

SEQ ID NO: 51898 - protein, 165 aa, Oryza sativa; identical to SEQ ID NO: 30497

SEQ ID NO: 51899 - protein, 774 aa, Oryza sativa
MGKPAAAKKPPASAAVDGDEEVFLELSRELKEEGGRLFNRRDYEGAAFKYDKAVQLLPSGGHADAAAHLRTCVAQCYMRMAPAEHHRAIHECNLALEAAPRYSRALLRRAACFQALDRPDLAWEDVRTVLAWEPANRAAREISDKVRAALEEKGVLVLEKEPVPPPPEHKAVSAKGQGKLKKSHKQCDSAIEGQELIHVEDYEQSEKTELKINGQENGENRAGKEQFDCNVPVKQEIRTDQPEANGVGKHQYHMDDKENKGLDKEGKNGKPGKHSAGKKIRRADAKKQKHSAMEPVHHAEENRHERYTETSVHVKEAMKDLKLVFGEDIRCAQMPANCNLSQLRDIVQNKFPSLKALLIKYKDKEGDLVTITSSDELRWAYSLADLEGPIRLYIVAVDPAQELGVDVVRRRSSFASLEKAYYSMSENGSSRHDDDHNCSIDDWMIQFARLFKNHLGFDSDSYLDLHDLGMRLYYEAMEDTVASEEAQEIFQVAELKFQEMAALALFNWGNVHMASARKRPPLSDDASMECILEQVKVAYEWACAEYAKAGAKYGEAVKTKPDFFEGLIALGQQQFEQAKLCWYYALACKIDMGTEVLGLFNHAEDNMEKGMGMWEGMENTRLRGLSKPSKEKIIFEKMGIDGYMKDMSSDEAFEQASSIRSHVNILWGTILYERSVVEFILGLPSWEESLTVAIEKFKTGGASPADINVMVKNHSANETTQEGLSFKVEEIVQAWNEMYDAKKWRNGVPSFRLEPIFRRRAPKLHHMLEHIHYA

SEQ ID NO: 51900 - protein, 475 aa, Oryza sativa
MAGGFRVLHLVRPFLAFLPEVQSADRKIPFREKVIYTVISLFIFLVCSQLPLYGIHSTTGADPFYWMRVILASNRGTVMELGITPIVTSGMVMQLLVGSKIIEVDNSVREDRALLNGAQKLLGILIAIGEAVAYVLSGMYGSVSQLGTGNAILIILQLFFAGIIVICLDELLQKGYGLGSGISLFIATNICENIIWKAFSPTTINSGRGAEFEGAVIALFHLLITRTDKVRALREAFYRQNLPNVTNLLATVLVFLIVIYFQGFRVVLPVRSKNARGQQGSYPIKLFYTSNMPIILHSALITNLYFISQLLYRRYSGNFLVNLIGKWKESEYSGHSVPVGGLAYYVTAPSSLADVLANPFHALFYVVFMLSACALFSKTWIEVSGSSAKDVAKQLKEQQMVMPGHRESNLQKELNRYIPTAAAFGGVCIGALTVLADFMGAIGSGTGILLAVTIIYQYFETFEKERATELGFSGF

SEQ ID NO: 51901 - protein, 352 aa, Oryza sativa; identical to SEQ ID NO: 49509

SEQ ID NO: 51902 - protein, 340 aa, Oryza sativa
MQGEHHDHVPVYESGTEVFQKLQEKWNSTKHKRYRAMYSSVVGGIILDPSMMVIPIDDHMVHRGHGVFDTAMLSDGYLYELDSHLDRLLLSASKAKISSPFSRETLRAILVQMTAASKCRNGSIKYWLSAGPGDFLLSPKGCTAPAFYAVVIASAAAAAAGGHPRLREGVRAITSTVPMKDPFFAAMKSVNYLANALAMAEAEERGAYASVWVDGDGGVAEGPMMNVAFVTGGGDLVVPAFDRVLSGCTARRLLALAPRLVDAGVLRSVGAARISAADARRCAEMMFVGSGLPLLPIVEWDGQPVGDGQVGKIALALSDMLCEDIKAGLDRVLVPYDQAS

SEQ ID NO: 51903 - protein, 407 aa, Oryza sativa
MKIAVEGCMHGELDKVYDTLRELEKAEGVKIDLLLCCGDFQAVRNENDLQCLNVKPRFREMKSFWKYYSGQAVAPYPTIFIGGNHEASNYLWELYYGGWAAPNIYFLGFAGVVKFGNIRIGGLSGIYKQQHYHLGHYERPPYNENTIRSVYHVRHYDVLKLMHVKEPLDIFMSHDWPLGITEYGNWQKLIREKRFFEEEVNKRTLGSEPAARLLNKLKPPYWFSAHLHCKFPAVIQHGEGGPTTKFLALDKCLPRRGFLQVIDIPSGPGPHEIQYDEEWLAITRKFNNVFSLTRMPFTMLDEQVDTQDDLQWVRNKLNARGAKPIDFVQTAASYDPSCQASNPSITVHCRNPQTESFLQLLNLPYLLDSSNSYGVSRNESSSQTGQALDSDDIELPDDEDDPADDDD

SEQ ID NO: 51904 - protein, 770 aa, Oryza sativa; identical to SEQ ID NO: 34739

SEQ ID NO: 51905 - protein, 244 aa, Oryza sativa
MEMAAPVSPAPRTVEDIFKDFSGRRAGLVRALTVDVDEFYGFCDPEKENLCLYGHRNGRWEVALPAEEVPPELPEPALGINFARDGMHRRDWLSLVAVHSDSWLLSVAFFFGARLNGNERKRLFSLINDHPTVLEALSDRKHGRDNKSGADNGSKSRHSGKRANDVQTKTSRPAVVDDGYDEEEHSETLCGTCGGRYNANEFWIGCDICERWFHGKCVRITPAKAEHIKHYKCPDCSSSKKSRQ

SEQ ID NO: 51906 - protein, 218 aa, Oryza sativa
MGIQKYVFYSIHNCDKHPEVPLMEIKHCTEKFIQDAGLDYLIIRLCGFMQGLIGQYAVPILEEKSVWGTDAPTRIAYMDTQDVARLTFIAMRNEKASKKLLTFAGPRAWTTQEVITLCERLAGQDANVTTVPVAVLRFTRQLTRFFQWTNDVADRLAFSEVLSSDTIFSVPMNDTYQLLGVDSKDILTLEKYLQDYFTNVLKKLKDLKAQSKQTDIFF

SEQ ID NO: 51907 - protein, 487 aa, Oryza sativa
MNLNRIIQWAEYEIETFARLVKENSPLPESVSALRSACICIQTSLTHCSYLESYGLKFSNLLMVLLHPYVEEVLELNFRRLRRKIVDSAKNDDILLPSPQEGSRLSSSVAPNIMLTSSGKKFMSIVNDVLDQITPMTIVHFGGTILNKFVQLFDKYVEALIEVLPGASEDDHLVESKEPIEFKAESDAQQIQLIGTAYTVADELLPAAVSKFFDIQTEKKRIGGTGEGLGSGSIYSIEYKEWKRSLQHSLDKLRDHFCLQYVLSFIYLEGKSRLDARMYLELKTDDLLWECDPSPSLPFQALFVKLRQLASVAGDVLLGKEKIQKVLLSRLTETVVMWLSNEQEFWDVFEDQSIQLRPSGLQQLILDMHFVVEIAVCGRYPHRPVQQLVSVIITRAIAAFSVRNVDPQSSLPEDEWFLDMAKVAINKQLGTSGSESELEEPVVVHDEISDSEESSISSPSTIGSEDSFASANNDDLETPVYFTDPEA

SEQ ID NO: 51908 - protein, 404 aa, Oryza sativa
MAAATTSRRGPGAMDDENLTFETSPGVEVISSFDQMGIRDDLLRGIYAYGFEKPSAIQQRAVLPIISGRDVIAQAQSGTGKTSMISLSVCQIVDTAVREVQALILSPTRELAAQTERVMLAIGDFINIQVHACIGGKSIGEDIRKLEHGVHVVSGTPGRVCDMIKRRTLRTRAIKLLILDEADEMLGRGFKDQIYDVYRYLPPELQVCLISATLPHEILEMTSKFMTDPVRILVKRDELTLEGIKQFFVAVEKEEWKFDTLCDLYDTLTITQAVIFCNTKRKVDWLTERMRSNNFTVSAMHGDMPQKERDAIMGEFRSGATRVLITTDVWARGLDVQQVSLVINYDLPNNRELYIHRIGRSGRFGRKGVAINFVKKEDIRILRDIEQYYSTQIDEMPMNVADLI

SEQ ID NO: 51909 - protein, 321 aa, Oryza sativa; identical to SEQ ID NO: 35280

SEQ ID NO: 51910 - protein, 51 aa, Oryza sativa
MHGRGGSVEVCFQGRRVRAASDRRLDALPIDLEVGFPGRRGGLRLVSAGCS

SEQ ID NO: 51911 - protein, 209 aa, Oryza sativa; identical to SEQ ID NO: 30287

SEQ ID NO: 51912 - protein, 361 aa, Oryza sativa
MRAPPASSLPPPPRPRTFQKRRPRRRGSSRCAPPRPPEPSGSSRGGGKRWVGGRMGTSDLDRQIEQLKRCEPLTEAEVKALCLKAMEILVEESNVQRVDAPVTICGDIHGQFYDMKELFKVGGDCPKTNYLFLGDFVDRGFYSVETFLLLLALKVRYPDRITLIRGNHESRQITQVYGFYDECLRKYGSVNVWRYCTDIFDYLSLSALIENKIFSVHGGLSPNITTLDQIRVIDRKQEVPHDGAMCDLLWSDPEDAVDGWGLSPRGAGFLFGGNVVSSFNHTNNIDYICRAHQLVMEGFKWMFNNKIVTVWSAPNYCYRCGNVAAILELDENLNKQFRVFEAAPHESRGVPAKRPAPDYFL

SEQ ID NO: 51913 - protein, 295 aa, Oryza sativa
MWRRASHLLRATATATATAVSRRVPHPHPAPATAISTVLPAPKLASSLSYATQAAAAAAVPAARAPRTVGSLLRLNDLRDNPGARKQKTRKGRGIGSGKGKTAGRGHKGQKARGTARFGFEGGQTPLRRRLPRRGFKNRFSLTFQPCGLGKIAKLINAGKIDSSELITMKTLKDTGAIGKQIKDGIRLMGRGAEEIKWPIHLEVSRTTARAKAAVEAAGGTVRLVYYNNLGFRALLKPEWFAKKGRLLPKAARPPPKQRDKVDSIGRLPAPTKPLPFTPEELEFAAKREAARVIA

SEQ ID NO: 51914 - protein, 110 aa, Oryza sativa
MDNLPDLVLPRPDTVSVVDGVQDVLSLVDGVHQLTQLPHDPTVAHELFLFLHRVHGHCDLPHFTHQLCNVLSVISQASVLPRHKGFRDFGDLDARRNRRPNRRNCSNRHA

SEQ ID NO: 51915 - protein, 97 aa, Oryza sativa
MPPLPPPLVSRSPPTAPLPDVRRRSAGCGCALWADDLGPTGVVSAASVTATAAGRRETFSSGQIGGALAAGFRGEQVARQSRCWSYGVHLLFDKPAP

SEQ ID NO: 51916 - protein, 766 aa, Oryza sativa
MATVSDIGLSAAINVSMAVAFLLVFAFLRLQPINDRVYFPKWYLRGMRDSPVSSGAAVQKVVNLNMRSYLKFLSWMPAALKMPEDELINHAGLDSAVYLRIYLTGIKIFVPISILASLVLFPVNWTNDTLDSMKVVHSKIDKLSISNIPYGSNRFVTHLVMAYAVTFWTCYVLFREYEIITTMRLRFLASEKRRPDQFTVLVRNIPPDPDESISELVEHFFLVNHPDHYLRHQVVYNANKLADLVEKKKKLQNWLDYYQLKYERNPSKRPTTKTGFLGCFGSEVDAIEYYKAEIEKIGKEEADERQKIMKDPQSAVPAAFVSFRSRWGAAVCAQTQQTSNPTVWITEWAPEPRDVYWNNLSIPFVSLTVRRLIVAVAFFFLNFFYVIPIAFVQSLASLEGIEKALPFLKPLIKIDVIKSFIQGFLPGIALKVFLILLPTILMFMSKFEGLISQSSLERRSASKYYIFLFFNVFLGSIVTGSALDQLKAYIHQSANEIPRTIGVAIPMRATFFITYVMVDGWTGVAGEILRLRALIIFHLKNFFLVKTEKDREEAMDPGSICFDWCEPRIQLYFLLGLVYAVVTPLLLPFILVFFGLAYVVYRHQIINVYNQQYESGAQFWPSVHGRIIIALIVSQLLLIGLLSTKGFEETTPVLVVLPVLTFWFYKYCKNRFEPAFVRNPLQEAMRKDTLERAREPTFDLKAYLANAYLHPVFKGREEEDNMSISEDVGMEEVIVPTKRQSRRNTPAQSKYEGSDTLSLPETVHER

SEQ ID NO: 51917 - protein, 365 aa, Oryza sativa
MARSVGGGWWRSRKTLVGLGLGQLVSLLVTATGFASSELSRRGINVPTSQSLLNYVLLGVVYGSILLYRRKSLQMKWYYYLVLALVDVEANYLVVKAYQYTSLTSVMLLDCWAIPAVIFLTWMFLKTNYRFRKYSGVAICVSGLVLVVFSDVHAGDRAGGTSPVKGDILVIAGATLYAISNVSEEFLVKVGDRVELMGMLGLFGAIISACQISIFERNEIKSIQWSVGAVVPFIGFAVAMFMFYSLVPILLKISGSTMLNLSLLTSDMWAILIRLFAYHEKVDWMYYVAFGAVAIGLVIYSGDSNSDDGRRGQVAEATDVEGKLPDEEEAAVHPKCQGAASSGIRKFDDGKTPPTIRPNEPHAQT

SEQ ID NO: 51918 - protein, 629 aa, Oryza sativa
MAKNGGAHGAATLFGLLALASMVKLGFVAGGGHDYAMALRKSILYFQAQRSGVLPPNQRVSWRASSGLFDGKANGVDLVGGYYDAGDNVKFGLPMAFTVTMMSWSILEYGKQMAAAGELRNAMDAVKWGTDYFIKAHPEPDVLYGEVGDGDTDHSCWQRPEDMTTSRQAFRVDPQHPGSDLAAETAAAMAAASIVFRGTYPGYANLLLVHSKQLFEFADKYRGKYDASITVARNYYGSFSGYGDELLWAAAWLFEATEDRSYLEYLAGNGEALDGTGWSINQFGWDVKYPGVQVLAAKFLLQGRAGDHAAALQRYRQNAEFFVCSCVGKGAVNVARTPGGMMYHQRWNNLQFVTSASFLLTVYADFAAISGRGAVHCPAGAAQPFDILKFVKSQVNYILGDNPRGTSYMVGYGASYPRQVHHRGASIVSIKRDPSFVSCQEGYSSWYGREAGNPNLLDGAVVGGPDEYDDFADERDNYEQTEAATYNNAPLLGVLARLAASCGGLKEEEYEQETATPVVNRTSSSSSLPATATAIGIEQNVTGTWARRRRTYYRYAVTVTNRSRGKTVRELHLGVSGLRGRLWGLEEARYGYVPPRWLPALRPGRSLRFVYVQPAPAPANIWVTGYKLV

SEQ ID NO: 51919 - protein, 229 aa, Oryza sativa
MGGFCCCLCTDDFEEYAHPNNPIYRQGVCLRNFFHNFFGGYTATFQRLESRPSNPAQGAAPLASTNPSTNITDNSLSETYHLVSRPPPYDTDPRYARVQREGLVSRREKSINLTQEESLALRRNGSSSGIEHLAAQKKWSSTEPEGEYKVHRSESTKSLSAKSYNSSFAVVTSEDEDVCPTCLEEYTPDNPKIIAKCSHHYHLSCIYEWMERSDTCPICGKEMEFCETP

SEQ ID NO: 51920 - protein, 429 aa, Oryza sativa
MKSKSSRKAADEDEAKSKKLRSSRGKQRPKQRRRGRCSSTSSRSESPPRKRSKKLKSSDKKSTKNKGRRRHHSLSPSPSPSSSSVSYSTRSSSGGGGGASERSVSPPRRSRSRDVRKKKKERGRDSKRVRRSGRSTSYSTSGESNSSSRSRSRSNNSKSRNRKSGGNKDHASRNKIVQDYDNGHAHRAENVKSVEIADRDEKAMADTSKGSSIEISHSIIDHEKNESVEKMESAPTKDADETQDILPAGSGSPDAQDLELILRQKALENFRKFRGAALMAGKPQTNGTGKEVVTDSPKSSDTKIAEASSVDKPFQRQRSGLSVNCSVGSPRLEDFGNHITPRKQESSAGKSVGVESPGTFEAGSTSGRTEQKGSSLEPTRSNSQIRLQDGRSSSSIMHRLGSPPRSSASVIRRVRKQRRGELCEWKSQS

SEQ ID NO: 51921 - protein, 220 aa, Oryza sativa
MTDIPKSRVRQLVMQPLNCVIFLLGLAILSVTFGPFVTIAHRELMMATYSEKGPENKLDHGVDETRTYEEIKSKIFAGRKMAFGVAVMENHPKDARSKPSSGEISNYSSNSRVPSSLKDSSSSTMKARPSVDNIKLEGSTSEQTLNIPNPQHIIILPFKPYYRHLSLGSKKEQKGSSICCNSYRTNEDWKEKMLESRDEVLRLLNKDYHANPHRRPPVHN

SEQ ID NO: 51922 - protein, 424 aa, Oryza sativa
MEGRMQGKAPLSDSNRRIMDADAPPRRVYQGWKGSNIFFLGGRLIFGPDVRSLILTVCLIVIPVILFAAVISGQLDHEYHNQIGGWVASVAIIFTAYIIVLLLLTSGRDPGIIPRNAHPPEPEDVGESSNLSEWPGGQHGSTGLPLTKDVLVNGVLVKVKYCHTCMLYRPPRCSHCSICNNCVERFDHHCPWVGQCIGKRNYRFFFMFVSSTTLLCVYVFAFCWVDLRIIMDTHRCKLGRAIMKSPVSGILILYTFIAVWFVGGLTSFHLYLISTNQTTYENFRYRYDRKTNPHNRGLVQNFIEILCSRIPSSRNNFRAKVKEDSATFPSSLGMGRALSPPKMSVDLEMGMKRQTVAMEELEDLHSQIGSAMGLERCGTEPPHIVGRKGCSEIATDIEAFAEEFGLEQRFTERKKIEQRTSHNP

SEQ ID NO: 51923 - protein, 179 aa, Oryza sativa
MHVTARGDCRRRDPGPRHPPKFKTKPRRHWRRRARRARVKAAARARSGARGNGGKPELELAGAWRRRRWVCLHQLRRRRPRRHRPSAPPRRPLAVPGCRDNTAFAQDGAWDRQWRRCGDPEQKFAELGEHGYDCELALAGAAHTHGGPCWEDEKGEKEPKRMRTNVLTCGPHYFVQLAS

SEQ ID NO: 51924 - protein, 186 aa, Oryza sativa
MEEAQVVESKDGTISVASAFAGHQEAVQDRDHKFLSKAVEEAYQGVDCGHGGPFGAVVVRNDEIVVSCHNMVLDYTDPTAHAEVTAIREACKKLGKIELSDCEMYASCEPCPMCFGAVHLSRIKRLVYGAKAEAAIAIGFDDFIADALRGTAYYQKANLEIRRADGNGALIAEQVFENTKEKFRMY

SEQ ID NO: 51925 - protein, 131 aa, Oryza sativa
MCRQRCRRRGKRGGEKLSYMMVVRAALLLLVALSTLSLLAAGSRDDRHAGLGLAALLPIHSCPRQASPRSIVAVARHRDGGELLAVGIGRRSERRREVWLIVGPTIFLLSLPLTGGSHLLTQQVNRVKDAT

SEQ ID NO: 51926 - protein, 262 aa, Oryza sativa
MAAASRAPLARRSLLLLRYKALPLSSPSSSSSSTHSLLPRPPALWPPPPPPPPHGCERWRAFHDGRPRGPLWRSKKLIGKGALFAIQGLKRFKGDEERLGEFVRRYVARLLKADKLAVLGELERQEEVDLAVKMFRIIQKEDWYKPDVFMYKDLIVALAKCKKMDEAMVIWGNMTDENLFPDAQTYAEVIRGFLRYGSPSDAMNIYEEMKKSPDPPEELPFRVLLKGLLPHPLLRNRVKQDFEELFPERHIYDPPEEIFGLR

SEQ ID NO: 51927 - protein, 66 aa, Oryza sativa
MALQYISDCIGIGIGCAGDNTVACQPPEAHITDVYADNCGVELPTVDVIAGRLIAVHQESCPSEAA

SEQ ID NO: 51928 - protein, 337 aa, Oryza sativa; identical to SEQ ID NO: 30942

SEQ ID NO: 51929 - protein, 169 aa, Oryza sativa
MSSSPTSTLMSPPKSPPSESPPLSPDGAAAIRRGSWPGVGSPVNDVLASFRQLRLNKVKSSPSGGWSYPSSSAVYGSPKAATGLYSLPTTPLASTATVTTASSFMPNLEPLDLGLIGDEEPVQRVESGRALREKVFERLSRDGAISGDATAFATAGVGLDVDWVSDLIN

SEQ ID NO: 51930 - protein, 520 aa, Oryza sativa
MPRASRAPNPPPPAAAAAENVSSDAGHAEPSCSTPAHHQVFRPVTRSMTRKPTAAAAASSDVKGGESASTSKRRDSTDPCFNTQSAAARPSVTRVRTPHKVASSAWKPLTQPIVMSEDLKRASVPSTNPSAKRSRVASSQAAEDSPTVHRGKKRNEESASKGDQLDGAVIPSPSKKLQTGKSPSDVLPKRKPTIRNKDGKLAAPLSMVKLETESGESSVIASSKIGPATTNDNCQSAELAQQLQLDTKNNSNDIITEAIAYGTNQADLLVAPVTTDAIASGSSQVNLSAFPVTAEAIPNRTHQVNHSAGPLNIKAMINRTSLVNKPVAPVNAKAIANRAQQVAAHNKLPSPVIAAPRQNLQDDLQRKLAKLLIARKQPSGQAGATAPLVSPKLEIGKAKGSSSNVLSDPAYANVKALLIKQQEQLLQQFKSANSQPQVHIKGPALTDKDEAPPVEPLGTRCQLCKLDIAFRPQGDDARDNAPPVAAVLGCHHAFHSSCIEAIYGLAEPSQCIGCLDSAKA

SEQ ID NO: 51931 - protein, 446 aa, Oryza sativa; identical to SEQ ID NO: 50851

SEQ ID NO: 51932 - protein, 391 aa, Oryza sativa
MATAARAASCTPAACAVLVIPILVLIMAGQVRVAEALSIGVNYGQIANNIPSPSRVSWLLRSLKISKVKLFDADPHVLRAFLGTGVEFVVGIGNEAVPAMASPAAAESWLQLHVVPHLRAGARITCITVGNEVFKGNDTALQASLLPALRSVHQALGALGLQGRVNVTTAHSLDIMGVSYPPSAGAFHPSAAPHLQPFLAFLSAARAPFLINCYPYFAYKDDPARVPLEYVLFQPNAGVVDPRTRLVYDNMLYAQVDAVYAAIQAMGHTDIDVKVSETGWPSRGDPDEAGATPENAGTYIGNLLRRIEMKQGTPLRPQAPIDVYVFALFNENLKPGPASERNYGLFYPDGTPVYNVGLRGYLPPMASHEAATQVIHWFLLIATASVVFALS

SEQ ID NO: 51933 - protein, 582 aa, Oryza sativa
MAESQVEGMRKAYAEIMLNMAQESAARVLAAERRAAALAGGLAAAREDGVAALVRLKAIMEARIKEAESQSLANINKIKELQEQLHGAQDTVASLQIELQRSNTELEQARSTLAEERRNNLRSCNKINSNKNSSSSSRKHLQGRVSSKSKNTAKESGAVENLETLYRCDSDLGSFMARTKNPELYRNGCTQRIRAIKQRSPNSDTSLVENSKQTSALNSRSKTGKTDTNRNPQSTRSIMEQILQTKFLANCKRKRGRRSRPSYMHDNSGEHGQTEYKSSDTSDGNGCLLLLQALEQDLSPLKASSGSVGEGLADQKDELLKDEKDADLNLHPASPGPNDVLSVNNMQMKRRKRSKTMRVFESDFEAKAAPEFGNTLPKSSNNNSMLNSEQSSDPPAGNNGPVLQCTAENLMHVTDAANADQLKSENSSPLVPQSTESEIGDEGNSRVDHKECRTPDNNAIVLEEVNVDKSCIILASDGADSSIVSSLDKEENAKEATSGVAVQAEGARYIKYTFNRRKRKAAPLDSTPQGAVPEKSSSVVCPSENHEPHAKPETQDLVIESPPGDNQLIHVAQQLILLSAQK

SEQ ID NO: 51934 - protein, 196 aa, Oryza sativa
MATAAASSSAPPPPPQPAEPAADPPAKEEPQNTTADAAAPVSDAGAAVAAEEGETVILDAAAGEGDAEGEEEGECGFCLFMKGGGCREEFVGWEKCVEDAEKAGDDVVERCYEVTAALHKCMEAHAEYYHPILSAERAMAADLEAAKADQAAEASSDAAASSSQQQQPPPTEEEAAGEKKQAEEEAVVPEKQDVAA

SEQ ID NO: 51935 - protein, 165 aa, Oryza sativa
MTPTMCSTKCFSPDVEPNLTVDVVVTCATTAMTFVDLVAAEDAIGATYIYNPIQPMVTPAKCLTNCSNPNDIPDLIVVAVVTCTSTSLASMDLEVGEDVACTTEIDGPDCHKETHTKCSMLGLDVKGGADHVGDVFLTMTGVAKAVPISIESIDIFSARLVSDLK

SEQ ID NO: 51936 - protein, 276 aa, Oryza sativa
MAAAKRRVRDAEADLNLPPGFRFHPTDEELVAHYLCPRAAGRAAPVPIIAELDLYRHDPWDLPHRALFGRREWYFFTPRDRKYPNGSRPNRAAASGYWKATGADKPVLHNGRTAGIKKALVFYHGKPPRGVKTEWIMHEYRLAKKGGAAAAAGAGALRLDDWVLCRLYNKKNEWEKMQSRKEEEEAMAAAQSWGETRTPESEVVDSDAFPEMDYSLPAASFDDALLPKEEARDDDWLMGMSLDDLQGLGSLLQADDLSMLAPPPAAKTEPLGAPFF

SEQ ID NO: 51937 - protein, 191 aa, Oryza sativa
MPAMAKPASRAAKPASAPKKQKAKPSAAAGGSSHPPYFEMIKEAITVLKERTGSSAHAIAKYMEEKHGASLPANYKKMLSIQLRGFASKGKLVKVKASYKLSDAAKDSPKAKPAAPAPKAAAPKPAKDAAKPKKDAAAAKPKKAPAAGTKRKAPEKKVVAKPKKSPAAKAKAKPKTVRSPAAKKTRKAPAA

SEQ ID NO: 51938 - protein, 276 aa, Oryza sativa
MAAQQLLLLLPLPLPSRTFSKPLPSLPIPLPALRLSSSAYAARRRDLLRSLRCGMRRSDLVADLELAKDKQWQGRRPNGIFWILLLNVGIYVADHLFQIEHIKAMYLYHAFPSWFQFVTSTFCHANWNHLSSNLFFVYIFGKLVEEEEGSFALWMSYILTGAGSNLISWLVLPTSSVSLGASGAVFGLFTISVLVKMSWDWRKILEVLILGQFVVDKVMEAARATTVTGHSLQVNNIAHLSGALIGAALVFLINRIPFPSDGDSSKSSKDTREKRS

SEQ ID NO: 51939 - protein, 163 aa, Oryza sativa
MRLEKCWFCSSTVYPGHGIQFVRNDAKIFRFCRSKCHKNFKMKRNPRKVKWTKAYRCLHGKDMTQDSTFEFERKRNRPERYDRNVTEQTLKAISLITKIRHERQKKHITERQKQGKTKQRERDAKELEQDIQMLPKKVTLSTQKTKVVVKVSQQQTEENLMEE

SEQ ID NO: 51940 - protein, 161 aa, Oryza sativa; identical to SEQ ID NO: 30246

SEQ ID NO: 51941 - protein, 86 aa, Oryza sativa
MGWCRRWRTTPIPSPTPTPAAACSPRPTPTRRRRTDRRRPPSIYGLLPPRSAGDVSAYKYTIYTVLPYKYLVVVNTAYKFGIHVRN

SEQ ID NO: 51942 - protein, 58 aa, Oryza sativa
MIDCKLICWKDLIQCQLHCLKQMQDILLKLILLKSWTKKKILIHLENTVFLIRELMKT

SEQ ID NO: 51943 - protein, 1134 aa, Oryza sativa
MPRWGGGSPSAQDSLRLLLSRRCLLLLRGHCLLLLLPPPQPPVGFKVVLEVCGPEDFSVAVGPAEGFAYPGEAECLRAVQDCISSAAPFSTTQSQSGHIFSVFKLMDYEPVLKCLKKLPGVAVQDIPYKTRNVIKNLPKFFAESCASDKEVDGLLMKLPQHLRDALLPFQLEGVKFGLRRHGRCLIADEMGLGKTLQAIAIACCYKDEGPVLIVCPAVLRYTWAEELERWDPSFLPKDIHLVFGHQDSLERLGACPKAVVISYQMLSRLRKSMMNRRWALMIIDESHNIRCTKKKHEKNETQAVLELAPNVSRIVLLSGTPSLSRPFDIYHQINMLWPHLLGSNKFDFANKYCLLHTVQGCNGRTYQDFSKGARLTELNVLLSQTLMIRRLKEHLLNELPPKRRQIIWLKLNASDIKTAISCIKGVNTSDEIPTIASPDNSNDSEEVNMEEADGCKKSPRNLTTQEIGIVKIPGFSEWFLNHFIMKEPADNGSLDSQSNCQKTIIFAHHLKVLDGVQVFVTEQRIKYVRIDGSTSPRERKDAVDSFRLNPEVMVAIIGITAGGVGLDFSSAQNVVFVELPKSASELLQAEDRAHRRGQTNAVNIYIFCARNTLDESHWLHLNQSLFRVSSLMNGKKDAIREIEVDQVYHLEESSKSEGKSQLGFLPLENHNADCGHGPGENVESDDMSIENFPGLNDMNFESDFFSIRTIPLHFEDDSLHTVMQNCPSATAHEEIAFDSSSISQASVICPSMSSAKSVKARRRLSEIFQTLGLPATTDCNIEEKFLRFEVSQHTGRIHLYICVPGHDSRPRPLFENFLPEEVESPLCSDNTMKTSNRLLKRDPAFCNTFKAFVKEWLALRPIEQKRLLGKPLQLPLSLELCYLKDTNNHSTKGLLKGGSKRRVTPWCDISNPLPENAEWRKVVLHNGTSREREYTQGWTVHDEPLCKLCQGPCNGRLAKSPEYFEDLFCGLPCFEVFRSRTSGRFARQALFEIEHGICSKCKLDCHELVKNIRPLCKKKREEYIRNVAPNIASRLKLLDKLVHEPNEGNAWHADHIVPVYKGGGECTLENLRTLCVACHSEVTCAQQKERKDLTKKAKELLKNTVNNQQKDEASEAAEEDDKSLLVVVPGSAYS

SEQ ID NO: 51944 - protein, 250 aa, Oryza sativa
MGLRSREEEDKVSSYFLLKAIADGCKVPATIQSDVQEPELPKESVEQFDEDQELQQVIDGQVCMKVYHFSDSMDKNFNRKIILPGSFNPLHDGHLRLLEVASSMCDDGLPCFEISAINADKPPLSIAEIKRRVEQFRKVGKNVIISNQPYFYKKAELFPGSAFVIGADTAARLVNPKYYGGDYNRMLEILLECKNTGTTFLVGGRNIEGVFKVLEDLDIPVELREMFISIPEEKFRMDISSTDIRKKQGP

SEQ ID NO: 51945 - protein, 144 aa, Oryza sativa
MVGGRGGGGGGGGWGGAGRKQERRALMVAFAVALLMGTAVYFRIWARQSTDPSFTVDDREELRRQFERANLEAMDESAEWRMKYDTEFAKNKQMQDELLKAKASLSASTKRFSLLKKDNEVLKRQIQIMKQQCDCTVTSNLTQE

SEQ ID NO: 51946 - protein, 379 aa, Oryza sativa
MSAAAEAEAAAVESLPDDVVAEILLCLPPHPSFVSGASLVCKRWLHLIRSPSFLRRVCAFHRTPPVLGFFHNYRDLPSFVAAEGVPGRNRMDGVDDGGDARMFIDCRHGRALLRRYDWADLVVWDPMTGERRRIAGPNQKMQGGGAGTSRRSAALFCSCDVSGGGGDQDCHSSPFHVVVVFTGGCRAFACVYSSLTDAWGDLISTPAPLPCELCDTPPALVGEASYWLSYGGLILEFQFGSQSLTLMKRPLEMLADVRLVRLEEDGLGLAFIKDSTLHLWAREVADDGAPKWKWIPRRAIELDKFLPMPRVLTGKWCGEMFVSISGFSEDGNVVFIRTLAGVFLVWLEALKFKKMSDPLYMMTVHPYSSFYVPNANVTE

SEQ ID NO: 51947 - protein, 170 aa, Oryza sativa
MLTGPLYYFVFRCCSLIVVGLPGPNINTEDFRFPKSGVYTPTKPSPRLLLPPCPYGQIGEREGRGGRASPVSNHRATGSVPRHHHRRRLEAGGSHCRLEGRRRQSHLDLREGGEGGQGHRGPPTARSTARAPPAAGSAACGPATVRSTVPAPAPVPLPAEDHGTPPGPSW

SEQ ID NO: 51948 - protein, 212 aa, Oryza sativa; identical to SEQ ID NO: 36492

SEQ ID NO: 51949 - protein, 51 aa, Oryza sativa; identical to SEQ ID NO: 51910

SEQ ID NO: 51950 - protein, 383 aa, Oryza sativa
MTRDGALPASGGGGAAEGPRRCSQCGHHGHNARTCTARGPVKLFGVRIGDKPPTAAAGGGGGMRKSASMGSLAQLAEGGGGGGGREEGYGSDGNDDKRRKRGEAWSEEEHKKFLLGLSKLGKGDWRGISRNYVGSRTPTQVASHAQKYFIRQTNVHRRKRRSSLFDMVIDDSDDQPLSRTSSQEVEVEENLEDGHPVTAPVIPPAPVPMLSSSLVPPPVPAMAPVAPGPVLTSASATLPVSAVAPQTDEKEQVASGSNTTETGAAIPEVMPPYGYPMMLPPYYPPAFVPMPYYGYVPVFYAPPGAVQAQHEVVKPVAVHSKPPVHIDELYSMSELSLKGEAGVKNGTPNSLLPPRPIGRPDRQSAFHGKGPSDGSSNGLIPAK

SEQ ID NO: 51951 - protein, 178 aa, Oryza sativa; identical to SEQ ID NO: 42566

SEQ ID NO: 51952 - protein, 58 aa, Oryza sativa; identical to SEQ ID NO: 51850

SEQ ID NO: 51953 - protein, 436 aa, Oryza sativa
MVAVARPAASAASNEMVCGICGSGHDQDRMAKCIRCNVYQHCYCFPVVTYDVPDEWCCCECQNKSNWDQTPSQGGQTIRNRVHQDSLKIPNKFENAKVKYISYEEVSLLNNNERPPNCRSNFHVRRTNSHVRPASPPNAKQSSSRSDNRAYSQFHRKFPNGQQSPCRSDTQGPFLKRGDGASQNQTEIAGINMKQKAQSGEMLRPCHRSRAIRGKIDFQVQNEQREKKVVSADKVTMNPQSRDDPREKSGSNVTGTDIGRGSEMSPDNDIGMLVVINSSVEYARQPPPEICWTGCFLVSNGSNCNPADFKAYCPSKVSSKVLNVIKSMPSIIELDILPRMDEWPKSFEINPPVYEDIGLFFFSTELDRNGKSQSHVMETSCNFVMRAYINNIKLLIYSSEVLPPDSQWIDGESYLWGVFVDPKRRHKSMPFGSISA

SEQ ID NO: 51954 - protein, 60 aa, Oryza sativa
MLRLIREKFSSHLSMPFCYLYGKVLRICTALNNAVSPSTALKILGRKWTQPSMGLMKTCV

SEQ ID NO: 51955 - protein, 279 aa, Oryza sativa; identical to SEQ ID NO: 32479

SEQ ID NO: 51956 - protein, 425 aa, Oryza sativa
MWRARRWPWPWRSQRRAARMLSSGEPAAGRRRVAALWGNGDYGRLGMGALESRWSPTACPFFLTGRPGDDDDDPPASLACGGAHTLFLTESGRVFAAGLNDFGQLGIGSSVTHSLEPIEVSGFDEKVVEVSAGNHHSCAVTADGKLFAWGRNSSGQLGLGKRAGKVVSTPRKVDCLADARVKMVALGSEHSIATTEEGEVLSWGAAGAGRLGHGHKTSILGFSITTSEYTPRLIKNLDGVKIKRIAAGMLHSACIDEKGTLFIFGQKTEKGFGRSGDELRPTVVEEVPFSEEVACGGYHTCVVTDSGDLYSWGSNENGCLGLGGTDMVRSPEVLKSSLFKFPVSKVSCGWKHTAVISGGDIYTWGWGGANGTFFEEGHSSGGQLGHGNDVDYFEPMMVEFGKNARAVHVSCGFNHTGAIFEYSEN

SEQ ID NO: 51957 - protein, 112 aa, Oryza sativa
MARPAPPPPTLIPPLPLSRAAADNPPSPPMLIIAIAAHAAPRPSPPRRHHPRHRRLIPLSPSRAAADLHRRAADALHLSADTAHSSAPTQPAPPRIALRLAITAAVDCLHPL

SEQ ID NO: 51958 - protein, 494 aa, Oryza sativa
MTRASTIDFGRKTHNDVLWSGPLRPANFIRNKFPTYKKSLNGIVIKLTDDQEMPSLKEAVAKETADLLHRSQRLSVRELAMKFEKGLNTATLLSNEVKWRQAALLERDILLKNLKSVLESLRSRVAGKHKDEIEESLSMVDVLTVQLSKREDELLQQKAEVAKIATSLKLASEDARRIVEEERSNARIEIDNARAAVQKVEQLVKEQEIDPQINGKQDEDELKEKAQEARRVKMLHCPSKAMDIENEIEVLREQLAEKSSNCVHLLKELHLHQSYEENDVSSYELEGLESLGSMLRIVSQSDGYVDLSRSTIQWFRVQPEGNKKEIISGAIKQAYAPEPHDVGRYLQAEINHCGEISVVKTAGPVDPAAGLVDYVETLLRNPETEYNVVVLQVNGIKQPTDSIHVLSIGKLRMRLAKGKTVIAKEFYSSTMQLCGMRGGGDAAPQAMYWQPRRDLSLVLGFETARERNSAIMLARRFAIDCNIILAGPGDKTHW

SEQ ID NO: 51959 - protein, 582 aa, Oryza sativa
MSPRVRMSVARWLPSSPAHGKTKSRRSSSAVRPTLLVIAVTVIAVLLVAVVFGGAGRWTLSGGGDTSWVSAGARVVINAVSGQQRDGDDPVAAAVEPRNDRLLGGLLSPDFDDSSCLSRYRAGLYRRQSPHAVSPHLVASLRRYESIHRRCGPGTSAYERAVERLRSPPPSNTSDAECRYLVWTPLEGLGNRMLTLTSAFLYALLTDRVLLFHHPAGEGLRDLFCEPFPGSTWTLPEGDFPFSGMQGFNARTRESLGNALRRGEGAAKDHPPPPPPWMYVHLRHDYNRNANDPRFFCDDGQDALRRVGWVVLLSDNYFVPGLFLVPRFERALSRMLPRRDAAFHHLGRYLLHPSNTVWGMVARYHASYMACANERVGIQVRSFYWARISTDELYGQIMSCAHGENILPRVTQQGPNFTAAGDQPQPAARPGRRKAVLVVSLHGAYSERIKDLYYEHGAAGGESVSVFQPTHLDRQRSGEQLHNQKALAEMMLLSFSDVVVTSAASTFGYVGHGLAGLRPWVLMSPLDKKVPDPPCRLAATIEPCFHNPPNYDCRTRAKGDTGKIVRHIRHCEDFENGVQLVD

SEQ ID NO: 51960 - protein, 238 aa, Oryza sativa
MALSKVEVNLLRLLEAAPRQQNQAKLVHYVTTARELLEQLGAETTPEGISSVSKAKISEYSEKIEALAARLAVPEPENEVPVDENREVESSYEGEKPGSPISLSSGLRRRPIAHTDVGPSSHARKDRDIGAPIKLDAEAQAHIEKHRKLQEDLTDEMVELARQLKESSLTMHQSVQETEKILDSTERAVEHSLASTGRAATRAAEVYSLASKTTCFQWLLIFMMTCMFIMVVLLIRVT

SEQ ID NO: 51961 - protein, 177 aa, Oryza sativa
MRAVVQRVLSASVEVEGRVVSAIGPGLLVLVGVHEADTDADADYICRKVLNMRLFPNEKTEKAWDQSVLQRKFEVLLVSQFTLYGILKGNKPDFHVAMPPAKAKPFYASLVEKFQKSYSADAVKDGIFGAMMKVSLVNDGPVTMQVDSSSLQNPAQSSNGDVGSVGDNEAQVPKETS

SEQ ID NO: 51962 - protein, 124 aa, Oryza sativa
MSIRDWLVLREFVLLLRDVPILSRQVTTSMIVGLFKGLQSTHLQAVSSTFSICSSHPVPRSVGSNTSICFPSDLILCTHGTSSSDVDKIGTGRLPVRSSSRTTPKLYISPLIVATHDCPYSGGM

SEQ ID NO: 51963 - protein, 52 aa, Oryza sativa
MGRALIRQPQQLLGSSPSPSDRCFRGSMLLARTSATSSMSSSAGHGCCCQWR

SEQ ID NO: 51964 - protein, 177 aa, Oryza sativa
MSRAVVVVVVVAVLALACGAASQSPAPAPAAGPASDCGSSITALAGCLTYITPGSPEARPAKDCCAGVKSALGSPAAVACLCGALGQDFGIKINYTRAAALPAACGGDSSALSKCNKKFPGASPTGAPAPSSSGSGSGSTPATGTPSSPKSAAAQSPVSAMLIVATVAAPLLSYYYL

SEQ ID NO: 51965 - protein, 250 aa, Oryza sativa
MYACMEGSQLETACLPAALYAPLCPYTPPSPPSFLAPLPSLQHKLPQLPQLVHDHAAATGTNHGVMFSSDHGCLYPLLPGIPFCLDSGCGAAACDDDKPAGFAHLGSAEADTSAAAARVDSEIAAAATATTCHGPNSWWKGTEKGKMKVRRKMREPRFCFQTRSDVDVLDDGYKWRKYGQKVVKNSLHPRSYYRCTHNNCRVKKRVERLSEDCRMVITTYEGRHTHTPCSDDATTGAAGDHTASCAFTSF

SEQ ID NO: 51966 - protein, 285 aa, Oryza sativa
MSSSVGGGGGGGAGGGGGGGGADIASLLDKAKELDQLRKEQDEVVTEINKMHKKILSSPEMVDKQVDATLIRLRALYTRAKELCESEVSASSALVGLLDGLLQSGTSAAQRKKIEVGEQKKKRMKSDTDTTRFSSASMRSQLDQATNLKGEQVAAKVKSDEEKDEWFVVKVIHFDKETKEYEVLDEEPGDDEESAQKKYKLPMSDIIPFPKRGDPSSAPDFGQGRQVLAVYPSTTALYRATVASNRKRKSDDYLLLFDDDEEDGNLPQRAVPFYRVVPLPEGHRQ

SEQ ID NO: 51967 - protein, 517 aa, Oryza sativa
MSGGSGDSSPSSGRASFSSLSGLKDLELSSESGCLSIVVLGASGDLAKKKTFPALFHLFQQGFLQSGEVHIFGYARSNISDDGLRERIRGYLKGASDEHISQFLQLIKYVSGSYNSGEGFASLNNAISENETSKNNKPGSSRRLFYLALPPSVYPSVCKMIRSYCMNPSSHSGWTRVIVEKPFGKDLESAEELSAQLGELLNEQQLYRIDHYLGKELVQNLLVLRFANRLFLPLWNRDNIANVQIVFREDFGTEGRGGYFDQYGIIRDIIQNHLLQVFCLVAMEKPVSLKPEHIRDEKVKVLQSVTPIKHDEVVLGQYDGYKDDSTVPDDSNTPTFASLVLRVNNERWEGVPFILKAGKALNNRKAEVRVQFKDAPGDIFKCKKQGRNEFVIRLQPSEAMYMKLTVKKPGLEMATEQSELDLSYGLRYQDVKIPEAYERLILDTIRGDQQHFVRRDELKAAWEIFTPLLHDIDDGKVKALPYKPGTRGPPEADELSKRMGYVQTHGYVWIPPTLSKF

SEQ ID NO: 51968 - protein, 340 aa, Oryza sativa
MRPSLLRYAAQALRRRDYSSAAAAAERKVAILGAAGGIGQPLALLMKLNPLVSSLSLYDIAGTPGVAADVSHINSPALVKGFVGEEQLGEALEGSDVVIIPAGVPRKPGMTRDDLFNINAGIVKGLCTAISKYCPNALVNMISSPVNSTVPIAAEVFKKAGTYDEKKLFGVTTLDVVRAKTFYAGKANVPVTEVNVPVVGGHAGITILPLFSQATPASNALSHEDIKALTKRTQDGGTEVVEAKAGKGSATLSMAYAGAVFADACLKGLNGVPDVVECSFVQSTVTELPFFASKVRLGKNGVEEVLGLGQLSEFEKEGLENLKGELKSSIEKGIKFAHAN

SEQ ID NO: 51969 - protein, 282 aa, Oryza sativa; identical to SEQ ID NO: 36568

SEQ ID NO: 51970 - protein, 86 aa, Oryza sativa; identical to SEQ ID NO: 44302

SEQ ID NO: 51971 - protein, 36 aa, Oryza sativa
MWSFSKGKMQRFPQVNDALPSPDAGAGCKCWQSVAW

SEQ ID NO: 51972 - protein, 85 aa, Oryza sativa
MAKKGKNNSTRRASASSSSSSAAADGDGSPWLRLTAFAVLTLHSAFSAYLARDDARLVALVVVGYLLMLVLLFYGLAVPVQQKRD

SEQ ID NO: 51973 - protein, 964 aa, Oryza sativa
MAGKVEKMASIDAQLRMLAPAKLSEDDKLVEYDALLLDRFLDILQDLHGDDLRELVQECYEIAAEYEGKHDSQKLDELGNMLTSLDPGDSIVMAKAFSHMLNLANLAEEVQIAYRRRIKLKKGDFADENSALTESDIEETFKRLVVDLKKSPAEVFDALKSQTVDLVLTAHPTQSVRRSLLQKHSRIRNCLVQLYSKDITPDDKQELDEALQREIQAAFRTDEIRRTQPTPQDEMRAGMSYFHETIWKGVPKFLRRLDTALKNIGIDERVPYNAPLIQFSSWMGGDRDGNPRVTPEVTRDVCLLARMMASNLYCSQIEDLMFELSMWRCNDELRARADELHLSSKKDAKHYIEFWKKVPPSEPYRVVLGDVRDKLYNTRERARQLLSSGYSDIPEETTLTSVEQFLEPLELCYRSLCDCGDRVIADGTLLDFLRQVSTFGLCLVRLDIRQESDRHTDVLDAITTYLGIGSYREWSEERRQDWLLSELNGKRPLFGPDLPKTDEIADVLDTFRVIAELPADNFGAYIISMATAPSDVLAVELLQRECHVKTPLRVVPLFEKLADLESAPAAVARLFSIDWYRERINGKQEVMIGYSDSGKDAGRLSAAWQLYKSQEELINVAKEFGVKLTMFHGRGGTVGRGGGPTHLAILSQPPDTIHGSLRVTVQGEVIEQSFGEEHLCFRTLQRFTAATLEHGMHPPIAPKPEWRALLDEMAVVATKEYRSIVFQEPRFVEYFRLATPEMEYGRMNIGSRPSKRKPSGGIESLRAIPWIFAWTQTRFHLPVWLGFGSAFKHILEKDIRNLHMLQEMYNEWPFFRVTIDLVEMVFAKGDPGIAALYDKLLVSEELWPLGEKLRANCEETKQLLLQVAGHKDLLEGDLYLKQRLRLRNAYITTLNVCQAYTMKRIRDPDYHVTLRPHMSKEIMDWSKPAAELVKLNPTSEYAPGLEDTLILTMKGIAAGMQNTG

SEQ ID NO: 51974 - protein, 327 aa, Oryza sativa
MSASAAVSSTCAAASSTTSRRSSSSPASRVQATPRRSLPSRLVASRTSPRSPVVPPVYATASPGGAGGTTAAAARKKLLIFDAEEYLAESLAKYTARLSGEAVAERGAFTVALSGGSLIKALRKLTESPYLEAVEWSKWHVFWVDERVVPKDHADSNYKLAMDGLLSKVPIPASQIYAINDTLSAEGAADEYETCLKQLVNDGVVAISEVTGFPKLDLMLLGMGPDGHVASLFPGHPVVNENLKWVSYIKDSPKPPPERITFTFPLVNSSAHIALVVTGAGKAGAVHKAFSDKQSSSDLLPVEMVSQQEGVLTWFTDKPAVSMLSSI

SEQ ID NO: 51975 - protein, 380 aa, Oryza sativa
MDASSSASAGGEADAMALVQGYNADELAIAGEFLTTWLPFLSAGLCASCADSLRSRVSSLLPPQAEESPSSPPPRIDQIEPSGWESDPATAHPQHLPFEPSGWDSDPPQLPPEQEQQKQKPQPAEKPRKSWADMAQEDELAAAAEEDAAAAAADDGEEGSEAGRPGVQLTREQRELRRFRNVVRRKDFICFERVNGRLVNILAGLELHCGVFSAAEQKRIVDYVYDLQEMGKHGELGDRTYTEPQRWMRGKGRVTIQFGCCYNYATDKNGNPPGIIRTIASDPMPSLFKIMIKRLVRWHVLPKTCIPDSCIVNIYDPGDCIPPHIDSHDFVRPFCTVSFLSECNILFGSTLKIAGPWRVHWFTSNSSACWVGAYPKWQWC

SEQ ID NO: 51976 - protein, 114 aa, Oryza sativa; identical to SEQ ID NO: 35204

SEQ ID NO: 51977 - protein, 138 aa, Oryza sativa
MGFVDPAAPLLATCGGDTVKLFDVTVESGDPCVLAYTPAPAHPVNAVRWNHTSEYPQPRLAGSTACPLVPPPALLSPPPSPSQISRVGFTFGVVRARISRWAAGASRPWGSVLSGRFELRVSALPCLIERCPCRVVMR

SEQ ID NO: 51978 - protein, 185 aa, Oryza sativa
MRLEKCWFCSSTIYPGHGIQFVRNDAKIFRFCRSKCHKNFKMKRNPRKVKWTKAYRCLHGKDMTQDSTFEFERKRNRPERYDRNVTAQTLRLSLLLQRLDMNAIKNILQRGKNRVRQSKGREMLRSWNRIFKCSRRRIPCCQHKRQRSWSKFLSSRPKKILWKSNEMESCCMRSHFVIFMQHLCF

SEQ ID NO: 51979 - protein, 35 aa, Oryza sativa; identical to SEQ ID NO: 51566

SEQ ID NO: 51980 - protein, 136 aa, Oryza sativa
MDSSSVEKGSGSIDPDERTASGEPKACTDCHTTKTPLWRGGPSGPKSLCNACGIRYRKKRREALGLDAGEGGAERQEKKKSKRERGEEVTMELRMVGFGKEVVLKQRRRMRRRRRLGEEEKAAILLMALSSGVIYA

SEQ ID NO: 51981 - protein, 220 aa, Oryza sativa
MTDIPKSRVRQLVMQPLNCVIFLLGLAILSVTFGPFVTIAHRELMMATYSEKGPENKLDHGVGETRTYEEIKSKIFAGRKMAFGVAVMENHPKDARSKPSSGEISNYSSNSRVPSSLKDSSSSTMKARPSVDNIKLEGSTSEQTLNIPNPQHIIILPFKPYYRHLSLGSKKEQKGSSICCNSYRTNEDWKEKMLESRDEVLRLLNKDYHANPHRRPPVHN

SEQ ID NO: 51982 - protein, 71 aa, Oryza sativa
MVKLSPSSSSFLIYSLLLFFILSFLCVLMCCHERLALVCVLCCCFAIWDLRGETNCVKIWPKKGSFLAADS

SEQ ID NO: 51983 - protein, 320 aa, Oryza sativa
MFYAGYGYHGSNFEQTYRCYPASFFDKPHLEGGDKVIMPPSALDRLASLHIEYPMLFELHNDATQRISHCGVLEFVAEEGMIIMPYWMMQNMLLQEGDTVRVKNTTLPKGTYVKLQPHTTDFLDISNPKAILEKTLRNFSCLTTGDSIMVAYNNKQYYIDIVETKPASAVSIIETDCEVDFAPPLDYKEPENPQQPSVPASEATAEDENAKVEDELKFKPFTGSGKWLDGKASKLQATEVPSASRSSPSDSNKRVNQETLAPASSGASNSTRQKSGKLVFGSSANNNKEPQKASVKDDESPKKDEPKFQAFSGKSYSLKR

SEQ ID NO: 51984 - protein, 498 aa, Oryza sativa
MAVGGDDDMERDFAARLRLAPSPASPNAAAGGGGGGIAFRAPQEQFTVGDFELGKIYGVGSYSKVVRAKKKDTGNVYALKIMDKKFITKENKISYVKMERIVLDQLDHPGVIRLFFTFQDTYSLYMALESCEGGELFDQIVRKGRLSEDEARFYAAEIVDILEYLHSLGLIHRDVKPENLLLTSDGHIKIADSGSVKPTKDTPIKVLPNSTNERACTFVGTAAYVPPEVLNSAPPTFGNDLWALGCTLYQLLSGSSPFKDASEWLIFQRIIARDLRIPEYFSDDARDLIDKLLDVDPSKRPGAGPDGYVSLKKHPFFRGIDWKNIRSTRAPKLAMEANANEDEDSQDSSWLSHMGSAPVNQHVSPVGNDGASSSSEVRSHISRLASIDSFDSRWQDFLEPGESVVLISKLKKINKLTNKKVQLILTDKPQLICVDPGKMVTKGNIMWSDDPSELNVQVSNSSHFRICTPKKVSSFEDAKQRAWQWKKAIEDLQRCQKN

SEQ ID NO: 51985 - protein, 58 aa, Oryza sativa
MWEKRVWEMAMWMRKRRESGRTKVAAMRAKRGRSATMMMSFVGDGWRERGEREEGDRR

SEQ ID NO: 51986 - protein, 507 aa, Oryza sativa
MGEVVSSAVVHETVNKIISGLIDKYEQNSSAEEQMERLEMAHIKLETALETSSKWQITGGPLQRWQKKLKRAAEECDDTLRKCRQRVQEEEQAEQQVRNSSLPTRVAHATKSLISSIFHGNIDEPIRSAVRRFEWFADGANDFLRSVEFGGTPRRYLFFDPLIGRLLAGETLEYKLVQGNNQHLFWIRPNNTAERGVEAKLIFVYNDESVPVNNFFLGMMLQLSECTNIVGTAIKCLQLFAPHFKSTTETVRKELSQLPTQDFSWVPRSHSYHWDSIHSTVTEWFRPNPMCCKHRSQKVCSSGNMEKTYLPDISLESVIDVSLQCQVSLPGLKDQVTVVESKPSLKEFPHLKVHLVYTPHGSSEDLFPAVESSVIEMVNGVDQHCLHTNIALEQMEGIMLPRAVDCFRQNAGTTVYQMVWKSKHGGAYLQAVKVSKNMLRQRTIRGAKKAKLLRRHDHWTQSRIDVISDFLNLWAAHAPVQLQGSILDWTQKEKEAQLAPHLLHLKF

SEQ ID NO: 51987 - protein, 397 aa, Oryza sativa
MELYPGYLEDHFNIHKLSISSASPPEYMTSASTQFAAPVRMGAYDRPPPVGMWSHEQFKVDNGQATSASTIMEAEMKFENRLEEIPQVVLEEGRNVDQEASKPPDKVLRRLAQNREAARKSRLRKKAYIQQLETSRLKLAQLEQELQRARQQAVYANGSLREPNLGFTGPIDPGALGFEIKYSHWVDEQNRNTGELRNALLQGQTTDQDLELKLLVEAGLDNYNRLFEMKEEAANSDVFYIMSGMWKTPTERFFLWIGGFRPSEVLKNLRPQLEPLTDKQVVEVGGLQQTSMQVEDALSQGMDKLKQTIADSLTAADPFDSPEAYMVHMANAVEQLRSLVQFVTQADHLRQQTLQEMHRILTTRQAARGLLALGDYFQRFRALSSLWAARPRDSGIS

SEQ ID NO: 51988 - protein, 105 aa, Oryza sativa
MQRRLRRVDPVAAAARARGSGYSPTRILSRRRQRSLTSPRWRRALSLPLLPVPFPSLLYRRQLPQAGSGVGVGGPVAVPSPPPDPAARGEAVAARWRDDYLDVLV

SEQ ID NO: 51989 - protein, 198 aa, Oryza sativa
MGFLRNPKAFLMVLKAVIEKTDYRFILFSSGYQPLDSAIQYFAPSVAESSEYQASALHCDSNLLFNGRLFCFSGSIPYSWLFPKCAVAIHHAGSGSTAAALFAGIPQISCPFLLDQFYWAERLHWLGVAPEPLGRQHLIPDTDNASSINSAADMLIGAIKSALSPEIKAQATRIANKLSSEDGIGEALRILKESFAPN

SEQ ID NO: 51990 - protein, 498 aa, Oryza sativa
MATCAADLAPLLGPVAANATDYLCNRFADTTSAVDATYLLFSAYLVFAMQLGFAMLCAGSVRAKNTMNIMLTNVLDAAAGALFYYLFGFAFAFGTPSNGFIGKQFFGLKHMPQTGFDYDFFLFQWAFAIAAAGITSGSIAERTQFVAYLIYSAFLTGFVYPVVSHWIWSADGWASASRTSGPLLFGSGVIDFAGSGVVHMVGGVAGLWGALIEGPRIGRFDHAGRSVALKGHSASLVVLGTFLLWFGWYGFNPGSFTTILKTYGPAGGINGQWSGVGRTAVTTTLAGSVAALTTLFGKRLQTGHWNVVDVCNGLLGGFAAITAGCSVVDPWAAIICGFVSAWVLIGLNALAARLKFDDPLEAAQLHGGCGAWGILFTALFARQKYVEEIYGAGRPYGLFMGGGGKLLAAHVIQILVIFGWVSCTMGPLFYGLKKLGLLRISAEDETSGMDLTRHGGFAYVYHDEDEHDKSGVGGFMLRSAQTRVEPAAAAASNSNNQV

SEQ ID NO: 51991 - protein, 325 aa, Oryza sativa
MALRRVLLFVKPFDVYPPRPLAAAASSPPPPPPPLRVSNPKVLNYLDDRCRVHKETINLCKSVLQRKSIDWISVQRNDMSNPIHDVDLVISVGGDGTLLRASHFLNSSIPVLGVNSDPTCPDEVDELTDEFDARRSTGHLCAATAANFEQILDATLDGSRQPSELSRISVKLNGLQLPTYALNDILVSHPCPASVSRFSFRKRSNTGESSHLINCRSSGLRVATPAGSTAAMLSAGGFVMPISSHELQYMIREPISPRDADKPLLHGLVKQGQHILVVWYNEEGAVYFDGSHVMHSIQHGDTLEISSDAPILKVILPENLLKQGS

SEQ ID NO: 51992 - protein, 420 aa, Oryza sativa
MGVALALIAIALLALVLCKLSQYNPQAPNNQGKSPDQSISHKFQLLKSGSFCYGSGRYLCCQFGNVKQSRTDGSDHHMNTPKGVVVDVFDREKPIVFTYQEILASTDSFSDANLLGHGTYGSVYYGVLRDQEVAIKRMTATKTKEFIVEMKVLCKVHHASLVELIGYAASKDELYLIYEYSQKGSLKNHLHDPQSKGYTSLSWIYRVQIALDAARGLEYIHEHTKDHYVHRDIKSSNILLDESFRAKISDFGLAKLVVKSTDAEASVTKVVGTFGYLAPEYLRDGLATTKNDVYAFGVVLFELISGKEAITRTDGLNEGSNSERRSLASVMLSALKNCRNSMYMGSLKDCIDPNLMDLYPHDCVYKMAMLAKQCVEEDPVLRPDMKQAVIALSQILLSSIEWEATLAGNSQVFSGLVAGR

SEQ ID NO: 51993 - protein, 395 aa, Oryza sativa
MEPEGGVRLPTLDRVRRGVRSSCDTESWECFQCGSINLPVEKLLFDLPAFHCRGCEAPFLGEMNFCYDLVKANKRSLIGGLDNIKNQYDNPECIAYSIASCLEIADRIKTVLQGKNPDSVKEIDPTAIVDMFDGKCLANCSDGTSGIGKLVTMALAVQTDGIQSADHSRLYTAVAVETIDKYDFEGICATLADGIPLVGAFYCGSRLEKLEYCQIYRVPKLSKFLDRNLIPTGHAAVIIGAGMRCGIQYLYFLNSWGNFFCPRYDKDGNLVKAGVGKLRFYDLLCNPIMFITDSAKRVGLNRQLLPMGTGKLSDHNKSMLMGRKQTDVIPEDLSIGVTSEFVGNQPQISSKRKMANATLDGDGQTQKRNKCRTFGRSSVDLNEANNKRNAKEDEM

SEQ ID NO: 51994 - protein, 531 aa, Oryza sativa
MHPLTLSSTALLRLIKSLSPAVRRAHLSASSIHCLLLKAGLLHVGAHLPTALLSAYAALGSPDHARRLFDEMPEQGLVPRTAMARAHVASGQAAQAIAVFGDMVADGVFPDNVALAVALGACHGAGSWTARRNPGKKIHALIVTSGIEPDVFVSTELIRVYGECGKLAVSRRVFDDMPSRSTITWNAMLHQYARHGKVDTAYELFLAMPRRDVVSWNTVMAGYCVAGRCREALGLFRQMVSPSSCAVHPNVPTMSTILGACAGAGCLETGIWVHAYIERNRMNDDGYLDRCLIDMYCKCGSIDNALQVFEKAPRKRDLFSWTTVICGLAMHGRATDALRMFDMMQDNGICPDDVTLVGVLNACAHGGLVDEGLGYFYSMEAKFRITPKIEHYGCMIDLLGRVGRLQEAYSMIRTMPMDPNTVIWGAFLSACKVHGNMELGKIAAEELTRLDPDDPWGRVLLSSMYAKAQDWIGLARERREMNSMQVKKTPGCSSIELKGEVHEFVAGGSQHPQYAEICSVLQDVEAQTNVG

SEQ ID NO: 51995 - protein, 298 aa, Oryza sativa
MYGVGVGGGGGGNYDGGGGNASSLFGGGGFMPSQATNAAEGTSGGGGGFPKSRNAQALLPLTVKQIMDASQTNDDKSNFAVNGMEVSTVRLVGRMLNKLDRVTDVSFTLDDGTGRVPVNRWENDSTDTKEMADIQNGDYVIVNGGLKGFQGKRQVVAYSVRRITNFNDVTHHFLHCVHVHLELTRPKSQVNANTATGTPNQTMPRDSMAYNQSPLTNQASTFSAPQNTGTGTNMIDLVLNVFHDPAVMNDDHGVGVDYVSRRLNLPEETVGKIIIDQVDLGHLYATIDDHHYKSTMNG

SEQ ID NO: 51996 - protein, 82 aa, Oryza sativa; identical to SEQ ID NO: 29976

SEQ ID NO: 51997 - protein, 401 aa, Oryza sativa
MATLPGGPHPTGGGAAADPMQVDQPRSAAAAAAVAPAGEKHGASLMEGSDPVTGHIISTTIGGKNGEPKRTISYMAERVVGTGSFGIVFQAKCLETGETVAIKKVLQDKRYKNRELQIMRSMDHCNVVSLKYCFFSTTSRDELFLNLVMEFVPESLYRVLKHYSNMNQRMPLIYVKLYVYQIFRGLAYIHTVPGVCHRDVKPQNLLVDPLTHQVKICDFGSAKMLVKGEANISYICSRYYRAPELIFGATEYTTSIDIWSAGCVLAELLLGQPLFPGESAVDQLVEIIKVLGTPTREEIRCMNPNYTEFRFPQIKAHPWHKIFHKRMPPEAIDLASRLLQYAPNLRCTALEACAHSFFDELREPHARLPNGRPFPPLFNFKQELANLSPELINRLIPEHAR

SEQ ID NO: 51998 - protein, 405 aa, Oryza sativa
MDFSGGSGGGGVASGRVQAERWLEIAGKLLAARDLVGCKRFAERAVEADPLLPGADELLAVTDVLLASQSVLPSGQADPLAVLQLPPSTNPADHAAVSRAYRRLALLLRQDTNPHPGADVALSLVHDAYAILSDPNRRPQPPVAVAVPHAHPGAASHPAAPAAAESPEFWTACPFCSYVHQYQRELVGRALKCPNESCRKGFVAIEISTPPTIVPGTEMYHCAWGFFPLGYPTSADLNGNWKPFYKMFPWNNAPAGGAGSGGRGGYGGRGGGSAGRQPQNGSARGGSSRGRVKKTTARKKVGAGLKRRSFGGVESGIEPMDGQDGWGEGEEGGDGQAEEVRGININEEAQSTDGATRGHVHARGNVSGGVVDMGTFHLDVDPSEDILGNLQNLPFLRVDNLGRML

SEQ ID NO: 51999 - protein, 215 aa, Oryza sativa; identical to SEQ ID NO: 32426

SEQ ID NO: 52000 - protein, 501 aa, Oryza sativa
MARHHGNHSLLPEMVQPNNEQLNQPLPLGQKLFVHAGNDAALKIGPSYHGNVAIRSNDLPSSSRVAQYSGHRVKNTGTLHNSYVHYPAGSSGGHVSYNPQTEPVITYPHRSEGEFARGSSQIDNRTAAVKRKNPVIYPEYSINGDGYCAGSSSSTQFSNYPQPAPFSESLHRQMPPSVGPINWNDQSLVNQEGSQRNVRARHNFNNISLEPRPVHSTSNVSQSTSMKRNGPSFSTRMRTMPSGASGMHSGEMPYTMGSSNSSVPVPTLQGSSSSAIFASGVFAPRHVHGDTVPSYIHLPSVASSSSTAIPHEVIIPSYQPATSATTSTPMRASQPLPVRAVASSRHARNVLIGHANSGRNRRARSSYYGIQPLMIDAQQLIMMQQFALRESREAQDPHRAMRLDIDNMSYEDLLALGESIGNVCTGLVDEKISGCVREVIYCSSDEQQNDQDDGKCAICLEEYKDNSLLGILKCNHDFHTDCVKKWLKEKNSCPICKSAAA

SEQ ID NO: 52001 - protein, 81 aa, Oryza sativa; identical to SEQ ID NO: 35120

SEQ ID NO: 52002 - protein, 148 aa, Oryza sativa; identical to SEQ ID NO: 35085

SEQ ID NO: 52003 - protein, 312 aa, Oryza sativa
MASESECVAVAEPPHVHVHLHPDGTEPLAHIAVDYCPEACHHASEDGEIHVTYDDRGGARWRSRCRFLPGGAVAATIRAPAGDTAGLNYNLYLSSLEGSRDMDEIDFEFLGHDKCAVQTNFHVAGGGGREQIHVLPFDSSDGFHHYAIAWGADAIEWRIDGELIRREERVAGEPWPEKPMFLYASVWDASHINDGKWTGTYHGRDAPYVCSYRDIRVPLALSLEDEEDPYKCACVGDASAAIAAADAAEQVDAGDAPAAAAAADAAEEVDAGDAPAATAAADVAEQVDAGDVPASAAAADAVKEVDAGAGKD

SEQ ID NO: 52004 - protein, 114 aa, Oryza sativa
MKPMYVFSSIWNADDWATRGGLEKTDWTKAPFISSYRDFTADACSWGTAAASPPSCAASTGNSWWDQPPAWALDAGQREDSAWVARNLVIYDYCDDRKRFPSPPEECLLRTTSS

SEQ ID NO: 52005 - protein, 125 aa, Oryza sativa
MSRGRSPEPLDFFIWTVEDVGLWLEEINLGSYRQVFEENGVNGEYLESLSMFTTEQILRFIRRCHMKWGDFITLCKELRRIKVACLKGEQEVRRPWWAPSCLSVVFVRAAKRNRQSRVVSLKLEP

SEQ ID NO: 52006 - protein, 513 aa, Oryza sativa
MGKEAVGEGQHQQQRPPDGAGGGGGGRGGRGGGGGRGGSGRLGWWWCCCCGVGGVVRLKCVAALVLGVAVLLSAVFWLPPFARRGRGSEGPDPGAGFDADIVASFRLHKMVPELNGNASKLELDIYEEIGIPNSTVVVNSLQLVGSNWTNVIFSIVPYPKNLTLSSTGLSILRSYFMSFVVRQSTLQLTESLFGNSSSFEVLKFPGGITIIPPQTAFLPQKPHATFNFTLNFPIYKVQDRIDELKDQMKTGLLLNSYENLYIKLANLNGSTVDPPTIVETSIFLEVGNHQPSVPRMKQLAQTITNSSSGNLGLNHTVFGRVKQISLSSYLRHSLHSGGGSEAPSPAPMHHHGHHHHHHHHHGHEDSRHSAPAQAPVHYPVHEPRYGAPPPSRCPYGTDKPKNKAHVMPAPEPTANGHHFASPVALPPHSLSPRNPNVHSRSPIPSPPVLPEPPLPTVSFAHAHPPSEHTSRRDPAGLSALAPAPHSSNATRSLWRSIHWANIVPLVCILMSLL

SEQ ID NO: 52007 - protein, 171 aa, Oryza sativa
MAAAVASHRFLSVAEAGAAFRWTPSQLDPKMLSLQNEIFITSGGDRDLINRILSKSKTETVPENKDDGESDDDNDEEGDDEDAENQGDDDAGDEDASEEEGNDEDEDGDPEANGEGGSDDDDGGEDDDDEDEDGDDDEGEGEGEDDDEDEEEEEEEDDDDDVPQPPAKKRK

SEQ ID NO: 52008 - protein, 433 aa, Oryza sativa
MDDENFFRRLFKDKNEEKKGAAHDRNDDDKCEEGDKENFFRKLFKDKHEERRSDGLDKHDDDGKGTSGIDDEENSEFLSFRRLFRVHPEDAKSGHIESCQPNGISEGSPGSESFFKRLFRDRDRSLEDSELFGSKLLKEKNSVPTGNGDKQSGKPPLPNNAIAELRKGCYYASLELVQSLCDTSYGLVDIFPMEDRKIALRESLTEINSQIASTEKNGGVCFPMGKGIYRVVHIPEDEAVLLNSREKAPYLICVEVLKAEAPSHSKGSSDVNKLSKGGIPLANGDVQLPKPPPWAYPLWSRHETQNYETDRMLKSTSQVIDQAMAQLWEAKVKFVNVSFSVEKLGRSRSVAISDSGHRSRQSTADSNEPSGDSQPIADQPIEWVKVTLSAVPGVNMDDVDDNEPTRKKDHRRVPSTIAIEEVKVQLIYELIFK

SEQ ID NO: 52009 - protein, 343 aa, Oryza sativa
MIQLHGSWEENFHMLYRWRAAVMERSPGSVIEIDTVEVDGKVYFNRFFCAFSPCITGFLTGCRPYLSVDSTALNGLWKGHLASAIAIDGNNWMYPLAFGFFDAETTDNWTWFMIQLLKAIGKVSPLAICTDACKGLEIAVHRVFPWAEHRECFNHLMQNLIKKYGGSVFQEMYPAARSYRAQVHEECMDTIKKACTDVALWLDTCHKLIWYRSGFNAEIKCDYVTNNLAECFNNWIRDIKALPICELADTCREMIMTLWNRRRRIGNKFTGTILPANLHQLRARTRGLGHLSVVHADITTAEVWDNSSSHARHVVRTHEQSCTCQEWQHTGKPCRHALAVITS

SEQ ID NO: 52010 - protein, 352 aa, Oryza sativa
MASASEDDAGSERCCGSYSPSADVSESETSSDCSAPTTTTTTRRFASSPSRGVASSSSSSLLPTPPPSSAAAFFLSAKPAADLSEVDMMKERFAKLLLGEDMSGSGKGVCTALAISNAITNLSATVFGELWRLEPMASARKAMWTREMDWLLSVADSIVELTPSIQELPDGGGQFEVMVPRPRSDLYMNLPALKKLDAMLLAMIDGFKETEFWYVDRGIVVDDSGGPFSSSSSSCGRPSVRQEEKWWLPCPRVPPKGLSEDARRKLQQDRDCANQILKAAMAINSDVLAEMEIPEVYLESLPKSGKSCLGEIIYRYITAEQFSPECLLDCLDLSSEHHTLEVANRIEAAIHV

SEQ ID NO: 52011 - protein, 318 aa, Oryza sativa
MSDGGAGAKGAGFGMPRVGMGTAVQGPRPEPIRRAVLKAIEAGYRHFDTAAHYETEAPIGEAAAEAVRSGAIASRADPFITSKLWCSDAHRDRVLPALRQTLWNLQMEYVDLYLVHWPVSMKPGRYKAPFTADDFVPFDMRAVWEAMEECHRLGLAKAIGVCNFSCKKLDTLLSFATIPPAVNQVEVNPVWQQRKLRELCREKGVQICAYSPLGASGTHWGSDSVMASAVLRDIAQSKGKTVAQVCLRWVYEQGDCLIVKSFDEARMRENLDIVGWELTEEERQRIAGIPQRKINRALRFVSDHGPYKSLDDLWDGEI

SEQ ID NO: 52012 - protein, 137 aa, Oryza sativa
MQQFAGEEKNELLYYLRSLSPEKVVELSESSCPGVEEAVYSVVHGLLATLSPKMHTNRSPTSENMAGGAVNFGMEEDDEFTELVEDVSLPFQPLISIPRDRLARLLFWCMMLGHYIRGQECRLELMHLLAVSSDAHS

SEQ ID NO: 52013 - protein, 620 aa, Oryza sativa; identical to SEQ ID NO: 35704

SEQ ID NO: 52014 - protein, 323 aa, Oryza sativa
MAMAGGGGLNRSSSRGQLPPQELLDDLCSRFVLNVPKEDLESFERILFLLEQAHWFYEDNSVEHNPSLKSLSFKDFTTLMFNSCAALRPYHAHLDDIYKDFTHYKFRVPVCGAIILDDTYEKCLLVKGWKSSASWSFPRGKRSKDEEDHTCAVREVLEETGCDVSKLLKLEDYIEVSMWQQRVRLYIITGVKGDTVFAPQTKKEISEISWHNIDELLPAGDDAISRGVNGMKLYMVAPFLQGLKAWIATHRHPQYQKSDTSARGTVWKAKNSSTGAAPVENPVITRTGSDPQTLDSRPGKSFRNFRFDTASILQSMEASFLRT

SEQ ID NO: 52015 - protein, 398 aa, Oryza sativa
MGLAHRRLLLLLLHLLLLVAAAAEAAAAGAGRKEKGIGGGGGLRFRGGSGTFKVVQVADMHYADGRRTGCLDVLPSEAAGCSDLNTTAFLYRLFRDEDPDLVVFTGDNIYGFDATDAAKSMDAAIAPAINMNLPWAAVIGNHDQEGTLSREGVMRHLVGMKNTLSRFNPEGIEIDGYGNYNLEVGGVEGTLLANKSVLNLYFLDSGDYSTVPSIGGYGWIKASQQFWFQQTSSNLQTKYMKEEPKQKAAAPGLVYFHIPLPEFSSFTSSNFTGVKQEGISSPSINSGFFASMVEAGDVKAAFIGHDHVNDFRGKLNGIQLCYAGGFGYHAYGKAGWSRRARVVSVQLEKSDGGEWRGVKSIKTWKRLDDPHLTTIDSEVLWNRGSNGRRKKNPDGKMR

SEQ ID NO: 52016 - protein, 311 aa, Oryza sativa
MMSFNKSQEGFGQVAAVATLASNGGGSLPWLLYGEPLGQGKPAMSPEGVVPRAQTPLDPPQVPAMDRGVPEILNFSMVPGKGEKCSEHSTTIALQSPFAEYNGCFELGLGQSVVPSNYPYADQHYGLLSPYGVRPTPSGRILIPPNMPADAPIYVNAKQCSAIIRRRHARAKAERENRLVKARKPYLHESRHLHAMRRARGSGGRFLNTKKETNGKTTGGGRKVMDIIIPPLCPAASPSSEQCNPSSVSSLSGSEVSSIYEHEDMDHFHSFDHLRTHFFTPLPSLMDVEHGAGNPFKWTAASDGCCDLLKA

SEQ ID NO: 52017 - protein, 67 aa, Oryza sativa
MTSLLLVEHKRDQTRSKPAKMVMILNCSLLLGLHLLNLWKAKMKMAFLYHFLNQRKELMVVLRKKAT

SEQ ID NO: 52018 - protein, 611 aa, Oryza sativa
MPPVDPHSYTDGDHPVTAKAALAFYLDFAPSTIHASALLTLSAPHSGDLLLDTRALAVHSASTASGPPSPIPFSLADAADPVLGSALTLTLPPDTTSFLLTFSTSPSASALQWLSPPQTASSLPFVFSQCQSIHARSVFPCHDTPAARITFDLLLNVPTQLSAVAAARHVSRRDPLPSDHRGACDDALWCAPGRIVEEFQMEQSVPPYLFAFAAGGIGFRDLGPRTRVYAEGGDKVLDEAAREFAGVEEMVKVGESLFGPYEWERFDLLVLPPSFPYGGMENPRMVFLTPTVIKGDAAGAQVVAHELAHSWTGNLITNKTNEDFWLNEGFTTYAERRIVEVVQGEERAALNMGIGWRGLNRMMERFKDNMEYTKLKPKMAGIDPDDVYSEVPYEKGFQFLWRIERQIGRPAFDEFLKNYISTFKFKSIDTETFLEFLKTNVPGIENQIDLQLWIEGTGIPPDAMEPESAIYKKICSLAAEFKSGKLPSEDEVADWSGQEWELYLENLPTDVEASQVTALDERYKLSESCDYEVKVAFLQLAIPTGCRCYFNEVEKCLKQVGRMKYLRPLYSSLARCSGEEKMLAHRIFSEAHEFYHPIARSVAESILSKHG

SEQ ID NO: 52019 - protein, 382 aa, Oryza sativa
MHLICRAVPLNADGRWTCNKTNLNKCYRSFSMDLGGGGGGGAVTPLGDLPTVLVPGGHFAIQAGGENWVLSVERPYPWLDERSTTRLLMRRQEGQRWVLAGGPHEFLHTGFERSESLYGSIFQGRAVIGNDKILVSLADAAFFVFDCTHCVWTPLSLTHKKLNYIPLSNRSVYVEDHNAVYFLRFDTLFAYKFSPGKNTIEPPIRLDVMCPFGTNGYGSLVHLAGQVMCVVWISTRSICTCTTQHVMITTLIINGDCINGGFVPKDVGVLHSTCRSLVVGDGRETTSRCNIFCFSLSYVEDVDRVEPFSIPPVLGEATYSEIEDSPNMLECCRMFLEDQWNEDDVVLEKCTTKTKMNLLHISVRLSIANISNQYFKWEVGMP

SEQ ID NO: 52020 - protein, 87 aa, Oryza sativa
MQASDRFNINSQLEHLQAKYVGTGHADLNRFEWAVNIQRDSYASYIGHYPMLAYFSIAENESIGRERYNFMQKMLLPCGLPPERDED

SEQ ID NO: 52021 - protein, 564 aa, Oryza sativa
MDHGGQVSPVPATATAPRKVRREHMRLGVYHDVLQRLRDAGAPEALAPDFAEKLWTHFHRFNASYAMDVNVERAEDVLMHMKLLEKAIHPENQPAFSVRIVQVPLDIDASEADSQSNITEDDNCPTPRTPAEHPAPIFGSTTALKALVRQASSKNLLDDNQDIDAILRPMHEITFASDDKPKGLTQLSSLLGNLNLDIKEVHALSTNDGYFLDIFIVIGWDHKETQLLEEALEKEIHNYEPQMPSKSSCWPPELAGKQSLINSQVNHVQIPKDNTDEWEINFDVLDIQEKVASGTYGDLYRGTYFGEDVAIKVLKSDRLNENMQEEFNEEVFIMRKIRHKNIVRFLGACTKSPTLCIVTEFMKNGSVYDYLHKRKGSFKLPSLLKAAVDISKGMNYLHQNKIIHRDLKTANLLMDEHELIKVADFGVARVKAESGIMTAETGTYRWMAPEVIEHKPYDSKADVFSFGVVLWELLTGKIPHEFLTPLQAAIGVVQEGLRPVIPKATDPKLALLLESCWQQNAVNRPDFVQILQKLDEIAGEHGIDLTHPHKEKEKGGFFTFGKVH

SEQ ID NO: 52022 - protein, 1016 aa, Oryza sativa
MASKFGLAGGIPERRVRPIWDAVDSRQYKAALKLCTALLAKHPTSPYVLALKGLILERMGKPDEALSVCLNAKEQLYSDNIFHFDDLTLSTLQIVFQRLERLDLATSCYEYACTKYPNNLELMMGLFNCYVREYSYVKQQHTAIKMYKTVGEERFLLWAICSIQLQVHFSIGGEKLLPLAEALLKKHITSHSLHEPEALALYISILEQQSKYDAALEVLSGDLGSLMGREEDKLRLQGRLLAQACNYTAASEIYQKILESCPDDWESFLHYLGCLLEHDVNLPKSRTSEHPSSLPVDSALALKTSLSDELVESRLASALSFVQKLQVNDTSDCVRGPHLASIEIERQRCRSGNPTDRKFIEALINYFHRFGHLSCAASDVEIYLHMLSSDETTELLDTISRSFDASSLSVKGLGLAITTFKVQELLGTFFSKSTTELQHIAKGMVEAFYKNLPLSRDLDPQESMHGEELLCMASSILVQLFWRTRNLGYLIEAILVLEFGLTVRKYVWQYKVMLVHLYSYLGALPLAHRWYVTLEVKNILLESASHHILPQMLNSPLLQQTADLVKDYLKFMDDHLKESADLTCLAYRHRTYSKVIEFVQFKERLQHSMQYLSVRSDSIILSLKQKAESLDEVESILENVNHGARLVELSNEDNVKRFTFNEDLQARPWWTPTTSVNFLSEPFDEGSTPACFRAKACEHKSTEKDDSKIKYAERKALLPRLVYLSMHGCASSLRETQLNGSGLDTDATEMKPLLLKYARSIGYSIDDALSVILGMSSGKKSVKDFTPDIVSWMSFAVFINAWNLWSNESVVPRADESSPSSWQIVDSLVKICVEEQLIDANRILTSPGNNIPVLVQMITEPISWHLVVIQSCVRSMAPQGKKKKKGGPSERPNVPRLQAIQRSVQCMIDTLRSVQSWLSDQMRPEEQALDILLSYLQGGNEDGPGQISCILEENSARHNPELGERIAQSLETWSSAGVVRRIVGAEKELLVELKKICDSKLKLLASVSASLSSALH

SEQ ID NO: 52023 - protein, 943 aa, Oryza sativa
MREEVRSSSAAPPDPPPRSASPPATPVASSAGASSPPAQTNAASIDWLGGEPISKVESSSQIAPHAPRPSLSTNAAGAAVDFSQPSCRPWERGDLLRRLATFKSSTWASKPKAASSLACARRGWVNIEMDKIACESCGAHLIFTALTSWSPAEVANAGEAFAEQLDASHLGDCPWRGNSCADSLVQFHLTPSALVGGFKDRCDGLLQFISLPVIAKSAIESMKLTRSPQIDRVLSQAITILSGELGYKTDSTTGIDINHQDESCSYSQAQKLISLCGWEPRWLPNVQDWEENSTRSAKHTASADPDQIHSRLPEHKQNSYSASVKKDKGKGKIHVKDSGCSMRSPLLDCSLCGATVRIWDFRSVPRPSHLSINNIDAPDMRKGVLTRGISATSGINGWVAEGTERENVEGRGEAGTDEGKSLSNAQVDLNLTMAGGLPSTHSVMPSMHDHFNDGGMGRDLMIGQPTGSELGGFAASFESRGPSSRKRNLEEGGSTADKPLNRLHPADSIEGTVIDRDGDEVDDGAQDSDIRSNKRPRGFNLFDVNQPSSSGAGPSRNLSFDLDIDVNKFDTYKAEGPSALHNPSASMRASSVIAMDTVHSAEENSTESVEYHPCDVDDVHKPSSAVRSGGMSEALDLNYSNQAPQSSFVQPAAESNAREIGGSSMNGGEEVLNAETAPAFARDQLSLGVSGGSVGMGASHEAEIHGVDVSEHKTDSVVGDVEPAPELTENMGNTGESAPGPGMMDEFVPEEVGREEPQSDSQDVASRLVGRADSGSKICGSTKADSVESGEKMSHGIGHESNLQHSLSRNARVYSGIDLSKDEVTQIAKLPANDDYDPGDDLAANGGNDYEAGLPEFDPISHHNNYCPWVNGHVAAACCINTGSSTSTGLSGWQLTVDALETIQSLAQAQNQIMPSDSAASLYKDDHVAPSRKLLKRASHSKC

SEQ ID NO: 52024 - protein, 105 aa, Oryza sativa
MHGMAWIDGSNLGPSVCGEGGDEDGCGGGGIGTPRSTGATPFLRAATLRLGMLPPLGGGAAAAASSVVGGFGIRWVVGWGGVRCGDRAEPTLRSEPPPRRWMDDS

SEQ ID NO: 52025 - protein, 811 aa, Oryza sativa
MSDQPPPYTPLPLLSSFPPNPYPDQTPDPASTPTLVLPNPAFPNKRKRTGFRRKLPSGSPAAPVAVAASPSAQPPPRASAADDIIVINREPTAEPVTALTAGFPADSLTDEEIEAGVVSDVGGIEQVNYILIRNHLLTRWRETFNSWLAKESFATLIPPHCDHLLNAAYSFLVSHGHINFGVAPAIKERIPKEPTRHNTVIVVGAGLAGLAAARQLVAFGFKVVVLEGRKRCGGRVYTKKMEGGGRSAAGDLGGSVLTGTFGNPLGIVAKQLGLPMHKIRDKCPLYRPDGSPVDPEVDKKVEGTFNKLLDKSSLLRASMGDVAMDVSLGAALETLRQTDGDLSTDQEMNLFNWHLANLEYANAGLLSKLSLAFWDQDDPYDMGGDHCFLPGGNGRLVQALAENVPIVYERTVHTIRYGGDGVQVVVNGGQVYEGDMALCTVPLGVLKNGGVKFVPELPQRKLDSIKRLGFGLLNKVAMLFPHVFWSTDLDTFGHLTEDPSHRGEFFLFYSYATVAGGPLLMALVAGEAAHNFETTPPTDAVSSVLKILRGIYEPQGIEVPDPLQSVCTRWGTDSFSLGSYSHVAVGASGDDYDILAESVGDGRLFFAGEATTRRYPATMHGAFISGLREAANITLHANARAAKSKVEKGPSTNTQACAALLMDLFRQPDLEFGSFSVIFGGQASDPKSPAILKVELGGPRKKGATEGGKADQHHSNKLLFQQLQSHFNQQQQLYVYTLLSRQQAMELREVRGGDEMRLHYLCEKLGVKLVGRKGLGPGADAVIASIKAERNSSRTKTRPSKLKIGIPKSKS

SEQ ID NO: 52026 - protein, 398 aa, Oryza sativa
MGNAFRCMSRKEHRGGGGAAVSRSKRMGSARSGRGGGGGKLTPAEEELLHRQALAMAIHQHLDAGGSMSRRIDAGGSMSRRIGPGSTSSRRRGDLPDSVTGAKPVQIVLENLETKKIVLVHGEGFGAWCWYKTISLLEEAGLDPIALDLTGSGIDNADTNSIATLADYSKPLIDYLNKLPENEKVILVGHSCGGASVSYALEQCPKKISKAIFLTATMVKDGQRPFDVFSEELASADVFLQESQLLIYGNGKDKPPTGLMFDKQQIKGLYFNTSPSKDTVLAAVSMRPIPLAPIMEKLSLTPENYGTVPRYFIQTLDDRMLSPDVQEKLVRENPPDGIFKIKGGDHCPFFSKPQSLNKILLEIAQIQAPTALLPGKAKTEAIEATEAKTEEEKTEKLS

SEQ ID NO: 52027 - protein, 265 aa, Oryza sativa
MASRIARLLQHQNRRLLSTAAEASSRRPPRAPLSGAIPKHEVAKAEASSLKKSRWYMIKSNPSSPLTTQRESHKVSTHLVRPSASYSTQASEQNPKEGTKDLKTVEDPFDSPTYNIPEKPVTFAEGASYSLVIVAGLGIAAVAGYAVFKELIFEPKEYKIFGKALARVQNDSQVTAKIGYPATGYGNESRNRAARQRIPNKVWTDEDGVEHVEVNFYIRGPHGAGKVYSEMFKDNNDRSWKFTYLIVEIVSPHRVQLMLESYVPA

SEQ ID NO: 52028 - protein, 391 aa, Oryza sativa
MAPPPYAAAVVVATVAVLVLVSQVSVAAGADCRFPAVFNFGDSNSDTGGLSATFGAAPPPNGRTFFGMPVGRYCDGRLVIDFIAESLGLPYLSAYLNSIGSNFTQGANFATAGSSIRRQNTSLFLSGFSPISLDVQSWEFEQFINRSQFVYNNKGGIYRELLPKAEYFSQALYTFDIGQNDITTGFFINMTSEQVIAYIPDLMERLTNIIQNVYGLGGRYFWIHNTGPIGCLPYAMVHRPDLAVVKDGSGCSVAYNEVAQLFNQRLKETVGHLRKTHADAAFTYVDVYSAKYKLISDAKKLGMDDPMLTCCGYGGGRYNFDDRVGCGGKVKVNGTWVVAGKSCDDPLKRVSWDGVHFTEAANKFVFDQIAGGKLSDPPVPLRQACQISRGQ

SEQ ID NO: 52029 - protein, 606 aa, Oryza sativa
MRASSFSSLMLPCSHGHGGGRATASTCAAAAAACLALVALVILVVSMDPRAQASSWFFLSSSSSSSSSSSSTLVRPAASSHAASLRKPSSWGGGNGGGGGGEHLLVTSSSFGSGGGARGSWSRNSTSKEVLFQGGGGGGGDEMTSTAAAPTPALIIGSSSGDGVSPSRVAVTAAAAEPTPALAPAPAPEWGVGDAASGDDIIQVMPQAQRRRDVKLELLELGLAKARATIREAIQNKDNKPPLTDKDYVPVGPVYRNAYAFHRSYLEMEKVFKVFVYEEGEPPVFHDGPCRSIYSTEGRFIYAMEMENRMRTRDPDQAHVFFLPFSVVKMVKMIYEPNSHDMDPLRRTISDYINVVSTKYPHWNRSLGADHFMLSCHDWGPYVSSANGHLFSNSIRVLCNANTSEGFDPSRDVSLPEINLRSDVVDRQVGGPSASHRPILAFFAGGDHGPVRPLLLQHWGKGQDADIQVSEYLPRRHGMSYTDMMRRSRFCLCPSGYEVASPRVVEAIYLECVPVVIGDDYTLPFADVLNWAAFSVRVAVGDIPRLKEILAAVSPRQYIRMQRRVRAVRRHFMVSDGAPRRFDVFHMILHSIWLRRLNVRVIARED

SEQ ID NO: 52030 - protein, 186 aa, Oryza sativa
MAMTAASVFGSGGCLELLTSSKAMRGKLWTRLAPFISKRHASTSQTSLSSSSSSCSVINPWLFVGLGNPGEKYQCTRHNVGFDMIDMFAQSQGISLTRHPFKALFGEGMVEGVPVLLAKPQTYMNLSGESVGPLAAYYKLPLNRVLVAFDDMDLPCGVLRLQPKGGYGRHNGSVDFIIMCFNEVIC

SEQ ID NO: 52031 - protein, 304 aa, Oryza sativa
MASQRRRSSATAVLLSLLLLLQLAAAYPQGKRQNVAVFWGRNKAEGSLRQTCDTGDYNIVIISFLSVFGHGKYWLDLSGHDLRDVGADIRHCQSKGVYMLLSIGGDGYQYSLPSSKSAADVAENLYYSVLGGDRPGAFHPFGDDTIVNGVDFFIDNGPADHYDDLANRINDYNQNIRDPIGIMLTATVRCSYPDPRMKAALDTKLFRRIHVRFYDDPSCSYNHAGLAGVMAQWNKWSATYPDGQIFLGVVAANLTGKNDMVAVGELRDKLLPAVQNTDTYGGVMLWNSYYDSLTHYGRYVKDLA

SEQ ID NO: 52032 - protein, 388 aa, Oryza sativa
MASATLLKSSFLPKKSEWGATRQAAAPKPVTVSMVVRAGAYDDELVKTAKTIASPGRGILAMDESNATCGKRLASIGLENTEANRQAYRTLLVTAPGLGQYISGAILFEETLYQSTVDGKKIVDILTEQKIVPGIKVDKGLVPLAGSNNESWCQGLDGLASREAAYYQQGARFAKWRTVVSIPNGPSELAVKEAAWGLARYAAISQDNGLVPIVEPEILLDGEHGIDRTFEVAQKVWAETFFYMAENNVMFEGILLKPSMVTPGAECKDRATPEQVSDCTLKLLHRRIPPAVPGIMFLSGGQSEVEATQNLNAMNQGPNPWHVSFSYARALQNTCLKTWGGQPENVKAAQDALLLRAKANSLAQLGKYTSDGEAAEAKEGMFVKNYVY

SEQ ID NO: 52033 - protein, 1044 aa, Oryza sativa
MELAVGASEATMRSLLGKLGNLLAQEYSLVSGVRGDIQYINDELASMQAFLRDLSVVTEGHNHDNRRKDWMKQIRDVAYDVEDCIDDFAHRLPQDSISDAKCSFILTKMYELLTWWPRRDIASRIAELKVRAQQIADRRNRYGVNNPEHCDSSNSPRPRAHAAAQDIAEYQDTKPQIVSIKEPVGMKTVMENLEKWLTEPQPDKGRAVLSIVGFGGVGKTTIAMALYRKVSGKFDCQASVAVSQNYDEDEVLRSILNQVSKQEEAGGSTESSSRDENTREPQGSSSTSSREENTAESGTKRMLNKLKKALPLSLLGGNDDKTSVRQQETMGSLQLREELKRRLAEKRYILLIDDIWSAKTWNSIIIPFLPSENDKDSRIIVTTRFHAVGSTCSPRHKNDEATSSPGHGKDLLHKVDFLTGDKPLDLFNASIPDPMKRTDRDKKLSKICGGLPLAIVTMAGLVACNPNKANSDWSKLCESLFPYPVTTLNLDGVTRILDCCYNDLPADLKTCLLYLSIFPKGWKISRKRLARRWIAEGFATEKQGLTEEEVAEAYFNQLARRNLIRPVEHGSNGKVKAFQVHDMVLEYIMSKSIEENFITVVGGHWQMTAPSNKVRRLSLQSSGSKHGNSTKGLNLAQVRSLTVFGNLNHVPFHSFNYGIIQVLDLEGWKGLKERHVTEICQMLVLKYLSIRRTEIAKIPSKIEKLEYLETLDIRETYVEELPKSVGQLKRISSILGGNKNTRKGLRLPQEKRNKAMKNPSPQGKTKEPAEKGFLSQEKAKGTMKSLRVLSGIEIVDESAAVAASLHQLTGLRKLAIYKLKISEENDTFKELLSSIEYLGSCGLQTLAINDENSKFINSLYNMSAPPRYLVSLELSGKLKWLPEWITSITTLNKLTISITVLTTETLEILRNLPSLFSLTFAFSLSAAKQDQDTVKGILEDNKLATDGEIVIPAKEFKSLKLLRFFAPFVPKLSFPDKSAMPALEIIEMRFQEFEGLFGIEILENLREVHLKVSDGAEAITKFLVSDLKDNTEKPKVFVDGIVTA

SEQ ID NO: 52034 - protein, 252 aa, Oryza sativa
MGSDASSAADAMGVLRAAVPLQADADLVLATGGGGERGQVVGLVLVDVSNGFCTVGAGNLAPVTPNKQIEKMVDEAARLAKVFCERNWPVFAFLDTHYPDKPEPPFPPHCIIGSGEENFVPALEWLEKDPNVTIRRKDCIDGYLGAFEKDGSNVFSDWVAKFQIKTVLVLGICTDFCVLDFASSALAARNIGRVPPLEDVVIYSEGCATYNLPVEVARSMQGTLAHPQDLMHHMGLYMAKSRGAKVVDRIII

SEQ ID NO: 52035 - protein, 470 aa, Oryza sativa
MKVEEKKRSITVAPFECAWDEEFRFRETGRGCITFEASAHNDVTLVFREQPGSQHYHYKMDNSRHYIVILGSHRNKRLKIEVDGKTVVDVAGIGLCCSSSFQSYWISIYDGLISIGQGRHPNNNILFQWLDPDPNRNVQYVGLSSWDKHVGYRNISLMPSAPQNSILWSQIECAYVEPDGAGGHTRKQESKDGLDQRALANFLENWDFSDSIFVVGSERKVVPAHKVVLGSCGDFPFNLMMSRPAIELPSVSYPVLHSLLEYIYTGSTQISEWQLVSLLELSSQFKVKPLVMYCEEIIGCLKMSDAVSESSKKIQLSSGGSQAHQFYYLPFKAPLNTQKIEQFLVNGEHSDVNIYVNGHGLVTHAHKLILSLWSMTFDKMFTNGMKESSASNVFFEDVPVEAFFLLIQFMYSGELKVDIEEITPVLVELLLLSDQFGITALQFECCKRIMEFLSKDSCPTGRSSSTRANF

SEQ ID NO: 52036 - protein, 255 aa, Oryza sativa; identical to SEQ ID NO: 31134

SEQ ID NO: 52037 - protein, 90 aa, Oryza sativa
MYDYVVTADDVDTLLAVDCTPMDDNTCQGELVTEYTNNGSKITCGQEEDGEADTEDHLGQEGKEGHHGTPSTFSSETPAMSSPTSSSPTP

SEQ ID NO: 52038 - protein, 645 aa, Oryza sativa
MQNVDNYLDQCSRKKVKAEKEVFFFTKIDEGLLHLIEIYGVTKLVMGAASDRHYKRKMKAPQSQTAISVMQRAHSYCNIWFICNGKLTCVGEASCCPVKRSKSARLPSSVDSCKVDLQSLLEPNIEAKRLGCMYINEMELRKETEAKLSQEKEESESLKHATMVLQNDLDWLKYQLNEKANRLQDLNQQKHLLEHRISESDSVATYLEESMKVTESRVQSLKLEYSKMKRERDDAVKEARSMRIEKELTNSCAYGAISSEFSLMELEQATQNFSNALNIGQGGFGSVYKGSLRNTTVAIKMLSTDSLHGQSQFHQEVAILSRVRHPNLVTLIGACTEASALVYELLPNGSLEDRLNCVDNTPPLTWQVRIQIITEICSALIFLHKHRPHPVVHGDLKPGNILLDANLQSKLSDFGISRLLLESSVTGSDAHYTSRPMGTPAYMDPEFFATGELTPQSDTYSFGVTIMRLLTGRAPLRLIRTVREALNDYDLQSVLDHSAGDWPLVHVEQLAHIALQCTELSKQRRPDLEHDVWEVIEPMKKEAHSPLSQSFRSICSAIETATPSYFLCPISQVTMRDPQMAADGFTYEADAIRDWLDKGHDRSPVTNQTLANCDTIPNIALRSAIQEYLKQNNMNKSFALYEQQH

SEQ ID NO: 52039 - protein, 467 aa, Oryza sativa
MHADATGMLLNWNRDLTGKGDSHGRTPLHFAVSIEPPTKIPYYHKILFSIMRHIDIYTLCLDRFLYPRKTRGDSLTLTGMLMDADESSAYQPDDKGSFPIHVAAAEGNDGTINILLNKSPNCATLRNAQGRTFLHIAVENGRHTIIMFVRRRRRLAAKIMNLQDNDGNTALHLAIQDGDLHAVLCLLMNPVVKVDCLNKEGLTPLDISRKLIPEGLLHGSHQRIWIKRSLHLANAHHANPSLDHRQEKCICRTVREERDSKIVEKDDDEQEDSKTITESTQVMAVCSTLIATVAFAAAFTLPGGYRADDHTNGGTPTFVGSYGFDAFVLAITFAFVYSLLATFSLVYSGMTKVDYSIRLEHLNSANSLVWLSIRCLLAAFALGLYVVLAPVAHKTALLICLMCSVGLLHGHTSMKTQIRMAVLLQGRIGFKVWWILGRKILRNFLHSFWPFLIIFGWPAYLKWRHQQ

SEQ ID NO: 52040 - protein, 561 aa, Oryza sativa
MDADEAAGSSRRMDLNLYLGLPRAPRPRRSDLGSDLALSTPMPSSPSSSAASVDAPPPPPELSHPPYSPSHADLSPPLQEVYSLYNPDDPPASETHLPPYAPPPAPVVSELPDDLEFGLHPPPPLVRASELLGWEDRPSSSTASSSFLPDTAARYWRLLEQTGSRWLRARRFRSDLPPLSSEAYPAGRDAVAVPVLQHEPMNDTVEHNKVAADGAEVGASEESEEQGRSAATFECNICFDMASEPVVTSCGHLFCWPCLYQWLNVYSNHKECPVCKGEVTEANITTIYGRGNSCLDAEKAVEGGKQTGPTIPPRPHGNRLESFRQQFHHLRPISRRLGEAHGLLSSWRRLLDQQIMNTASRFEGPPESAVQEMVDTAHAQHTSRLSRLASRMRARRLLREADNPNPPDGGSTSPDSGLIRNNASDPSRNGPSSLLPDGIDWLRGLTLLGYEDTERFASAMSDFRRITGPSQYGASASSSNPPNLESTFDRTHVVAAPSADQASNSSTAAVIQGDAGISESAGEPSNAGSSRSLRRRGRSSALGSLDADGGGLQRNKRRRIN

SEQ ID NO: 52041 - protein, 323 aa, Oryza sativa
MAASGMKLAVAVACALALASACHGLQLGYYKQSCPRVEAIVRDEVKKFVYKDAGIGAGLIRLVFHDCFVEGCDGSVLLDPTPANPKPEKLSPPNMPSLRGFEVIDAAKDAVEKVCPGVVSCADIVAFAARDAAYFLSRFRVKINVPGGRLDGRRSLDSDALNNLPPPNFNVNQLIGAFAAKGLDAEDMVVLSGAHTVGRSHCSSFVSDRVAAPSDINGGFANFLKQRCPANPTSSNDPTVNQDAVTPNAFDNQYYKNVVAHKVLFASDAALLTSPATAKMVSDNANIPGWWEDKFAKAFVKMASVGVKTGYPGEIRRHCRVVN

SEQ ID NO: 52042 - protein, 574 aa, Oryza sativa
MAEHEEQPYEGNGNGGDPAPASAYAEYPAPEGSPPAAAAKPTGFSDGATDGGRSQHETQPHDGRSSKSRERERERDKDKERDRDRDRDRRDRDRGDKDRDSDRHREHRDRSERREHHDRERSDDRDRRRGHDSERRRDRDRDGHRRHRSRSRSPSKGRDRRSRSRSRSRSSKRVSGFDQGPQAAIPALAAGAAPGQVPVVAPAISGMLPNMFNLTQTPFTPLVIQPQAMTQQATRHARRVYVGGLPPTANEHTVAVYFNQVMAAVGGNTAGPGDAVLNVYINHDKKFAFVEMRSVEEASNAMALDGIMFEGAPVKVRRPTDYNPSLAAALGPSQPNPNLNLAAVGLTPGSAGGLEGPDRIFVGGLPYYFTEAQVRELLESFGPLRGFDLVKDRETGNSKGYAFCVYQDLNVTDIACAALNGIKMGDKTLTVRRANQGASQPRPEQESMLLHVQQQAQMQKLMFQVGGGALPTKVVCLTQVVSPDELRDDEEYEDIVQDMREEGCRYGNLVKVVIPRPDPSGAPVAGVGRVFLEFADVESSTKAKNGMHGRKFANNQVVAVFYPEDKFAEGQYDG

SEQ ID NO: 52043 - protein, 967 aa, Oryza sativa
MAATVEEQMVVKAIREECPWESLPKRLQSTLHTKEEWHRRIVDYCIRKRLQWNTCFARRVCREGEYYEEMMKYLRRNLALYPYHLADYICRVSRISPFRYYCDILFEAMKNGQPYDSIPNFTAADALRLTGVGRNEFIDIMNKCRSKKLMWKLNKSIAKELLPTQPVDFPIDPWWGVCLVNFTIEEFKKLSEEETATIDKICKEEANSYVLFDPKVIDGLYKRGLVYFDVPVYPDDRFKVSRLEGFVSNKDQSYEDPIEELLYAVFVVSSANATVAELAATLLADLYQLQAAASFACRLGWAVKLMDADSVLEDAPTFPSNILSDDEEGSNASINSEKSGQQLLSVDAGPRKISGTAHVALVVDANVTSYLMMGSLSPGLKSHAVTLYEAGKLGDSCIAELCSDLASLEGKKFEGVLEEFANHAFSLRCFLECLQSGGVSTNVNIDKAGEAKLTTSSLQDNVTAHLTKINIEDTDEMPQQKHSGLNSSDGKMLTSSATLLESGEGMEGNDVEGSGTTELDGSTDINVVKTKRKYRVDILRCESLASLPPATLERLFLRDYDIIVSMVPLPSSSVLPGSSGPIHFGPPSYSSMTPWMKLVLYTAGDCGPLSAVFMKGQRIRLLPKPLAGCEKALIWSWDSSVVGGLGGKFEGNLVKGNLLLHCLNSMLKQSAVMVQPLSVNDLNASGNLVTVDIPLPLKSDDQSIASVIAQTNLPQEQVLNLASVLKDLSSKFELSTLGYLRLLRLHRLTESDESHLENGSYQWVPLSLEFGIPLFSPKLCERICERVVESCILQKEDLAEHYDVMQTVRRRLRELCSEYQATGPVAKLFNKRGSSKDLPRVLINTISGRWNPVNDPSAPSEHERLKLAGRQRCQTEVVGFDGTFIRSYALPPEHDEAGTKSLSEEQSSANDGKPDTEDADSKDVLLPGVNLIFDGAELHPFDISACLQARQPLWLIAEASAASSTMI

SEQ ID NO: 52044 - protein, 330 aa, Oryza sativa
MSAYCGKYKDELIKNAAYIGTPGKGILAADESTGTIGKRFASINVENVEENRRSLRELLFTTPGALQHLSGVILFEETLYQKTKDGKPFVDVLKEGGVLPGIKVDKGTVEVAGTNKETTTQGHDDLGKRCAKYYEAGARFAKWRAVLKIGPNEPSQLSIDLNAQGLARYAIICQENGLVPIVEPEILVDGSHDIERCAYVTEKVLAACYKALNEHHVLLEGSLLKPNMVTPGSESKKVSPQLIAEYTVRAPPEDCPCCRACHCLPLWWTERGGGDREPQRHEQAQHQEAVGSVLLLRPCSPAEHAQGLGRQDGERGEGAEGLHHQVQGQL

SEQ ID NO: 52045 - protein, 76 aa, Oryza sativa
MDLASGSAWNLFVLDGILRAMHPASGALLAFICALTPLCWYLVKKKDMYTVFLFPYLLWFVPEMEQSIWSKMFYPP

SEQ ID NO: 52046 - protein, 424 aa, Oryza sativa
MAAAAGPMDLVEAEAEEQPPDEDGDEEGYVEADPAGRFIRYDEIVGSGAVKTVYKAFDKLEGVEVAWSQSRIDDSVMGSSKKMKQLNTEIQLLKTLKHKNIEKMFASWVDGEKKTVNIITELFTSGSLTQYRRKHKKVNMKAMKRWAIQILTGLEYLHSQKPAIIHRDLKCDNIFINGNHGKVKIGDFGLATFMQQQKKSIKGTLEFMAPELLTGHYNELVDIYSFGMCMLEMVTCEYPYSECQGMAHIFKKIDEGKKPAAFYKIKDAEVRSFIENCLAPVENRMSATELLKSSFLQDDDLISVSLVKNMSEDGQQPVSCMLRKGEFLLTGNVDVASHVDLWLRFPDPSGCFKSVEFPFNLTEDTSLSVAVEMVEQFGLTQDSRPIIAQLIDAFLVILIPEWTPCVAIRQVVSEGANGLTIEKR

SEQ ID NO: 52047 - protein, 616 aa, Oryza sativa
MLFCCPASPPPPIQASSLPPFRTNSLSPTVRGGNAAPRRPLARSFSAKNRSPRARNRHAAAGDGGGYGSPEQEGRGESSLPNAEALASSLRDCGGADGVRRVHAVAVRSLDSLGTFVANNLISAYARFDEVSDAREVFDEMPERSVVSWTAMMNVYLKLGHYGEVVRLFFDMVGSGVQGNSLTFVCLLKSCGERCDAKLGQQVHCCIVKGGWSNVIVDSAIAHFYAQCGDVASASAIFDKMAYRDVISWTTMITAYVQHGHGGQALRMFSEMVSEGFRPNEFTVCSVLKACAEEKAVRFGKQLHCAVLKKMYKNDIHIGSALVTMYARCGEVFDAQAVFDMMPRRNTITWTSMISGYAQSGHGEKAILLFRKMKMRRVFVNNLTIVGLLSACGSLQSPYLGKELHAQIIKNSMEENLQIGSTLVWFYCKCGEYTYAARILEAMPDRDAISWTALISGYNNLGHNVEALKSLDDMLWDGVKPNTYTYSSALKACAKLEALQYGRKIHGFVNKTQDFSNVFVGSSLIDMYMRCGKVDEARSVFDAMPEHNLVTWKVIITGFAQNGLCEEALKYMYLMQQEGHEVDDFVLSTVLTSCGDLQWKSISFSDSVAGSVSARQ

SEQ ID NO: 52048 - protein, 513 aa, Oryza sativa
MSSNSTLTDSLHERTIVFGLKLWVVIGISVGASLLGVLLILIVCLTIQTWIKRSRRTFKEIPITQIPSASKDIKEVRAVEEFLPNDFVVHDGLLLAIQYEPVEPVDKDVNQFAQEDKTIQGEDNSSSVPLHYVDNYDGIQSVSTCEQSSSHAPADSVPLPGLPEFSYLGWGHWFTLRDLELATNCFSKDNVIGEGGYGVVYRGRLSNGTPVAVKKILNNLGQAEREFRVEVEAIGHVRHKNLVRLLGYCVEGTQRMLVYEYVNNGNLESWLHGELSQYSSLTWLARMKILLGTAKALAYLHEAIEPKVVHRDIKASNILIDDEFNAKISDFGLAKMLGAGKSHIATRVMGTFGYVAPEYANSGLLNEKSDVYSFGVVLLEAITGRDPIDYDRPPDEVNLVDWLKMMVANRRSEEVVDPNLERRPSTKELKRALLTALRCIDLNSEKRPRMDQVVRMLDSNEPIPQEERRQRQNHISNNSETEPLRGKSSSGKSDAPENEMRPPRYKNRSFPPK

SEQ ID NO: 52049 - protein, 177 aa, Oryza sativa
MESCPSVKNILVLDSEGKRVAVKYYSDDWPSLSSKQAFEKSVFAKTQKTSARTEAEIVMFDSYFVVYKFIQDLHFFVTGGDEENELILASVLQGFSEAIDYLLRNKVHRRAALENLDLIFLCLDEVVDGGIVLETDAKAILEKVSGHGLEGSGSLTEQKLSSALATAREHFARSIFS

SEQ ID NO: 52050 - protein, 141 aa, Oryza sativa
MSTPAAGEKPALRKPVFTKVDQLKPVTSGHTLTVKVVSATPVPGRARPGVAAPSRPPRIAECLIGDETGAIVFTARNEQVDLLKPGATVIMRNAKIDMFKGSMRLAVDKWGRIEATEPASFTVKEDNNLSLVEYELVNVTE

SEQ ID NO: 52051 - protein, 586 aa, Oryza sativa
MAALGRASSSAPVLAAAAAVLLSLCLAALSEEQEQLENLRFVRHAQDAPLVSSYNYIVIGGGTAGCPLAATLSEHSRVLLLERGGLPYANMSSEQHFTDALADTSPASPAQRFISEDGVVNARARVLGGGSCLNAGFYTRASNEYVRASGWDARLVNSSYRWVERSLVFRPDVPPWQAALRDALLEVGVTPDNGFTFDHVTGSKIGGTIFDNSGQRHTAADFLRHARPRGLTVLLYATVSRILFKSQDGVPYPVAYGVVFSDPLGVQHRVYLRDGDKNEVIVSAGTLGSPQLLMLSGVGPQAHLEAHGIEVIVDQPMVGQGVADNPMNSVFIPSPVPVELSLVQVVGITRSGSFIEGVSGSEFGMPVSDGALRWARSFGMLSPQTGQLGTLPPKQRTPEALQRAAEAMMRLDRRAFRGGFILEKILGPVSSGHVELRTTDPRANPSVTFNYFREAEDLERCVHGIETIERVIQSRAFSNFTYANASVESIFTDSANFPVNLLPRHVNDSRSPEQYCMDTVMTIWHYHGGCHVGAVVDDDYRVFGVQGLRVIDSSTFKYSPGTNPQATVMMLGRYMGVKIQSERWKK

SEQ ID NO: 52052 - protein, 425 aa, Oryza sativa; identical to SEQ ID NO: 35388

SEQ ID NO: 52053 - protein, 319 aa, Oryza sativa
MAAVSRGLLARLRHLSIAGPRLPPCCRPFSAEPLVSHPDDDDAAAGGGGGGGEGSGGGRIIEARAGVMGPDSRRTGVIGVKCGMSAMWDKWGAKVPITVLWVDDNVVCQVKTAEKEGFFALQLGAGQKKEKHLTKPEVGHFRAQGVPLKRKLREFPVTEDALIPLGTTITVRHFVPGQFVDVTGITKGKGFAGGMKRHGFSGMPASHGASLSHRSIGSTGQRDAPGRVFKNRKMPGRMGGVQRTVKNVWVYQIDPARNLLYLKGQVPGPQGSFVFVKDSIYKKPDIAKLPFPTYFSQEGESEELLVADLGDIDPFMVAD

SEQ ID NO: 52054 - protein, 526 aa, Oryza sativa; identical to SEQ ID NO: 34698

SEQ ID NO: 52055 - protein, 254 aa, Oryza sativa
MASRRLFASLLRSTAAPRTPSTPGCLFNRAAAAAYSSSAPYNGQGFPLPQSETASRLGLFSSPGDTRQPSYGDRLMQSQQLSQDYRARTQANNAPRFGDTMSRIAGGENSSYFGTPSRIFDEHKQSLVKGKRDFVHVLLKRNKTFVTVTDVRGNKKTGASAGCLEDRKGRSRLSKYAAEATAEHVGRAARKMGLKSVVMKVKGTTFFNKKKKVILSFREGFRGERVREQSPVVLIHDVTQLPHNGCRLPKQRRV

SEQ ID NO: 52056 - protein, 244 aa, Oryza sativa
MFRYEKGGDVEAGTSGGARELYPGMTEPPEMRWALIRKIYVILSMQLLLTAAVAAVVVKVSAISHFFVSSHAGLGLYIFLIILPFIVLCPLYYYHQKHPVNLILLGLFTVAISFAVGMTCAFTSGKVILESAILTTVVVFSLTAYTFWAAKRGRDFSFLGPFLFASLIVLLVFAFIQILFPLGRISQMIYGGIASLIFSGYIVYDTDNIIKRYTYDQYVWAAVSLYLDVINLFLSLMTLFRAAD

SEQ ID NO: 52057 - protein, 312 aa, Oryza sativa
MAGSSGGATSSSSRNSVERFYLPPHSRRQQQQRLRSPTSPSLSPSPSPRSGRHKAAAAAPPAVVAAAAVGAGVLTDGDSRVDSDDSSSTSSKPSVASTATATTTAADVNVTAVEESGNLERFLTSTTPSVPFQYLPKTSLKMWRTGDCTNTSPYFCLEDLWESFREWSAYGAGVPLLLNGSDSVTQYYVPYLSAIQLYADPSRSVSRTGRLGDESDGEYLDASSESSSETDVDRLRVSSVEATHGMANGSLRTDDADGYASASSPIFQYMERDPPFCREPLTDKVSILASRFPALKAFKSCDLLPSSWMSVA

SEQ ID NO: 52058 - protein, 597 aa, Oryza sativa
MVGPQYDLVGNPLGAVRSTFERAAAESGGHEPVAAFRGKDWGATEVFRSFLFEQGGLDKVPVLDESNLGLIKPNTLVRFRGMVQDMLGNEFYVGAFKDGSTWRTNKFSDSSPFSMPHPCDSHLWERHLFHCVPVPGQNSWTRESSPGPDLRRIASCFTSEQREKRKRGADNDAMDVSESGSGETSSSSKKTKDDGVKISNSSVEMSMNEEHHVPEMNGGDHHIPGSSFSCLVKVYDMPESQVKLNDVSEFIGVYTFDPELAAPNDNSDDIMFDLMEDVTAQLPPSKVPRLHCLVWRNLSAHDFLPRPPAVEPSPILLRGIRQSLLSHLTLVLGKDELAAQCLLLHLLSRLRNKVDVVTVGRLSLNFTGFNRESVSIFGNQLNNLFQRLLPYSQVIPLSIEYLNTATLQPRKDNQSGRLVTGVLQLPQGTHLTFDETLLQSGSLTSKGVENTMLLKNLMESQKVEYDFEFYKLEMATDVQLLILSEGKSNILPSDLIVPFRPSSVPAVNASSEELESWRWYLATVRSLPQSTETDTYQMIQDEMVNAMRDDRSLGCSELSRWLTMAQIMAASFGEKSLSMEHWQMVKELERLRKERLQ

SEQ ID NO: 52059 - protein, 597 aa, Oryza sativa; identical to SEQ ID NO: 52058

SEQ ID NO: 52060 - protein, 104 aa, Oryza sativa
MSLFLSKKRRMGLSGSHTWIFWESNHLTTRNTLQNPGRLDKNLLTSKWSSPGTLPLSMVAVLTSSKAFWMLTAGESCFQASWQVQTPPRSSLLGPLTCTTGCFN

SEQ ID NO: 52061 - protein, 44 aa, Oryza sativa
MASTSTPLATPPTAATLPGPILILTISPMGHHLMMKDMWATWET

SEQ ID NO: 52062 - protein, 398 aa, Oryza sativa
MGSPMSRPATADGSARGGGLALAIADELPQEAVAKPALMSQVMAGNSSMVAKMDEVSRVADDLMFAEDLQLEEVIRFSAHSAGPNCAVCGQATPSVDASWKPDNCDHVMCITCFGQLASDSHADELPKCPLASCQSSPDIISVSNEETGGGKGKELATYVVLEEHGECSRGAAATASSSASSEFYCTICMETVDAIERFAIPGCTHAFCASCVRQYIAAKVEENVLSIGCPDPGCKDSGGGALHPEACRDVIPPQLFQRWGDALCDSALSSLKFYCPFSDCSALLVDDPGDGEEAITDAECPHCSRMFCAQCKVPWHGGATCAEFQKLGKDERGRDDLLLRKVAKDSKWQRCPKCKMYVERVEGCVFIICRCGHCFCYLCASPMSRDNHHCKKCKRTW

SEQ ID NO: 52063 - protein, 178 aa, Oryza sativa
MGADGGGGGGRKSSSPAGKPAEAARAGSLLAGLPSRGNFVADSIASSMGGLPVYVCLHDTAPPEGQVIDTDTTNILIRSLQLSKQKNEAKDVGSRTPGESSKGKRSASRLLDGKNPSKRANTGSTAGSSAHGELGSVFSEQTLQSFTVEKLRILLKERGLSPKGKKDELIARLIESSE

SEQ ID NO: 52064 - protein, 131 aa, Oryza sativa
MTANANVGDSILKLFQNNFNSAACSLLILYQPHEIDRSEHMDDLAHTTNQCDLEFNYLGIRGLGISFRAVTIFLLYFCAHIGECGVAIVTFFKSKLVLYKDFTYSSYVMPINLSGNCIEELPYAELIGAGV

SEQ ID NO: 52065 - protein, 195 aa, Oryza sativa
MDLEKGKKPSEQAAACRIMQVKDKLITLQPVVRACVFLATAVAAVIMGLNKQSYTTVVAIVGTRPVTQTFTAKFKDTPAFVFFVIANAIASGYNLMVLVTRRILQRRAQSLSVHLLDMVILTLLATGSATAASMAQLGKNGNLHARWNPICDKFGSFCNHGGIALVSSFIGVALMLALNLLSAAANSPRSNVTGQ

SEQ ID NO: 52066 - protein, 501 aa, Oryza sativa
MAAAKDLLGGEDLARFLSQLHADVSNLKAMLRAICIAGHATESFSDFVVGHGEIWSAQLLSFAIKKSGTPCSWMDTREVLVVNPTGSNQVDPDYLESEKRLEKWFARQPAETIIATGFIASTPENIPTTLKRDGSDFSAAIIGSLVKAGQVTIWTDVDGVFSADPRKVSEAVILSTLSYQEAWEMSYFGANVLHPRTIIPVMKYNIPIVIRNMFNISAPGTMICQQPANESGDLEACVKAFATIDKLSLVSVEGTGMAGVPGTASAIFGAVKDVGANVIMISQASSEHSVCFAVPEKEVAAVSAALHVRFREALSAGRLSKVEVIHNCSILAAVGLKMASTPGVSATLFDALAKANINVRAIAQGCSEYNITVVLKQEDCVRALRAAHSRFFLSKTTLAVGIIGPGLIGRTLLNQLKDQAAVLKENMNIDLRVMGITGSRTMVLSDTGIDLAHWKSCYKLKQNQPTLTSLLIICPRINYSLTGFWWTAQQTQVLHPTIMTG

SEQ ID NO: 52067 - protein, 116 aa, Oryza sativa
MNSGYPPQQQIPQAYGYYQIPGKSACSELSQAERYTLHQQAYTCANSATVTDVALDMRAPPFHLSGGPKSDSSERLAAETNLYTRSLNGLAATAAGVAASAHRKVGVVPYGMSRMY

SEQ ID NO: 52068 - protein, 424 aa, Oryza sativa; identical to SEQ ID NO: 35343

SEQ ID NO: 52069 - protein, 410 aa, Oryza sativa; identical to SEQ ID NO: 37328

SEQ ID NO: 52070 - protein, 473 aa, Oryza sativa
MASLAVSASASASGEEVTHLAQREAAEIDEQLMGPLGFSVDQLMELAGLSVAAAVAEVYKLGEHTRVLVICGPGNNGGDGLVAARHLHHFGYKPSVCYPKRTPKPLYSGLCTQLESLTIPFVPVEDLPANLSEEFDIIIDAMFGFSFHGTPRPPFDDLINRLVSLSAIDNSAKRPAIVSVDIPSGWHVEEGDINGGGFKPDMLVSLTAPKLCAKKFTGPHHFLGGRFVPPPIVSKYKLHLPPYPGTSMCVRIGKAPSVDISSLRENYISPELLENQVMPDPFDQFVRWFDEAVTAGLREPNAMALTTADKEGKPSSRMVLLKGVDKQGFVWYTNYGSQKAHDLSENPNAALLFYWNEMNRQVRVEGSVQKVPEEESEKYFHSRPRGSQLGAIVSKQSTIIPGREVLQQAYKELEQKYSDGSVIPKPDYWGGYRLTPKLFEFWQGQQSRLHDRLQYSLREVDRSTVWHIERLSP

SEQ ID NO: 52071 - protein, 671 aa, Oryza sativa
MTPAPAAASYRALVALLLVAVAVADDGSTLLEIKKSFRNVDNVLYDWAGGDYCSWRGVLCDNVTFAVAALNLSGLNLGGEISPAVGRLKGIVSIDLKSNGLSGQIPDEIGDCSSLKTLDLSFNSLDGDIPFSVSKLKHIESLILKNNQLIGVIPSTLSQLPNLKILDLAQNKLSGEIPRLIYWNEVLQYLGLRGNNLEGSISPDICQLTGLWYFDVKNNSLTGPIPETIGNCTSFQVLDLSYNKLSGSIPFNIGFLQVATLSLQGNMFTGPIPSVIGLMQALAVLDLSYNQLSGPIPSILGNLTYTEKLYMQGNKLTGPIPPELGNMSTLHYLELNDNQLSGFIPPEFGKLTGLFDLNLANNNFEGPIPDNISSCVNLNSFNAYGNRLNGTIPPSLHKLESMTYLNLSSNFLSGSIPIELSRINNLDTLDLSCNMITGPIPSTIGSLEHLLRLNLSNNGLVGFIPAEIGNLRSIMEIDMSNNHLGGLIPQELGMLQNLMLLNLKNNNITGDVSSLMNCFSLNILNVSYNNLAGVVPTDNNFSRFSPDSFLGNPGLCGYWLGSSCRSSGHQQKPLISKAAILGIAVGGLVILLMILVAVCRPHSPPVFKDVSVSKPVSNVPPKLVILHMNLSLLVYEDIMTMTENLSEKYIIGYGASSTVINVFRRTANQWQ

SEQ ID NO: 52072 - protein, 291 aa, Oryza sativa
MFYACSLDPEICGLEFALFLSDIFIKKEEDSISRMSAVSYVGSYLSRARFISADTVVGILKRLVDWCVDYCDLQNNIRITTKPINHQIFYASCQAVMYILCFRLRSIMDYPNLKAQLFNMPFGYILTHPLEPLKVCLPSIVDEFLRQAKAARLFNASVHSEFEDALESDLSKTFGGMNRLDMFFPFDPYLLKESDRYMRPNFEYWSMVKTTYNNYNSDVDDELVDLDAPEMNVGSLDDHVEIDLNSDDDLEYSMNKMSITPNRSFFHQIMANSDTGLTMPARIRPSISPPS

SEQ ID NO: 52073 - protein, 417 aa, Oryza sativa
MENPQIEMGAFKANGPQLQNGGLRSSMVQSWNLQRFVESALRSIRIVIFTSKLNLLLPFGPASIILHYTTSRHGLVFLFSMLGITPLAERLGYATEQLAIYTGPTVGGLLNATFGNATEMIIAIYALKNGMIRVVQQSLLGSILSNMLLVMGCAFFAGGIVHRNKDQVFSKATAVVNSGLLLMAVMGLMFPAVLHFTHSEVRQGASEVSLSRFSSCIMLVAYASYLYFQLSGRNNAYSPIGSEEMPNEDAAEEDEESEIGMWESIAWLAMLTLWVSILSEYLVNAIEGASDSLNLPVAFISVILLPIVGNAAEHASAIMFAMKDKLDITLGVAIGSSTQISMFVIPFCVVIGWMMGQKMDLNFQLFETATLFITVLVVAFMLQDGVANYLKGLMLILCYLIVAASFFVHVDPQSSDD

SEQ ID NO: 52074 - protein, 466 aa, Oryza sativa
MAEDGGGDRDQQNQQQQQEEAAAPAAAAAGVGGGEEQGNGRGEESVKLFVGQVPKQMTEDELAAMFAAVAVVDEVTLIRDKATKASRGCCFLICPSREEADKAVNAYHNKRTLPGASSPLQVKYADGELERLEHKLFIGMLPKNVTDAEMTDLFSQYGNIKDLQILRGSQQTSKAGCAFLKYETKEQALAAIEALNGKHKIEGSSVPLVVKWADTEKERQARKAQKAQFHPSNMSNPNAMQQSSLFGAMQMGYVPQYNGYGYQPQGTYGLMQYPLSPMQNQAAFPNMVQSVNQGSSIRGVNSELSPNSAPRSFNSMQLGSPYSPVPSMQYPGSYPGNAINSRPFVNSHNSMKVPNANASSPTSSSTSSNPGPQIEGPPGANLFIYHIPQEFGDQDLAGAFQGFGRVLSAKVFVDKATGLSKCFGFISYDSPASAQTAISMMNGYQLGGKKLKVQLKRDNSKHSKTY

SEQ ID NO: 52075 - protein, 715 aa, Oryza sativa
MEPKLAFPQDSPPLAILCAAKVAGVSLTLDPKLASGSAPTLHLGSGDFIHGVNTILRYIARVASVTSFYGQDAIQAAYVDQWLDYAPVILSGSEFEAACSFLDGYLASRTFLVSYGLSIADIVVWSNLAGTGQRWESLRRSKKYQNLVRWFNSIADYSDTLDEVVSAYVGKRGIGKSPAPSLKEKLPDSKQNISIPEVDLPGAKVGEVCVRFAPEPSGYLHIGHAKAGLLNKYFAERYKGRLIVRFDDTNPSKESNEFVENVLKDVETLGIKYDIVTYTSDYFPQLMEMAENLIKQGKAYVDDTPKEQMRSERMDGVESKCRNNTVQDNLSLWKEMINGTERGMQCCVRGKLDMQDPNKSLQDPVYYRCNTDPHHRIGSKYKVYPTYDFACPFVDALEGVTHALRSSEYHDRNAQYYRILQEMGLRRVEIYEFSRLNMVYTVLSKRKLLWFVQNKKVEDWTDPRFPTVQGIVRRGLKVEALVQFILEQGASKNLNLMEWDKLWTINKKIIDPVCGRHTAVLKDQRVLFTLTNGPEEPFIRVLPRHKKYEGAGKKATTFTNKIWLESADASVISIGEEVTLMDWGNAIIKEIKTQNGIITELLGELHLEGSVKMTKLKLTWLPDIEDLVSLSLVEFDYLIKKKKLEEDDNFLDNLNPCTCQEFPALGDANMRNLKQGEIIQLERKGYYRCDAPFIRSSKPIVLFAIPDGRQKSATK

SEQ ID NO: 52076 - protein, 66 aa, Oryza sativa
MKGATSMVMQKDRHGVLHHYSFRGGIGVKRIPFHRFCYYWNHIRTPIRLSCCKMQIVYSSSILKVS

SEQ ID NO: 52077 - protein, 373 aa, Oryza sativa
MEASDLNTHLPPRKRLLAGLRMAAPPCADAPPPALLTADLAARLRHMMASSSSPDDIVQAARSAASTAAQAAAAARATAAEKAAVAAKARAAARAAMEFLDSISRPASSRNGLQLKLKSRKKHVQVKLLYKPNGRLEEGRGGPPTTGDASSKPRRRGRETDEEVARKLHRAMNSSPRISFTGPKRPRTIAAENGGVLDACNGSSPYPPTFEVSTITNGCSLGQSSELPVPFSEHEGLDDDNKDSSGHDTTKSRAIVGNGVGAGNLSAGRKVKIKRKELLLNQHNSKDTQEAKEIKPSIDSIRYDESKQNGAEKRLNQLVDAKDPGDGLAPMKISSVWRFKKFKTSHCSSDSKVLHNVCPSTSAAETSASVKAD

SEQ ID NO: 52078 - protein, 292 aa, Oryza sativa
MAFGRRSLFLPVVGVAAILLLAAGHATAVNTGETVVFWGRNKDEGSLREACDTGLYTSVIISFLAVFGHGRYSLDLSGHDVSAVGADIKHCQSKYIPVLLSIGGQGGAYSLPTNASAADVADHLWDSFLGGGRAGVPRPFGDAVVDGVDLFIDQGGAEHYDELARRLFSHYKFEMLLTATTRCSYPDHRLDMALATGLFTHIHVRVFGGGGDAGCTTRHRASWERWAAAYPGSLVYLGVVASPEQDANAYLPRKVLFSDVLSHIVEKPNYGGLMIWDRYYDKKTGYSAGKVF

SEQ ID NO: 52079 - protein, 228 aa, Oryza sativa
MSMREFVDHWAASSSNGDSDGSLLYLKDWHFVKEYPGYVAYTTPTFFADDWLNMYLDSHPIHRDSDIANHTNEINCADYRFVYMGPKGTWTPLHADVFRSYSWSANVCGRKLWLFLPPSQSHFVFDRNLRSSVYNINDDVSEKQFPEFNNTKWLECTQEQNEIIFVPSGWYHQVHNLEDTISINHNWFNGYNLHWVWNLLHEDYKVAKIILKTFGTYVTILRDYVNAT

SEQ ID NO: 52080 - protein, 319 aa, Oryza sativa; identical to SEQ ID NO: 35364

SEQ ID NO: 52081 - protein, 252 aa, Oryza sativa; identical to SEQ ID NO: 46472

SEQ ID NO: 52082 - protein, 742 aa, Oryza sativa
MRVWLGRVGGGDAMMHMLVAPDGGGGGEMPPPYGGAAAAPPPPMEQELELHRDNADDGLDGHVRCLRCGISGNATPHMRRGPDGPRTLCNACGIAYRKGKMRRMIEAEPPIDEAALAKLVPEVGMEFESEDKAYEFYNKYAGHVGFSVRKSTSHKSSGNITKVRTFVCSREGYNRDKKSLEAKKPRLDTRIGCPARLIIKVTPESKYRVTDFKADHNHQLAPPSTMHMLRSQRILTELQSGEAELSDDSVMTPTTKATGDLVVRQIGFLRSISLLPADYKNYLRSKRMKAMQLGDGGAILKYLQTMQMENPAFFYTMQIDEDDKLTNFFWADPKSREDFNYFGDVLCLDTTYKINGYGRPLSLFLGVNHHKQTIVFGAAMLYDESFESYRWLFESFKIAMHGKQPAVALVDQSIPLASAMAAAWPNTTQRTCAWHVYQNSLKHLNHVFQGSKTFAKDFSRCVFGYEEEEEFLFAWRSMLEKYDLRHNEWLSKLFDERERWALAYERHIFCADIISALQAESFSSVLKKFLGPQLDLLSFFKHYERAVDEHRYAELQADFQASQSYPRIPPAKMLKQAAHTYTPVVFEIFRKEFELFMDSVLFSCGEAGATSEYKVAPSEKPKEHFVRFDSSDCSCICTCRKFEFMGIPCCHMLKVLDYRNIKELPQRYLLKRWRRTAKSANEENQGTLLFLICMRIHFAEAHDAGDLNLNIIPSARCLLHDTGVEAVRTGHAELPRIKVSNL

SEQ ID NO: 52083 - protein, 194 aa, Oryza sativa
MGKYMRKAKVVVSGEVVAAAVMELAAAPLGVRTRARSLALQKRQGGEYLELRSRRLEKLPPPPPPPPRRRATAAAATADATAAESAEAEVSFGGENVLELEAMERNTRETTPCSLIRDPDTISTPGSTTRRSHSSSHCKVQTPVRHNIIPASAELEAFFAAEEQRQRQAFIDKYNFDPVNDCPLPGRFEWVKLD

SEQ ID NO: 52084 - protein, 704 aa, Oryza sativa
MDASAGSSAPAAEIRGEAARDDVFFADDTFPLLPDFPCLSSPSSSTFSSSSSSNSSSAFTTAAGGGCGGEPSEPASAADGFGELADIDQLLDLASLSVPWEAEQPLFPDDVGMMIEDAMSGQPHQADDCTGDGDTKAVMEAAGGGDDAGDACMEGSDAPDDLPAFFMEWLTSNREYISADDLRSIRLRRSTIEAAAARLGGGRQGTMQLLKLILTWVQNHHLQKKRPRTAIDDGAASSDPQLPSPGANPGYEFPSGGQEMGSAAATSWMPYQAFTPPAAYGGDAMYPGAAGPFPFQQSCSKSSVVVSSQPFSPPTAAAAGDMHASGGGNMAWPQQFAPFPVSSTSSYTMPSVVPPPFTAGFPGQYSGGHAMCSPRLAGVEPSSTKEARKKRMARQRRLSCLQQQRSQQLNLSQIHISGHPQEPSPRAAHSAPVTPSSAGCRSWGIWPPAAQIIQNPLSNKPNPPPATSKQPKPSPEKPKPKPQAAATAGAESLQRSTASEKRQAKTDKNLRFLLQKVLKQSDVGSLGRIVLPKEAEVHLPELKTRDGVSIPMEDIGTSQVWNMRYRFWPNNKSRMYLLENTGDFVRSNELQEGDFIVIYSDIKSGKYLIRGVKVRRAAQEQGNSSGAVGKHKHGSPEKPGVSSNTKAAGAEDGTGGDDSAEAAAAAAAGKADGGGCKGKSPHGVRRSRQEAAAAASMSQMAVSI

SEQ ID NO: 52085 - protein, 22 aa, Oryza sativa
MTETIDELCTDDGVIAHSRLAV

SEQ ID NO: 52086 - protein, 468 aa, Oryza sativa
MASRLLTRSTAARLLSHLRSSGALSPTHHHHHHLDNGAALASLLGLGRGGLPAAAGPWSPRDPPTRWFSSPATVAEAPMTADGLTVDSIAGKGWTILPEAESDWRSHAAAVAQSVKLIKKRLKWGWILERSRQLSVVLERPDLWDDPVFAGKVSREHGELMGKIKSVNQFEQELMEHIDMLRLAREEDDNELETETMRALAEMRRSAKEKELNALLSGDNDSCSCFIEVQAGAGGTESMDWAAMVMNMYSSWAQRRGYTVSIIEEMPGEIAGIKRATIKVDGEYAFGYAKAEVGVHRLVRISPFDSGKRRHTSFAAVAVVPILGDGSTRYQIKDSDLRIERFRSGGPGGQHANCTESAVRIVHIPTGITATCQNERSQHMNKASAMAVLQSRLDQLEIARQAQMNADHTQSLSEISWGNQIRSYVLHPYRMVKDLRTNYEVSDPDSVLNGDLDDFILNFLSTSLDEAD

SEQ ID NO: 52087 - protein, 519 aa, Oryza sativa
MAVAAPGQLNLDESPSWGSRSVDCFEKLEQIGEGTYGQVYMARETETQEIVALKKIRMDNEREGFPITAIREIKILKKLHHQNVIQLKEIVTSPGPERDEQGKPIHGNKYKGSIYMVFEYMDHDLTGLADRPGMRFTVPQIKCYMKQLLTGLHYCHINQVLHRDIKGSNLLIDNEGNLKLADFGLARSFSNDHNGNLTNRVITLWYRPPELLLGSTKYGPAVDMWSVGCIFAELLNGKPILPGKNEPEQLSKIFDVCGTPDESNWPGVTKMPWYNNFKPPRQLKRRVKEYFKHFDRLALDLLEKMLTLDPAQRISAQDALDAEYFWSDPLPCDPKSLPKYESSHEFQTKKKRQQMRQADEAAKRQKTQHPQPHGRLPPIQQTGQPHPQIRPGQPMNNPHAPMAAGPGHHYAKPRGPGGSSRYPQGGNQGGGYPNRGGQGGGGSYGNAPYPQQGRGPPPPYPGSGMAGTGGPRGGVGGGYGGGSNYPQQGGPYGPSGPGRGSNYPQQGGSRNQQQYGNWQ

SEQ ID NO: 52088 - protein, 71 aa, Oryza sativa; identical to SEQ ID NO: 35357

SEQ ID NO: 52089 - protein, 499 aa, Oryza sativa; identical to SEQ ID NO: 47596

SEQ ID NO: 52090 - protein, 594 aa, Oryza sativa
MSGSGVPAGRGSRSFDFGADDVLCSYDDFAAPSEPKRPDPADKDFHDSRLGRPFGKAYEQESYGKEDVLFAVEKCMKKYADNLLRSLEGITNRLSQLEIYCYKLERSMGELRSDVLRDETDQRLKSLEKHLHEVHRSIQILRDKQELAETQKELAKFQLTHDTSKKKEDMPTPSFPEQKTLEEKADAPGQQLAIVLPHQVNSSLAPRASQPVQQYKDQTVQQPPSSSVPQQDRYVLSQAIVYYPQRQAPGIQDTQGQQVQPEVQYLPVRPSATQDVPVHASSQQSQAANQTQPQSFPPYQQQWPQQSSQPAPAPVAQPQPTFSQPFPPPVQQPQLSNTQQFPPQPMQQPQLSNTQQFAPQPVQQPNAQQFPPPPVQPQQSNTQLPPQAMQPQQHPPVQNQMRPQTPPNYPHYQPHQSLNPPPETLPGSMAMQGPYNTVAPAAGSRSEVPYSYGGPGMPPPQHNMQRQQLPPPSQGSFGPPSKGGYAGPPQYAPQGSSHGYNTAYGYPPSGPSAAQAPQMPPAPGNVGMSHPGSHQMMRGHPYGEMIEKAITMGYPREQVMNVIQRMTESGQPMDFNTLLDRLNEAGSGAPPRAW

SEQ ID NO: 52091 - protein, 303 aa, Oryza sativa
MLLNQASREVAALDSIRHHLLEEEEETPATAPAPTRRPVYCRSSSFGSLVADQWSESLPFRPNDAEDMVVYGALRDAFSSGWLPDGSFAAVKPESQDSYDGSSIGSFLASSSSEAGTPGEVTSTEATVTPGIREGEGEAVAVASRGKHYRGVRQRPWGKFAAEIRDPAKNGARVWLGTFDSAEEAAVAYDRAAYRMRGSRALLNFPLRIGSEIAAAAAAAAAGNKRPYPDPASSGSSSPSSSSSSSSSSSSGSPKRRKRGEAAAASMAMALVPPPPPPAQAPVQLALPAQPWFAAGPIQQLVS

SEQ ID NO: 52092 - protein, 345 aa, Oryza sativa
MLALRKTLLHGRLPAAPPAAAAAAIASRIPALLRRLSSSPGDGQGGDEWGSSWSTGITKEHFDGSDAAVGRPVTSPSKPVSPELAAVRAMDEEDEIFRAMERDNREAKAYVDSWGDRMRETCELLKQVREPGSRGSYLKDSEKQEMYRLHKEDPETYTVERLAKDFRVMRQRVHAILWLKEMEEEEERKLGKPLDDSVEVLLDSCPEFFNSHDREFHVASLPYKPDFKVMPEGWDGTTRDPDEVLYEISMKEDQMLYEEFVQRLQFNKKKVAGEVKCHKYSRRRPDDGWTYMVEKLGAQSKRGSGGGWKFASLPDGSSRPLNDMEKMYVKRETPKRRRRIMAPFK

SEQ ID NO: 52093 - protein, 221 aa, Oryza sativa; identical to SEQ ID NO: 42551

SEQ ID NO: 52094 - protein, 506 aa, Oryza sativa
MGGGRKRGRTQRRHFKQGRENVWKHNPQRPPAAGGEGAEGGAAEGREGNPSWQPFATENPAFEDYYKAQQIIPEGEWDDFMNMLRKPLPATFRINASCQFYQDICSQLENDFRKSLETEVSDEHEEDAIRPLPWYPGNLAWHLNFSRMQLRRNQALEGFHEFLKRENEVGNITRQEAVSMVPPLFLNVQPDHHILDMCAAPGSKTFQLLEMIHQSTKPGMLPNALVVANDVDVQRCNLLIHQTKRMCTANLIVTNHEAQNFPGCNLAKFSSETCTDESKLQRLEFDRVLCDVPCSGDGTVRKAPDMWRKWNAGMGNGLHRLQVEIAMRGIGLLKVGGRIVYSTCSMNPVENEVVVAEILRRCGDSVELLDVSNELPELVRRPGLSTWKVRDRGSWFGTHEDVPRYRKNVISPSMFPSGKGTMDSHVAIGSVEINTDVIDADMKDSTNMVEGEQETKTASDDSIMVVIPILKRRANLSLMKFQTTLIKSQILRLSAQNIQISLCIAA

SEQ ID NO: 52095 - protein, 588 aa, Oryza sativa
MATAVACAERATSDMLIGPDWAVNIELCDIINMDPGQAKDTLKLLKKRLGNKNSKVQILTLYVLETLSKNCGDVVYQQIIERDILSEMVKIVKKKPDLNVREKILSLIDTWQVAFGGASGRYPQYHAAYQELRNAGVDFPPREENTVPLFTPPQTQPLRQPHLYPPPGQSYEDAAIQASLQSSAPSAPALSLSEIQSARGIVDVLDEMLNALDHRHPEGVREEVIVDLVGQCRSYQGRVMDLVSNTGDESLLFQALGLNDELQRVLQRHDDIAKGVPPGSGPAPAAANVNRGTAPPRPTGVSFSPLLNVHHEDDEPEDEFSVLSRRSARDGTAAQGNLPSAPKSERPYPSPLLPPPPSSKRPVFTEASSVDYLSGDSYKTEKVSDDFINPTAPANIPAPSHSKTETNPPPSYDSRSESVSDDFINPTAAPSFSMPSRPMSESNRPAVNRQESLPDDDFINPTAIPGFSSSSNANKYGDSGEDLPKAPWEAQAPGSLPPPPARYGQRQQYFEQQHGLPSGNNGAGYNGLVSQTEGLSLNQRNTENERGSSVPTASRQTKPEDSLFKDLVDFAKNKPSSPSKPANSRRTR

SEQ ID NO: 52096 - protein, 654 aa, Oryza sativa
MAPALSRSLGASSVAALRPTPSRGRGPTLRSAVAVQGRGAAAVAARGVRWEAGRRKGKGRMVGVRCEAAVTEKPAGEEEAAGEQFEYQAEVSRLLDLIVHSLYSHKEVFLRELVSNASDALDKLRFLSVTDSSVLSDGGELEIRIKPDPEAGTITITDTGIGMTKDELKDCLGTIAQSGTSKFLKALKENKDLGADNGLIGQFGVGFYSAFLVAEKVVVSTKSPKADKQYVWEAMADSSSYVIKEETDPEKMLTRGTQITLFLRDDDKYEFADPGRIQGLVKNYSQFVSFPIYTWQEKSRTVEVEEEEPKEGEEATEGEKKKKKKTITEKYWDWELANETKPIWMRNPKEVEKTEYNEFYKKAFNEFLDPLAYTHFTTEGEVELRSVLYIPGMAPLSNEEIMNPKTKNIRLYVKRVFISDDFDGELFPRYLSFVKGVVDSNDLPLNVSREILQESRIVRIMRKRLVRKTFDMIQEIAEKEDKEDYKKFWESFGKFVRLGCIEDTGNHKRLAPLLRFYSSKNETDLISLDQYVENMPENQKAIYYIATDSLQSAKTAPFLEKLVQKDIEVRARFLFTIYQRFVVCLCYSSGSEAHFSFFRFSTLSSRLMRLPFRIYRHTKRKNLLISAKKTWNWVMKMRTRKMRASRNTLFYVTG

SEQ ID NO: 52097 - protein, 259 aa, Oryza sativa
MQEAKKDSIFGGLASGAPVGADRFPFDPREYSPAMSSDSRELLGIDPPELIFPFELKKQISCSLHLTNKTDEYVTFKVKTTSPKKYCVRPNNGIVAPQSTSNVLVTMQAQREAPPDMQCKDKFLVQSAIVTQELTPKDITGDMFTKESGNVVDEVKLKVVYTQPHPTSLNGGSEEGLGSLSYQEATKGSRESETVTSEPLALISKLKEEKSSAIQQNMKLREELDLLRRQMGSQHGGFSLVFVLVIAILGILLGFLIKR

SEQ ID NO: 52098 - protein, 86 aa, Oryza sativa
MLTKLKVSGNRSKLVCCRKNMWPRLLGCFLMVSKLLMQMCTSTHGKEGALQRFVMVMVKLQLENKPAPSFRGSVLMESTALSCANL

SEQ ID NO: 52099 - protein, 50 aa, Oryza sativa
MTMRPCELHELECHCSGFRTTKWTLFFVGNLGVCRCKIHVSEKCRYKMYL

SEQ ID NO: 52100 - protein, 183 aa, Oryza sativa
MLNLFKIKGQKKEEAANTNGRPPAKKQSPGELRLHKDIAELNLPKKTNITFPNGKDDLMNIEITLRPDEGYYVGGAFVFTLQVPPTYPHEPPKVKCTTKVYHPNIDLDGNVCLNILREDWKPVLNINTIVYGLNLLFIQPNDEDPLNHDAAAVLRDDPQKFRRNVQTAMSGGYVDRVHFPRCK

SEQ ID NO: 52101 - protein, 355 aa, Oryza sativa
MAAANGSACGGGGVDKEKEEFKQIYGVLKEELLRDPAFEFTDSSRQWIDRMLDYNVPGGKCNRGLSVVDSYKLLKGTNVLSQEDMFLASTLGWCVEWLQAYFLVLDDIMDDSHTRRGQPCWFRVPQVGSIAINDGIILRNHITRMLRLHFRGKLYYADLLDLFNEVEFKTASGQLLDLITTHEGEKDLNKYNIGVHRRIVQYKTSYYSFYLPVACALLLSGEDLTKYGAVEDILVKMGIYFQVQDDYLDCYGDPKFIGKIGTDIEDYKCSWLVVQALERADESQKSVLFENYGKKDPACVAKVKSLYRELNLEAVFLDYENESYKKLIADIEAQPSIAVQNVLKSFLHKIYKRQK

SEQ ID NO: 52102 - protein, 152 aa, Oryza sativa; identical to SEQ ID NO: 47110

SEQ ID NO: 52103 - protein, 322 aa, Oryza sativa; identical to SEQ ID NO: 30975

SEQ ID NO: 52104 - protein, 833 aa, Oryza sativa
MKSNAVTSKGKAVFELKHRLVQAINKIADRDTYQIGLDELEKAADTLPPDMVGPFLSCVVDTDAEQKSAVRKECIKVIGTLARSHGSLVAPHMTKMVTSIVKRLKDADSVVRDACVDTCGTLALCARGYGDGGAALVALVRPLFESLGEQNRYVQAGAASCLAKVIDESNYFPGPVLPQMLVRVVKLLKNPHFMAKPAVIELIRSIIQAEGASTEQSLTSALTSIMDALKSSDWTTRKAASIALSSIALSSGYLVASFRTSCLRSLERSKFDKVKPVRDAITQAIQLWKVIPGSDTPEPSEAGSSTKENFFGDHHDGRSINDGGSRDTSFRRVDPASSVSAISGNSITSSKKRSPLSINKIALNNAANQQRSKLSDWHVEISVPKQNMIPLVDFEEKVSGNGSMLKGSNRSPYEIVDNDSKYEYDPMDDKQDCSSMSEVASRSCETKHVTSAQECVEDCDSARDIEQFPRAQKSKSIDSTVTDITSHGTHTCCLGAMKELSHIRKQLQEMERKQANIFDMLQEFMSNSVENMSVLSMKVHNLENAVDKTVYTITQSESRYHLPGSKFIKNQSATSSPRVSTSTPRSSVDANYKPPPIPHLKQEKKWMQDQPSKGLNMGVKEGEFLKSHTHDKTRKPGVVRSESALGRYVPSSARTRASGVKGNFPVSLTNSCEQPELQNALRASKEFDGNDDMASAYVEALNSGDCDYLIDVMDRTGPVLEKLSRETTSELLRVIAGQFLNKKMFDLALPWLQQVADLSMIYKPSQLFVSVRAQKEFLALLEEAATSGSTEPAIRIAIAQLAFKLTKVCEVAPCRKVLSRVCRGNETIMATAM

SEQ ID NO: 52105 - protein, 274 aa, Oryza sativa
MTTLLRRLLLGATPADALLTGRLPFSTSSRRTPHRFRRSRRSPNPAPPSPEAVSAAIATLPSRLTPPLLSYSLSSVSDARLLLPVLTHSLRLATFRPDPGPFLVAIKRLAAADLYADFDRTCALAFSLLPSLPSPGPFLRTALYFYCQFRKIGKAFHVYTLMRASADPAARPSADTYHALFTALLSRGGGDTMVHYMYMDTVSALFRQMLEGGCPAGHARAQRARQGLRAVAAPQRRAARVPPDAARLRLRTGRPHVQLPGARAERAGPDEERP

SEQ ID NO: 52106 - protein, 454 aa, Oryza sativa
MEARRVSANPRPSCVRRVLARKRRRPEATANSARKLQRREISALPCRAFSASTTRERFRNIQLQEEFDTHDPKEMGSLLPYLMKRSEIIEIVGASDIIFALSQSGVCAAFSRVSNQRICFLNGRPDEVIRSLFYNKNNDSLITVSVYGSENFSALRCRTTRIEYIRRGKPDAGFPLFETESLKWPGFVEFDDVNGKVLTYSAQDSTYKVFDLKNYTLLYTISDKNVQEIKISPGIMLLIYSRKKGCIPLDILSIEDGKRLKSFKHLLHRNKKVDFIEQFNEKLLIKQEGENLQILDVRNFQSIEVSRSEFVTPSAFIFLYEMQLFLTFRSRSVSVWNFRGELVTSFEDHMLWHPDCNTNSIYITSNQDLIISYCKADPNDPSSEENACSINISEILTGKCLAKIKAGNLNKQRVSKFQSTPSEALGDITALYYDEEREEIYTGNRLGLVHVWSN

SEQ ID NO: 52107 - protein, 463 aa, Oryza sativa
MAIAISQEAFDAMVRENMEDLGMDADEALADAVDALTLQGADLSGIIKRVPGEAAAAEVSPVMRVLDEVKASSASDSDSGGRSEEDAERLASLLDELRELCSGDGLENAAVAARNGGVEALVALCASAGVKQERLLASGLKALSSLLRDVGSTEKFRQSEGPQVVMGILKGGSESSDILEGGFRVVASASAGNEVVKECFMVLKVDELIFQVMGEKSNSNVQSLYDAIRVLLTPDDNRVVASQVYGYSRRFAETGIAAVLVNALREKVAPSSLPSACAALKAIAVNDEICRSISENGGIDVLLRCIDEASEQKNKVIAKSCCSLLSKLAGSDANKTTIIERGGFDKFLKLTSRFSEDPPIIQEVMSMVTILTLRSPENAARAMGAGYGTLAIQAMQKFPSSAQTQKQACLMIRNLVVRNPENRTILLNDGVEKLIRKTKMMHGSCKDAATSALRDLGVDNYNA

SEQ ID NO: 52108 - protein, 763 aa, Oryza sativa
MASPPAGDAPPPAAAAREEEEEEGVSCGICLTDARRAVRGELDCCAHHFCFVCIMAWARVESRCPFCKARFRTITRPPVPGRFPSQRVVAVPERNQACNPSGNGSSTVDADLYANTSCSVCNLSNDDELLMLCELCDSAVHTYCAGLGTEIPEGDWFCTDCMTAKEEHSRCEIDDDNSSDHGEFKITIEVPIADPVAAPSISDIVDEGHSPNLVQRSSVQSNRPSISDPVPSIYDIVDDDYTTIPIGRVNARSTRLDSRAERLPSQGISVGPQCPESPQERENSRVCSHARSRIESERARTLRNSRNLGSRIRELRENWSALRSGSIGFATQLHNRRRGNGAGTCDIEERHRSTTTFMEVAASSSGHAKKISPKNSSDVHKAWKMLEMAKSSGGKKKPDNPSSLNCSVPFSMGNRSTSYSPIDAILGHKNNKLYDGITQKNNAEQHRSTNMENKPPTMNFGECRKLQEKFHGSAHGRTPSTIMRQESLTGKVSSSSNNEKHNRSINMENRPPTVNFGEHRKLQESASVHGRIPSTVMMQENLNGKVASSSNNEDAGQIFESSRDVSRPEKSKPVVSCPLTFSLLSGQSMVTSSQQLRPGWSQSTEMVSSQEPSATAASIDIGTAGANDKVKGSRPDRLERKRKLGSETHDDKGSKRSMSSCKIRKSDISFLAIRELKLLNIDKTYGSDTFKEVARAATHTVLASCGLEHSPSVALALPRPVCKHTCKTEPLPSPDVLTDFCRECLCNFVKEVISSLLSGRKME

SEQ ID NO: 52109 - protein, 591 aa, Oryza sativa
MNHPQQTMPPRASANGFPHRKLDREGSGRHDNKTQLLRSSSGGFSGAENGGKLGHGSPSRDRLIYVLTQLIGQHVDVHVKNGSIISGILHATNSDKDLGVIMKMAQVIKDGSARGQKSAADVVKKPETMIIPGRELVQILAKDVALGGDELPKGPSQEKRKDLMIDSAISRSHYPEERELERWAPDEGDSECIELEKYDRKGNRSWDQFETNAALFGVKSTFNEELYTTKLERGPHMRELEKHASRIAREIEGEDTKDMHLAEERGLYLDDDFDHDEEIKYSAVRRDTDNTKFKSSTNVLSNTNQVDSLTRAGNTNPKALLSTADEESSSHLFGTDLPVTNNVSQLVSQSQLNKLLPIDESRLDDKLTKDSSGNRDTSNLQTENIISEGGRSSISEDLEVPSSSSHASEPSSSGQAKKSSESLPADSSLSRKVPSSGEYVNSSQGPGSSTSSTSERIAASSVACAPGLSPSSSMGSLSSEKSSLNPNAKEFKLNPNAKSFTPSTSVRPPQPPASDGPYYYANNMPTAPLGPPMFPPAYGGQPMVYNAQPGPSPQGYMHPAGPQYGQQMMMGQTRPVYYYAPEMQQYRGRNF

SEQ ID NO: 52110 - protein, 541 aa, Oryza sativa
MRTAQQQQQKQRGGVVRVDQASPASSFRELDDAFLQTQTKIWLGEVLHLRFDEAVIVADLLADGELLFQVSKVLWKRLVRMNKEQMKQSKVYIYERTSSGKSNGKYMPYPKVDSFLKICQILGLAGIDLFTPSDVVEKRNVRKVCMCIRLLSKKARTMRLTVPDFDIVTHTIAMPNYIVGGIRRSLEQPQCSSSGSSGYSPSANSKALNQQRVFGAENDQQCETHYDSDEAESKLSALEPEDSVSEDNISTLLKSGNMPKEEKEGYGDSERGMHEEKSLSESVGSIDFGNMESDSVGSTPLFHKNESYCCIESPTDQCSRTRTIRCSLSSEESDSISSHLVVDSSKAKRTHGEHLEPLNGNGKRFANDPEKESDALQKVTFDQQCDLLACDGESVCSNCDSTPYSSLTPIDSACGKLPAVSEDDSACRGLELEFRCGNETDVSQKEDKQVESEYKAENDSSAQMNENDVPKSGKGMLKSVAGGITLVGAVFFIAHLRRSKDRSFAGVIAPFSEKSVQGDSRAKKVEKTKAGAVYPGEWLKV

SEQ ID NO: 52111 - protein, 950 aa, Oryza sativa
MEQLRTIGRELAMGSQGGWGQSKEFLDLVKSIGEARSKAEEDRIISRELDHLKRRLADPDVPRRKMKELLLRLVYAEMLGHDASFGHIHAVKMTHDESLPLKRTGYLAVSLFLDERHDLVILVVNTIQKDLRSDNYLVVCAALTAACRLIGEEAIPAVLPQVVELLAHPKEAVRKKAVMALHRFYQRSPSSVSHLVSNFRKRLCDNDPGVMGATLCPLYDLILEDPNSYKDLVVSFVNILKQVAERRLPTSYDYHQMPAPFIQIKLLKILAVLGSGDKQASGNMYMVLGDIFRKGDTASNIGNAILYECICCISSIFPNAKMLDAAAETTSKFLKSDSHNLKYMGIDALGRLIKINPDIAEEHQLAVIDCLEDPDDTLKRKTFELLYKMTKSTNVEVIVDRMIEYMINITDHHYKTEIASRCVELAEQFAPSNQWFIQTMNKVFEHAGDLVNIRVAHNLMRLIAEGFGEEDEGADSQLRSSAVDSYLRIVGEPKLPSSFLQIICWVLGEYGTADGKYSASYIIGKLYDVAEAHPTDDTVRAYAISAILKIFAFEIALGRKIDMLPECQSLIDELSASHSTDLQQRAYELQALLGLDKQAVENVMPADASCEDIEIDRNLSFLNGYVQQAIENGAAPYIPESERSGVVSVGNYKAQDQQETSAHALRFEAYELPPAASQASISPTTDLVPVPEPSYYKEDHQMSRSQPSGDSLSGEFGLKLRLDGVQKKWGRPAYSSSSTPSSSTSSQQATNGGVSSEVGGSTSSQARESTYGSKRQQATEVSAEKQRLAASLFGKADRKTQAGRKTAKESSSTEKVATANATPQPAKEQVIPSAPPPDLLDLGEPVSSSPPLADPFTQLEGLLGPASASPVVSETPASSTSKTPDLMSIFSDDVQTGVTSGSTEPSLGVNVVAAKKGPSLQDALQKDAAARQVGVTPTGNNPILFKDLLG

SEQ ID NO: 52112 - protein, 318 aa, Oryza sativa
MATQWVLVVVAVMAVLFAGGAAGGQLSTRYYDGKCPNVQSIVRAGMAQAVAAEPRMGASILRMFFHDCFVNGCDASILLDDTANFTGEKNAGPNANSVRGYEVIDAIKTQVEASCNATVSCADILALAARDAVNLLGGPTWTVQLGRRDALTASQSAANGNLPGPGSDLATLVTMFGNKGLSPRDMTALSGAHTLGQARCATFRSRIFGDGNVDAAFAALRQQACPQSGGDTTLAPIDVQTPDAFDNAYYANLVKKQGLFHSDQELFNGGSQDALVRKYAGNAGMFAADFAKAMVRMGALLPAAGTPTEVRLNCRKVN

SEQ ID NO: 52113 - protein, 172 aa, Oryza sativa; identical to SEQ ID NO: 35105

SEQ ID NO: 52114 - protein, 222 aa, Oryza sativa
MSAGDTLDKLVVFLAKRDGIDKLVKTFQYVSKLAHWAAESSSPGLAGRAKNWETSAGLSRKAFRTGRFLTGLNGLRRAPGEFGALAVLANAGEMVYFFFDHFTWLSRVGVLDAWLARRMSFISAFGESVGYVFFIAMDLIMIRRGLRQERKLLREGGKDKDKEVKKIRMDRVMRLMATAANVADLVIGIADIEPNPFCNHAVTLGISGLVSAWAGWYRNWPS

SEQ ID NO: 52115 - protein, 376 aa, Oryza sativa
MDPVPLFNPCEMGRFTFSHRIVLAPLTRARSYGNLPQSHAILYYSQRATKGGLLISEATGVSSDAPCTNTPGIWTKEQVEAWKPVVDAVHAKDGIFFCQIWHVGRASDLEQEPISSTDKPVEKNEDMDFPVPRRLAVEEIPDVINHFRIAARNAIDAGFDGVEVHGAHGFLLEQFMKDGVNDRADEYGGSLQNRCRFALEVIDAVSTEVGPDRVGFRISPYISYYGCHDSDPDALGVYMARELDRRGVLYCSAVEPEMVAATTVVDGETTTTTMSRRMMIPHRLHGMREAFRRGMFMVGGGYDRDAGNMAVASGYADMVVFGRLFLANPDLPRRFQLDAPLNKYDRATFYTHDPVVGYTDYPFLDDDREAMSDHTG

SEQ ID NO: 52116 - protein, 215 aa, Oryza sativa
MASQQERASYHAGETKAHAEEKTGRMMGTAQEKAREAKDTASDAAGRAMGRGHGAKEATKEKAYETKDATKEKAYEAKDAASDATGRAMDKGRGAAGATRDKAYDAKDRAADTAQSAADRARDGAGQTGSYIGQTAEAAKQKAAGAAQYAKETAIAGKDKTGAVLQQAGEQVKSVAVGAKDAVMYTLGMSGDNKNNAAAGKDTSTYKPGTGSDYQ

SEQ ID NO: 52117 - protein, 1121 aa, Oryza sativa
MDSLWAAIAALFVAAAVVVRGAAAADDAQLLEEFRQAVPNQAALKGWSGGDGACRFPGAGCRNGRLTSLSLAGVPLNAEFRAVAATLLQLGSVEVLSLRGANVSGALSAAGGARCGSKLQALDLSGNAALRGSVADVAALASACGGLKTLNLSGDAVGAAKVGGGGGPGFAGLDSLDLSNNKITDDSDLRWMVDAGVGAVRWLDLALNRISGVPEFTNCSGLQYLDLSGNLIVGEVPGGALSDCRGLKVLNLSFNHLAGVFPPDIAGLTSLNALNLSNNNFSGELPGEAFAKLQQLTALSLSFNHFNGSIPDTVASLPELQQLDLSSNTFSGTIPSSLCQDPNSKLHLLYLQNNYLTGGIPDAVSNCTSLVSLDLSLNYINGSIPASLGDLGNLQDLILWQNELEGEIPASLSRIQGLEHLILDYNGLTGSIPPELAKCTKLNWISLASNRLSGPIPSWLGKLSYLAILKLSNNSFSGPIPPELGDCQSLVWLDLNSNQLNGSIPKELAKQSGKMNVGLIVGRPYVYLRNDELSSECRGKGSLLEFTSIRPDDLSRMPSKKLCNFTRMYVGSTEYTFNKNGSMIFLDLSYNQLDSAIPGELGDMFYLMIMNLGHNLLSGTIPSRLAEAKKLAVLDLSYNQLEGPIPNSFSALSLSEINLSNNQLNGTIPELGSLATFPKSQYENNTGLCGFPLPPCDHSSPRSSNDHQSHRRQASMASSIAMGLLFSLFCIIVIIIAIGSKRRRLKNEEASTSRDIYIDSRSHSATMNSDWRQNLSGTNLLSINLAAFEKPLQNLTLADLVEATNGFHIACQIGSGGFGDVYKAQLKDGKVVAIKKLIHVSGQGDREFTAEMETIGKIKHRNLVPLLGYCKAGEERLLVYDYMKFGSLEDVLHDRKKIGKKLNWEARRKIAVGAARGLAFLHHNCIPHIIHRDMKSSNVLIDEQLEARVSDFGMARLMSVVDTHLSVSTLAGTPGYVPPEYYQSFRCTTKGDVYSYGVVLLELLTGKPPTDSADFGEDNNLVGWVKQHTKLKITDVFDPELLKEDPSVELELLEHLKIACACLDDRPSRRPTMLKVMAMFKEIQAGSTVDSKTSSAAAGSIDEGGYGVLDMPLREAKEEKD

SEQ ID NO: 52118 - protein, 643 aa, Oryza sativa
MVRRRRRSVLLLLLALTVLSPLVLYTRRLSAALNPNQRRDLPGEIVNQGRGVKASKLNALPLETVGSLKEPVGIVFSEESRESASKSTEPDSQEFLLRKAGEHKNRVLFEATAADSARSEDDDLIEQVTSKDGEDDGLATVSVDQQQITTASQQRSASEASSLENVPEQTSMENSLEGNKDGALLDTRIRNIRDLLIKAKVYLGLGAIRANPQYLKDLRQRIREVQKVLGDASKDSDLPKNANEKVKTLEQTLIKGKLMQDDCSVVVKKLRAMLHSAEEQLHAHKKQTVFLTQLAAKTLPKGLHCLPLRLANEYFLLDPSHQQFPNKEKLDDPKLYHYALFSDNILAAAVVVNSTVLNAKHPSHHVFHIVTDRLNYAPMRMWFLSNPPGKATIEVRSIEEFTWLNASYSPVLKQLESQSMIDYYFRTHRANSDSNLKYRNPKYLSILNHLRFYLPEIYPNLHKIVFLDDDVVIKKDLTSLWSIDMKGKVIGVVETCGESFHRFDRYLNFSNPVIVKNFDPHACGWAFGMNVFDLAEWRRQNITEIYHSWQKLNQDRLLWKLGTLPPGLITFWNKTLPLNRSWHVLGLGYNPHVSSRDIERAAVIHYNGNMKPWLEIGLPKFRNYWSAYLDYDQPFLRECNINP

SEQ ID NO: 52119 - protein, 518 aa, Oryza sativa
MLFYVRDRVGNPTPRKDNITANMPARRTIPEKISGLSDMIQSGVIEAKLNGSSSPYGDKRLHGISNGNSIKTSREHYLKKDGKTEAPKASENNGLASTQKASAPQIDGATLSAQSKQITSTGHREELQPKVDGLTDTSSLGNGNAILSERNKQTSQHQNPFSMPASHGKDTGAGLAAQTFPTKDAIVSNGVVPSSRDPISSEKVCGLQKSIKQDDKTVKELPISENNIVSGLERVNARKQTSSEVSMKVAAADSCNSNTPKRVDLKSKKLVRYPVMNMWLGPRQVMLGSLKVQKKKKCNRTRRRSVVCEDMANATCSGNNTSEQQASTSTTTSSETVQCTPRGRKRAYDSDSPKNNNQKQNKQDVIGADTGSGELNMDKRNVISETAASAELPKLGPGSSANQEHSRNNVHAKLGVPRHFTVLTRDLAEVTVPCWDDVAVSNAEARESKHSESKSIGYVLDEWDEEYDRGKTKKIRNSKEDYGGPNPFQEEANYISQRNMKQRTYQPKSWKKHAHVRR

SEQ ID NO: 52120 - protein, 318 aa, Oryza sativa
MHPITFFTNIIGVVTIVLISIVSILGLICLCHSLNFQLLIKRRRRNYYQANDEQLSYFNGPWLTRITLILVALWWGVGDVLRLTFVNGEGRFISDQTWQANVCKFYIVSNLGFAEPGLFLLLAFLLSAALQNQEVGALNRKWNQRTICAVFMLCSPSLIWEACVVFIGPHIASNDGQTSKVAKYWYSASSVHDGDVACTYPLLSSIFLGTFYTVLTLYVIFVGGQILSLVINKGLRRRIYMLIFATGILLPRAMFLGFSVLPWPGEIVHESLVFVSFLVLMIAAMLGIVILVYFPVAETFEVRNQEHIELQTSHSIAL

SEQ ID NO: 52121 - protein, 479 aa, Oryza sativa
MGAPVCGALVCFFVLLVARAAAETAPVERPTLPSADVAIDGNGNGARAGAGKAAGAGAVGGGIVSNSVLVALLDSRYTEMAELVEKALLLQALEDAVAEHNVTILAPRNEALERDIDPEFKRFLLEPRNLNSLQSLLLFHVLPARLPSGSWPAAATHPTLAGEDVELAAADGGGGMRVAHAAVSRPDAVVRTDGVIHGIDRLLVPRSVQDEFNRRRSLADISAMPPTAAPEVDPRTDRLKKPAPPGDSPVLPISDATVPDPSVALASEPSDHYDGDSQVKDFIQTLLKYGGYNELADIFVNLTSLATELAQLVSEGYALTVLAPNDEAMARLTADQLSEPGSPENILYYHMIPEYQTEESMYNAVRRFGKVRYDTLRLPHKVVAREADGSVKFGHGEGSAYLFDPDIFADGRISVQGIDAVLFPPAETKTKTKPATARIRTAPAITGVSKIKHRRGKLLEAACQMVGILGQRSQFTRCQ

SEQ ID NO: 52122 - protein, 293 aa, Oryza sativa
MALRRLAALLSLAVLLSAGLAAVSATSQNTGDTVIIWGRNKDEGSLREACDAGRYTTVIISFLSAFGYIPGTYKLDISGHQVSAVGPDIKYCQSKGKLILLAIGGQGGEYSLPSSQAAVDLHDHLWYSYLGGRRNGVYRPFGDANVNGIDFFIDQGAREHYNELAKMLYDHNKDYRATVGVMVTATTRCGYPDHRLDEALATGLFHRIHVKMFSDGRCPAWSRRQSFEKWAKTYPQSRVLIGVVASPDVDKDAYMPPEALNNLLQFINKQPNFGGVMVWDRFYDKKTGFTAHL

SEQ ID NO: 52123 - protein, 672 aa, Oryza sativa
MARAPSFLLLPLLLLVSSSLTPAATAAAFVGLDSFLAAAAARDPSAGNDTFGALPAALLRQLSTPSPLLPTRLLSLSAQVPVTVRLAGASFPPATGRLLESFVNSAVSSSRFLSSRRPHRLALSHKIHLEVAASSSQLAPRAAAAVRAHLDSSAAPFHAAALSSVPYSVVDDLVAEDYRALVDTGSAPSVYIYLLNLGPQPRPYAYTAASSPADAHSPGFSRCLAPVWAGKERYIWIDLGAGPVDYGPALSGEGALPRGEFHPLAALHGRPRSEKALVADLASLVLSAYKSLLVPSLRIPVHYESSLLVQVFHILGHERDTSGLDWGSIEQSIRDGNLAYEGQRLKFDLNRIRFSDCPICSFAVARSTTSFTSRFLFDNYTLIVSEYLDSKRMRQVLSDSLEELHKVAGVHDNDDYDKVVPVFVFDLDYDKLLLLDRYHQAVAFRDMVISVRTRSSQTVSDYSCNGRHVITMTRNLDRPIIASVLQSMWGVSPTHQSWSPEHNATVVDYTWSTGHTPFGPFSETKSLSFVQKDAARRNVLLTTLNYTITSAIDVLESMAAHGGESILLRRKRRVEFIQRWNLLTYKLEKVVSAMSRLDYNKAMYFLRSSDHDLFAVHTLVYQASQELEASLVCFKDPPFPWLSVSMSGIFVFGFFYVYSKRDKLFRSKRKQF

SEQ ID NO: 52124 - protein, 434 aa, Oryza sativa
MLTPRAKSVIGTPEFMAPELYDENYDELVDIYSFGMCMLEMFTLEYPYSECTNAAQIFKKVSKGVKPAALAKITNIQAKRFIDKCLVPASERLSAKELLQDPFLCSDNSSVLVGTKFPSSLPKSVDVSLEALHMDVDTNESMCTSTCKRNDLGGPHRSVLEFTRTNKNTELKLTGEKLDDNSVSLVLRIADLCGHARNIHFLFYLDSDTAMSVAAEMVEQLELADCDVTFIADFIDLLIVNLVPGQQLMNDAVMSTSSESKMGESEHVITSQQHPSELTHDYVLVEGMMHSKEANASPSDYIDSLLNATNLGGPNSSEGSDISVQLDGSSKSLSEYGVDEYRTLECGAYKGTDKLGCRHPLSNGSSNFAIFQMDQASHHSELVIGASVSITENRDVLNGELGLIEAQYEQWFRELTRMREGALEGARKKWLPDK

SEQ ID NO: 52125 - protein, 179 aa, Oryza sativa
MIICKKNRREICKYLFHEGVLYAKKDYNLAKHPKVDVPNLEVIKLMQSFKSKEYVRETFSWQHYYWYLTNDGIEHLRSYLNLPSEVVPNTLKKSAKPPSRPFGSGPPGDRPRGPPRFEGDRPRFGDRDGYRGGPRGAPGDFGGEKGGAPAEFQPSFRGSRPGFGRGGGGAFGGGASSME

SEQ ID NO: 52126 - protein, 331 aa, Oryza sativa
MEARGSRGMRLWLLSVAVMAMAMATRSQAQLQVGYYDTLCPAAEIIVQEEVSKAVSGNPGMAAGLVRLHFHDCFVRGCDASVLLDSTQGNRAEKDAPPNTSLRGFEVIDSAKSRLETACFGVVSCADVLAFAARDALALVGGNAYQVPGGRGDGNVSVAQETNGNLPPPSANVAQLNQMFGAKGLTQTEMVALSGAHTIGVSHCSSFSNRLYSSGPNAGQDPSMDPSYVAALTTQCPQQQGQPAAGMVPMDAVTPNAFDTNYYAAIVANRGLLSSDQALLADQTTAAQVVGYTNNPDSFQTDFAAAMVKMGSIGVLTGNAGTIRTNCRVAS

SEQ ID NO: 52127 - protein, 318 aa, Oryza sativa
MEMAAAVGGSGRRDAEAELNLPPGFRFHPTDEELVVHYLCRKVARQPLPVPIIAEVDLYKLDPWDLPEKALFGRKEWYFFTPRDRKYPNGSRPNRAAGRGYWKATGADKPVAPKGSARTVGIKKALVFYSGKAPRGVKTDWIMHEYRLADADRAPGGKKGSQKLDGWVLCRLYNKKNNWEKVKLEQQDVASVAAAAPRNHHHQNGEVMDAAAADTMSDSFQTHDSDIDNASAGLRHGGCGGGGFGDVAPPRNGFVTVKEDNDWFTGLNFDELQPPYMMNLQHMQMQMVNPAAPGHDGGYLQSISSRQMKMWQTILPPF

SEQ ID NO: 52128 - protein, 317 aa, Oryza sativa
MASATNSSLSLMLLVAAAMASVASAQLSATFYDTSCPNALSTIKSVITAAVNSEARMGASLLRLHFHDCFVQGCDASVLLSGQEQNAGPNVGSLRGFSVIDNAKARVEAICNQTVSCADILAVAARDSVVALGGPSWTVLLGRRDSATASEALANTDLPAPSSSLAELIGNFSRKGLDATDMVALSGAHTIGQAQCQNFRDRIYNETNIDSAFATQRQANCPRPTGSGDSNLAPLDTTTPNAFDNAYYSNLLSNKGLLHSDQVLFNGGSADNTVRNFASNAAAFSSAFTTAMVKMGNISPLTGTQGQIRLSCSKVNS

SEQ ID NO: 52129 - protein, 381 aa, Oryza sativa
MAAASSPAAAITCRAAVAWAPGQALVMEEVEVAPPEAMEIRVKVVSTSICRSDVTQWQSTAQTDLFPRIFGHEASGVVESVGEGVTEFEVGDHVLTVFIGECMSCKHCVSGKSNMCQKLGLERRGVMHSDQKTRFSLRGKPVYHYCAVSSFSEYTVVHSGCAVKVGPTVPMDRICLLSCGVSAGLGAAWKVADISKGSSVVIFGLGTVGLSVAQGAKLRGASIIIGVDTNPEKQEKGKAFGVTDFINPEELNEPVQQVVKRLTNGGADYSFECVGDTGVVSTALQSCSDGWGLTVTLGVPKAKPEVSAHYALLLSGRTLKGSLFGGWRPKSDLPLLVDKYANKEIQVDDLVTHDLSFDYINKALELMLENKCLRCVIHMPQ

SEQ ID NO: 52130 - protein, 164 aa, Oryza sativa
MAETPERRRYSGSPSPYRGNPKSRSRSRSPAARSQSRSPVPDPRSQARSRSRSREREPDAVNHGNTLYVTGLSSRVTERELKDYFSKEGRVTSCHVVLEPHTRVSRGFAFVTMDTVEDAERCIKYLNQSVMEGRNITVEKKRLCKLCATIKMLSSSISTLAHTA

SEQ ID NO: 52131 - protein, 440 aa, Oryza sativa
MDHLSIRNPLSLLLSLQLSLLLFNPLSVADLTSEKQALLDFASAVYRGNRLNWSQSTSLCSWHGVKCSGDQSHIFELRVPGAGLIGAIPPNTLGKLDSLQVLSLRSNRLAGSLPSDVTTLPSLRSIYLQHNNFSGDLPSFLNPNLSVVDLSYNSFTGEIPISLQNLSQLSVLNLQENSLSGSIPDLKLPSLRLLNLSNNDLKGQIPQSLQTFPNGSFLGNPGLCGPPLAKCLLPDSPTPSPASPSSAPTPMSAHHEKKFGAGFIIAVAVGGFAVLMFVVVVLVVCNSKRKGKKESGVDYKGKGTGVRSEKPKQEFSSGVQIAEKNKLVFLEGCSYTFDLEDLLRASAEVLGKGSYGTAYKAILEDGTVVVVKRLKDVVAGKKEFEQQMELIGRLGKHANLVHFVLTTILRTRSSSSTIISPMAVSQPSYMVSGVLLKRHH

SEQ ID NO: 52132 - protein, 375 aa, Oryza sativa
MAGAGGGGVRDMDALEGVRSIVLKPSESLDEGRFTRIAGADFNDAGLGLPGLLASLATTGFQASNLGDAVDVVNQMLDWRLSHEKPREDCDEAELDPTYRESVKCKIFLGFTSNLVSSGIRDVVRFLVQHHMVDVIVTTAGGIEEDLIKCLAPTYRGEFSLPGTLLRSKGLNRIGNLLVPNDNYCKFENWIMPLFDQMLQEQSTENVWTPSKVIACLGKEINDESSYLYWAYKNNIPVYCPALTDGSLGDMLFCHAVRNPGLIIDIVQDIRLMNGEAIHATPRKTGIIVLGGGLPKHHICNANMFRNGADYAVYINTAQEFDGSDSGAQPDEAVSWGKIKGSAKPVKVHCDATIAFPLIVAATFARKFHGAKQAN

SEQ ID NO: 52133 - protein, 538 aa, Oryza sativa
MKLRVKGLGLLLLLVLLALCSTIDVCDARRGKHWRPRSSPSSSLLRNKGKGKKGSSNRQHGSNRPSPKPPLSPPPSPGNGKGYQSPYQPSPSPSPNAPVSPSPVNGSGHASPKSPTPSCGKGNQPPSRPTPTSPQGAVFNVVDFGAKGDGVSDDTKAFVAAWAAACKQGASTVVVPSELEFLVGPISFSGPYCKPNILFQLDGTIVAPTSAKAWGSGLLQWIEFTKLNGVSIQGNGIINGRGQQWWTYSDIDDDEDDDTQYDVEFERMPQVKPTALRFYGSFNVVVAGITIVNSSQCHLKFDSCQGVMVHDVTISSPENSLNTDGIHLQNSKDVSIHHTNLACGDDCVSIQTGCSNINIHNVNCGPGHGISIGGLGRDNTKACVSNVTVRDVNMFRTMTGVRIKTWQGGLGLVQDVRFSNIQVSEVQTPIIIDQFYCDKRTCSNQTSAVAVSGVQYENIRGTFTIKPVHFACSDSSPCSGITLTGVQLRPVQIPHYRLNDPFCWQAFGELYTPTVPPIACLHLGKPAGNNLQSYHDLC

SEQ ID NO: 52134 - protein, 604 aa, Oryza sativa
MPKHYRPAGKKKEGNAAKYITRTKAVKYLQISLATFRKLCILKGVFPRDPKKKVEGNHKTYYHMKDIAFLAHDPLIEKFREIKVHRKKVKKAFAKKNKDLADRLLNRPPTYKLDRLILERYPTFVDALRDLDDCLTMVHLFAALPAVEGERVQVQRIHNCRRLSHEWQAYISRTHSLRKTFISVKGIYYQAEVQGQKITWLTPHALQQVLTDDVDFNVMLTFLEFYETLLGFINFKLYHSINVNYPPVLDPRLEALASELYALCRYMSSGRVPGNSEPAGLIEDKEGEDNKESSKTDESELRLAQLQHQLPTNEPGALMHLVQESTAADADDADAKECRSLFKNLKFYLSREVPRESLLFIIPAFGGTVSWEGEGAPFDETDEDITHQIVDRPTQSHFFLSREYVQPQWIYDCVNARIILPTEGYIVGRVPPPHLSPFVDNDAEGYIPEYAETIKRLQAAAQSQVLPLPSLGDEDMENSLVEAIIDRSESNEIADKKRKLEMLEKQYHDELRMEYEGKTFSNRTADNQPDVVDKSDTKEADDHMEDSHKQAEKDAPDISKTLMSRKQRGLLQAIEINQERKKDKVNLLKKRKKNADSSASAKGR

SEQ ID NO: 52135 - protein, 568 aa, Oryza sativa
MAAATSINAVPCSAGRPKRRSQRRGASTVAVRASGDASTVTLLDYGAGNVRSVRNAIRHLGFGIRDVRSPEDILAADRLVFPGVGAFGSAMDVLTRSGMADALREYIRRDRPFLGICLGLQLLFDSSEENGPISGLGVIPGVVRRFDSSKGLIVPHIGWNALEITKDTQLLKGAEGHHVYFVHSYHALPSDENKEWISSVCNYGESFISSISMGNIQAVQFHPEKSGATGLSILKNFLSPNTSGSKVPSRRKASNLAKRVIACLDVRSNDSGDLVVTKGDQYDVRDHSSSKEVRNLGKPVDLASQYYIDGADEVSFLNITGFRDFPLGDLPMLEVLRCASEKVFVPLTVGGGIRDFTDANGRYYSSLEVASEYFRSGADKISIGSDAVFAAEAYLQTGVKTGKSSLEQISRVYGNQAVVVSIDPRRVYVKNPEEVQFKTVKVSNKGPLGEEYAWYQCTVSGGRDSRPIGAYELAKAVEELGAGEILLNCIDCDGQGCGFDIDLVKMVSDAVTIPVIASSGAGTVEHFSEVFEKTNASAALAAGIFHRKEVPISAVKEHLVDAGVEVRV

SEQ ID NO: 52136 - protein, 156 aa, Oryza sativa
MTLMAKTEPAPALAKMVMSTCSLTLNGPGLRVNSHGRPRKKTRSGSAAAMRRPSGTTAICAEMAVTVSGSLRYQKKVLRKDSTTQDAVPSTHIRNVSTGVAGSSPTGTVSATCSTGEFSSGEPSRIEDRTAREELIRQQNSLLSSSGVPWREKENS

SEQ ID NO: 52137 - protein, 637 aa, Oryza sativa
MEELHDCVVQLRSNPQRCRDTVYVGCGAGFGGDRPMAALKLLERVKELNYLVLECLAERTLVDRYQIMMSGGKGYDPRVKEWLSVLLPLALDRGVCIITNMGAVDPLGAQEEVLELASNLGLEITVAVAYETSSGNSVFSNESTGVRQGGSTYLGVASIVHCLENGKPQVVITSRVADAALFLAPMVYELGWNWNDFEELSQGTLASHLLECGCQLTGGYFMHPGDAYRDFSFEQLLDLSLPYAEVSYKGEVFVGKAEGSGGLLSYSTCAEQLLYEVGDPANYITPDLVVDFRDVKFQQISKDKVQCKGAKPSNPCWPEKLLQLLPTESGWKGWGEISYGGQECLKRAHAAEYLVRSWMDETYPGIEGKIISYIIGYDSLKAIGDNKDSSVKQVMDVRFRMDGLFELEEHAIKFVEEFIALYTNGPAGGGGISTGQKKEITLQKILVDREKIFWQVNMKKSSIPSPQNQATNADKGQMCDQQQHKCPRRCAMGTLPLNTNMDTLPSAVPSPSGTKIPLYHVAHSRAGDKGNDLNFSIIPHFPDDIGRLRAVITRDWVKNAVSPLLDSSLFPADRANQVRYDPLENVSIEIYDVPGISSLNVVVRNILDGGVNSSRRIDRHGKTLSDLILCQNVVLPP

SEQ ID NO: 52138 - protein, 415 aa, Oryza sativa
MSAAQQQKHEVDRATVAGAVAALFKWMRARAAEAPPNLLADERDDLLLLQLSLRRIPPSPTTKPRLLPLPHPVIVPGESASICVISDDRPKSRSPAASDLLDASRSHHLPVSEVIPLSALRTDYRPYESRRRLAASHDLFIADRAVLPLLPRVLGKAFYSTKKAPVAVDFARTGWLEQVRKVMNSTFLYLRTGTCSGIKVGRLDMKEEDTVENVMAAVEAAVENVPKKWANVRSLHLKAVDSVALPIYQAVPELGMKIEVRFAQLEGEVGSGEVIDASEAGAALKGVGKKKAKKALKHVEEENAGEEAAQESGKRKRGKKQLAEDLMEQDIQDVSEKRKKVKEGTPAAETPKISKKGKEKSKRALDKEGEDASVEEASNKKKKGKKEVVSDVGEKNSKVKKSNGDKEKRRTRLRV

SEQ ID NO: 52139 - protein, 585 aa, Oryza sativa
MAGRGEGNGAATMAGVATGGVEDAYGEDRATEDQPITPWAVCVASGHSLLRDPRHNKGLSFTEKERDAHYLRGLLPPVVLSQELQEKRLLQNVRQFQVPLQRYMALMDLQERNERLFYKLLIDNVEELLPVVYTPTVGEACQKYGSIFRRPQGLYISLKEKGRILELLRNWPEKSIQVIVVTDGERILGLGDLGCQGMGIPVGKLALYTALGGVRPSACLPITIDVGTNNEDLLKDEFYIGLRQKRATGQEYSDLLDEFMAAIKQNYGQKVLVQFEDFANYNAFTLLEKYRANNLVFNDDIQGTAAVVLAGLIAAQKFVSGTLADHTFLFFGAGEAGTGIAELVALEISNQSKVPVEDARKKIWLLDSKGLIVSSRKDSLQPFKKRYAHEHEPVKDLLDAVKVIKPTALIGSAGVGQSFTKEVIEAMSSINERPIILALSNPTSQSECTAEQAYSWSKGRAIFGSGSPFDPVKYNDKLFVPAQANNAYIFPGFGLGVVISGAIRVKDEMILAAAEGLADQVTPEHVDKGLIYPPFSCIRKISANIAARVAAKAYDLGLASHLPRPKDLVKYAESCMYSPIYRSYR

SEQ ID NO: 52140 - protein, 154 aa, Oryza sativa
MVAVASASPLTAAAAPSMCCSPPAFLPLRAHRRRIFRAEAMKTQQEKKQTEVAVEESFPFRETAPPDEPLVTAEESWVVKLEQSVNIFLTESVITILDGLYRDRNYARFFVLETIARVPYFGEDLVVHARYSLQRLSLCFTCMKHLAGGGELII

SEQ ID NO: 52141 - protein, 828 aa, Oryza sativa
MRPQSYAFLGLVLLLFSLLPLAPCSAANLNNDTLLAGQALAVGDKLISNNGKFTLGFFQPDAGTSKSSDTSTNSPGWYLGIWFNKIPVFTTVWVANRERPITIPELNLTQLKFSSDGNLVIFNHATESIIWSTRVIIDSHRTQETSSTNTSVVLLNTGNLVIESTTNVVLWESFDSPTDVVLPGAKFGWNKITGLNRQCISKKSLIDPGLGSYSVELDTNGTKGVILMLRNPPKVYWYGLTSPTLIPELRSLLAMDPRTRGLIIPTYVDNSQEEYYMYTLSNESPSSFLSLDMSGQIMLNVWSEANQSWQIIYAQPADPCNPFATCGPFTICNGNSNPVCECMESFTRKSSQDWDLGDRTGGCSRNTPLDCTISGNRTSSADMFHPIAHVKLPYDSESIQDATTQSKCAQACLSSCSCTAYSYQNNICSVWHGDLFSVNQNDGIENHFDDVLYLRLAAKDLQSLSKNKRKPIVGVVTTISIIILVLLIMLMVLVMVWRNRFKWCGVPLHRSQGGSGIIAFRYSDLDHATKNFSEKLGEGGFGSVFKGVLRDLTVVAVKRLDGARQGEKQFRAEVSSIGLIQHINLVKLIGFCCQGDKRLLVYEHMLNGSLDTHLFQSNATILTWSTRYQIAIGVARGLSYLHQSCHECIIHCDIKPQNILLDESFTPKIADFGMAVFVGGDFSRVLTTFRGTVGYLAPEWISGVAITPKVDVYSYGMVLLEVISGMRSLPNVHSSNSHHAAYFPVQAISKLHEGDVQSLVDPRLSGDFNLEEAERVCKVACWCIQDNEFDRPTMGEVVLVLEGLQEFDMPPMPRLLAAITRSSNVAEM

SEQ ID NO: 52142 - protein, 195 aa, Oryza sativa
MWVGQVLAAIKVQYLQYLELEHSRMKSTETLQYCQGSDMGQFHPLYHVCFLLITFMDRQSPYLVAWKWCLPVAANNGDEILITRLGDNVLEDHVMNLAALHPAVAAVFDRLYQVPANEFIEAVFCNFLSSLPMLFSNESFSNPSSYQMLPANTAALGKCAQVQQACLKIRWQIFVTVVNYLRYSFGGEIASQLCT

SEQ ID NO: 52143 - protein, 499 aa, Oryza sativa
MSDHRTHASDCHPVASQPDVQCLVCTRPFTLDAQVTDTFEALAICRDCKMTVLNDDERDEITSTYRQNTRRRQISRTASIDFLEDAFLQEFSQLIDLARRQGRETDIDSSSVAPQHASFNSTPSQSQRWHASDDESDGLNYVDSVFGEIESAISLGDYGGDSDTSIEEHSVMTRRRISIQLDNDSYMNTDTDIDPMNARLDQWDSDDQEDVEESGFDEIVNTMTQHQQQSHDIQLSGLSEDESEDGVWNWSVSVRQRANVTNLLDDMEEPEMRTTFVGNPDDYVDARQFEMLLEQFAEDNDSRRGAPPAATSFIENLPSVIISASHQTNGDVICPVCKDPIPTRARAKQLPCMHLYHSSCILPWLSSRNTCPVCRYELPTDDAEYERSKQATTNVRDIQVVEEISDEQEVQVTRQMAAGVIEETNTSEHNVRVDEQPNSARRRSGWLFIAAAPVVSLIGFALVLCFTNPARSGRRQLYCRSPSATEVHVDTKKSWWSMF

SEQ ID NO: 52144 - protein, 71 aa, Oryza sativa
MLMQLNLSYQCSTIQLLIIDTYNLEFSTDQYKNLNCKSHLLHLTLCIHYILTRNMESFKLLSDICFLSLMI

SEQ ID NO: 52145 - protein, 161 aa, Oryza sativa
MMRRPAPVLVLAILAVAASTAAAAAIEGEVKCGGCSPCGGADCPVLYPSPPPPALPPPPPYYYYSPPPPAYYPGSYCPPPPAAYVQFGPPTSRSSSSSSRPSTSSGWCPSPPRGRVPSARMRSAPLRRGRAHRGRGSGRRRRARGGRPGPRGRSGARRRAH

SEQ ID NO: 52146 - protein, 460 aa, Oryza sativa
MSSSHSSLTGSATPRAGAVGHFRGGLRPPPPPPTPFGWEEAARLERIISEEVGRRLIEKEVERRLIEEDVRREVAFAHGLHVLPHDPFPRPPPPPPEMPVGMHPHPHEPPPRFQELGAWEGFRPRRQHAGVAAPLRFGQRMLLGGAERRWSPPPPPRPKPKHKLVLREIEPGESSEVPSETKHSEAKPLETKPLQTKVSGVKRKVDAIPATTRPGKLQKPAQDWSCALCQVSATSEGALNEHLEGKRHKAKLAHCGASNAIKDGKSSLKEKTANKDDAGPSDAPKKICIQVDGAMHEVVQKSNYLWCDRCKVRCDNNVTMADHLRGKKHSGLNKVWTSINAVRMNKKKEQSAATWEETVNENERTEIPVEAKDDSAGLSTEEDETCHYEIPVKNSKNEGTYLATEVDQSDSEIETPVEIMREGLNMATDATDENVRMEDPLEIKKENPDETNLAPKEEQH

SEQ ID NO: 52147 - protein, 579 aa, Oryza sativa
MEDLLDTEIGKHDYDWLLTPPGSPHAPILEVVEKAPSSDVPKRITTRSSSTTRASRLSIPETENGHSTVPTRPARSNSVSRPSIQSTLISSNNRSSVVNASISSVCSPPTTPSKRTSTLSSSKPSVPASRQVPTRPSTPTKTRPCTPVKPRPSTPVKPRPSTPNKTRPSTPVKTRSSVPNTMSTSTIAKTTSAQNSRPSTPTSRPRIMSNSSSSTSSAASRPSSSSGRTSTISRTSSSTSTVPSVSRSSSRSSTPTRQPITRSSAPLAGYSPSVGRIFGSNNITSIGRPVTSNGRSSAPSSAPSSRPSSPNSRARAPVRPLDIPDFPSETPPNLRTKLPQRPLSAGRARPGVGLGPKSAPNAEQVRSAPVKKMTVPAITRSKFPDAPSRVSSLTNGHQSRQSEGSAVEGQHTKPLRSITGTDNGFGRTISRKSLDMAIKHMDIRQNLGGIRGASLFPPSIRSAGAKVRSARMSDPAHLSLNGDCHFTDNGSINGHFSGDSNGTLSNNGGSSTGSPDRESIGTKETLCELDLYTTARYEALLLREDITNTNWLHNVDDKSDQSPVFDHRFEPLPEPFGPL

SEQ ID NO: 52148 - protein, 176 aa, Oryza sativa
MAAAPLSPPPPLHARLLLLPPLLPTMAGGSRGRRRGRGRRRFAVPPSRNGSSSQGTEWCPVPPEQLPVNEYESLAASLPFSWAAGDLTVYCSRLALTGAAFALFVGLPVASFGGRGGAGGDAVHLALGATGSGILAVTLAVVRMYLGWAYVGNRLLSATVEYEETGWYDGQVRYYA

SEQ ID NO: 52149 - protein, 388 aa, Oryza sativa
MSTTSSSKTATCPLCHADVLLPRRRSAGSSTHRSHDLDDGPAPPSPESSCRSNAAVCGCARCRRPDLISPGTGMRMRNRFGDGPNRISAQSGAWLCRERTAETCRSTSSRSGRYRRLQPAAVAGTRRAELIKRLQELCHPANNLPNCSASWQPQRQRQKTIDRIPDSLDCGVTMERGKNKRDGSDNGLIFSNLMHGVAAGIYGYPPHQGYTQAQSYLLLPEAYPPPPWTYPLSSAYPPQPVGYPSGGYPPAVYSDSYLHQGSRVAREQCPLSYSNNAVTCREDGQMNCENGTVNMEKSAMSSNKMATSLLKSCGNVMPCRNMERSGPAMYKVDMRGSTKQFSMGSKMMLCLIVFGCLIAALDMFRNVAQKQMFSVVSLLSFVVATYVC

SEQ ID NO: 52150 - protein, 155 aa, Oryza sativa
MQVEDKTIFSSSQAASSSKVILVKFEPSIRRYLRHLKSSFLKLSTLSVHEMCRSLTHCNMGSWAKNFRSSWFSGVLLRVTLASFLLPPSVSNGKRCLAPLMLRLSRNSGWCFRRDAISCNSGLEGVTSSVVVGIVIDRERRLACRSLIALSKLPR

SEQ ID NO: 52151 - protein, 110 aa, Oryza sativa
MGLLFVESLPGPKVFKCKFCGVDSASPDAIVSKEFRGRHGRAYLFDSVVNVSLGPREDRLLMTGLHTVNDIYCSCCQRLLGWRYEKAYSEDQKYKEGKYILEKHMMLKEG

SEQ ID NO: 52152 - protein, 155 aa, Oryza sativa
MFCALQSLKSFLGDDQLKEFINFTLHYIADLDIPIKRGTFIEFRSGMLNVSPIGRNCSQEERDEFEKYDKVHNIRPKMVSVLREKFAHLNLTFSIGGQISFDVFPQGWDKTYCLRYLEEFQEIHFFGDKTYKGGNDYEIFESDRTIGHTGVLFVS

SEQ ID NO: 52153 - protein, 908 aa, Oryza sativa
MLQYLDFSHASTSRKWSHKKQGEGFEAPRNSMEFTLEAPQSYGVFQEDVPYSCNMRQQYPKAGLNHSSSPIKRIIHEDVSFRTNEVQKRPSVIARLMGMDSPPMSTTAGELAAGHTEEKRQDMITSTRPMPRRDPSEMVSTKHASFVQHKGSMKHSPKQAEVCAYDDSMELFGQLSKAISSSEWAKPQPREHPQEEELQKFKKDFEAWQASRMWEQSRALELESHLDDDDVRCTDIVPYRFQHRGKDNAGKKHTHSNGDAHWRRSKESGTGTGTSISGSRTFSLTSADASSTRLPLSRFYYEEERLLSPKKIVILKPCPEMSTDDIEESSLGSPEMVKKENNMEAFLEEVKKRLKVELEGRMASDDRAADRWAAGGDIPADPKQIARSIANQIRETVTKDLHSALLRSESTRSYRSDIPLNGQSQMDYICRDARKHLSDRLKNVLRREPETEPPALSHRRRTASASFNEEPRPKPRHEVARKGKIRSKEEKKHAIEFDVRSFRRGHHKASPTPAIDSDPVSPRNLIRSFSAPVSGTTFVKLLSEEPRVLTGARLQRKQEGYGSRPPPPSSEEERKGRKDTFNIKGRVSNLRQNLGLRAKLFGKKLHSADESPFPDDLPPIGTLVTAPSVLIHPGVLQENSTEVPPSPASWCSSPPDEMSRGGYPSPVSPLEASFSEHRSPLKMAARDMSSSASEPEHPSSEQAQTDQELAETSPIQDDDDDDTDEIDNPIKAYIRAILVIAGLYGQRRSSDQLFSDREVKPIPAWVFEEVESSSSSSAPATTDCDAAATGVDHRLLFDLINESLPRVVQSSTTLCAFSRWYGAAPRRSPGGKRLLDGLWNTVQAWLAPPPPTDSPNSVDELIGRDMSMSPWNGPFREDVGAAGAEMEAEILDELVDETLWDVLLNVGD

SEQ ID NO: 52154 - protein, 526 aa, Oryza sativa
MWSSSQASTRGVIEVGRVEAGPSHFPKRPAPRNSSRVNLSRTYAIKSCSVSSRTGLCLGQCYHKKSSACKCKLGWSSQPLSSLRHHLRVHSSASEAVLTSQSDFTKLLVGNEKIGVLLLNLGGPETLDDVQPFLFNLFADPDIIRLPRLFRFLQKPLAQFISVVRAPKSKEGYASIGGGSPLRQITDAQAEALRKALCDKDIPAKVYVGMRYWHPFTEEAIEQIKRDGITKLVVLPLYPQFSISTSGSSLRLLEGIFREDEYLVNMQHTVIPSWYQREGYIKAMATLIEKELRTFSEPQKVMIFFSAHGVPLAYVEEAGDPYKAEMEECVDLIMEELEKRGITNSCTLAYQSRVGPVEWLRPYTDETIIELGQKGVKSLLAVPISFVSEHIETLEEIDVEYKELALESGIKHWGRVPALGCEPTFITDLADAVIESLPYVGAMAVSNLEARQPLVPLGSVEELLAAYDSKRDELPPPVTVWEWGWTKSAETWNGRAAMLAVLALLVLEVTTGEGFLHQWGILPLFH

SEQ ID NO: 52155 - protein, 348 aa, Oryza sativa
MDVLRKQASKFKEQVAKQQQAVIKQFSTTGYEHSDAVVIDEVELQRHQQLEKLYTSTRSGRDFQKDIVRAAEGLVSIGIRHVEVGTKFSEDCYRYGGESSASDEALAKAASLYGGALRNVEKEYEEFNRILSSQTIDPLRAMAAGAPLEDARGLAQRYSRMRHEAEILSAEIARRKQRVREAPLAEHTTKLQQSESKMIEHKASMAVLGKEAAAALAAVESQQQRITLQRLVGMVEAEKLFHLRLAAILDDVEAEMSSEKQKRESAPPTIHSHKRAEKAQYFLAEAVHNFNGTTEKELSLIVGDYVVVRQIAPNGWAEGECKGVAGWFPAAYVERRENIPPNKVFPQA

SEQ ID NO: 52156 - protein, 1128 aa, Oryza sativa
MGVPEAVALEIPAAAEAEEEVEEEEGSPSPPVVARVPPRIRRRLLLRHRGGAPATAEEIEAKLRDADLRRQQFHEALSCKARCTVRYPSCPSQEEDPKKRLEAKLVAAEQKRLSLLAKEQSRLAKLDELRQAAKNDAELRFKKEREELGMKVESRVRQAEEKRTQLMHARSQRRAALEERTTKYLVQRVAWENKYRERVHSAILQKRTAAEKRRTGLLEGEKRRAQGRFSQVQLAARTLSCQREADRSKLKEQLEDKLQRAKRQRAEYLKQRGSTHSFTYTASVKHGDFLSRNLARCWRRFITSRKTTVVLARAFDMLRINEESVKPMPFEKLALCIESPTVLQTTRAFLDRLESRFTLSQSSSPSSPENIDHLLKHLGSPKRTLSKSGGRTRVTPTKAARNSDVSKLPRYSPRIVLCAYMILGHPSVVFNERGEREKLLVESAENFVKEFELLIKTILDGSSGACILKQPILDDLSPGSSNYQESSAVVADRKKFRSQLASFDKAWCAYLYHFVVCKAKDAKSLEEDLVRAACKLELSMMQTCKFTAEGQPENLNDNLKAIQKEVMVDQTLLREKVRHLGGEAGIERMEVALSEARTKFFEAKGNRSPLATTIKNVAATCSSGESPISDMKENSNINDKRPSQAVQSMFRVPSSPSESNTAGITMSNPMTVSSTLSEKRPTENEQMVNEILHGFLADSSSNIGTVEGGFKEKVRETMEKAFWDVVVDSLRGDMPDYSYLVQLVKEVRDTLYEMVPKGWKEEIINNIDLEILLQVLESGTQDMQYLGQILQYSLGMLRKLSSPAKEDEMKRSHDKLLGELTEHSECNNSGSNSFVIAVIKGLRFTMEELKALKTEVSRARIQLLEPIIKGSGGVEYLQKAFADRYGFPSNASVALRSTAQWISTSKDTVEVEWNEHAQPFVATLRSGHGVPDQRQSTIPVSDDTGLPECTGQRLDQLIRIGLLQLISGIEGVQMQSVTETFKLNWLRLRSVQSQFQQVIVIATSMLVQRQVLATDDPNITPTELESATSQLFNTLAELLDNFPDVSTAKIMEVMLRSSCRRRHQARQPALHQMKEPRAGSRYWPGSSSRASRPMTPSSRRSPGPSTVRSARSPSVAAVPGDGSSPTPP

SEQ ID NO: 52157 - protein, 301 aa, Oryza sativa; identical to SEQ ID NO: 36754

SEQ ID NO: 52158 - protein, 277 aa, Oryza sativa
MPFPRRDIEAAGAGSGSGDDDSPAAKRGKPEAAGARPSLTRTEAAAAASVLVLFLVGIFCVFRAAPRREFEQILRLPRSLADVRLLKDNLAVYARDYQANFILGYCSIYIFMQTFMIPGTIFMSLLAGALFGVVKGGILVVFTATAGASSCYFVSKLIGRPLISWLWPEKLRYFQSEIAKRKEKLLNYMLFLRITPTLPNTFINMASPIVDIPFHIFFAATLIGLIPASYITVKAGRALGDLRSLRELYDSKTLVILFLIGTVAVAPTILKRKRIYE

SEQ ID NO: 52159 - protein, 322 aa, Oryza sativa
MFPNQLDIAFWGAKLKVHLFTYFLHRDAQWNNSWHSSSTENRTMEREIVASYEPKKNNEIRMFESSDEMATDLAEYISQVSEISIKERGYFAIALSGGPLISFMRKLCEAPYNKTLDWSKWYIFWADERAVAKNHVDSYYKSTKEDFLSKVPILNGHVYSINDNVTVEDAATDYEFVIRQLVKIRTVGVSESNDCPKFDLILLSIGSDGHVASLFPNHPALELKDDWVTYITDSPVPPPERITFTLPVINSASNIAVVATGEDKAKAVYFAISDGTEGPDAPSIPARMVQPTDGKLVWFLDKASASFLEAKTKNDGYEHPKY

SEQ ID NO: 52160 - protein, 75 aa, Oryza sativa
MRGQTGRGYSRRRRRRRGRPRARQGAVHRCCRAYRRLVERWWWAIGAAKSPPSTPSPAPRGKERCITASGSIGRW

SEQ ID NO: 52161 - protein, 423 aa, Oryza sativa
MNKGLVSSSFIRSDVFPSPRTPNYRRHRSSVFGYQKGWSSERVPLASKGNRRYPGSSMAFPFSNGRTLPSKWEDAERWIFSPNSSDVLEKTSFAPARRPKSKSGPLGPPGKFGGQYSSVSLLDNGRVGHLTANSPFLAGVLIPEHYCGEKDNIGRYMSRTAGEEASIGIGGKSCLANGGSHATQYNRVRRRLDTAIESSPSLPSTQASVQDEQVGITEESASIITPIILRKDAATQTSPNLSRSSSPSVSTPFIHLLTTHQVREKENCFSDVIRDVHMDDRVTLTRWSKKHVTRASSKNSTNVIDVKKKTVESKSSSWELTEAKSISKVEREQEKITAWEHLQKAKAEAAIQKLVMKIEKKRSSSLDKIWNTLRSAQRRAQVMRETAAANQDEQSSGKAKRASHLNKNGQISSLSGCFTCHAF

SEQ ID NO: 52162 - protein, 915 aa, Oryza sativa
MAKAVVLPLVSKLQEVALSEGRALVGVGGEINRLRDKLMWLMAFLQEADPQRRAADAGGELMRVLVHQTRDAAFSAEDALDDYAVRVDLSRYPGWSRAAVGFLAGITTQLRVRHRLSSDIAAIHARFEEIVGNKDKYRLEGSAPSSLLTWTASAASSSESILWGTSKPPIIGRDDQQQELEAMLLSSAGCLAVIYVVGDSGVGKTILVNSVCSKPSVREHFKERIGVKVGKDAGISNILSLISKELKKENNESDNENPRSKIQRRLGEECYLIIIDGRQMSIADWNAVIHALPKNERGSRVVLITKIKPQFLDHPMNDVHEIKLTCLNQTDCRKLFHMRLHGKEEDEQNQTYLPIYYQRVYDITGGSPLAVILLAGLMHNKEYPHEWDRVLKYLESAKEKRLNRILSLSFDDLHHELKLCFLYFTAFPVSYKVYQNVLVNLWVSEGFVVPRHGKTVQQLGQLYLRQLTTRGLVTEASADGDYDIRHFFLHDSVYLFARSEAHEANFMELHDGDYFPSPDRARRLTLHNSMDRYAALDNKMPKLRSIFAIFEEIPASTAEESVSSPSCFPTCCSCEQHRSPKISRFDLTKLLKRSKFLRVIMIEGLNIGTELPEAIGGMVHLRYLSTRCRSLRRIRPSIGNLKNLQTIDVRQSLVHELPCSFWKITSLRHVFGSELIVPRWTRELKQLNTLKSVRALQDWDGSMLRRMVNLKLLDVTIQEKLKEEKARKLSDNLNNLNNLTTLILKGVDLPISSIFTAPSLQFLKTIELTGTILLTTPSPEIDKMTTSPSDFQLPNLSKLSLSKTCLQQGFIGKLGKLPLLSNLTLKDVSCDGEELVFRPDGFHCLKKLEVNDTSKRVVIEEHALPVLVSLHIIGNSRNYQHSIHPTHKIINKIRHEDINLFQRICTCHQKEITKG

SEQ ID NO: 52163 - protein, 536 aa, Oryza sativa
MAAARLRLLSAGLLSPAVSRARHSSSLQGLRALSTLSTTLGSGAGEDEIERIRREFEDAKRNYLSIPVAIKDMAKMNPQGIYVNKNVKLDDLQVYGFDYDYTLSHYSEHLQCLIYDLAKKHLVNELKYPESCLKYEYDHGFPIRGLYYDRLKGCLLKLDFFGSIEPDGCFFGRHKLSLSEIKELYGTRHIGRDQARQLVGLMDVFCFSEACLLADIVQHFVDARLEFDASYVYEDVNQSIQHVHRSGLIHRKILSEPQKYLIKNSQVFRFLKMLREKGKNLFLLTNSPFYFVDGGMSYLLEDEHFDGNSWRELFDVVIAQANKPTFYNSDHPFRVYDTQKDTLAFTAVDKFLPNEVYYHGCLKSFLQITKWRGPEVIYFGDHLLSDLRGPAKAGWRTAAVIRELEDEIEIQNGDSYRFQQAKLSIIHDLLGKVHATVVSTEKGQVYRALLDELNAERRQCRSAMRDLFNSSFGATFLTDTGRESSFAYHIHQYADIYTSKLENFLSYAPESWLHPPHDIKIMPHNAKVPASLFSGS

SEQ ID NO: 52164 - protein, 309 aa, Oryza sativa; identical to SEQ ID NO: 31402

SEQ ID NO: 52165 - protein, 465 aa, Oryza sativa
MNKNAAPEDVESGEHERTGTVWTATAHIVTAVIGSGVLALAWSVAQLGWVAGPLALAGFACVTYYTSTLLANAYRAPHPVTGTRNRTYMDAVRSYLSPREVFMCGIAQYVNLWGTMVGYTITATISMVAIRRSDCIHRNGAGAAARCDNTSATVLMLAFSIVQVVLSQFPGLEHITWLSVVAAVMSFAYSFIGLGLSVAEWVSHGGHLSGRIQGATAASSSKKLWNVLLALGNIAFAYTFAEVLIEIQDTLKPSPPENKTMKKAAMYGIGATTIFYISVGCAGYAAFGSDAPGNILTASGMGPFWLVDIANMCLILHLIGAYQVYAQPIFATMERWISSRWPEAKFINSEYTVNVPLIQRGSVTVAPYKLVLRTVVVIATTVVAMMIPFFNAVLGLLGAFSFWPLTVYFPISMHIAQEKITRGGRWYLLQGLSMVCLMISVAVGIGSVTDIVDSLKVATPFKTVS

SEQ ID NO: 52166 - protein, 150 aa, Oryza sativa
MATVEVETPTTVLAEEAPVEATPAAAAAEVEAPKEETPAAPAEAVAEEAAPAEAEVAETKEAEPAAAEPAAEEVKEAEPEPAEPEAEPAKEEVAPEPAAAAEAEAKEAEPAAQVAEEVKEEEAAPAPAAEEVKVEEAAPVAEPEAEKASE

SEQ ID NO: 52167 - protein, 549 aa, Oryza sativa
MRPFHPPRPNAGQPHRPRPGDPAPPPLPMHPGFNPPPVPNLAAANPMAAAAAANPFLAMQLFGQAQQLQSLGFLAAAALQQHHHQPQPQAPFFPGGGFPPNPNQFGAFPVQHAGFNGGGAFRPGGVGVGVAGPRTPRPMMGAPGNGYNSGGGSGHGTGAGAPRPMLNGGGNDRNSSAGKGGEVNHTKIKPDGIPRFTSENGERKNTTDQKARFNSGRDCRDSRQFGPSGGRGRGRGRSFNQGRGGGNNNWRDAKSNFRSSDSPSPASGQRRNDSPASGGHRKRPRIIYDANEVKQWLEARKKNYPTSVNINKKLSESRPDGEKKDEEAQMRRQELKEVLEKQKELGFELPELPPGYLSEHEDQGNGRRSNWKTQRRDCRFGNRADNKRSRYDRNDFQSKRPKVRNQTHCDDGAVLKSREPTLLQKLLSSDVKRDRHRLLHTFKFMVLNNFFSDYPDKPLEFPSVKVNQIELESNIAEEDLDDLMNSETAKDSILDLKENGDQKDSSSIDGESDLDDDNDDEDEEDDDDGNGSAESSDKDENEDVDAGQM

SEQ ID NO: 52168 - protein, 191 aa, Oryza sativa; identical to SEQ ID NO: 29562

SEQ ID NO: 52169 - protein, 274 aa, Oryza sativa
MAALSQLVLVTAFLAAALLPLGMAATTYPIGSFCSESGMNYGDLNSSEAVVRRRSVNFVVSDLVAKARTGGGFATSRAGRGYDAFYGLAQCRGDVSGGDCDACLAQAAKQIVSNCNYTSDSRIWYEYCFMRYYNYDFIGEVDTREDASVTMINWQNMDNPKAFQKAAGKAMGKATAQAVAVGRSGLGRAKEQYTPFVSVYALAQCTRDLAPPACARCLSEIVSKFDKTCNSAQGCQIDYSSCWARYEIYPFYFPLEAGSRATIDMSKYTKVTMH

SEQ ID NO: 52170 - protein, 414 aa, Oryza sativa
MVGCSRGGGGLPAWMTAAAARVDLSSAGGGGGIPGSGASSSSSSSSQPGYSGPHQQAGVAGAAADQELGMAERALSAAGAAFVSAIIVNPLDVAKTRLQAQAAGVPYYQPSQMASLGPDAILSDFRCSPSCTRGVILGSEPICPPDCFQYKGTLDVFLKVVRQEGFGRLWRGTNAGLALAVPTVGIYLPCYDLFRNWIEDFTQSNAPGLTPYAPLVAGSVARSLACIACSPIELARTRMQAYKEFRPGVKPPGMWKTLLGVVSPLASSTQNAQNYRALWTGVGAQLARDVPFSAICWSTLEPIRRKLLGIVGEEGDAASVLGANFAAGFVAGSLAAGATCPLDVAKTRRQIEKDTQKAMRMTTRQTLADIWSSGGMKGLFTGVGPRVARAGPSVGIVISFYEVVKYALHQRHIS

SEQ ID NO: 52171 - protein, 618 aa, Oryza sativa
MTTEPVSSRSSQDAIPDISAREDSFVWKDNSFTLNYLLSAFKDLDEDEEENLLRKTLQIKEISIGKVCLPDFNVPGDTPASNTTEQKNPMSDHALERTAPGSNLARISQLEKRIFVGDALEDKHADLSKDDESDGSPESLLCKQSPVRRSSDAVGLMINEGSTAMETPSPSIKSPEHVLESESNPPDGVTTDEQPTENSPIGVDRDSELVKEKGTSSRHSVSLEEDVMPIDCTVSPPDHLEGGSTEVLTNITSRNVSPLHHGDGNSEHQEIVGGDVAQDNPIHTLETPPEDTPQNQSEIHRGSIEKLAVDKSNALSPSQGKQHRGKNKKQPSKRGKRETDNPIHTSETPPMDTNPQNQSEIHRGSIEKLAVDKSNALSPSKGKEQRGKNKKQPSKRGKRKTDNLIHTPEIPPEDTDNTVHTPEIPPEDTYPQNQSEIHRGNTEKLAVDINNALSPSKGKEQRGNNKKQPSKRQKRAAGEAGDLETHAPNFEPEIQPHVQDTDVEQQPACTSQSPSPSNGTSKNEVRKRNKKQDLNRRKSLADAGLTWQAGVRRSTRIRSKPLQHWLGERFIYGRIHGTMATVIGVKSFSPSQEGKGPLRVKSFVPEQFSDLLAESAKY

SEQ ID NO: 52172 - protein, 109 aa, Oryza sativa
MELEAAAVAFFPAAGGSSSSQRRAPWGRTLLLHPHFLALPLSNPDPEPVGKLDVKDPGSPDLLSLVAAVTTATSQTRHPSRACTGDVQETEVKADLPRLHLTLRGSNRQ

SEQ ID NO: 52173 - protein, 377 aa, Oryza sativa
MRRKTEMVRSTCCVVLLLLLSVAARSASAIMDGLLPNGNFEEAPDKSQLNGTRVIGRYAIPQWEISGFVEYIGSGQMQGDMLLPVPEGAYAVRLGNEASIQQRLTLTRGMHYSVTFSAARTCAQSELLNITVTPEIGEVPIQTVYTSSGWDSYSWAFKARRSDVSLIVHNPGVTDDAACGPLIDSFAIKTLQSPPSTKDNLLKNGGFEEGPYIFPNTSWGVLVPPMDEDDYSPLSPWTIMGYTKSVKYVDAAHYAVPGGARAVELVAGMEAALVQEVCTVPGRSYRLEFSVGDAGDGCVGSMSVQAYVSHGSVKVPYESQGRGGYKRGVLEFTATDKRTRVVFVSMAYTMKPDGTLCGPVVDDASVVGVHSHRRLLL

SEQ ID NO: 52174 - protein, 1247 aa, Oryza sativa
MADLVLGLAKTTVEGTVTMARSAMEEEEKLHKTVQRDLLVISDEFEMMHSFLNDAKGRVTDNVTRTLVRQVRNTALDVEDCIETIVYLDSKPHWWRRMILPWCMPSAAPGKDLDAAVANIEQLKARVEAMGHRNLRYNRIGDSGHKPEEQAHQQAVANAMAPTDAAKQSRQVDLVMLINRKGGQARHMLGGGGGDEDDDDDDDNNNNEDDDDNGDCYHGCCEEQLKVEKEVLQVISVWGTGSDLEMMSIKKAYDDTETMKSFNCRAWVKMVHPFHPIEFIRSLLAQFHKNVCPEQDNTVKILDLMVATDDVLIEEFKQQLSQKFLVVLEDVTTMVDWEAVRGYLPDKKNGSCIVVHTRHHGIACSCVGHPYRVSELEKFSADYSVRVVFKEDAAGKVEGTVNEETAHEREKSGPSCFGRDTDLSWLHSLTRLGGVVSVWGMSGVGKSFLIRQFFNNYMRQSSKNTVTRNPYYDKKKFGWVDVPRPRPFDLRDLSKSLHSELNPAFKDEVMSTIKDPIQQCREYLQREENWPYLIVIDGLQSKEEWDSIRRNMDFKFNTSSGKSNRSGEKVGNVVIIITNEESVANYCATKNNNVWNVKGLEVTGAIKLFDQVAANQRQRLWPWDWESEENKMLEIKHRNDETRHILLQKCGGLPKVICAVAESLSMVGDIKEEDNLVSKLAATRSLDDVFSWLLSYFRSCPDSLKPCILYLSIFPVNHTIRRRRLVRRWIAEGYFRDNKESTAEENGEGSFSKLIDLSMIQAPRTRVDGRRRMPLCQVNGFVREYIVSQLVEENLVFELEGHCRKNIQRTGRHLAIDNSWDRDRNVFESIDLSLLRSLTVFGKWETFIISDNMKLLRVLDLEDVSSGVTNVDVEKMVKLLPRLKFLSLRRCKQITRLPDSLGDLKQLQTLDIRHTSVIKLPKSIIKLEKLQYVRAGTAKHQQASEAAENPSMAAAPAMMSRPCIATPGSRFSKLGLGLHCRHGSHSGVKVPRGIGKLSSLHTLGVVNIQACGEDGILEDLKNLTQLHKLGVSGINRKNSEKLFSVILRLAHLESLSLKMQANQDNEAAGCMADISSPLEKLQSLKLYGLVDRLPSWIMQMCLQLPRLEKLDLQMKTLPQQELDFILTLKYLRSLRLRLAEFQDGELRFGWTIAQRSTSWIIDILEIVCNSSLQAVKFGSKIHVKILKIRCYSVSSSLQFSGLESMETLKEVWLSGSYELGFKQQLETELKGNENEPILELEKPSSST

SEQ ID NO: 52175 - protein, 950 aa, Oryza sativa
MEAGARLAFVMPLVVVLLLMIFSLGVRGVDVVVDGGGGGAAAARRRRVEVGVILDRRTWLGNISWACMELAVEDFYADEERASYTTALRLHLRDTRLDAVDAASAGVDLLKNVHVQAIVGPQTSAQAKFLAELGEKSSVPVVSFSANSPCRTASQTPYFIRTAWNDSSQAEAIASLVQRFNWRDVIPVIEDDDSNTRFIPDLVDALRNAEIRVTHRCKIHPSAGADDIKKVVLSLKEKWTSVFVVRMSYQLALSFFKHAKDEGMMGQGFVWIAAYGLTDIFDVVGSPAFDVMQGVIGMKPYVNDTKQLQNFRQRWRKMYKSENPGTTLSEPTLSGLYAYDTVWALALAAEKAGYVNSDFLLSEKNNGSTDFDRINTSNAAKKLQSTLLNIDFQGMSGKFQFQDMHLLSMTYEIINIVGEEQRVVGFWTPEFNISRGLNTKADVNEIIWPGGETTVPRGWLFPMNKTLKIGVPAKPGFSGFIKKEKYNFTGLCIEVFEEVLNGLPYKIPHDYVEFGNGKGESNGTYDELIYKVYQNDFDAAVGDITILANRSLYVDFTLPYTESGVRMLVPVQDQRQKTAWTFLQPLTADLWLGTAAFFVLTGFVVWFIEHRTNEDFRGPPVNQIGSVFYFAFSTLVFAHRQKIVNNLSRVLLVIWLFVVLILQRSYTASLSSILTVEQLQPTVTNLDEVIRKGANVGYLNDSFMPELLKRLKIDESKLIALDSPDEYNEALSTGRVAVVVDEIPYLKVFLSKYCHNYTMVGPTYKFDGFGFAFPLGSPLTAEISRGILNFTSSNRMAQLERELYNNRTCPDKDDSQTSSSLTLRSFLGLFIITGASSLLALFLHVVITLYNHRHDLSSASSSQSSWCGWFAILLKIFHEGDRPNAPQLDEPAVSNANTTADTPWSTPDHHIIENVDSGSDVESVRKEDREDFVQGPDPPSFAYMHSERGQ

SEQ ID NO: 52176 - protein, 218 aa, Oryza sativa
MGDEATQVSASSAVAVHALCFAGIVAAHQLSGRGMLVSNPAYALRLLVVFEAPLVIAVFSLLRRNPKRCSFLKAAARGLLGLPIGAFLNAFGAIVLGAPIGIKYWAATTYWSLLMSLFTFVPAACVFGASKVNWQAVLSHSIYCGSTDSVDYMISAPAHGAVIGAWLGAWPMPLDWERPWQEWPISVTYGSVAGHLIGMAISLALVVTHKRRGRAKAD

SEQ ID NO: 52177 - protein, 1011 aa, Oryza sativa
MAAYKLGVEVASAHDLMPKDGQGSASACVELTFDGQRFRTAIKDKDLNPVWNERFYFNVSDPSNLPELALEAYVYNINRSIDGSRSFLGKVRIAGTSFVPFPDAVVMHYPLEKRGMFSRVKGELGLKVYITNDPSIKASNPLPAMDPVSNNPPPTPAEQIATDITGTNLSTTHEHRAEVKTLHTIAKEVQHQHHGHGHLPASFPDQPSKYAVDQMKPEPQQPKIVRMYSAASQQPMDYALKETSPFLGGGQVVGGRVIRAEKHASTYDLVERMQYLFVRVVKARDLPDMDVTGSLDPYVEVRVGNYRGITRHFEKQKNPEWNAVFAFSRDRMQATILEVVVKDKDLLKDDFVGLVRFDLNDVPMRVPPDSPLAPEWYRLVHKTGDKSRGELMLAVWIGTQADEAFPDAWHSDAATLEDPSAVTHMKSKVYHAPRLWYLRVNIIEAQDIAITDKTRYPDVFVRAQVGHQHGRTKPVQARNFNPFWNEDLMFVAAEPFEDHLILSLEDRVAPNKDEVLGRVIIPLTMIDRRADDRIVHGKWFNLEKPVLIDVDQLKKEKFSTRLHLRLCLDGGYHVLDESTNYSSDLRPTAKQLWKPSIGLLELGILGAQGIVPMKTRDGKGSSDTYCVAKYGSKWVRTRTIVNNPGPKFNEQYTWEVYDPATVLTVGVFDNGQLGEKGGEKTSSSKDAKIGKVRIRLSTLETGRVYTHSYPLLVLHPSGVKKMGELHLAIRFSSTSLVNMMYLYSRPLLPKMHYVRPIPVLQVDMLRHQAVQIVSARLSRMEPPLRKEVVEYMSDVDSHLWSMRRSKANFFRLMSVFSGLFAVSKWFNGVCSWRNPITTVLVHILFIMLVCFPELILPTVFLYMFLIGVWNYRYRPCYPPHMNTKISHAEAVHPDELDEEFDTFPTSRSPDVIRMRYDRLRSVAGRIQTVVGDIATQGERVQALLSWRDPRATAIFVLFCLIAAIVLYVTPLQVLAALAGFYVMRHPRFRYRLPSTPVNFFRRLPARADSML

SEQ ID NO: 52178 - protein, 172 aa, Oryza sativa
MQSLQDKASEWSGVAAGDAFAIDDGNVFEALGGTTQPFVDLSTNFYTRVYEDEEEWFRQIFAGSKKEDAIRNQYEFLVQRMGGPQLFSQRRGHPALIARHRPFPVTHQAAERWLHHMQQAVDTTDSIDAATKTKMMYFFRHTAYFLVAGNEMTRQGHGTSCKCKHGESKPAE

SEQ ID NO: 52179 - protein, 535 aa, Oryza sativa
MTIWYQSIDPGEATLYISPSAAGRSDGEAEYRLWQGLNGDSGVACLAESGARRDATAVNKLDQGVTNWRPQVEAAVKELREEVGDIRQQMDLLGKSQSAPPATSSPRVPLTDEERKAPLLPTPPASRVAAAGDSGDKWASGRQHPHEHRGRAPGVVTTVVPTSVKVSDKFDRDQHDSLIRQMDQIKQTGSVWEYYERFDELMNQLLVYDPGVNMCYLTHRFIDGLRREIRNAVLLQRPKNLESALAVASLQEEVLESSDSTPVKEGKKFESSGQHKTGGNFKGAFPLPLPPGRHLGVIQSARVDEKKEGEIKRLSASSEKVSALKAQRRAQGLCYICAEKWSPTHKCANTVQLHAVQELFSVLHEACDEAVCNPENSVLSDSQVLMAISVHAVQGSEASGCMRMLGQIQGKDVFILVDSGSTASFISARVAEGLSELSQIATNLQVKVADGATLHCQSEIPACEWSTQGQKFCTTLKILPLGNYDMILGMDWLMQHSPMTVNWVTKSLTIEGRNPVVTLQGILSNTAQCGLIPSK

SEQ ID NO: 52180 - protein, 178 aa, Oryza sativa; identical to SEQ ID NO: 35360

SEQ ID NO: 52181 - protein, 943 aa, Oryza sativa
MESRMDQYEIMEQVGRGAFGAAILVNHKIERKKYVLKKIRLARQTERCRKSAHQEMALIARLQHPYIVEFKEAWVEKGCYVCIVTGYCEDGDMDELMKKLNGTYFPEEKLLKWFAQLVLAVDYLHSNYVLHRDLKCSNIFLTKDQDIRLGDFGLAKTLKEDDLTSSVVGTPNYMCPELLTDIPYGFKSDIWSLGCCMYEMAAHRPAFKAFDMAGLISKINRSSIGPLPACYSSSMKTLIKSMLRKSPEHRPTASEILKNPYLQPYVNQCRPLSDAPTPIRMPENPLSTSRSNQRCTSESQSSSISCSDIDSTQSSDRSTSGGAPSTDSKLNDIRSIQDADRADSDEKCVTPEDLRGNKNISGAELKRQDSSKSVHQHHRGESKQPKIIEKIMTTLREESRLRENNSPVSSSGVKLTSAVSNKNQAEQSSESSRPHSGVSYSSKFGDISSNGWTNTSDECVDPVQVPLQLKQLSPTVEHCPKLKNSGSSTPEPAKQIAENGSSASGMSKTKSSPSSSRRPSPQRQTVAGIPIVPFTVSKRAHIKAESEKTPPRPAHSPNNSLHNLPPLIPISTNLSEENIKLGNSQAMPAPLEFVTAASKEDISFYSNSVVDCVEKAEPSEVFESNSPAYLTPPWTGPVLDAKGENGLIAIPCSEIHTGTLQKSMASNDDSSLSSPLDTFYLSFEQEFVCKDDSQSSKHGHSAVTLLSGEDKFTVQELLASTPVISPFVSSTSNTLPEDKSSYQSFKKQSDSHSGPPVDVPAQTIRLNSFLVSDEWPTSETVQGEARDTAASKLLNVVREDFDVRSSSCSTSTQPSGQTPVRSKLNVPETNLASNISIPSISEAVRLSTAMDVKPYTSEASNGVKEEASPAKEALDVTSFRQRAEALEGLLELSADLLENNRLEELAIVLQPFGKNKVSPRETAIWLARSFKGMMNEEGGRLSM

SEQ ID NO: 52182 - protein, 408 aa, Oryza sativa
MEERIPLLSKRFPADGTAGVGGGREEEGGDRWWSGLAREAGKVGSMALPMAAMSVAQNAVQVASNMMVGHLPGVLPLSASAIATSLASVSGFSLLVGMASGLETLCGQAYGAKQYDKLGVQTYRAIVTLTVVTIPISLLWVFIGKLLTLIGQDPVISHEAGRYIVWLIPGLFAYAVCQPLTKFLQSQSLIFPMLWSSIATLLLHIPLSWLLVFKTSMGFTGAALAISISYWLNTFMLAAYIRFSCSCKVTRSPPTIEAFRGVGLFLRIALPSALMLCFEWWSFEILVLLSGLLPNPELESSVLSICLTTTSLMYTIPYGLGGAASTRVANELGAGNPEGARSAVHLVMSIAGTEAVLVTGMLFAAQRILGYAYSSDEEVVTYFTSMVPFVCISVAADSLQGVLSGYIS

SEQ ID NO: 52183 - protein, 599 aa, Oryza sativa
MEQYEVLEQIGKGAFGSALLVRHKVEKKKYVLKKIRLARQTDRTRRSAHQEMQLIATVRNPFIVEYKDSWVEKGCYVCIIIGYCEGGDMAEAIKRATGDHFSEEKLCKWLVQLLMALDYLHANHILHRDVKCSNIFLTRDQSIRLGDFGLAKILTSDDLASSVVGTPSYMCPELLADIPYGTKSDIWSLGCCIYEMTALRPAFKAFDMQALISKITKSIVSPLPTRYSGAFRGLIKSMLRKSPEHRPSAAELLKHPHLQPYVLQVHLKSSPARNIIPSHQSPIDKVKKMTFPTESMCRSKGRRNSLGNERIVTFSKPSPERKFTSSIQSIKDYSTTRSVKDLSIDVSLVEEVSSKTTFTTRTSSIVKTPKRTPSKTITTPQLEPPKVSYNRVNRSELLSRTPVNRSARVIRRASLPLPLPSSETPKRGVSSISILEQLESPDVSVNSPRIDRIAEFPLASSEDPPFLKLHGRRSPTPTPQHCVIDQSITKDKCMVEAFHIIDVDDDDGRSDSSSGRNNAAAAASSRAGSSESTRQRRFDTSSYQQRAEALEGLLEFSAQLLQQERYDELGVLLKPFGPEKVSPRETAIWLTKSFKETGL

SEQ ID NO: 52184 - protein, 38 aa, Oryza sativa
MEQQMGNIQLHILLGSCMMWQRPTQLMTLSGLMQSPQF

SEQ ID NO: 52185 - protein, 338 aa, Oryza sativa
MVYQDQIYLYGGYFKEVVSSDKSASEKGTVHADMWTLDPRTWEWNKVKKTGMPPGPRAGFSMCVHKKRAVLFGGVVDMEIEGDVIMSMFMNELYGFQLDNHRWYPLELRKDKPAKNKTKDIKRKEPSNNVEDNLGNEEDEIMEDSETTGGQSEVHGVSNHLTKSLTLNKAGSGNSSDILSDSTTQEVLPEAVKPGGRINACLAVGKDTLYLYGGMMELKDREITLDDMYSLNLSKLDEWKCIIPASESEWLEISEDEDDEDDDDDDNENDSEDDANQTDEDDEESDEDAEKNVDMSTAVSLIKGERKNLRRKEKRARIEQIRVMLGLSDSQRTPMVML

SEQ ID NO: 52186 - protein, 370 aa, Oryza sativa
MGRPPSTGGPAFRFTQAEVAEMEARLQQLNNAIPHRSVIQALADKFTSSPARSGKVAVQPKQVWNWFQNRRYSHRSRSSRGPPTLMQTKMLPTGSDEHKSPPFRAMPSASAHSGSPSGKGSLESGQVEFEAKSARDGAWYDVAAFLSHRLFESGDPEVRVRFSGFGAEEDEWINVRKCVRQRSLPCESTECVAVLPGDLILCFQEGKEQALYFDTCVLDAQRRRHDVRGCRCRFLVRYDHDHSEEIVPLRKVCRRPETDYRFQILHAARAAGMAKEAVVDLVSHNDKSSAEQKPPKQHKMMDVNTDEVTMVSNQDQEEPTGKPAATLPAAPVKTLNDSASASASDVQMGEAQAAPKVESSDEVEDKMKEG

SEQ ID NO: 52187 - protein, 165 aa, Oryza sativa
MRRAPRLHALPSRALAFGGLPPPPLPRAQLQGITEPGAASRLGAAFLARALATTGLPAPRRPRALQVQRITEPGAASRFGAAFLARGGFSTDASAAAQDSAKPAAATGGEGGDGKSGKSEQGDAGKSVRGGPVSWLSFLLLLVTGGGIIVYYDKEKKRHIEGRLL

SEQ ID NO: 52188 - protein, 787 aa, Oryza sativa
MAASVSPAASPPRRHRHRHDDSPPRRRRRHDDDSPRHRDDRKRRASPSPSPSPSPSDRDADRHRGKSRASPPRRPRDSDPAESNGGGAPKPGGDNGGDRSPRRARVPDAEEEGGDRRRRPSRVSDDDKEGGRRRRRRSTDSDDERGDRHRRRHRRRSPSSESSDGGRSRRHRRDESSRRQRDERRRDRGGREERRRSPDRKEPTPPLPPPPPLLPELIPGRTGGIYIPPFRMAQMMREVEDKSSPEYQRLSWDALKKSINGLVNKVNATNIKNIVPELFAENLVRGRGLFCQSCIKSQMASPGFTDVFAALVAVVNTKFPEIGRLLLVRVVLQLKRAYKRNDKPQLLAATKFIAHLVNQVVAHELVALELLTVLLENPTDDSVEVAVGFVKECGAMLQDLSPQGLHAIFERFRGILHEGEIDKRVQFLIEGLFAIRKAKFQGFPAIRPELDLVEQEDQFTHEISLEDELDPETNLNVFRANPNFAEDEKAYENLKRSILGAESSDDEEGSDDASDEDAEEESDDEEDEEQMEIRDQTETNLINLRRTIYLTIMSSVDFEEAGHKLLKIKLEPGQEMELCIMLLECCSQERTYLRYYGLLGQRFCMINKVYQENFEKCFVQQYSMIHRLETNKLRNVAKFFAHLLGTDALPWHVLAYIRLTEEDTTSSSRIFIKILFQELSEHLGIRLLNEKLNDPNMQDSFDSIFPKDHPKNTRFSINFFTSIGLGGITETLREYLKNMPRLIMQQQKPASSESGSSDSGSASDSSSSESESSSDESDKKRSKRRKR

SEQ ID NO: 52189 - protein, 40 aa, Oryza sativa
MNSTKGERKRARTLVGRINWLAVKEDHVMAHGRMGELMVF

SEQ ID NO: 52190 - protein, 320 aa, Oryza sativa
MAVVHRILRRGLSAASPLPSLRGLLLVSPQELGRRPASSSSSAAAAAGDVEAELRAAREDVRQLLKSNPCHPILVRLGWHDAGTYDKNITEWPKCGGANGSLRFGVELVHAANKGLLKALFLVIPIKSKYAGVTYADIFQLASATAIEEAGGPKIPMIYGRADVADGEECPPEGRLPAADQPSPAEHLREVFYRMGLSDKEIVALSGAHTLGRARPERSGWGKPETKYTENGPGAPGGQSWTSEWLKFDNSYFKEIKERRDEDLLVLPTDAVLFEDSSFKIHAEKYAEDQDAFFEDYAEAHAKLSNLGAKFDPPKGISLE

SEQ ID NO: 52191 - protein, 453 aa, Oryza sativa
MVAKKAGGSPSKNQTSVASTNSKNQNQTSAGVASGGSSGTTSKQEETTSQGSVGSSKDHPAQAINSKTSNYSEVLVKGNGSSTKQASQKQPDKKVDWIKEMASCDMFHGNWVRDESYPLYPEGSCPHIDEPFDCYLNGRPDRAYQKLRWQPSSCNIPRLNPTDMLERLRGKRLVFVGDSLNRNMWESLVCILRNSVKDKRKVFEASGRHEFKTEGSYSFLFTDYNCSVEFFRSPFLVQEWEMKVSNGKKKETLRLDIVEQSSPKYKDADFLIFNTGHWWTHEKTSLGKDYYQEGNHVYSELNVVDAFHKALVTWSRWIDANVNPKKTTVLFRGYSASHFSGGQWNSGGSCDKETEPIRNEQYLSTYPPKMSILEDVIHKMKTPVVYLNITRMTDYRKDAHPSIYRKRNLTEDERRSPERYQDCSHWCLPGVPDSWNELLYAQLLIKQHQMLQQ

SEQ ID NO: 52192 - protein, 448 aa, Oryza sativa
MGGKAALLMALVAISVVLEARADAGGYGGGYTPTPTPVKPAPKPEKPPKEHKPPHHHEPKPEKPPKEHKPPAYTPPKPTPTPPTYTPTPKPTPPPYTPKPTPPAHTPTPPTYTPTPTPPKPSLVCRSWYRAEAQTRRELFIGNCYAVSPRRAVERFGGVRAVVLKGKPRFADFSLVPYGWGAYVSPWVAALGPAYPHLERICLKRMTVSNDDLALIAKSFPLFKELSLVCCDGFSTLGLAAIAERCRHLRVLDLIEDYIDEEEDELVDWISKFPESNTSLESLVFDCVSVPFNFEALEALVARSPAMRRLRMNHHVTVEQLRRLMARAPQLTHLGTGAFRSEPGPGGALSVTELATSFAASRSLICLSGFRDVNPEYLPAIHPVCANLTSLNFSFANLTAEELTPIIRNCVRLRTFWVLDTVGDEGLRAVAETCSDLRELRVFSFRCH

SEQ ID NO: 52193 - protein, 304 aa, Oryza sativa
MKQRTGDGSPARRHCFTFPDIVVCEPLTRCHQGILCPPDLSGYQCLGVFLLDGDGDGGRIGMSNFKVICALYDRYLLNYILPLSETLACTFTSGSGGGGWRLPHSTAAGGDVTLEHVRLDATSFVGRANGRVYWEIEGDEGGDMLVLDETTAGFSLVTFPENVRESYDKRTFRIIAGGDGVAMRVVRVINNDLKVFAQLDGDGEWVLEKRVWLPAAARGLPGYDEGYFQEQNGEAIVVAASAAYVLLTPPVEDTWLFSVELETMAVERWHERNKYAGVAYPCELPWPRALQATDADQISGRRRC

SEQ ID NO: 52194 - protein, 1376 aa, Oryza sativa
MASGKVVSFVGADELGVSLAASFVRSGAIVRCFVAPGGDGSATALAELGGVRCASPAEAARDAELVIVLSDTDGVDELFFGPEGIVKGLCSGAVVLIRSTMLPSHLEKLNQKLADEKKNALLDGYIFSGLSDELKQKIVVVASGRHDVTERTGQFFSGLDTAVYFVEGEFGSSSKIKLVNDLLESIHFIASIEAMFLGVRAGIHPSIIYDIISNAAGSSRIFVEIVPKLLREDSLLIDYLESSKTNAGYVMDMAKAVIFPLPLVAVSYQQLIHGCSSANGDALVSPLKVWEQSFGVNIIDAASQQIHDASKLADQLVMACKTAKTIGFIGLGAMGFGMASHLLKSGFSVIAYDVYKPTLARFTDLGGLTKDSPEEVSKDVEILVIMVANEVQAENVLYGNAGAVSVMAAGTSIILSSTVSPGFVIKLKERLEAECRDIKLVDAPVSGGVKRAAEGTLTIIASGTDEALQCTGSVLSALSEKLYVIKGGCGAASSVKMVNQLLAGVHIASAAEAMAFGARLNLRTRRLFEIIQHARGYSWMFGNRVPHMLDNDYTPYSAVDIFVKDLGIVSHESSNARIPLHVSSIAHQLFLSGSASGWGRFDDAAVVKVYETLTGVKVEGRPPMLNKEDVLSSLPAEWPEDPMDDLVSSASHNSKKILVVLDDDPTGTQTVHDIEVLTEWPVEALAEQFQKLPACFFILTNSRSMTAEKATLLVKDICRNLEAAAKSVPGVSYTVVLRGDSTLRGHFPEEADAVVSVLGEMDAWIICPFFLQGGRYTIDDIHYVADSDRLIPAGETEFAKDAAFGYKSSNLRQWVEEKTKGRISENQVSTISVNLLRKEGPNAVCQHLCSLKKGSACIVNAASERDMSVFAAGMIQAELKGKRFLRRTAASFVSARIAIKPKPPIRPTDLGLKRALTGGLIVVGSYVPKTTKQVDELRSQCEQSLRIIEVSVEMISMKSAEDRDHEISRVIELGNAYIQSRKDTLVVTSRQLITGKTPEESLEINYKVSSALVEIVRGIGSRPRYILAKGGITSSDLATKALEARRAKVMGQALAGVPLWQLGPESRHPGVPYIVFPGNVGDNSALAKVVQNWACPSRSSAKELLLNAENGGYAIGAFNVYNLEGIDAVVSAAEAEKSPAILQVHPSALKQGGVPLVSCCIAAAEHASVPITVHYDHGTSKSDLLQALEMGFDSIMVDGSHLLLGKNILYTRSISSLAHSKGMLVEAELGRLSGTEDGLTVEEYEARFTDVAQALEFIDETGIDSLAVCIGNVHGKYPPSGPNLRFDLLEDLRALTMKKGVSLVLHGASGLPHELVKECIALGVRKFNVNTEVRNSYLESLKRPEKDLIHVMASAKEAMKAVVAEKMRLFGSSGKA

SEQ ID NO: 52195 - protein, 171 aa, Oryza sativa; identical to SEQ ID NO: 40885

SEQ ID NO: 52196 - protein, 1099 aa, Oryza sativa
MEASGSEPGRPWTVSATWAPAGGAAVEDAVSFETSADDAEAVPSAVFLERPSPDGDGDAPPCEVTVHFRGKYEIHRVYVRSTARIYEIYYTTDPKDSSKDYLCTVRCGPAVKEPLPSAEESMPQWSSDASTSEKHEHETKSVSSSIDEDSWVDVKIPELHVEKNRSKSQEPNAIGVKQETTLAHYEATAEITDASPCVSLTVRLLSLQSKTSVHIEEIYIFADPVEPTNDESETRPGNMGGSSLLAMLVPSLMQMSKSRNQKTDNKYFSDASRTQLSQGCAMAVNNSPCENVVRDAEPCSTDDLNFKSAGMESKLNAIDGDTITYEKGNHYELKDSKSILLPIQTTENTQAPLTKNQSVSNTDQPVTPLMDENPNPYSRIEGKLDTLLSKMEKMELYCSRFDDGMMRPICSIESRLQRLEQQFDVFSMEIKTLQASSARMTAPDGLSDMINPQDKTDNDGKAENSASTTNRQPGLVVRAPEFSLEESFSCDKSNENAVTLRGPSMVPRLLVKAPDFVSESEFACEKLHDGSFSPVDFALSSEKEPKTSPGLVVKVPEFPNDSDDELEEEKETEVGDHDDGHTKSDAALSESTVDSFKSKSHVSVDGALAPALEALLGSTKKTPSSQSAACPASNSTAENTTDSSTCPFSSEQVDETSTNDGSAGQLSGTFVDANKVNTFISCEEADAVPQTYISKANLKAEVNDLNNVLDLNMMAFAESTEPLCVPQLHTVEESKDVGSQANLKNNGSSSYMMQSIANTEHIIAHSQLPTVLESINDGQQLNGNRSTLSLAEFLVARNANFSKNVISEALSSNGGAEMHTFKRTSMESAKNIKDINQLLLQKALEVNEDDSAKFSVSGGMNSCCLRAFTDSKKRCIESSGLEASLNDSFTKSEVEHSLSDLCSMESFSAEPAREAVGSGGVTAGNCVDDPFTGSSTVNPTAGEELQKVCDLLYEYNDDVLGMAFVAKKTSKSSPSLEVLLAESSDSEAEISDAKDTDNDAGLSSARLFSTFSSSDDEAPRTDEPIIDVVDLPTPLDAYASSKNELVDDESLLDMDDPPIPPESYASVLSDMHHACLNDQSKPSGTFAGEGNGEYPDSLI

SEQ ID NO: 52197 - protein, 452 aa, Oryza sativa
MAAAIGVSVPVLRFLLCFAATIPTGLMWRAVPGAAGRHLYAGLTGAALSYLSFGATSNLLFVVPMAFGYLAMLLCRRLAGLVTFLGAFGFLIACHMYYMSGDAWKEGGIDAAGALMVLTLKIISCAINYSDGMLKEEGLRDAQKKYRLAKLPSLIEYFGYCLCCGSHFAGPVYEMKDYLEYTERKGLWASPTPSPLLPTLRALVQAGACMGLYLYLSPQFPLSRFSEPLYYEWGFWHRLFYQYMSGFTARWKYYFIWSLSEAAIIISGLGFSGWSDSSPPKAKWDRAKNVDVLGVELATSAVQLPLMWNIQVSTWLRYYVYERLVQKGKKPGFLQLLGTQTVSAVWHGLYPGYIIFFVQSALMINGSKVIYRWQQAVSNPVFHAILVFVNFSYTLMVLNYSCIGFQVLSFKETLASYQSVYYIGTIVPIVVVLLGYVIKPARPVKPKARKAE

SEQ ID NO: 52198 - protein, 822 aa, Oryza sativa
MSFLAPGRGRLLRVLPTRRHRLPPPQGSGGYAACFRRCKAHFLLDGVEDAVEGAAEPQQPPVSLAKSLASLTEESAVAAQRQRKPLLRMERKRLAELRIKKRVKAQYLNGKFHDLMANVVASTDTLEDAYDIVRLNSNIDMSSVRDDVCFATLAELLRTGEFDVRANVYAVVAKRRDGGRLVLPRLNLRIIQEAVRVVLEVVYRPHFSKISHGCRSGRGHQSALRFISNEIGIPDWCFTIPMHKEVDRNVLSKIICLIQEKIDDNQLVTFMQHMFDAEVINLVFGGFPKGHGLPQEGVLAPILMNIYLDSFDHEVFRICMRHEGLGSEAADVSDNQESNLRHWFRSQISGLKDREENSDNQTDYPLKTKLYACRYMDEIFVAVVGSRDIAEDIKSEMITYLRKTLFLEVDDRLYLMPVRSNSRGLQFAGSMVRVTTKESAALKAVHKLKEKVHLFASQKQEIWDAMNLRLGKKWLAYGLRRVKESEIKSLGLSTPLLDHIAQFRKDCMKTDHWFKTLLKVWMQDINAKREADESILLSKYIAEPSLPQDLKDAFNNFQKQAKDYISSETAATEALLSSLKNKESAITCTDGAVIKIHAPISYIHKCLNRYGLINLEGFPKHVSALVLQDDELIISWFAGIIQRWMRWFSEVDNFKELKLMLVECVRKSCIRTLSAKYRMYEKITEKRFELDDYGIPMAEDFEAIMAPLESSSSVCTDEALMYGISSSGLFVLTLSRVRVPSRQFDCFVMGCQSASLSMYVLHVKERQRFPGFRTGFSSSIHGSLDGRRVGLCTQHVKDLYLGHISLQSVDFGVLIDDSNKIP

SEQ ID NO: 52199 - protein, 309 aa, Oryza sativa
MEKPEWSMDDFEIGKYIGEGKFGKVYLAREKQSGYVVALKVTFKAKLDKYRFHAHLRREIEIQHGLDHPNVLRLFAWFHDAERVVLVLEYAARGELYKLLRTVRRFSERTAATYVASLAGALAYCHKKQVIHRDIKPENLLLDIEGRLKIADFGWAVRSNAKRHTLCGTIDYLAPEMIEKKAHDHAVDNWTLGILCYEFLYGSPPFEAAEQDDTLRRIVKVDLSFPSTPYVSADAKDLICKVKFVVLIIPIVYVTLKWVELLSFELRVRMQLLVKDSNKRLSLDDIMKHPWIVKNADPSGSCSDQKART

SEQ ID NO: 52200 - protein, 375 aa, Oryza sativa
MAAAAIHQFAECITCHAWSPDHSMIAFCPNNNEVHIYKFFTDKWEKLHVLSKHDQIVSGIDWSRSSNKIVTVSHDRNSYVWTQEGHDWVPTLVILKLNRAALCVQWSPKENKFAVGSGAKSVCICYYEQDNNWWISKVVRKKHESSVTSVAWHPNNILLATTSTDGKCRVLSTFIKGVDTRGSHASTSTDWKFGEQIAQLDLSSMWAFGVRWSPSGKTLAYAGHNSMIYFIDDVETSPAAQNLALRDLPLRDILFLSERTVIGVGFDCNPMIFSADETGLWSFVRYLDERKVTTSTSRASQLSEAFGKLYGQSKQVASSDTVEPSKPRGGVHENCITCIVPLRKGNDSIVKRFSTSGLDGKIVVWDAENHIDIKK

SEQ ID NO: 52201 - protein, 466 aa, Oryza sativa
MEPYAAAEGGGGGGGGGSTDTGLEESMWRMGLGGGGGGGGEAVAAGRLPERPGEADCVYYLRTGACGYGENCRYNHPRDRAAAAVLNGGGKTTHSAEYPERPGQPVCEYYMKNGTCKFGSNCKYDHPREGSVQAVMLNSSGYPLRSGEKDCTYYVKTGHCKFGSTCKFHHPEIGGVSETPNMYPPVQPQPISSSHPYQHLAGWQMGRPPVLPGSFLSGSYPPMMLPSTVVPMQGWNPYISPVNQVASAGGHQTVQAGPFYGLSHQGPSAAVTYGSQYAPLSSSTMPSSSSKQEPAFPARPGQPECQYYLKTGSCKFGSACKYHHPQYLNTPKSNCMLSPLGLPLRPGSQPCAYYTQHGFCKFGPTCKFDHPMGTLSYSPSASSITDLPIAPYPLNYAVAPVAPPSSSSDLRPEYLLTKEFSANQSASPGTTCGPAGAMLKAYAPHMLIRPQTSGAGGMVTTHGGEL

SEQ ID NO: 52202 - protein, 408 aa, Oryza sativa
MLAMGSEEWELYPSSFIGAQVIDYGHVSGDMDDDQSGDLAVSMDAVLPDDLLEKVLSFLPVASVIRSGSVCKRWHEIVHARRQTWSKMVPQKPWYFMFTCSEEAVSGFTYDPSLRKWYGFDFPCIEKTTWSISSSSGLVCLMDSEDRSRIIVCNPITKDWKRLVDAPGGKSADYSALAISVTRTSHQYKVAVARCNQVPSGYYQWEFTIHLYESEINTWVSPFTELLIGWRGGDECVICDGVLYYLVYSTGVLVNNNEHRHCLLMYDLSTRPTHTSLMSMAIPVPCPLTCGRLMNLNERLVLVGGIGKQDRPGIIKGIGIWELRNKEWHEVARMPHKFFQGFGEFDDVFASCGADDLIYIQSYGSPALLTFELNQKLWKWSLKSPVTKRFPLQLFTGFSFEPRLDIAS

SEQ ID NO: 52203 - protein, 504 aa, Oryza sativa
MVGADAESSAVVDAGEGHGDLALDSSSAASTDPLLHPPPSPSSTPSSPTAIADHDAFIEEDGEDDSAPHVPSASDEAAPEFVQITVSEPKKHAEPAAGAAGVIPGSGSYFSYLITTRAADGGLFRVRRRFRDVVALADRLAAAYRGLFVPARPDKSIVEGQVMQRHEFVNQRCAALQRYLGRLAAHPTIGRSAELHDFLTEPSGIPTSAGESPRSDPALSAAMSAAAVTAPTAPAKPGRDIFGMFKDLKQTVANGLVAVRPPPVEEETDAKFVMHKAKLEYFEQHLTTASQQVEALLKAYDDLKATTGQLGMTFIKLAKFEKEQDTCNSQRKRAVDMSNFANAVINMSRSQTKLNAKIEIHLGTIYEYLETMTSVRNAFTDRANALLRVQSLSGDLFLLHTQAAKLESVSSRGMGQERLRYQKIEELKETIRKTEDAKGNARQEYELIKENNMNEIIRFNKEKRHGLVEMLKGFVRNQVSYSEHISSIWTKVAEETTGYTGKGS

SEQ ID NO: 52204 - protein, 89 aa, Oryza sativa
MASTCFRAAARMASSACRSAASRSIPSAARRGAPRISRLPVELGCSAGLSLLPLHSAVAAARLTSRLSTASRSCCALSQGTLCRTYPGL

SEQ ID NO: 52205 - protein, 445 aa, Oryza sativa
MPYMTFYDSLNTNSGTAPRFGALADYNPVYITLFRELSQQGGARLFLPTGANDVVIPVFDDEPTSIISYALVSPMYCHQMLDENSKNKDGPDSSLPLPVYDSGNFNPFHLFEDFGSADDLASSISGTRGSFVPDLVHLRVPFGDGGPLGKVKYTVTCYYAKSFEALRRSCCPSELDFLRSISRCKKWGAQGGKSNVFFAKSLDDRFIIKQVTKTELESFLKFGLDYFKYLSESISTGSPTSLAKILGIYQVTIKHVKGGKESKMDLLVMENLLFGRNITRLYDLKGSSRSRYNADSSSNKVLLDQNLIEAMPTSPIFVGNKAKRLLERAVWNDTSFLAGIDVMDYSLLVGVDEEKHELVLGIIDFMRQYTWDKHLETWVKSSGILGGPKNAPPTVISPMQYKKRFRKAMSAYFIVIPEQWMPAIINPSKSSSNLCQEDPQNASQE

SEQ ID NO: 52206 - protein, 131 aa, Oryza sativa
MPDLRLRSSALSRAPPPPPLQAPCSSPVCSYRSVQRRTGAREDNSTGRRQRWHSVLQRAENMVNAIKGLFISCDVPMAQFIVNLNASMPASDKFILHMLDPTHMFVQPHVAEMIRSKISEFRDQNSYEKPT

SEQ ID NO: 52207 - protein, 204 aa, Oryza sativa
MGSIGNGRNGSEVGIQIPAMGNKEVLERPAIPRWPRLGVVMVATRAVALVMAVLSMALMISAKQRGSLKIFGIEIPLYANWSFSDSLEYLVGMSAVSAAYCLAQLLLTAHKAVKNAPVVQSRNYAWLLFTGDQIFAYAMMSAGSAAAAVANLNRTGIRHTALPNFCKPLPRFCDLSAASIACAFLSCIFLAASAVIDVIWLSNM

SEQ ID NO: 52208 - protein, 306 aa, Oryza sativa
MAVVGLAALVALQERLVYVPVLPGIARAYPITPDRLRLIYEDVWLRAADGVRLHSWFIRHSPTCRGPTILFFQENAGNIAHRLDFVRLMMQRLQCNVFMLSYRGYGESDGYPSQKGIINDAQAALDHLVQRKDIDTSRIVVFGRSLGGAVGAVLAKNNPGKVSALILENTFTSILDMAGIMLPFLRWFIGGSSSKGPKLLNCVVRSPWSTLDIIAEVKQPIIFLSGLQDELVPPSHMRLLYEKAFEHNKNCRFVDFPNGMHMDTWNSGGDRYWRTIQLFLDQYAPEVQSCNTSCKSEIANDDEAEE

SEQ ID NO: 52209 - protein, 165 aa, Oryza sativa
MSSRRVKWNEDNLYEIESNKPVRQKITEPKTPYHPMVDDDGSLSPTRPFDKCLDETVNAEAILTALNGVASSSKTDPKDDGWASSDDDADAMEQDDDPEAEKSRLSFKEHRRAHYDEFLKVKELMRSGSLIDDEADEDDRGAKGSQAKAVGKKPAGCDSTPPPQT

SEQ ID NO: 52210 - protein, 213 aa, Oryza sativa; identical to SEQ ID NO: 32038

SEQ ID NO: 52211 - protein, 224 aa, Oryza sativa
MSFIFGKRKTPAELLRENKRMLDKSIREIERERQGLQAQEKKLIAEIKKVAKQGQMGAVKIMAKDLIRTRHQITKFYALKSQLQGVSLRIQTLKSTQAMGEAMKGVTKAMRQMNRQMNLPALQKIMREFEIQNEKMEIVSSTMNDAIDDALEGDEEEEETEELVNQVLDEIGIDVNSELVGAPSTAVAAPVGAGKVAAQAEAAGGGDGGIDDDLQARLDNLRKM

SEQ ID NO: 52212 - protein, 802 aa, Oryza sativa
MDADFRFDPDGSDDDVAAASAAAGRRKPAQSPWEFSSYAESVAAEHARRRTTSIDEKISQALSGSRRGGKPSIPDGDSEGDEDDSEVEDDSEEDDKEVVEGEIDDEEDEVEESEDDDEGVEVSDEEVEELEEGKGEEKSDEVEEGEEGQDGEEEEKEEGDEEAAEEEEETDKKSGVVDPSKFFASSEGASFHANSFLELNLSRPLLRACEALGYQKPTPIQAACIPLALTGRDICGSAITGSGKTAAFSLPVLERLLFRPKRVPAIRVLILTPTRELAAQVHSMIEKLAQFTDIRCCLIVGGLSTKVQEVALRSMPDIVVATPGRIIDHLRNSLSVGLEDLAILILDEADRLLELGFSAEIQELIRMCPRRRQTMLFSATMTEEINELVTLSLNKPVRLEADPSLKRPATLTEEVVRIRRAREANQEAVLLALCLKTFKDKVIIFSGTKHSAHRLKIIFGLSGMKAAELHGNLTQAQRLEALELFKKQEVDFLIATDVAARGIDIVGVRTVINFSCPRDARTYLHRVGRTARAGREGYAVTFVTDDDRSLLKAIAKKAGSQLKSRIVAEKPVAECAKLIEELEDQISTIIQEEREERILRKAEMEATKAENMIAHKDEIYSRPKRTWFATEKEKKLLAKAAKESTSQGKSNSGVISAQQAEDLRLKEKKRREREKNLPRKKRRRLEAEREMLEDESEDEEEAKESKGGKKEKKGQSLVDVAYRRAKSMKASGKRGAGTGKGKNDKKAKQHSGKGPTRQEEMQELFQNDMSEWKQGRSLKKNNVMRKKSKNSFKSKSRYNRRK

SEQ ID NO: 52213 - protein, 430 aa, Oryza sativa
MARALLLRRGHPFLRRLLRPPPPPTSSVLESCNRNVSPRVQLWRFSAEGKDQTNSSEDGYSEANIKKKDFALQQALDQIKSAFGEESIMWLNHSYGPKEVPVISTGSFALDMALGIGGLPKGRVVEIYGPEASGKTTLALHIIAEAQKNGGYCAFIDAEHALDPTLAESIGVKAEHLLLSQPDCGEQALGLADILIRSGSIDVVVVDSVAALVPKTELDGEMGDAHVALQARLMSQALRKLSHSLSRSRTMLVFINQVRSKLSTFSGFGAPAEVTCGGNALKFYASVRLNTKRIGLIKKSEEVVGTQIQVKIVKNKHAPPFKTVHLELEFGKGLSRELEIIEVGFKHKFITKSGVFYHLNGQNFHGKDALKCYLAENKNVLESLMSMIKESIMQQESHPDRNMEDANPDTSITEEFVSATDEQVPEEVEA

SEQ ID NO: 52214 - protein, 424 aa, Oryza sativa
MAASSSSSSSAGRRLAGNLSLRPGVASIIPGLPDDVAAVILCLLTFPDQSRLRATSRAWRLLLSAATLLPLRRSLRLPRRHLLCLFPTDPSLASPILLDPAAPTAWWSLPPIPCSPQHYGLANFAAVAVGGQIYVLGGSRFDARSYPLDNPSPSAAAYRLDLALSRHRWERLPDMRVPRGSFACAPAPSGGVIVAGGGSRHPTFPSYGSRTSGVELYDAAARAWRVTAAMPRDRAGCVGFVAHGAGDGREDEFWVMGGYDGYTTVGGVVPSDVYCRDAVALGLWSGKWREIGDMWEEWERERLGPVAVISAEDGRVTEVFMLDGHDIFRYNFSSNSWSKEATLRRKIPSTQSCGFIAMNGELYVLTSAKLPVETSSPWKQSKKRLALEFQVYNPAAKMWRVLTTHPPVNVPIDFRTAALCTVEL

SEQ ID NO: 52215 - protein, 612 aa, Oryza sativa
MAAHDPKDDVDRLFACFKCGVSPPQSAFRERPRRAGKRSRVASTADGGGGGGGGSSSSSTPTPDAAEKHEAPSSAVIKFTGRKQMSPVVFYGSPQGVPVKKPLSLLRLLREIRIDLKKQTDLVPSAGVWATFPRQEEAIRFCKAHAYTNVFSYQDHLSGQRRFLVSTYDEFWKRYNNMDPQIRHHYEVIQDGSPCHIYFDLEFDPRLNKMRDADEMVDILVAATFSALHDKYSIEGQEEWIIELDSSTEEKFSRHLIIRIPKTAFKDNSHVGAFISEICSRIASQRAANPNFDKLYITKDSSCTGHADHLFMDIAVYSRNRCFRLAFSSKSGKKSFLVATERFKHKNMSDKELFMESLICRLDDDCHKLLTCKLDLDCKKTLHFDSEASMIRIQGRNSKDSIGTYRNDFPVSNTYGISPFPALDVFIESIASFGNVSGKIRCWYWFSHYGLMIYSMSRSRYCEHIGREHKSNHVMYIVEFQRAAYYQKCYDPDCQGYRSPLRPVPWDVIPELSSISDSAQREYQGEVVEINIEGRNRNDEYLCNGTKSVTESGEDDPSWWEEAVKFADSIENTDHGPDTRDQDKDCDDADWWMDAERIMVQIEEQIGSQSNA

SEQ ID NO: 52216 - protein, 183 aa, Oryza sativa
MAIISDFQEEEAPPRQQQQPASVAAAAGSGDEVLAAELERRGGAIPFLQAAIDVARRRSDLFRDPSAVSRVTSMASAARAVVEAEERKAREAKRKAEEAERKAAEAERKAKAPAEPKPESSAGKDSMEVDKKEEGNVRKPNAGNGLDLEKYSWIQQLPEVTITVPVPQGTKSRFVVCDIKKTI

SEQ ID NO: 52217 - protein, 481 aa, Oryza sativa; identical to SEQ ID NO: 36960

SEQ ID NO: 52218 - protein, 325 aa, Oryza sativa
MATRGRIVAAVASVVVAWLAVAVGVNGGGCEAERDRVEALPGQPPVAFAQYAGYVAVSEASGRALFYWLTEAAAAAAAATKPLVLWLNGGPGCSSIAYGASEEIGPFRIKTNGTGLYLNKYSWNREANLLFLESPAGVGFSYSNTTSDLKTSGDERTAQDALQFLISWMSRFPQYRHRDFYIAGESYAGHYVPQLARKIVEFNKASPYPFINLKGILVGNGVTDNYYDNIGTVTYWWTHAMISDTTYKAIMSSCNFTSANVSRLCNRAMSYAMNHEFGDIDQYSIYTPSCAAAAAANATGRRRGKAAVLRFKDTFLRRRSFGYDP

SEQ ID NO: 52219 - protein, 762 aa, Oryza sativa
MQGSKTKSGHAEAKSNGKAEAKGTPPTPKSAKIARKPAVPKAPPRPSADKSQSPGSADRKKSASRITTPPEKQGKATKPAQESVAAKPSPQEPVAVKPSSQEQEQQALLAAVQQELVKTKEELVEKEKERGKVLDELERAKRAADEANAKLQEALAAQSKAAEESAAEQSGDAEAEQASASMEDELRTKLASMQSQQEADMAALRSTVEQLEQARYELADAIDAKNAALTQADDAMRASDENAEKIKLLDAEVAHLKGLLDSEVGSSSKGAVEHIRKLEEENSGLKLELEKANVAEQRAVELEGVVEQLEVEIADVKKARARSEELLGKWKTKALELEVRLEEADQSNILKGESLESAMKELDAKMTLLQEKESEIEALQDKVRSLEDEVAKQKEDFHTADKEADELRLEIEDLRLKLEAAEEDLNNDKIASSEMETLIEQKNMLAKELEASKAEVEKIKKAMEGQASALHEMSAQLRVAQEKYLDKQEEIDRARAQVEELNVSLQNTKESYEVMLDEANYEKVCLKKSVERMEAETKSASEEWQSKELSFVNSIKKSEEEIINARAQMDKTLEAVKGKESENAELQEKLKHLEAQLMEANKTCEEAKAETFQWKEKLLDKENELQNIKQENDDLQAKELVASEKIKELSVLANAKDGATNGSHKEESNVKGDSEDDEPVMVVAKMWENSNVTDDASSKEKGNDGESEVDLESNTGDSIVDGNGLHSTTASNGNASPPKQQPQKKKPLLKKFGGLLKKKTQP

SEQ ID NO: 52220 - protein, 169 aa, Oryza sativa
MGAAESVPETSIYEFTVKDCNGKEVSLEMYKGKVLIVVNVASKCGFTETNYTQLTELYQKHRDKDFEILAFPCNQFLRQEPGSDQQIKDFACTRFKAEYPVFQKVRVNGPDAAPLYKFLKASKPGLFGSRIKWNFTKFLIDKNGKVINRYSTATSPLSFEKDILKALED

SEQ ID NO: 52221 - protein, 289 aa, Oryza sativa
MARVSHSRKRTRAPSNSNSKPTSQTQPPPPELTDRPVRVYADGIFDLFHFGHARALEQAKLLFPNTYLLVGCCNDELTNRYKGKTVMTQDERYESLRHCKWVDEVIPDAPWVLTQEFIDKHQIDYVAHDALPYADTSGAANDVYEFVKKIGKFKETKRTDGVSTSDLIMRILKDYNQYVMRNLARGYTRKDLGVSYVKEKQLQVNMKINKLRETVKAHQEKLQTVAKTAGINHEEWLANADRWVAGFLEKFEEHCHNMETAIKGRIQEKLRRQTSRGIIGGLMQQPVAA

SEQ ID NO: 52222 - protein, 430 aa, Oryza sativa
MEGEDEVRVNGAVEVAEVVAEGDLASGGEAAAAGGSDQAVVVVAMAAEGTTAKKGGSGGAAAARKAKVAAAVANGKVGKKPALSQSASFPARGAAAKKAATPKQAKTTDGKGAVPNGSEKAAGRAVEKKVNSARTPAASRSLPVKSGSVDAPPNDASPETQESNENTTNALEQTLPEKMEDDVHSTTSSTNTPRAAAQRKNAAAAAGFSFRLQERAEKRKEFYQKLEEKIHAKELEQTNLQAKSKESQEAEIKLLRKSLTFKATPMPSFYKEQPPKVELKKIPPTRARSPKLGRHKPTNSAAAASVDGSVSCESPRSITNLAKLTESTENNKPHATARKPAQRSVTKIPSQASATAKTETKPLVTKQKTSNTKPKAPRAKVEQLQDNSVEIPPAEPSGPEGLTVEHGVEDATGPDRATTLVASNEVPVQG

SEQ ID NO: 52223 - protein, 499 aa, Oryza sativa
MRRPWKHPTKARHGAADLCLREVGLLLPRRFARRAAASEDLVMRLQVHRKLNRHTGCVNTVGFNADGDTLISGSDDQMVMLWDWDTGAIKLQFPSGHSNNVFQARFMPYTNDQTIVTCAADGEVRLAKIGDGGDVPTTLLGDHDGRAHKLAIEPGSPYIFYSCGEDGLVQHFDLRTNTATKLFQCRNSLSKSGHSSNIHLNAITIDPRNPNLLAVGGSNCYARVYDIRKYKWDGSSDYPSDCYCPPHLIGNRFVGITGLAFSHQSELLISYNNENIYLFPKNGGLGPDPKSSVKIEANKGSKSTIVSSGEDVDRPAPLMYAGHRNCETVKGVTFIGPNHEYVASGSDCGRLFIWRKKDGKFLRAMEGDECVVNCIEPHPHTMTIASSGIDNDVKIWTPSATERAPVVNIEELKPRKRRTKLWHFSLPEELIFHVLASRRRQQAAGDDDSSEDLEDSTGLLNLVLRAAERDVLSDEDEESSEDSGDCSLNLSMAQPWKHC

SEQ ID NO: 52224 - protein, 760 aa, Oryza sativa
MDTPDRPPRAAATAAVEDSPVFNFINSLSPIPPPKPSDSAHNVQLFKSSDLAPVSSIFASPHVNPAKESKLPIREDSVQLSRESHSPNSVRTRTGATSSIIRMIRCKNIVSENCSITCYLNDSTSSKASQPIQLCGGSAESDTNQNTDGKKDPTTEQDRTDIEFVLLDQCGPEKMDSSQSGNNACENQLSEQHKDELGSFDGGYMFAHQPHSDMLRLAPPFESETQLVNETLQTDNVYCETLLTDGPSGSYTQNSAPDPHLYWAGAVEGCATDYTPQMLPGACQSQLVPNDQINNKLNEPSDYMPMDHNVSSQNLRGMRRRCLFNEKSGAANEGAKNSSARHSTNSTTPRRKISSSDNNLKTLRTPPCALPGIGLHLNALATVPKDKMVPHNDIQSSLNQASNVPSAVGSSPPTDDPHTINDDSSQTAVVAYVGESSQGSPKKKRHKFDNGDGTSCKRCSCKKSKCLKLYCECFHAGVFCSEPCSCQGCLNMPSNMETVLSTREQIESRNPLAFAPKVIRTEPGQELADDSNKTPASSRHKRGCNCKKSSCLKKYCECYQGGVGCSVSCRCEGCKNAFGRREGVALLGIEEAKRGCEEKDGGVKEETTDNDKQLVIYQDSINLTPAESVLATPSVVDYRPLVALPPLSSKKPRSSTKLGGYSSRLEGHLKSDILLSPFESYAEMMLGDGTSNVLKGESSPQTSVKVVSPNKKRVSPPRIGTGLSPICKSGRKLILKSIPSFPSLGVDITNEDPNTSSLAP

SEQ ID NO: 52225 - protein, 54 aa, Oryza sativa
MTVLSLILVSSEIPSLGYLWRQENASPVVPQKMENAKGISGTLSCLCLYITLAM

SEQ ID NO: 52226 - protein, 233 aa, Oryza sativa
MAGGGDELKLLGMWASPFALRAKLALSFKGLSYEYVEEDLKNKSELLLTSNPVHKKVPVLIHNGKPVCESQVIVQYIDEAFPDAGVPLLPSDPYDRAVARFWAAYIDDKLLKSWLQASMCKTEQEKAAAMKETFAAVANLEAAFKECSKGKPFFGGDAVGYVDVTLGAVVGFVRVGEAVHGMRLFDASRSPLLDAWLDRFAALDAAKAVLPDTGRLAEYAKMKQAEWAAAATN

SEQ ID NO: 52227 - protein, 261 aa, Oryza sativa; identical to SEQ ID NO: 46293

SEQ ID NO: 52228 - protein, 844 aa, Oryza sativa
MEEDAEGMDRFDMDGDFEGGRFGRDGEFYYERRRERAPQTRDDALYGVFAEGDSDYDSDDGRRRSRRKRRRDEAEPDLSRPVHFQSAGKFMPSKEPEPELEERPGLGAAASASASASAAGEDDAAEEEEDLDLPTAFGQRIAEGARARREERARERETAARRRQASGVASGKPAPALGSLGSNTKVAKMMAMMGYKDGMGLGKNEQGIVAPVETTLRPKNAGLGSVEGFKEPKPFFTKENLPPPPPPAPAKKEQQRWSKKAGAKKGPVLTKNELLAMRSEQEQDEQPTVVQKVIDMRGPQARVLTDLKGLNVEQEMEANDVPMPELQYNVRLLVDEAKADIVRLDGQLRREQEKVASLVREKEKVAKQEALQKRQLQVMEKIAGVLEQVRVDDTAGILSLEGLLKTFQELKACYVEEFKMCSVAWIACRFAHPLLIRVFQGWQPLQNPLFGLEIMSSWKDLLQGDQAYDFSGDVESMAPYAQLVCEVILPAVRISGTNSWEARDPEPMLRFLESWERLLPPIVLQSILEHVIMPKLSAAVDSWDPRREKVPIHVWVHPWLPMLGQRIDTLCHSIRYKLSSVLHVWQAHDASAYAVLSPWKDVFDAASWEDLIVRYIVPKLKMALQEFQINPANQKLDQFNWVMIWASAIPVHHMVHMLEVDFFSKWQQVLYHWLCSPNPDFNEIMNWYKGWKGLFPPELLANERIRMLLTAGLDMMNRAAEGLEVVQPGARENVGYLRATEKRQFDAAQQASQYMTHHAVPGAAMADMSFKESIQAYAMDQGLLFMPRVGKFYNGMPVYEFGTVSICIDSVKRLLYAQLQEGIERWSAVSLTQLIEMNRKARQR

SEQ ID NO: 52229 - protein, 693 aa, Oryza sativa
MCTQKPPHDYSQQLYDKYRESFEEYITSMVLPSLRDKHDEFMLRELVKRWSNHKIMVRWLSRFFFYLDRYFISRRSLIPLEQVGLTCFRDLIYQEIKGQVKGAVIALIDKEREGEQIDRALLKNVLGIFVEIGLGSMECYENDFEDFLLKDTTDYYSLKAQSWILEDSCPDYMIKAEECLKKEKERVGHYLHISSEQKLLEKVQNELLAQYATPLLEKEHSGCFALLRDDKEEDLSRVYRLFSKINRGLEPIANMFKTHVTNEGTALVKQAEDSASNKKPEKKDMVGMQEQVFVWKIIELHDKYVAYVTECFQGHTLFHKALKEAFEVFCNKGVSGSSSAELLATFCDNILKKGCSEKLSDEAIEDALEKVVRLLAYISDKDLFAEFYRKKLARRLLFDKSANDEHERSILTKLKQQCGGQFTSKMEGMVTDLTVARDHQTKFEEFVAAHQELNPGIDLAVTVLTTGFWPSYKTFDINLPAEMVKCVEVFKEFYQTRTKHRKLTWIYSLGTCNINAKFEAKTIELIVTTYQAALLLLFNGSDRLTYSEIVTQLNLSDDDVVRLLHSLSCAKYKILNKEPANRSISPNDVFEFNSKFTDRMRRIKIPLPPVDEKKKVVEDVDKDRRYAIDASIVRIMKSRKVMGHQQLVAECVEQLSRMFKPDFKAIKKRIEDLITRDYLEREKDNANVYRYLA

SEQ ID NO: 52230 - protein, 185 aa, Oryza sativa; identical to SEQ ID NO: 30263

SEQ ID NO: 52231 - protein, 365 aa, Oryza sativa
MGTSAQEPNLWKQIDDAEHYLVSGLFEQAVSTALSVSSQVHSAAMENSCDHDELLEMLELAGMVLVQALKELKRTSEMFIQLKTIYGSVASIPLKIFITGATMHMAGGSGSDLRPIFDEYLAKWRYTDDQVYVLDEGKNSSSNGLVVTSVMSPEQYFEVAELYTVTFLSVVSHETATAISWTEKAELTEQDRQDLLRKLHALQSAANKKSTNQGAKLSESAERNLSTSQNGSISPAHEDATKSSAPTHNGNIQGLRKALPKSIQPSFQRVTNQFDPLFWWFHSFRIKFGKVHVVLPSGKVMFLFSLLFSTLYILRRKGAALKRTAFQQISSLRRGFLDALQLAFSTQINPLAAVQQVPQAPRASW

SEQ ID NO: 52232 - protein, 419 aa, Oryza sativa
MRFSVVISSWILNRQLIKSAPKGGGRQQRRAKGMEKVAVGLLPPLRFIAVLAVVSWTSFIYCHFSLLSGGLLLGHGGGDDGADPCRGRYIYVHDLPRRFNDDILRDCRKTRDHWPDMCGFVSNAGLGRPLVDRADGVLTGEAGWYGTHQFALDAIFHNRMKQYECLTNQSAVADAVFVPFYAGFDFVRYHWGYDNATRDAASVDLTQWLMRRPEWRRMGGRDHFLVAGRTGWDFRRDTNINPNWGTNLLVMPGGRDMSVLVLESSLLNGSDYAVPYPTYFHPRSDADVFRWQDRVRGMQRRWLMAFVGAPRPDDPKNIRAQIIAQCNATSACSQLGCAFGSSQCHSPGNIMRLFQKATFCLQPPGDSYTRRSVFDSMVAGSSRCSSTTRRRTCSMRGTSPGSTPSTRCSSPSTTCAPAT

SEQ ID NO: 52233 - protein, 23 aa, Oryza sativa
MYCGGWTISRTSLILAQQYKRLT

SEQ ID NO: 52234 - protein, 360 aa, Oryza sativa
MAQCGGGDVSRHRKGHLDTVESLCQGLLDDVMLDDDKCRAMFGYLQEWQDLASMCYGSLGGEPPLAPEASNGSGSSGGGGSFRKRRPDDAKGESNSICKRQRGKQQQQQQPCHPDQMAAAVGKGRPERARPGAKKKAEVASPKDSPATSASTVTAGQKTDYIHVRARRGQATDSHSLAERVRRERISERMRYLQELVPGCNKVTGKAGMLDEIINYVQSLQKQVEFLSMKIAASNPVVNFNIVEDLFGRQLSQAACNPAALPAMALPMAQVEPSCLQMSPLQQKTSAGSSGYGLEMVVSNQYSPPGGPMSVPAGASVEPCLNVNGAAGWDIGSHGLFSGFDAPFQSVQSDCLLDNLKMEM

SEQ ID NO: 52235 - protein, 219 aa, Oryza sativa
MRALLPLRLQAPPLRRHLRRRLLALLFFSRAAPAFLLQEAARARLDLRAGAARRRGGGGRGRRRRRRHGGGAADAAGQPRRPHAAALHHQGGDQVGPRVRGRPEPVREEPEPRRAAAFVGDAVHDAGVIAAADGQVLQPSVRAHGGGGRDGVAAAQVSVLEGRRGEDVSAGARRGGHEGAEVAADEVTGGGRRGGRRVHHHHGGEEQQGHPLAVASQQW

SEQ ID NO: 52236 - protein, 388 aa, Oryza sativa; identical to SEQ ID NO: 29493

SEQ ID NO: 52237 - protein, 90 aa, Oryza sativa
MFAGGGGGLVVMPGRSGLSIPSLPCGADPGAANFFERVFFFFLPFGPCCSQRQRGNRSINLCIQFSPFCVQGLEAVVLAIASCFLAAHGV

SEQ ID NO: 52238 - protein, 133 aa, Oryza sativa
MAEVAPPAPAPEPTKDIAEERAAVPAPEESKAMTVVDDAEKAAATGGSHERDALLTTVATEKRISLIKAWEENEKAKADNKAAKKLADIASWENSKVAEIEAEIKKYQVSSAQLSSSTSRTRRDQLCVCESLS

SEQ ID NO: 52239 - protein, 113 aa, Oryza sativa
MGSIEAHHRVSDMVDITKKIIGAVLQICHIEPSTAVKFLSSFCRMLKNTLSCRINTNTQLKQVSCKSFPFWWRVNFCRGSTIPYFLSCGSSDFSTVESCQNTTRTSETTTVVE

SEQ ID NO: 52240 - protein, 360 aa, Oryza sativa; identical to SEQ ID NO: 33864

SEQ ID NO: 52241 - protein, 466 aa, Oryza sativa
MPRYCRHPALSSLPFIASSLPPSLFTAQHAATIYATPSLPAVVTGRASHSQPEAHLLSVIFSVFFSSTLAMAASSGEWLSRAAMVLVLGLVVASSAKAGDVDMVFLKSAVSTGAVCLDGSPPVYHFSPGSGSGANNWLVHMEGGGWCRNAQECSVRQGNFRGSSKFMRPLSFSGIIGGNQRNNPDFYNWNRIKVRYCDGSSFTGDVETVETSTNLHFRGARVWNAIIEDLLAKGMSKAQNALLSGCSAGGLAAILHCDQFRDLLPATANVKCFSDAGFFVDGKDITGNDFVRTFYKDVVNLHGSAKNLPSSCTSKMSPDLCFFPQNVVPTLRTPLFILNAAYDAWQIKNVLAPSAADKKKTWAKCKLDITACSSSQLTTLQNFRTDFLAALPKPEQSPANLSIFIDSCYAHCQSGSQDTWLAQGSPVVEKTQIGKAVGDWFHDREVSRRIDCPYPCNPTCKNRDDD

SEQ ID NO: 52242 - protein, 83 aa, Oryza sativa
MGGDHGGHGHGGGDFRQKVWSMTGGPYCRPVHWRRNTAIAMFGVFLVCIPIAMKSAELEQRPHHPVRPIPSQLWCKNFGKKEY

SEQ ID NO: 52243 - protein, 295 aa, Oryza sativa
MPRTSVVESPGCPPLRALTTDILGLIKVVEARTKPAGVAKVVETWGAPDAPRAVLAASLADRAVDPVLAVARKNGVVELLNPLNGETLAGVNAAAGRAAPADSSAEEDPLATLHLFRRHALDSSMLGTFLACTEKGKAYVKSVAKENASSDMAVGPSSSWDVSNSGTVQFSSVDAGESYAMFGGKGIEVNLWDITSCSKIWSAKSPRGNSLQIFTAPWFTAGTFLCKDDHRKIVACTNNHQVRLYDTASQRRPVISVDFRESPIKAVAEDPNGHAVYIGTGRGDLASFDMRTGII

SEQ ID NO: 52244 - protein, 500 aa, Oryza sativa
MIRLQTYAAFSLMATATAVYYAFSSREQFYPAMVYLSTSKICFVLLLNTGLVAMCVAWQLVKRLFLGTLREAEVERLNEQAWREVVEILFAVTIFRQDFSVSFLAMVAALLLVKALHWLAQKRVEYIETTPSVPMLSHARIVSFMLFLLVVDCLFLSNSLRSLIHKREASVAIFFSFEYMILATSTVSTFVKYIFYVSDMLMEGQWEKKAVYTFYLELISDLVHLSLYMLFFIAIFLNYGVPLHLIRELYETFRNFRIRIADYVRYRKITSNMNERFPDATADELNASDATCIICREEMTTAKKLLCGHLFHVHCLRSWLERQHTCPTCRAPILPPDNGRTAARPHGVHPGVQPVPGNGTPGSERAAGENISRRQAKLEAAASAASLYGRSFAYPPANNLNRYSTPPQSTSNGPQSGEASTSNQSPKGHATADPSAPTFYARGAVSSVTTTRELESSLQKAYENAIKSQIEMLQIQLQMFQHGATSSATNNENGEHTKSD

SEQ ID NO: 52245 - protein, 298 aa, Oryza sativa; identical to SEQ ID NO: 32269

SEQ ID NO: 52246 - protein, 115 aa, Oryza sativa; identical to SEQ ID NO: 33332

SEQ ID NO: 52247 - protein, 195 aa, Oryza sativa
MHYLICLQAFLKHIDFEVVQCAVIASPGFTKDQFRDYMHLEAARRDLRLIIENKQRIVLAHAPSGYKHSLKEVLDSPSVMTLIKDTKAAQEVQALKDFFNMLTNDSARACYGPKHVEIANERLAIQTLLITDNLFRNSDIATRQNYVRLVESVKKFGGTVHIFSSMHVSGEQLAQLTGIAAILRFPLPDLEDIEM

SEQ ID NO: 52248 - protein, 73 aa, Oryza sativa
MEGGAAAAAVAGRRTAGEARGGQGRDEVLRGGLEEGAGSPLPQGEDHRHAAGLPQIQGQDHGDTAPRAHVLRD

SEQ ID NO: 52249 - protein, 379 aa, Oryza sativa
MATAGKVIKCKAAVAWEAAKPLVIEEVEVAPPQAMEVRVKILFTSLCHTDVYFWEAKGQTPVFPRIFGHEAGGIVESVGEGVTDLAPGDHVLPVFTGECKECPHCKSAESNMCDLLRINTDRGVMIGDGKSRFSINGKPIYHFVGTSTFSEYTVMHVGCVAKINPAAPLDKVCVLSCGISTGLGATINVAKPPKGSTVAIFGLGAVGLAAAEGARIAGASRIIGIDLNANRFEEARKFGCTEFVNPKDHDKPVQQVLAEMTNGGVDRSVECTGNINAMIQAFECVHDGWGVAVLVGVPHKDAEFKTHPMNFLNERTLKGTFFGNYKPRTDLPNVVELYMKKELEVEKFITHSVPFSEINTAFDLMHKGEGIRCIIRMEN

SEQ ID NO: 52250 - protein, 818 aa, Oryza sativa
MEDGIYSSSAPPSTATAAAAAAAVGSSVIPIVNKLQDIFSQLGSSSTIDLPQVAVVWSQSSGKSSVLEALVGRDFLPRGSDICTRRPLVLQLVHQPRRPADAEADEWGEFLHLPGRRFYDFREIRREIQAETDREAGGNKGVSDKQIRLKIYSPNVLNITLVDLPGITKVPVGDQPTDIEARIRTMILSYIKHKTCIILAVSPANADLSNSDALQIARNADPDGSRTIGVITKLDIMDRGTDARNFLLGNVIPLRLGYVGVVNRSQQDIKSDLSIKEALAREESFFRNHPAYNGLAQYCGIPQLAKKLNQILVQHIKTVLPGLKSRISSQLTTTAKELSFYGDPVESKAGQGAKLLNILAKYCEAFSSMVEGKNEDISTIELCGGARIHYIFQSIYVKSLEDVDPCEDVTDEDIRMAIQNATGPRSALFVPEVPFEVLVRRQISRLLDPSLQCAGFIYDELVKMSHRCLAVELQQFPLLRRSMDEVIGRFLRDGLKPAQDMIAHIIEMEADYINTSHPNFIGGSKAVEQAQQQVRSSRLAAVARREGVDADKSQASDKTQKPRALLGRTGVNGVVTDHLQGLRPAAEAERPGSSGSGSTSFWGSISIFSSTSDDRTHSSAKDNSSNKSYTASTSHLEHSLSTIQLREPPVVLKPSESQSEQEALEIAITKLLLKSYYNIVRKNVEDFVPKAIMHFLVNHTKRELHNYLITKLYRDDLFADMLREPDEITIKRRQIRDTLKVLQQAYKTLDEIPLEADTVERGYSLDADATGLPRAHGLSSSFQDGSSPYSTPKQPRSRKSSHSGEQLPFNPDASGNGF

SEQ ID NO: 52251 - protein, 60 aa, Oryza sativa
MLNSKVNEELVAAAGVEEGDVVLEIGPGTGSLTAALLDAGATVFAVEKVGGIASHWLELG

SEQ ID NO: 52252 - protein, 481 aa, Oryza sativa
MRWKLKSSAYKRVPSRDAAMDLDVETPAKMADGGAPSWRMSLPHVCVATLTSFLFGYHSGVVNEPLESISTDLGFAGNTLAEGLVVSICLGGAFVGCLFSGSIADGIGRRRAFQLSALPMIIGAAVSALTNSLEGMLLGRFLVGTGMGLGPPVASLYITEVSPPSVRGTYGSFVQIATCLGIVVSLLIGTPVKDIDRWWRVCFWVAAVPATLQALGMEFCAESPQWLYKCGRTTEAEIQFEKLLGPLHVKSAMAELSRSERGDDGENVKYSELFYGRNFNVVFIGTTLFALQQLSGINSVFYFSSTVFRSVGVPPNLANICMGIANLSGSIVAMLLMDKLGRKVLLSGSFLGMAFAMGLQAVGANRHHLGSASVYLSVGGMLLFVLTFSLGAGPVPGLLLPEIFPNKIRAKAMALCMSVHWVVNFFVSLLFLRLLEQLGPQVLYTMFSSACVVAAIFVRRHVVETKGKTLQEIEVSLLQTQ

SEQ ID NO: 52253 - protein, 726 aa, Oryza sativa
MAAAMAESDNNGSEVSPGGGGRDSASAAAAVASPVKAKARALLELETASAAAAASESSEARVDDGNIQEAESSLREGLSLNYEEARALLGRLEYQRGNVEAALRVFDGIDLQAAIQRFQPSLSEKPPSKRSNKLRSDSSNSGSQHAASLVLEAIYLKSMSLQKLGKAVEAAQQCRSVLDAVESIFQRGIPDVMVEQKLQETVSKSVELLPELWKQAGAYQEALASYRRALLSQWNLDDDCCTRIQKRFAVFLLYGGVEASPPSLASQTEGSYVPKNNLEEAILLLMIILKKWYLGKTHWDPSVMEHLTFALSLCGQTSVLAKHLEEVLPGIYPRTGRWYSLALCNYAASHNEAALNLLRKLLNKNESPGDIMALLLAAKLCSSDYSLASEGVEYARRAVTNVDSSDGHLKSAALHFLGSCLAKKSRIATSDHQRSLLQTESLKSLSEAISLDRHNPDLIYDMGIEYAEQRNMQAALKCAKEFIDATGGSVSKGWRLLSLVLSAQQRYSEAEVVTDAALDETTKWEQGPLLRIKAKLKVAQSLPMEAVEAYRALLALVQAQRKAYGTVKNGTEEVDNKVSEFEVWQGLANLYASLSYWRDAEICLQKAKALKSFSAITLHAEGYTREVREQTQDALAAYFNAVSTEVEHVPSKVSIGALLSKQGPKYLPVARSFLSDALRHEPTNRMAWFYLGKVHKHDGRLADAADCFQAASMLEESDPIESFRSL

SEQ ID NO: 52254 - protein, 641 aa, Oryza sativa
MSAAVGGAEFHGFRGGGGGAAQLQRSRMLGRPLRVATPHAAAPAGGGGSSSASIRAVSAPLKKDASEVKRSKVEIIKEKSNFLRYPLNEELVSEAPNINDSAVQLIKFHGSYQQTDRDVRGQENYSFMLRTKNPCGKVPNQLYLAMDTLADEFGIGTLRLTTRQTFQLHGVLKKNLKTVISTVIKNMGSLLGACGDLNRNVLAPAAPYVRKDILFAQETAENIAALLTPQSGAYYDLWVDGEKIMSAEEPPEVTKARNDNTYGTNFPDSPEPIYGTQYLPRKFKIAVTVAGDNSVDILTNDIGVVVVSDSAGEPVGFNIYVGGGMGRTHRVETTFPRLADPLGYVPKEDILYAIKAIVVTQRENGRRDDRRYSRMKYLIDNWGIEKFRAEVEKYYGKKFEDSRPLPEWQFNSYLGWQEQGDGKLFYGVHVDNGRVAGQAKKTLREIIEKYNLEVSITPNQNLILCGIDQAWKDPITAALAQSGLLEPKDVDPLNITSMACPALPLCPLAQTEAERGILPILKRIRAVFDKVGIKDHESVVVRITGCPNGCARPYMAEVGFVGDGPNSYQIWLGGTPNQSTLAETFMNKVKLQDIEKVLEPLFSYWNSTRQEGESFGSFTRRTGFDKLKEVVNKWAESASAA

SEQ ID NO: 52255 - protein, 533 aa, Oryza sativa
MRARRVVAAAAVLLLFAVVAVARLDLDDDGDDSEVLDELLAVDEEEERGELGGGGEAAAAEAVRRAQSMVLVLDNDNARRAVEENAEVLLLGYAPWCERSAQLMPRFAEAAAALRAMGSAVAFAKLDGERYPKAASAVGVKGFPTVLLFVNGTEHQFTGLHTKDAIVTWVRKKTGAPASRIQSKDSAEEFLKKDQTFAVGLFKNFEGTEYEEFVKAATSENEVQFVETNDRNVAKILFPGIASEEQFLGLVKSEPEKFEKFNGAFEEKEIIQFVELNKFPLITVFTDLNSGKVYGSPIKLQVFTFAEAYDFEDLESMIQEVARGFKTKIMLIYVDTAEEKLAKPFLTLYGLEPEKPTVTAFDTSKGTKYLMEAEINAKNLQDFCLSLLEGTLPPYFRSEPVPEEKGPIEKVVGRTFDSSVLESPQNVFLEVHAPWCVDCEAISKNVEKLAKHFNDLGQTNLKFARIDASVNEHPKLQINNYPTLLLYPAQDKSNPIKLSKKSNLKDMAKFVKEKLQIADVETVAAGDIVKDEL

SEQ ID NO: 52256 - protein, 217 aa, Oryza sativa
MCEENEIFRSGPSRGHMAPYTFLVATARCCPCCLRVSGFSTFLEMVDTPTGPGKFLHLRYLRITFATWRFSWAYDYFSLASFLDASPSLETFILCISQKEKHDLTFKDPICLRQIPEHRHDKLKNVKITGFSATRSLAELICHIMENTTSLECLTLDTLCTQLRCSDGNIDVCLPLDQDVIKGVHNSLLAIRTYIEGKIPSTVKFNVREPCSRCHGW

SEQ ID NO: 52257 - protein, 324 aa, Oryza sativa
MAMEVALAVYSLVLLASFSFPCRLASALLSPKGVNYEVQALMMIKTSLKDPHGVLKNWDQDSVDPCSWTMVTCSPENLVTGLEAPSQNLSGLLSASIGNLTNLEIVLLQNNNINGPIPEEIGRLTKLKTLDLSSNHFSGGIPNSVGHLESLQYLRLNNNTLSGAYPSSSANLSQLVFLDLSYNNLSGPVPGSLARTFNIVGNPLICAAGTEHDCYGTLPMPMSYSLNNTQGTLMPAKSKSHKVAIAFGSTIGCISFLIPVMGLLFWWRHRRNHQILFDVDGKQKAKLLSIMPQCSSNLGAYWHAMVVFIVTHWLLQSNTQRMST

SEQ ID NO: 52258 - protein, 166 aa, Oryza sativa
MLWYFPVRLNNEQRAAIADYFRVYKGGENTMKKVSLTGAVLHPFLARSYTDVLKGFFEDKLLLSQQLFASEERYQKILDLIPDENVASELHDKWQGNRRSSISKEDVNATRWEQLKSTLQSGKHKGLRRCIEEIVFSYTYPRLDMEVSKHMNHLLKAPFCIHPKTG

SEQ ID NO: 52259 - protein, 314 aa, Oryza sativa
MYYCLAAPPAAAAPAAPAARRASSFLFVVSVPPPTLWGRVTGGAVSAQRLVRRRCSSAGEPRAAGDGGLSSFCIIEGPETIQDFVQMQSQEIQDNIRSRRNKIFLLMEEVRRLRVQQRIRTSESRGASSEESEMPEIQSSIPFLPNTSPKTMKQLYLTSFSFITGIIFFGGLIAPVLELKLGLGGTSYEDFIRTMHLPLQLSQVDPIVASFSGGAVGVISALMLVEIRNVRQQEKKRCTYCHGTGYLPCARCSASGMLLNSKSFSLSCDNGHNMWSTTERCPNCSGAGKVMCPTCLCTGTAMASEHDPRIDPFD

SEQ ID NO: 52260 - protein, 327 aa, Oryza sativa; identical to SEQ ID NO: 31386

SEQ ID NO: 52261 - protein, 422 aa, Oryza sativa; identical to SEQ ID NO: 35238

SEQ ID NO: 52262 - protein, 113 aa, Oryza sativa
MAARLLANLLVIGGTVLGRAAVQAYRQAIVNANKTGAAQEAINGIRRASKAMTEQEARQILGISEKSTWEEIVQKYDTMFERNAKNGSFYLQSKVHRAKECLEAVYQKPDVPS

SEQ ID NO: 52263 - protein, 339 aa, Oryza sativa
MFSSSAMERRRRSPCAAVVMAAVAMLAVMPAFPGVAADLSAGYYSSSCPKLESIVRYEVSRKINETVVTIPAVLRLFFHDCLVTGCDASALISSPNDDAEKDAPDNMSLAGDGFDTVNRVKTAVEKACPGVVSCADILALAARDVVSLASGPWWSVELGRLDGLVSKASDVDGKLPGPDMRVTKLAAVFDKHGLSMRDMVALSGAHTVGFAHCTRFTGRLYNYSAGEQTDPSMNKDYAAQLMEACPRDVGKTIAVNMDPVSPIVFDNVYYSNLVNGLGLFTSDQVLYTDGASRRTVEEFAVNQTAFFDAFVSSMVRLGRLGVKAGKDGEVRRDCTAFNH

SEQ ID NO: 52264 - protein, 145 aa, Oryza sativa
MATAAKGGEKPALRKPVFVKVDQLKPGTCGHTLTVKVVSANPVPARGRAGGGGPAVGSRPARIAECLVGDETGVIVFTARNEQVDMLMPGNTAILRNARIDMFKGSMRLAVDKWGRVEVTEPASFAVKEDNNLSLVEYELVNVPE

SEQ ID NO: 52265 - protein, 729 aa, Oryza sativa
MSGWDEGAVFYSDQAQFPRGGPGGDPSADLTRHSALRKFKEFLRGFTGPTGDFPYRESLVHNRDHVTVAIEDLDAFDAELSDKIRKSPADYLPLFETAASEVLASLRSKVAGETGEMEEPATGDVQIFLSSKENCLSMRSIGADYMSKLVKIAGITIAASRVKAKATHVTLLCKNCRSVKTVPCRPGLGGAIVPRSCDHVPQPGEEPCPLDPWIAVPDKSKYVDLQTLKLQENPEDVPTGELPRNMLLSVDRHLVQTIVPGTRLTVIGIYSVYQASANQKGAVGVKQPYIRVVGLEQSRDANSNGPSNFTLDEEMEFKEFAQRPDAYVKICSMIGPSIYGHSDVKKAIACLLFGGSKKRLPDGVRLRGDIHVLLLGDPSTAKSQFLKFVEKTAPIAVYTSGKGSSAAGLTASVIRDGSSREFYLEGGAMVLADGGVVCIDEFDKMRPEDRVAIHEAMEQQTISIAKAGITTVLNSRTSVLAAANPIAGRYDDLKTAQDNIDLQTTILSRFDLIFIVKDVRMYDQDKRIASHIIKVHASGAAASSKNTDASEGENWLKRYIEYCRVTCKPRLSEKAAEMLQNKYVEIRQKMRQQAHETGRAAAIPITVRQLEAIIRLSESLAKMRLTSVATPEHVEEAFRLFNVSTVDAARSGINEHLNLSPDIANEIKQAEAQIKRRMGIGSHISERRLIDELNRMGMNESIVRRALLIMHQRDEVEYKRERHVIVRKA

SEQ ID NO: 52266 - protein, 1290 aa, Oryza sativa
MFSPAIKKPHLLHRRDKEEASPSPPPAPAHTPAPRGFAVHDRPATGTPAPWTSSSLLARISTSTRTDRTGDSGQIQPVHVSEFPQIVRNAQANLLQKSFSGKNMLAGGIDKETSLAWMLCGNELFIWSYLASVAKDCLVLEVPSSLMGNKEEKSLCGNQWAVCIVRWGSSGASTRSSGDILHRRSSTGFILCNKRTQAIAYWSDIYAESSKSSVLDLIGYGDTSSGDGTSGNCRINSLIAVAVPGGINECIVIASQPTGTLWMFWCSPAAVRRREIHKGTLGVYNADHSQKNSGGRSLAWLPSKASSKAAERTFFLLTSHELQCWSISFGHDINCKKIGSQEIVGSDGDMGIKKDIAGQKNIWLLDMQIDDHGKEIIILVATFCKDRVSGSNYTQYSLLTMLYRPNQKFSSEDNVIKTERFLEKKAPSQVIIPKARVEDEEFLFSMRLKTGGKPSGSVIILSGDGTATIAIYWRGSTRLYQFDLPWDAGKVLDASVIPSSEDRDEGAWVVLTEKAGVWAIPEKAVLVGGVEPPERSLSRKGSCNEAVAEEKRRNQAFNASVVPRRASSEAWSAGERQRPALTGIAQQAVVDEESEMLLNRLFHDFVLSGTVHEALQKLRAAGAFDKEGEMNIFVRISKSIVNTLSKHWTTTREAEFLASTIVSSLTEKQQKHKKFLQFLVLSKCHEELSSKQRTAMLTVMEHGEKLSGMIQLRELQNALSHQRSSIHLSPQSKNQTTGALWNLIQLVGEQSRRNTVLLMDRDNAEVFYSRVSDIEDLFNCISHQLQYIITGGENPSVQMQRALELSNACMTLVQAALRYREEHKDWYPSPEGLITWNSQPVVRSGIWRVASFAMELLREPGAADMSMKSNLWSQLERLTDILLDAYIGLLTAKFERGDEHGVLIQEYCDRRDELLGSLYDLAKQIVDAKYQETTEVTDNLELKESIFREVTSPILATAKRHEGYQTLWQTCYDLSDTGLLRSLMHDSVGPHGGFSFFVFKQLVNRRQHAKLLRLGEEFPEELANFLKERDDLLWLHEICLNRFSSASKTLHTLVSPEEDANLTSNRKSLSFVERRRFLYLSKIAAAAGKDVDYEVKVAHIDADIRILNLQEEIVQHDPEYAPDKYTTKPFRPLELIEMCLKGDRELSLKAFEVFAWTRASFRSSNKGLLEACWMNAADQDDWVSLQEESSGGWSDEVIQESLQGTVLFNASRLCYSPDAVVYDGSFEDVLPVKKEDVHLRGLEGRCLSVEEVLMQHKDFPDAGKLMMTAVIMGKELPYTVSTAEPVDMDS

SEQ ID NO: 52267 - protein, 274 aa, Oryza sativa
MALNYVGLAAINLVAALLSIPVIAAGIWLSAQVDSACVQLLQWPLIGLGVAVLAVGLAGFVAAFWRLPWLLLAYLVGMLLLVVALACLAVFVFVVTGGASSGGHTVPSRAFLEYELDDFSGSWLRGRVDDPAGRWEQIKTCLAATPICSDVNQTYATAQDFFSASWLTPLQSGCCKPPTRCGYTFVTPISWISPISAAADPDCGAWSNDPSQLCYSCSSCKAGLLHNLSREWRRADLILLVATVALLAVYAFACYAFRTAKTDDLFRRYRQGYT

SEQ ID NO: 52268 - protein, 532 aa, Oryza sativa
MAALSSCLLAAVRPHPPPPPRPLSPSFIPSALRHRHRLSQAPPLATSLPRPRPPWCRFSASSPPPPPDDPDDYELLDTTGNCDPLCSVDEVSSQYFEANYKPKNDLLKALTIIATALAGAAAINHSWVAEHQDIAMVLVFALGYAGIIFEESLAFNKSGVGLLMAVCLWVIRSIGAPSTDVAVQELSHTTAEVSEIVFFLLGAMTIVEIVDAHQGFKLVTDNISTRNPRTLLWVIGFVTFFLSSILDNLTSTIVMVSLLRKLVPPSEYRKLLGAVVVISANAGGAWTPIGDVTTTMLWIHGQITTLNTMQGLFLPSVVSLAVPLALMSLTSEANGSSQKSSSLLSSEQMAPRGQLVFAVGLGALVFVPVFKALTGLPPFMGMMLGLAILWILTDAIHYGDSGRQRLKVPQALSRIDTQGVLFFLGILMSVGSLESAGILRQLANYLDANIPNADLIASAIGVASAIIDNVPLVAATMGMYDLTSFPQDADFWQLIAFCAGTGGSMLIIGSAAGVAFMGMEKVDFFWYFRKVN

SEQ ID NO: 52269 - protein, 261 aa, Oryza sativa
MDISGEQHHDIRHDIEKRRLDAHGNVIEARKEGIGGAKIESPLQKHGGRLSKGEEYCGTCYGAEESDEQCCNSCEEVREAYKKKGWALTNPDLIDQCTREDFVERVKTQQGEGCNVHGFLDVSKVAGNLHFAPGKGFYESNINVPELSALEHGFNITHKINKLSFGTEFPGVVNPLDGAQWTQPASDGTYQYFIKVVPTIYTDLRGRKIHSNQFSVTEHFRDGNIRPKPQPGVFFFYDFSPIKVVTMERNSYVVMFIFLFL

SEQ ID NO: 52270 - protein, 451 aa, Oryza sativa
MDDENGLELSLGLSLGGTSGKSKARDAPLEPKAEPQVEESSSKGVSQTPEAPFVHYYQTNAENQEHSSKQRHSPAAPPFGNFWGQPGSSSVPVADGSNEQKPVSSKRKLLSEEISFQKKPNTAAEQPDAFSKSSDGGVKNAPISISTDDGSTGENEDVAESEAEGSNSWLVAQREDSAKGSVVNRGSDRKRSSDDAAVGFQGKRQPSFSGSESSSGKLPQGNPLSLQASNVVAVPYQVPSQVSAPPSITNASNFTPVCTVQLRPPTNNGLAVTMGSTSQVAFGYPAVQLPTLETSSSWAFGAPPQAMSSFTAKDKVERAGISQADDGKKTQEAGASSSALVEDDKKSDRALPLMGSAIRPGIAPNVKFGGSGSYPDLPWVSTTGTGPNGRTISGVTYKFGRNEVKIVCACHGTHMTPEEFMRHASADAPGQENSATLPAFPVGNQAASAQN

SEQ ID NO: 52271 - protein, 291 aa, Oryza sativa
MDERIPPPAFFQFLPSGAHSSPHHQSPLRSPASERERYLAELLAERQKLAPFMQVLPFCNRLLNQEILRASSLPPNPNFVEPERVNHGSPLRLTGHPMNGQPMDLEGWSGMQTEMGVLQSPSMGWNVAPGVAGSPVVKKVVRIDVPVDKYPNYNFVGRLLGPRGNSLKRVEATTQCRVYIRGRGSVKDSVKEDKLRDKPGYEHLNDPLHVLVEAEFPSDIVDVRLNQAVAILEDLLKPVDESMDYYKKQQLRELAILNGTLREESPSPHLSPSPSVSPFNSTGMKRAKTGR

SEQ ID NO: 52272 - protein, 462 aa, Oryza sativa; identical to SEQ ID NO: 36545

SEQ ID NO: 52273 - protein, 255 aa, Oryza sativa; identical to SEQ ID NO: 30542

SEQ ID NO: 52274 - protein, 342 aa, Oryza sativa
MRKKEPILFSQKFPSADPLALDLLQKLLAFDPKDRPTAEEALAHPYFKGLAKVEREPSCQPITKMEFEFERRRVTKEDIRELIFREILEYHPQLLKDYINGTERTTFLYPSAVDQFRKQFAHLEENGGNGPVIPMDRKHTSLPRSTIVHSTPIPAKEQPRIGPSRDKPSDEPYSNPREFDRFSGNAPRTSQAPQRVPTARPGRVVGPVLPYENGATKDSYDARRLAMNSGYPPQQQIPQAYGYYQIPGKSACSELSQAERYTLHQQAYTCANSATVTDVALDMRAPPFHLSGGPKSDSSERLAAETNLYTRSLNGLAATAAGVAASAHRKVGVVPYGMSRMY

SEQ ID NO: 52275 - protein, 286 aa, Oryza sativa
MGLLNDILANCVQLTDFRVAFSSYYRAKVRIYAPSSKLKNLQVDRCNFGKIYLICLPCLETFVCRGRPTKLSYGEVPQLRHVRLDYIQTEDNDIDDESGTKRTYPPSKFFKKIPKLDSLVLQFKGTQMWIEPFVVLSEFSQLKKLFIANVPVNWDILWILLLLDATPALESLHVHIDNNSEDRTAGDLCASLDVGVQQDRYRHLKELVVAGFDGLGWQAGFVRLIMKRSPLLRRVHLLDGEVRDDEGELGDLQIVPRHREWHECERAEVLDDLTTGFRWPPQIILE

SEQ ID NO: 52276 - protein, 86 aa, Oryza sativa
MALVMSLPSLNTETDIGASWHPLSKCRDVFELLENLGRQPLIKRQILRRGCPSVVRCLIGKEKFHSLMGILNMNLIVQVIERSFKK

SEQ ID NO: 52277 - protein, 395 aa, Oryza sativa
MTDSLKEALAELYVINSQYDKALSLYAELLKPEVFEFIEKHNLHDAIHDKVVNLMILDSKRTVNLLIQHRDTIPPNEVVGQLLHASKSCDKRHLLHLYLHALFETDMNAGKDYHDMQVELYAEYEPRMLIPFLRTSQHYRLDKAYEIFAQKELVREQVFVLGRMGNAKEALSTIINKLEDIQEAVEFVMEQHDDELWEELIRQCLQKPEMVGMLLEHTVGNLDPLYIVSLVPDGLEIPRLRDRLVKIVTDYRTETSLRHGCNDILKADCVNLLVKYYHEARRGVYMASMDEEVTGTRVAEGSSRANERSSSLRALEIKSRTRCGARCCLCFDPLSIQDISVIVFYCCHAYHTSCLEGGLDLMKSNSSTQDSDEDDEGTPSGESRMRCVLCTTAAA

SEQ ID NO: 52278 - protein, 39 aa, Oryza sativa
MICKPWMIEYSLVQILILPSSSSACTSPAMLLYLVHDFM

SEQ ID NO: 52279 - protein, 447 aa, Oryza sativa
MPPRSSDRGCPRSPSPAAMEHGFDRHCVVLGGMPKKRSRLELDAGVSLWAGLQPDILGIVLHFLPCLADRARMRSVCRHWRASANGHVLPPPLPLLMLPGFKFSSLSDKGDLMPVRCVPVPKEVAADDLRCVGYFDGWLVGVTPNKDRSDEYNRDADGDCFLVNVFSRKVIRLPQLCHMRYNFPAYSSKTLRIINGSGEVYFRVNDIYTMSLCNVALSASPDSRGKYIVAASSDHKCASKLALWQPGMISWHICAGVDIDGPRDLTFYLGKLYVLQRYKIRLFAFEVGEDNGGLMVSRVKRCLSALPLHHPYQGGGAISCNMVVWRGELLLIIRHYSDNYRDREVLKVEVFALDVNTNPYGLTEIHSLNGDCIFVGLGGCKSFPAGLHHGVEGDHIYFVPDDWKPYDTFVYSMRDGKMRSFAVKLLASDFDVDQLSRDFPVWLLPTE

SEQ ID NO: 52280 - protein, 842 aa, Oryza sativa
MEALGDMEGEEGQRRQQQIRVVRCPKCEKFLPELPNYSVYVCGGCGATLQAKKNSASENSSEKSDGGHVKYLEVLESSPDNKGAASKDTCEAAQEGEAKNGEAKAEERQVLLDRMAACDDSRIPREPNALKLEASLRDDSREIREAKYRRIRSEDKGEAKHTVRARDRSPRSVVDAIPPNAYPAEGPSDYHIKSRFRHTNGEQADMRNLEGLNRVNGLEKDRADLLRMLDELRGQVQRSCEITNKPSGSTSTDKAVDASGLYNPRERLSRLRHGSPQLQRSGSQQSPSLNGQAPCIPQAYAPGTAQQDLHGYGEPMAHMGAPSYPVGTYPWRNFDNYFYGQYDPDPLISYHHDGFYHQPACSCLHCYHREFLPVQGPPLGFNHRRVPPYVMNNPRVYPVDGPAMFGTQNYNSRVNASMQRNHMRAAMSKKPAQTCEPIACGAPFTICYNCYEVLQLPKKSPVPGKDEYKLRCGSCSHALVVKLDGSRLDVSAPSPISHISGGSKISSNDGQGSNANSAPHERVLPLYSFSAASHGSQDLPSNSSEAEKMQGISSSCSISEDENSPARSNSQRDTPGSRDLHPEAEVSTRVPSLHLRDHFGYSPSEKVVDGSGKGSRSTRSEHEKAVLTESFKQNTVKDVSVVNIMDLSDDEYDDPDYMQDRGDVAQPVDHPRAVKTGDSFFTNLIKKSFKINNGMGNGRAKVFINGYPISDRAVRKAEKIAGPIYPGEYWYDYRAGFWGVMGQSCLGMIPPYIPELNYPMPKKCAAGNTGVFVNGRELHQKDLDLLVGRGLPDSPGRSYRVEMSGKVSDEVSGEELYCLGKLAPTVEKMKRGFGMRVPRIIP

SEQ ID NO: 52281 - protein, 319 aa, Oryza sativa; identical to SEQ ID NO: 31946

SEQ ID NO: 52282 - protein, 261 aa, Oryza sativa
MSGVGFSKIDGNSQQEEEEKEADDLDRDLGMMREELEREVLNTWLWGKDMDSILNEESEWQGTLPGWACPREDNYQSESEFSVDPDECDSFDGYWYEFRYEDGNPYYAAEREERWENQVMEQMKFTVSIAKQRQNDFFCPIFEGSLHVEGPCHLDPDILSTEHLLPQLPKWKNRWVNGYNHRNEPCRRAIQVYDLDVSSPHDEPMEIYGIFAFRDVRNNQQRNHVFQYSRDKPYKLRPVRDFMTKFVLFIPFVLKGSPPFL

SEQ ID NO: 52283 - protein, 122 aa, Oryza sativa; identical to SEQ ID NO: 46427

SEQ ID NO: 52284 - protein, 577 aa, Oryza sativa
MYRAAASLASKARQAGSSARQIGSRLALHRNYAAKDIKFGVEARALMLRGVEELADAVKVTMGPKGRTVVIEQSFGAPKVTKDGVTVAKSIEFSNRVKNVGASLVKQVANATNDTAGDGTTCATVLTKAIFAEGCKSVAAGMNAMDLRRGISMAVDEVVTNLKGMARMISTSEEIAQVGTISANGEREIGELIAKAMEKVGKEGVITITDGNTLYNELEVVEGMKLDRGYISPYFITNQKNQKCELDDPLILIHDKKVSNLHAVVKVLELALKKQRPLLIVAEDVESEALGTLIINKLRAGIKVCAVKAPGFGESRKANLQDLAILTGGEVITEELGMNLENFEPQMLGTCKKVTVSKDDTVILDGAGDKKAIEERAEQLRSAIELSTSDYDKEKLQERLAKLSGGVAVLKIGGASEAEVGEKKDRVTDALNATKAAVEEGIVPGGGVALLYASKDLDKLQTANFDQKIGVQIIQNALKTPVHTIASNAGVEGSVIIGKLLEQDNTDLGYDAAKGEYVDMVKSGIIDPLKVIRTALVDAASVSSLMTTTESIIVEIPKEEEAAAAAPAMGGMGGMGF

SEQ ID NO: 52285 - protein, 815 aa, Oryza sativa
MRPDARLDAAVFQLTPTRTRFDLVVIVNGRKEKIASGLLNPFLAHLKVAQDQIAKGGYSITLEPSSGVGAPWFTRGTVERFVRFVSTPEVLERVTTIESEILQLEDAISIQSNDNLGLRSVEDHGGKLTESNEGTRANHSPDADKAIVIYQPGSQPTPAVHDETTTHEENSKVQLLRVLETRKNVLRKEQAMAFARAVAAGFDIDNLGYLIAFAERFGASRLMRACSQFIELWKRKHETGQWIEVEPEAMSTHSEFPPFNPSGIVFVGDNMKQNTETMSVSNGEANGEDASKAEHKSGQQMGYQAAYPPWAMHPPPYHMQGMPYYPGPYYPPYPPVDDPRYHYSGRKSSRKHSSDSKESEVLDEGSDGSSSERGSSHGHKSHKKGKRSGKKKPSVVVIKNVNVTSKKHGSSESESQSSSEDGSQDSDDTHYKKRHGKHKSSGSKKKEGAKTNFDSGDDYNNKDESSYGQDADQGNWNAFQSFLMRAEEKKTRSNDADMFSGEKAPPSRKKNNVNTADPILLAGGDSGDVYEQRGAGFDPVNGRSRAIRLQSNDELMMSGEGGRYMDGEIKEIEAGGGRYRRGTSEDFMLYGQERSMDRRSALDPLAEARYRNPNQVDKNGYAAADESFIIPLRSGSQDNVGPEYRATIDIDVELPTNTKKTSDGKAGTQLFYEPDELMPERGSEDASFGYDPAMDYESNMMVRAVKVEDSNDEDVSHSNDGDVKKPEKEKIRGTKDGSDKRKKDAILRRLSAPKTPLNDAQKRAQNMRAYKADLQKLKKEQTILFRDRGGTTEQVGGSKRVICKFRDRDDTVEQV

SEQ ID NO: 52286 - protein, 427 aa, Oryza sativa
MAQDDAPDSTTSSSSASSASAPAPSAARLNAAAPEFTPRSAAHHHHHHANPRRQHRGGGGGAYHHHQQHYQPHHHHQHHQHWQHYGEDEGDAAAAGAVGEGGIPEDVARRVVKQVEFYFSDVNLATTEHLMKFMIRDPEGFVPMSVVASFRKIRELVSERSALAAVLRTSAELVVSDDGKRVRRRVLFTEADAEEVQSRIVVAENLREEHRYPNLMKIFSAFGSVKSIRTCYPQGGIDGAGTSTGKASKIEMLFANKVHAFVEYETVEDAEKAVSEFSSGRSWRDGIRVRSLLGCLKQAMGQGRRGGDEVDAADEDDPETTDHPQDYETEDASQISEAHLDHQADDGYHDKGGMRHGRGRGRGGRGRGRGQYYGHSRDANHPIGTPPSNHSALADHPSKPPPGPRMPDGTRGFTMGRGKPLNPTNAV

SEQ ID NO: 52287 - protein, 972 aa, Oryza sativa
MDGFGLSSTHSAVKSLVGRLTDVLSDQVQLLGGLRREVQFIRDEMESMNGFLLNHARRGRMDHQLQAWMNQVKDLANHSQYCVDQYLRCLGTTSHRSPGGLWGSVRRLPRFVSTLPARYRLAIQIQDIKIRVVEVSQRQQRYPLHGTATEQEPQSGMASDHSQQAFLTGDSEADQQEHLRRRILAVDDSGLFKEAADELTSWLTVEGDGRSDLRIIPIVGSRGMGKTTLAEQVYKGYSSRLADHKAWISVGSNQSPQQVLRDILAQIVGLHANNLQDMGTWGNSQIALMIQEQLEGKRFLIVLDDVCSESLWKDIEASLHCGNSAPSAILVTTSLPEVAQSFCPYRIYDLRYIQEEHNRSLVDFFLVRAANFISDNGHGKASLKEEVLRSILVKCSPCIFSMKMLLRFLYANPNKTLQELHDFSNSLCFCSPLHLSSWLSNAEKMLTFCYNALPCDYRSCLLYLTIFPNDHNIRRTSLLRKWIAEGLIAERDGLSAFDVANRCFDALLAQRFVLPGDVGNSGKVNSCRVHNLVRDFIAWVIRDDNFVYTKLPVDLAHRLPIHNGERLQQVSRIKLRASHFDDCWSMTRCCFTTKSVDPLAGISMLLRSIQESAQLGLRLNVLDLEGCKGLEKYHLNSVCKIFQLKYLSLRNTDVSHLPKKIDKLQYLETLDIRQTQIKAFPGKHFILPGLKHLLAGCTNCPSKKNNLMEKESCSFSTVLMPQKIVRMGKLEILCYAEVSSGLTGLMGICQLRRLRKLGVLLQGNAACNLDYLFRQIDMLDRSLHSLSIRMERLKLAKDDARKRDDMVPASFPFSPPKFVQKLNISGIRSALLGWIGDLHQLSKITLHETSLTEHVLGILGQLGSLRCLKLQCNSTMGSSLSFRSGAFRNLVALVVQDNNLLDIIFDYGAAPRLERVILSIAAIDSLSGVQHLQQLKELELHGSARNIGEVEQAIAGHHNNPVFRHEQWNDLH

SEQ ID NO: 52288 - protein, 220 aa, Oryza sativa; identical to SEQ ID NO: 35721

SEQ ID NO: 52289 - protein, 955 aa, Oryza sativa
MVIASGAIDRRHLSPFTPTSDDSSSSFFSQDLVPTERQVGFWNSESMVDHKGSKSVFASPLEKIQPNGANHAGDPETPGGQAFKGLDILSLSNLMRQENASGSPSLSWGEILTNPISRLGLSTRETAFVEPTTADQHVPGYGKGLSSSSLSEVFSGKSREIVSGVLCQSTGTHTSIYDSDEPLESMEAIEAQTIGDLLPDDDDDLISGIADGFEFTGMSTNQDDADEDIFCTGGGMELENNDSVKGDKVQDGSFKSQISSGHSINKQPSRTLVVRNITANIEDSDLTVLFQQYGDIRMLYTSFKHHGFVTVSYYDIRAAQNAMRALHSKPLGLMKLDVQFSFPKENVPGKDIDKGMLVVSNIDSSISNDDLLQMLSVYGDVKEISSSPISCTKKFVEFYDVRAAEEALHDLNKGGISGPKFKVELSQHGEAGSCLRQQHSREWKQDSLPHQPKNSSPGTIGKLGTKCQDNSTVHNLFSPVNQQLESPTQCISTTGPQILSSPIRIKSTLQHNNQASVGDLSGPLGQGNFGRGIQTLHPRSLPEHHNRICNNSKSMTVSGRNASSRQDGVDHNIQKVGPAGFCGHSFDQNNEAFGFTEIGSCPLHGYHYTWNHTNVFPQSPSAPILWSNLQHPMHVHSYPGVPPHMLNTGSYPMDQHHLGSAPDNGGSFGNVHSVHPGSLGSIGLHGSPQLYPSELSAFASSRGNFREALFSPVGGGFQSLQQMCNAINGRNPMIHVSTSYDATNDRMRSRRHDGNPAQSENKRQFELDIDRIAKGEDSRTTLMIKNIPNKYNCKLLLAVIDENHRGTYDFIYLPIDFKNKCNVGYAFINMTDPQHIIPFYKTFNGKKWEKFNSEKVASLAYARIQGRSALIAHFQNSSLMNEDKWCRPMLFHKDGPNAGDQEPFPVGNNVRSRAGRNRSLISLDTKDASPSSSPDQESNSVGTANSTCRTTLEQT

SEQ ID NO: 52290 - protein, 317 aa, Oryza sativa
MAVARRWQWWLKLDGGKLMPLVSLATSNDDVKLIGSACNESCHAWTKIETAPLGPMRYTDRIYNEHEALRMRNSVNILSVKILSSDVGFPINVYGTVIARDSLDEKCIYLFRRPRDDCQLINSKDDSLILTGPTRGLVLQDAVYFEVDLRIKDDRLRGKKKEHSKGLLMIDGIRRTIKVKTEVENDTFVGKLGTVELRYAVIKDAVEATVEIKVVEGYFCGEVAACTTNIQDKVVLLDSRTCCVMADNLDVQLSRRVMAVHNKEKLLLTVVNQDDEVPTGCVTQTIDFTPKFNGSDVTEVTCGSVKMLVKVTWSLMV

SEQ ID NO: 52291 - protein, 50 aa, Oryza sativa; identical to SEQ ID NO: 52099

SEQ ID NO: 52292 - protein, 164 aa, Oryza sativa
MPSLGVSSIGVSSVSLLNAVASHCQLPLVSYLWEMGSDGVLLAGVELVLVSGEHSGQRGCRFFWCVAFEPYETAHEPAAREAVRFLQSIYGFVVHDYNFRYMVSYREIAASAIDLAIAASTCLAHMRAPHDLHCFRFESLFREFCSVWFAFVAEEHNLNHFGWM

SEQ ID NO: 52293 - protein, 475 aa, Oryza sativa
MYMDMRCLYFQKALLESGTLGAKCNTQMVIPHLTENYGASRDPPEKQAPMCTVHSFPHNIDHCLTWARSEFEGLLEKTPGEVNSFLSNPAQYAAAMRKAGDAQARELLERVSECLGKERCSLFEDCIRWARLKFEDYFSNRVKQLTFTFPEDAATSTGAPFWSAPKRFPRPLQFSVSDPSHIHFIMSASILRAESFGIAIPDWAKNTSKLADAVSEVAVPQFEPKKGVSIVTDEKATSLSSASVDDVSVIDDLLAKLEECAKRLPPGFQMKPIQFEKDDDTNFHMDLISGFANMRARNYSIPEVDKLKAKFIAGRIIPAIATSTAMATGLVCLELYKVIAGEHPIEDYRNTFANLALPLFSMAEPVPPKVMKHQDMSWTVWDRWSIKGNLTVAELLQWFSDKGLTAYSISCGTSLLHNNMFARHKERLNKKVVDVAREVAKVDVPEYRKHLDLVAACEDDDGNDIDIPLVSVYFR

SEQ ID NO: 52294 - protein, 469 aa, Oryza sativa
MPPTMLASVPTRPRSHPFRRRRGAAAAAPPLLPDQIAAAAAAAAKRPAESSTSASSCFHSEVISATSTTCPTSLAAAQRPEKRPRYQDVDEEQPAASECSEIIGGARPRAAEVEVSESSCLASVLESYLACPEQLANDAETTAYSSAREDLTLSETEEEEEEEEVRSGPCICTDCSFSPLHESSSSSDDDNAVPSPTFSLFLALAEQFVPFTHPKTPTATDVALQAGEGKRFEDLDNEVSYERFRRRERRGVVARDYIEVYSSMLGSYGRAVVEQRVVMVNWIMEHSQAMKLQPETVFMGIGLMDRFLTRGYVKGSRNLQLLGIACTTLATRIEENQPYNCILQKAFKVGINTYSRSEVVAMEWLVQEVLDFQCFVTTTHHFLWFYLKAANADDRVEDLAKYLALLSLLDHKHLSFWPSTVAAAVVALACLATNNESSCHLVMETHMRTKNDDLPECLMSLEWLTNYAS

SEQ ID NO: 52295 - protein, 160 aa, Oryza sativa; identical to SEQ ID NO: 29318

SEQ ID NO: 52296 - protein, 304 aa, Oryza sativa
MSSSTSARDDEAPDLVCQIDCVHGMVDALSCVRWKRHQDAVLELSEHGIVLIVEESGCLQAKVYLKRELFMEYEYAAEGRPRFGLSLGLLVDCLNTFSAPGHSSPVEIRYPGPDMQLLLKSVGSPDSCMYAEIRTRIPDTISWDYHFEHAGNTPVTFTVKSAVLKESIEDLEWPGSSIQIQMQPDPPSVLFKGEGHGDLQIEFPYYANTDLLIAFQCDHETSYRYKYKFLRATTSNFPNSIVKENRGSKVTIGRGGMLKIQHLVSVARPGMQNFRNVAGGAQQPSRIAYIEFFVKPEEYEINDA

SEQ ID NO: 52297 - protein, 710 aa, Oryza sativa
MEAAALSTVLCVLALVVADADHHVVHVQGRRHRQCQPFSCGHLSNITHPFRRRGDPRRCGVSSYELDCSSDDGKATIRINTGKYYVSSIDYTASIFWVVDANLQDDANSSCPLPRSDQLPYVGLGIPGSHDSWDLGLDDMITWVGFVNCSQELITNSSSKYQPMNCLTTTSSYVYYMLPSFGAPSIQDIEPSCGYLAMTPIGGGSNGNSINLSEYEDVVKSMRGGFAVKFPTYGGPWTTWYGLIKDCLNESVSLADSHDNPLPRVGIKDRIIDILSIDLRFWGCMIGISRRYYLDMRLSISDMIRGVDHSLYHKLFIIYTLCLVKWIAVLCRFVFAPLVVMIFLTRKYWKTRIAIDAVEKFLRMQDMLGPKRYAYTDIIAITSHFRDKLGQGGYGSVYKGVFLPGDVHVAIKMLDGNSNCNGEDFISEVATIGRIHHINVVRLVGFCSEEMRRALVYEYMPRGSLNKYIFSSERSFSWDKLNEIALGIARGINYLHQGCEMQILHFDIKPDNILLDDNFVPKVADFGLAKLYPREKSFVSDRALRGTVGYMAPEMVSRSFGVISDKSDVYSFGMLLLEMAGGRRNADPNANSNASRAYYPAWVYDQLIADQQVDEISNVADMHELERKLCLVGLWCIQMKSHDRLTMSEAIEMLEGGVDALQVPPRPFFCDGDGIGNGMPPPQVMDSYFHSSELTAISEEDDGISELASS

SEQ ID NO: 52298 - protein, 245 aa, Oryza sativa; identical to SEQ ID NO: 32403

SEQ ID NO: 52299 - protein, 284 aa, Oryza sativa
MRDFASCLSQSGVQVAHSSSPGGQNMVQCTYLARLRGKSCSVTVTWSKMTMGQALSVAVDDSSNRCLCKAEIKPWLFSKRKGSKAMEVDGGALDIVWDLSSAKFAAGPEPVEGFYVALVCDLEAVLVLGDMRKDGDHRVSSDVLASNAVMIARKEHVYGKKVYSAKARFLDIGQLHHITIECDTSGLKDPSLEIRIGKKRVMQVKRLAWKFRGNQTVYVDGLPVEVLWDVHDWLFGSSNKCAVFLFQSGQSMEKLLSRSCSQNEKELQAHRFGFTLILNAWKTE

SEQ ID NO: 52300 - protein, 284 aa, Oryza sativa
MEVRTVKVSNISLNASKREITEFFSFSGDIEYVEMQSESERSQLAYVTFKDSQGADTAVLLSGATIVDRSVVITPVVNYQLPPDARKQSAGEKSSSAESVVRKAEDVVSSMLAKGFVLSKDALNVARSFDERHNILSNATATVASLDRQYGVSEKISLGRAIVGSKVKEVDDRYQVSELTKSALAAAEQKASIASSAIMNNQYVSAGASWLTSAFGMVTKAAGDMSSMTKDKVDRAEEERKAIMWEERNGLVSDYAKIHLDEPSSWEPAVLPLESVDEQKLQAV

SEQ ID NO: 52301 - protein, 880 aa, Oryza sativa
MAVGDALRRLCEEARWSYAVFWKAIGAADPVHLVWEDGFCGHASCSAGSEASEAGCESGGAVCTLVRKIMASQVHVVGEGTIGRAAFTGNHQWIVHETANDHGLRSEVAAEMNNQFRAGIKTIAIIPVLPRGVLQLGSTSVILENISSVQQYKKLCCQLNNRSSMVASASAKNDLSQKVQSRSLHGLPSIHPYEQCYGHDARALSSSTSANTGRNTSLLKVAQRNDQAIREQVLYAPDMRFRQQLPYSDRRVDINTHSSAMSSGFISSISASVEKYPLLTNNIGQVEHGNMEESSGPRNVLLKSLSCRNPVVHENTNTSLFHGGDEVRAFLNSHGSFDFLQAGPRVVEANLYNNGTSSQVLDQRCSSTSGMAGYKPSVSYKFPHSAQFIVKMENPRRQSFQDPAAPSSGSDVQVSSGLKTTTRQFNPEHMCQNKKTNEVNDSSAAVSTQDVKNMDRHKILDISNERTSSFVMDPSTENDLFDIFGTDFHQLHRSLDGDLSWNTAKPQSSDRDAPESSIYLDSSPAFGAQEDEFSYSGIFSLTDTDQLLDAVISNVNPGGKQISGDSASCKTSLTDIPSTSYCGSKETKQCKSSGAPPLLIKNELAVSNFVKQPCFLEKAEDGCLSQNNGVQKSQIRLWIESGQNMKCESVSASNSKGLDTANKANRKRSRPGESPKPRPKDRQLIQDRIKELRELVPNGAKCSIDALLEKTIKHMVFLQSVTKHADNLKDSNESKIHGGGENGPLLKDYFEGGATWAFDVGSQSMTCPIIVEDLDRPRQMLVEMLCEDRGIFLEIADFIKGLGLTILRGVMEARKNKIWARFTVEANRDVTRMEIFLSLMRLLEPSCDGGGGGVGDNPNNVKIPPGIVQHPVIPATGHLR

SEQ ID NO: 52302 - protein, 681 aa, Oryza sativa
MHLPVFLDDPRRLLSSSAAASASARTLARLHALLIVSSSASHTLISSLAAAYARAGDLAAAESTLTATAASSSIAAWNAIIAAHSRRGSPASALRVFRALPPAARPDSTTFTLALSACARLGDLRGGESVRDRAFDAGYKDDVFVCSSLLHLYARWGAMGDAVKVFVRMPRRDRVTWSTMVAGFVSAGQPLDAIQMYRRMREDGVKGDEVVMIGVIQACTAARNVRMGASVHGHLLRHGMRMDVVTATSLVDMYAKNGLLDVACRVFGLMVHRNDVSWSAMISGFAQNGQSDEALRLFRNMQASGIQPDSGALVSALLACSNIGFLKLGRSVHGFIVRRFDFNCILGTAAIDMYSKCGSLASAQMLFNMISDRDLILWNAMIACCGAHGRGQDALTLFQEMNETGMRPDHATFASLLSALSHSGLVEEGKLWFGRMVNHFKITPAEKHYVCLVDLLARSGLVEEASDLLTSMKAEPTVAIWVALLSGCLNNKKLELGESIADNILELQPDDVGVLALVSNLYAATKKWDKVRQVRKLMKDSGSKKMPGCSSIEIRGTRHVFVMEDQSHPQREEIVSKVAKLDLEMRKMGYIPRTEFVYHDLEEEVKEQQLSYHSERLAIAFGLLNTGPGTRLVIIKNLRVCGDCHDAIKYISKIADREIVVRDAKRFHHFKDGVCSCRDYW

SEQ ID NO: 52303 - protein, 282 aa, Oryza sativa
MIQCFIKRDKSKSTYHLYLCLSTAVLADSGKFLLSAKRHRKTTCTEYVISMDADNISRSSSTYIGKLRSNFLGTKFIIYDTQPSYNGAVIPPVGRSSRRFNSKKVSPKMPSGSYNIAQVTYELNVLGTRGPRRMHCVMHSIPASSVEPGGIVPGQPEQIVPRAFEESFRSTTSFSKSSIMDRSMDFSSSRDFSSARFSDIAGGTINGDEEGQNKERPLVLRNKAPRWHEQLQCWCLNFRGRVTIASVKNFQLIAAPAQPPAGGSNSVTTCSTRAGQDYSTVW

SEQ ID NO: 52304 - protein, 203 aa, Oryza sativa
MSKSAPEIPSNPPRIPLHFTLTFPGDGRRRRRQGGEEGGGAEAGRAEEEAGVALRQGRAPVPRRPHRPLPQEGPLRPARRHRRPRLPRRRPRVPRRRGAGARRERGAGQQEEPDHPEARAAGDPQRRGAREAARRGHHRARRRAAEHQPGAAPEEDRGEGRQAGQGVQGQSRQVPQEAGALLASCPSIHWSLYMQYLVCSIRD

SEQ ID NO: 52305 - protein, 169 aa, Oryza sativa
MSTVKGQTRRERPRGARPHGLTKQKRQEIKEAFDLFDTDNSGTIDAKELNVAMRALGFEMTEEQINQMIADVDKDGSGSIDYEEFEHMMTAKIGERDSKEELTKAFSIIDQDKNGKISDVDIQRIAKELGENFTYQEIQEMVQEADRNGDGEIDFDEFIRMMRRTGYGY

SEQ ID NO: 52306 - protein, 797 aa, Oryza sativa
MPAFRDVIDVPLVVRRLHKSRSEVRKELGIKDDVKVVIFNFGGQPAGWKLKKEWLPDGWLCLVCGASETQELPPNFIKLAKDAYTPDLMAASDCMLGKIGYGTVSEALAYKLPFVFVRRDYFNEEPFLRNMLEHYQCGVEMVRKDLLTGHWKPYLQRAMTLHPCYDGPINGGEVAAHILQDTAVGKKYISGKLSGARRLRDAIVLGYQLQRAPGRDVGIPDWYSVSEKEIGVRPAPTYHEVNGSAESSFEDFEILHGDIQGLTDTMAFLTSLSGLVGNDPRSPEKQSRERVAASVFFDWEEEIYVARAPGRLDVMGGIADYSGSLVLQMPIREACHVAIQRSNPMKQKLWKHTQARQLANGRAVPLLQIVSFGSELSNRAPTFDMDLSDFMDGDKPISYDKAKEYFSQDPSQKWAAYVAGTILVLMTELGVVFTDSMSILVSSSVPEGKGVSSSASVEVASMSAIAAAYGLNIPPRDLAILCQKVENRIVGAPCGVMDQMTSACGEANKLLAMICQPAEVKELVSIPTHIRFWGLDSGIRHSVGGTDYGSVRVGTYMGRKMIKCAASDLLSESLPSCPPIQSGNTNSDEYEEHGVDLLKSEASLEYLCNLPPHRYEAVYARDIPEIITGDAFLEKYGDHNDAVTTVDPKRSYCVKAPTRHPIYENFRVEAFKALLTAAKTVEQLSALGELMYQCHYSYNACGLGSDGTDRLVNMVQEVQHRKTSQDGGPSLFGAKITGGGSGGSVCVIGKNCLKSSEEIFEIQKRYKAATGYLPIVFEGSSPGAGKFGYLKIRRRST

SEQ ID NO: 52307 - protein, 372 aa, Oryza sativa
MQLSFFLSEDPSYLCSVGHAVGAIVDAGKTDLLEFSLWSDVGKLTLEHCQLLRQRFMSFSHSCPVAFRWLTNLALRNLAFQESDVSHILNTCHNLKFLALCSCVSDFVVLKIDAPHSELLTLEIVTCGFDRADLIHLPNLRRVVCWDWCLPNPPIRFGNVTRLHNMSLSCSATYDQMPFRLTELISSATNLTILYLDFQDQMIWIEPQGPKLLYPVFSNVRDVYLCNIFYECDLNWTVFVLEAAARLSNFYLKLCQHPCERNRCEDSAEKVNLLWDQMSSDFKHRHLNLLEITGFAMDDKMINYTRLIMERAVNLKRIRLLDQVPCDKGNAMNGMGSTSSNKWRFPVDQGEKSLIKQKLIDGFSSSAEITIG

SEQ ID NO: 52308 - protein, 1022 aa, Oryza sativa
MVIAVEGGFVHEEEEVDHPIRYLPLGRVYSSSAPCPLPKKPRSAEDGKPPVIVYYRRRRKKPRVEGPPPSPATAPPMLHPREDDEDEEVTRRKGSLKYELLSLGQAPPALGGDGEEPARRRCLRRSGGAERRGYFSEPKRRQRQGVHKEAASSAGRRWLELEIEAADPLAFVGLGCKVFWPLDEDWYKGSITGYNEATKKHSVKYDDGESEDLNLADERIKFSISSEEMKCRNLKFGISNLNKRGYDELLALAVSLHDYQGLDPGDLVWAKLTGHAMWPAVVVDESNVPANRALKPGRLDQSILVQFFGTHDFARIKLKQAVPFLNGLLSSLHLKCKQARFYRSLEEAKEFLCTQLLPENMLQLQKSMEKGSSDANSNKDVHSCDNLSEDKTAESGGDYDEMTPIELGNLRVSKLGRIVTDSDYFHNKKHIWPEGYTAFRKFRSVKDPHVVILYKMEVLRNSDIKARPLFRVTSEDGTQIDGSTPNTCWKEIYCRLKEKQRNVASGLDRDVCQGSGSYMFGFSNPQIRQLIQELPNARSCLKYFENAGDTFRGYRAVHVNWKDLDYCSVCDMDEEYEDNLFLQCDKCRMMVHARCYGELEPLNGVLWLCNLCRPEAPRVSPRCCLCPVTGGAMKPTTDGRWAHLACAIWIPETCLKDVKRMEPIDGLSRINKDRWKLLCSICGVAYGACIQCSHPTCRVAYHPLCARAADLCVELEDDDKIHLMLLDEDEDPCIRLLSYCKKHRQPSTERPSLESNLAKPAVVVQTDAVPPSGCARTEPYNIHGRRGQKQPQVMATASVKRLYVENMPYIVSGFCQNRVGHDAISEPIQSVGFLDVAHQEAVGNVSSMIEKYKSMKATFRRRLAFGKSRIHGFGVFAKVSHKAGDMMIEYIGELVRPPISDIRERRIYNSLVGAGTYMFRIDDERVIDATRAGSIAHLINHSCEPNCYSRVISVLGDEHIIIFAKRDINPWEELTYDYRFVSSDQRLPCYCGFPKCRGVVNDVEAEGQSAKIRVNRSELFQQ

SEQ ID NO: 52309 - protein, 571 aa, Oryza sativa
MRSHEMNNSSSRYASEEERGSNSFLIESEEEEEDEEAHPHSSILLKDADSDSDSDDSSCATPRPSSYATHQWPQSYRQSIDIYSSVQSPNLSFLGTPTLSRLSNSFLTNSFRGKTPEILSNLVKPLLRPSSSSDDQQQQQQHDDDTRKSSQYLLPSRKPSLQQIPEDQKPLVPAHEVPAYQQCSYTQAVMNGINVLCGVGILSTPYAIKQGGWLGLVILCLFAVLAWYTGVLLRRCLDSKEGLETYPDIGHAAFGTTGRIAISIILYIELYACCIEYLILESDNLSKLFPNAHLTIGSMTLNSHVFFAILTTLIVMPTTWLRDLSCLSYLSAGGVIASILVVVCLCWVGVVDHVGFENKGTALNLPGIPIAIGLYGYCYSGHGVFPNIYSSLKNRNQFPSILFTCIGLSSILFAGAAVMGYKMFGESTESQFTLNLPENLVVSKVAVWTTVANPITKYALTITPLAMSLEELLPPNQQKYANIIMLRSSLVVSTLLIALSVPFFGLVMALVGSLLTMLVTYILPCACFLAILKRKVTWHQIAACSFIIVVGVCCACVGTYSSLSKIIQNYT

SEQ ID NO: 52310 - protein, 270 aa, Oryza sativa; identical to SEQ ID NO: 32588

SEQ ID NO: 52311 - protein, 192 aa, Oryza sativa
MNGALWIPILPPPVVDARYQGLCLQCGRRIKGRSNLCSISCRLLRVHTGARRGMAQNLVEFSESVGQPIHQLDQLCGQCLRSFCGVSCPNHLVHPHPQGNHAAGPDIITIERLNGWLVIDQEQLPVEFGQDIHVMVGEDGRHMLPIKRLPAEHGDGHDGLVEPDWNLCARAGCNEMFNGNAVCCCMRCFHLL

SEQ ID NO: 52312 - protein, 554 aa, Oryza sativa
MQREKEAMGIGIGIGIGIGIGTGTGAALPFGEASPWSLLGGAVAALLLVWAAQMLEWAWLAPRRMERALRAQGLRGTQYRFLHGDLTEDLRLVTAARSKPVPMDRPHDFIPRVAPLLHRALEEHGRVSFTWFGPMPRVTIIDPDLVREVLSNKFGHFEKTKLATRLSKLLVGGLVILHGEKWVKHRRIMNPAFHAEKLKRMLPAFSASCSELIGRWENAVAASVGKAELDIWPDFQNLSGDVISRAAFGVRHHEGRQIFLLQAEQAERLVQSFRSNYIPGLSLLPTENNRRMKAIDREIKSILRGIIEKRQKATKNGEASKDDLLGLLLQSNMDYYSDEDGKSSKGMTVEEIIDECKLFYFAGMETTAVLLTWTMVALSMHPEWQDRAREEILQVFGRNKPDINGVSRLKVVTMVLHEVLRLYPPVVMMNRRTYKEIELGGVRYPAGVMLSLPVLFIHRDAAAWGHDAGEFDPGRFAEGVARACKDPGAGAFFPFSWGPRICIGQNFALLEAKVALGMILQRFAFELSPAYAHAPYTVLTLHPQHGVPVRLRRL

SEQ ID NO: 52313 - protein, 354 aa, Oryza sativa
MAGSDEVNRNECKTVVPLHTWVLISNFKLSYNILRRADGTFERDLGEYLDRRVPANARPLEGVSSFDHIIDQSVGLEVRIYRAAAEGDAEEGAAAVTRPILEFLTDAPAAEPFPVIIFFHGGSFVHSSASSTIYDSLCRRFVKLSKGVVVSVNYRRAPEHRYPCAYDDGWTALKWVMSQPFMRSGGDAQARVFLSGDSSGGNIAHHVAVRAADEGVKVCGNILLNAMFGGTERTESERRLDGKYFVTLQDRDWYWKAYLPEDADRDHPACNPFGPNGRRLGGLPFAKSLIIVSGLDLTCDRQLAYADALREDGHHVKVVQCENATVGFYLLPNTVHYHEVMEEISDFLNANLYY

SEQ ID NO: 52314 - protein, 261 aa, Oryza sativa; identical to SEQ ID NO: 31083

SEQ ID NO: 52315 - protein, 440 aa, Oryza sativa; identical to SEQ ID NO: 51389

SEQ ID NO: 52316 - protein, 533 aa, Oryza sativa
MGSCCSRATSPDSGRGGANGYGYSHQTKPAQTTPSYNHPQPPPPAEVRYTPSAMNPPVVPPVVAPPKPTPDTILGKPYDDVRSVYSLGKELGRGQFGVTYLCTEIASGKQYACKSISKRKLVSKADKEDIRREIQIMQHLYGQQNIVEFRGAYEDKSNVHVVMELCAGGELFDRIIAKGHYSERAAATICRAVVNVVNICHFMGVMHRDLKPENFLLATKEENAMLKATDFGLSVFIEEGKMYRDIVGSAYYVAPEVLRRNYGKEIDVWSAGVILYILLSGVPPFWAETEKGIFDAILQGEIDFESQPWPSISESAKDLVRKMLTQDPKKRITSAQVLQHPWLRDGEASDKPIDSAVLSRMKQFRAMNKLKKMALKVIASNLNEEEIKGLKQMFTNMDTDNSGTITYDELKAGLAKLGSKLSEAEVKQLMEAADVDGNGSIDYVEFITATMHRHKLERDEHLFKAFQYFDKDNSGFITRDELESALIEHEMGDTSTIKDIISEVDTNNDGRINYEEFCAMMRGGGMQQPMRLK

SEQ ID NO: 52317 - protein, 487 aa, Oryza sativa
MAPDVEARLLAASSKPATAAAASLPRRNKYPFFCAVLASMTSVLMGYNVAVTSGAQIFMAEDLGVSDAQIEVLSGAINIYSLVGALLAGWTSDRLGRRLTIVLTNGFFLAGPLVMSLAGGYAALMAGRFVAGIGVGYALVIAPVYAAEISPASSRGLLSSLPEIFINGGVMLSYVSNFAFSGLPVHLSWRLMFAAGVVPTVFLAAGVLTMPESPRWLAMKGRRGEARVVLDRTSDTPAEAEQRLQEIEDVVAAAGSVAGNGNGGGGAWKEVATKPGVRRVLAIVLTLQFFQQASGIYSVVLYGPRVLAAAGVASNTLLLGLNVVFGVAKASSILVAMALTDRVGRRPLLLASTGGMTASLLALGSVFAAFGGARDDAAVAAGAAVAVVVAFVCAFSVGIGPLAWVYSSEILPLRLRGQGAGVGTAMNRVVSGVVTMTFISLYGAITMAGAFYLYAAIAAASFVFIYACLPETRGRSLEDMEELFHTK

SEQ ID NO: 52318 - protein, 332 aa, Oryza sativa
MDGKPPPPNPNLPYREDCWSDGETAALVDAWGRRYVDLNRGSLRQPQWREVAEAVNARPGASARRRPPRTDIQCKNRVDTLKKKYKAERARGTPSSWYFYRDLDMLVGPTLSAAAAAGGGGSAKKPSPPRGLPMMRRRLESPSRSPSPPSPTPAVALPLPNYRQASNLPSAGLLFNKMAAAAAAESDSEDGYNNPNNNYEDDEDDGSQQSASRSVSSRSGGVAAAGAGGGGVSSSKRKRGGGGGGGFGELARAVETFAEMYERMEFAKQRHAEEMERQRIKFLKDLELKRMQAFVDVQLQLAKAKHGKHPDGATEMLMSLAALPFLSTPAYL

SEQ ID NO: 52319 - protein, 504 aa, Oryza sativa
MPRTAAAAAAAPPPLLLLSAAAAIAIAIAVAVAAPDGHLVASLPGFHGAFPSKHYSGYVTVDEGSGRRLFYYLVTSERDAAADPVVLWLNGGPGCSSLDGFVYENGPFNFERGSDPGGLPNLELNPYSWSKVSNVVYLDSPAGVGMSYSLNKSDYTTGDLKTAADAHTFLLKWFELYPEFQSNPFYMSGESFAGIYIPTLADEVVKGIEKDLKPRINFKGYLIGNGATDQDYDFNSFVPFAHGMGLISTELFEDASTACHGTFWGKVNNLCQEKIDRVHWELKDLNKYNILAPCYHHPEIQELEFKNSSLPSSFRKLGETEKRFPVRKRMAGRSWPLRAPVTRGRMTMWPELGGRSLPCTSDELANAWLDDEDVRAAIHAEPKSLIGSWELYTARIEYYHDTGDSMVKYHKKFTAMGYRALIYSGDHDLCIPYVGTEAWVRSMGYRVIDHWRPWYFGGQVAGYTQGYEHNLTFLTIKGAGHTVPEYKPKETLAFYSHWLSGKKI

SEQ ID NO: 52320 - protein, 862 aa, Oryza sativa
MVSKSYSNLLGMSCGDGVDFRQPFKSLPRVVTSPGIISDPDWDTRSDGDSVGSAFSVERKIIVANLLPLNCTKDEAGQWSFSRDDDALLMQLKDGFSNETDVIYVGSLKVQVDPSEQDQVAQKLLRDYRCIPTFLPPDLQQQFYHGFCKQQLWPLFHYMLPICLDKGELFDRSLFQAYVRANKLFADKVMEAINTDDDHVWVHDYHLMLLPTFLRKRLHRIKLGFFLHSPFPSSEIYRSLPVRDEILKSLLNADLIGFQTFDYARHFLSCCSRLLGLHYESKRGYIGIDYFGRTVSLKILSVGVHVGRLESILKLPATVKKVQEIEQRYKGKMLMLGVDDMDIFKGISLKLLGLELLLDRNPKLRGKVVLVQIVNPARSTGKDVEEAITESVSVAERINLKYGSVDYKPVVLIDHRIPFYEKIAFYAASDCCIVNALRDGMNLVPYEYTVCRQGNEEIDNARGSDTNCHHTSTLIVSEFVGCSPSLSGAFRVNPWSVDDVADALHHATDLTESEKRLRHEKHYRYVRSHSVAYWAHSFAQDLERACKDHYSRRCWAIGFGLNFRVIALSPGFRKLSLEHFASSYNKATRRAIFLDYDGTLVPQSSINKAPSDELITILNSLCDDPKNDVFIVSGRARSLLDEWFAPCQKLGIAAEHGYFVRWNKAAEWESSYPNHDFEWKHIAEPVMQVYTETTDGSSIEPKESALVWHYLDADHDFGSCQAKELLGHLERVLSNEPVVVKCGHYIVEVKPQGVSKGLVVDKVIHRLMNNGKTPDFVVCIGNDRSDEDMFKSIDSMTSSSAFPAVPEVFACSVGQKPSKAKYYVDDAGEVVRLLKNVAGISSHREAVSHGRVTFRDVMDYVE

SEQ ID NO: 52321 - protein, 256 aa, Oryza sativa
MLPSLAFVGFLAWQARRSFRRLSYGRSHVVVVAYYALLWAVAVLNLLWCFLQAWQCMPDRAFSWNVLSLFTKSGMLFLEVSLIAFLLQGNETSGFESLARTFVISGAVVAADVLLKTIYVFGFGVSLFIDVDQGTGGKWGLWFLHKLVLTGVYGLIVFMYHSRWRDRLPAKPAYYNYVCAMLLLNGISLFGCFLVATGAGFGLWLYNLTSVCYHSLYLPLLYVTFLADFFQEEDMLLENVYYSEMKDAGFFDADWD

SEQ ID NO: 52322 - protein, 162 aa, Oryza sativa
MRIHPSPATTAGGSCGGKKDLRRLPHVYSKVLELPFPADTDVAVFEGPDAFHFVVSAAAALAGEVRVRTVRIHPGVVRVVVQAGGGGVHDDGDDDDMELDKWRSRLPEASCPAMAVAGYVNGQLVVTVPKGRGGGEGDNDGGEEAWRCCNGGKISGRLVVVQ

SEQ ID NO: 52323 - protein, 170 aa, Oryza sativa
MSASSRALSRAGFLARRGGIGILAAARCGYHTRRRLPLTAAEVVEGGGAASAAGGASTSEEAGSSSSAMARRMEEAIDGAMARMSEPEWAPFRPGTSYYAPPRPAGAARGLLALVSHAAARMGPVPRALSADEARAVDAASRGFPCTTYFIDGHFPDEVERSDVIPAEDE

SEQ ID NO: 52324 - protein, 962 aa, Oryza sativa
MNTLTGSIPSEIGNLANLMTLNLQFSNLTWGIPEEIGDLAGLVGLGLGSNQLAGSIPASLGNLSALKYLSIPSAKLTGSIPSLQNLSSLLVLELGENNLEGTVPAWLGNLSSLVFVSLQQNRLSGHIPESLGRLQMLTSLDLSQNNLISGSIPDSLGNLGALSSLRLDYNKLEGSFPPSLLNLSSLDDLGLQSNRLSGALPPDIGNKLPNLQRFVVDINQFHGTIPPSLCNATMLQVLQTVYNFLSGRIPQCLGIQQKSLSVVALSKNQLEATNDADWVFLSSLANCSNLNALDLGYNKLQGELPSSIGNLSSHLSYLIIANNNIEGKIPEGIGNLINLKLLYMDINRLEGIIPASLGKLKMLNKLSIPYNNLSGSIPPTLGNLTGLNLLQLQGNALNGSIPSNLSSCPLELLDLSYNSLTGLIPKQLFLISTLSSNMFLGHNFLSGALPAEMGNLKNLGEFDFSSNNISGEIPTSIGECKSLQQLNISGNSLQGIIPSSLGQLKGLLVLDLSDNNLSGGIPAFLGGMRGLSILNLSYNKFEGEVPRDGVFLNATATFLAGNDDLCGGIPEMKLPPCFNQTTKKASRKLIIIISICRIMPLITLIFMLFAFYYRNKKAKPNPQISLISEQYTRVSYAELVNATNGFASDNLIGAGSFGSVYKGRMTNNDQQVVAVKVLNLTQRGASQSFMAECETLRCVRHRNLVKILTVCSSIDFQGNEFKAIVYEYLPNGNLDQWLHPNIMGQSEHKALDLTARLRIAIDVASSLEYLHQYKPSPIIHCDLKPSNVLLDSDMVAHVSDFGLARFLHQESEKSSGWASMRGTVGYAAPEYGIGNEVSIQGDVYSYGILLLEMFTRKRPTDDEFGEAVGLRKYVQMALPDNAANVLDQQLLPETEDGGAIKSNSYNGKDLRITCVTSVMRIGISCSEEAPTDRVQIGDALKELQAIRDKFEKHVSNEGTSSQ

SEQ ID NO: 52325 - protein, 368 aa, Oryza sativa
MAASTGVVSSLLSKLATLAEQKYGDVRRIRREITFLTDELSSMNALLLKLADMEELDSQLKEWRNKVRELAYDVEDCIDAFAHHHRLSRGDADPGGLIRRAARNMKKLRASYRAADQIHELKARELGKHKLQYLDICDDDAIPDALMCSSSESDCPFPHLQKLVLSNHNIQRIPRWIGSLVNLCHLEIVVKTTRQNDLGTLGNLPCLLYLKICRLYEPVESQQLIVPNRGFRCLKELCFQCWCPLGLEFAPGAMPWVQTFRLWFMPCWKSCDHGVSVGLGIEHLLELKLVDVKTGYGCGKREVKSFEAAITAVVANHPRRPALVLRRSGERSAVRKENWTAVETNMNKSLFDSSTVRQRLQKQSRFQT

SEQ ID NO: 52326 - protein, 581 aa, Oryza sativa
MGSACSRKRGQLLVDEEDLYSARFSKSSSFKWLLHTLPRSGSDVHRKVQGPVPVRCPSLMELCVAKVREDIGKYSDFSLLPRDLSQQVFNELVEWNILTEELLGAFRDCALQDICLADYPGVRDAWMEVAASQGQSLLSVDISCSDVTDGGLNQLKDCINLQSLSCNYCDQISEHGLKTLSGLSNVTSLSFKKCSAVTAEGAKAFANMVNLGSLDLERCPKIHGGLVHLKGLRKLEKLNLRYCNGITDSDMKHLSDLTNLRELQLSCCKISDLGVSYLRGLSKLAHLNLEGCAVTAACLEVISGLASLVLLNLSRCGVYDEGCEHLEGLVKLKVLNLGFNYITDACLVHLKELINLECLNLDSCKIGDEGLAHLKGLLKLRSLELSDTEVGSNGLRHLSGLRNLQSINLSFTLVTDIGLKKISGLNSLRSLNLDNRQITDNGLAALTCLTGLTHLDLFGARITDAGTNCLKYFKNLQSLEVCGGLITDAGVKNIKDLKALTLLNLSQNGNLTDKSLELISRLTALVSLNVSNSRVSNSGLHHLKPLQNLRSLSLESCKVTAIEIKKLQLAALPNLVSVRPE

SEQ ID NO: 52327 - protein, 541 aa, Oryza sativa
MESGGILPPSETCAGSGSPDGRGGWRAARFLIAVGFLERIGFNGVQGNLVMYLSGPMGMSTAAAAAGANAWGGTVLVLTLVGALAADSRLGRYRAIVAAGVLHLLSLGMLTISSVMQPTHQHPVSCHDAAAACSPPPPPSPSLGRLVFFHAALYLLALAQGFHNPCSEAFGADQFTPPSDPGARASRSSYFNWYNFSSSCGYAISNTAMSYVEDNVSWTVGFAACLATTAVYLPVFLLGTAAYRAEQPIDGALLALLAKKSLSATRVWTARVFPRKDAICTERLLLAKEEEVEHGKGFVVKLLPIWVTSIVLAAVISQQVTLFTKQGSTMDRRVAVGGGVFVLPPAALQDVISATMLTVLRAYDRALVPLARRFTGHPAGITTLQRVGAGMATCCLHMVVAALVEAKRLRAASDAGLPADATVPMSVWWLVPQYALVGLSKVFGVIGLQEFFYDQVPDDLRSVGLAMSLSAQGVGSYASSALVSAIDWATTRRGGESWFSDDINRAHLDYFYWLLAALAALDVAVFVYIAKRYVYRNKDEQ

SEQ ID NO: 52328 - protein, 654 aa, Oryza sativa
MSGPKLDRTPSIRDRVEDTLHAHRNELVALLSKYVSQGKGILQPHHILDALDEVQSSGGRALVEGPFLDVLRSAQEAIVLPPFVAIAVRPRPGVWEYVRVNVHELSVEQLTVSEYLRFKEELVDGQYNDPYILELDFEPFNASVPRPNRSSSIGNGVQFLNRHLSSIMFRNKDCLEPLLDFLRGHRHKGHVMMLNDRIQSLGRLQSVLTKAEEHLSKLPADTPYSQFAYKFQEWGLEKGWGDTAGYVLEMIHLLLDVLQAPDPSTLETFLGRIPMIFNVVVVSPHGYFGQANVLGLPDTGGQIVYILDQVRALENEMVLRLKKQGLDFTPKILIVTRLIPEAKGTSCNQRLERISGTQHTYILRVPFRNENGILRKWISRFDVWPYLEKFAEDAAGEIAAELQGTPDFIIGNYSDGNLVASLLSYKMGITQCNIAHALEKTKYPDSDIYWTKYDEKYHFSCQFTADIIAMNNADFIITSTYQEIAGSKNTVGQYESHTAFTLPGLYRIVHGIDVFDPKFNIVSPGADMSIYFPYTEKAKRLTSLHGSLENLISDPEQNDEHIGHLDDRSKPILFSMARLDRVKNITGLVEAYAKNARLRELVNLVVVAGYNDVKKSKDREEIAEIEKMHELIKTYNLFGQVPLDLGSDEQGSQW

SEQ ID NO: 52329 - protein, 230 aa, Oryza sativa
MVEKASAVARKLDVSVGRCSTSPYGSGGLPSPTSPLDRAALHAPSPRGEWRHRDAGGVGLGILAALEAQEEEEARKPAVSAVAIAASASASSSAAATTTRRRAARLEVSELGCSGRCATSLCGSGAGAAAFRVAEFLACCDLCRRPLDGKDIFMYRGERAFCSMECRYHAIVSDEFQQEKDRKRRAAAAAAPRDIPSKVSAAPSTAAAEIAGSPCSGGGQIFFTTGIVAA

SEQ ID NO: 52330 - protein, 69 aa, Oryza sativa
MSHKCTEFNRSQFLSTHIRGLSVNCEKTKCGNLDAKQPCLLCDQRSAGQSDNAAYLYHRCVHVDGRSEA

SEQ ID NO: 52331 - protein, 316 aa, Oryza sativa; identical to SEQ ID NO: 28952

SEQ ID NO: 52332 - protein, 71 aa, Oryza sativa
MAVYYKFKSARDYDSIPIEGQFISVANLKERIFESKHLGRGTDFDLMISNAQTDEGWFFLASGPLCDFLYE

SEQ ID NO: 52333 - protein, 106 aa, Oryza sativa
MRPFNQNLPKAMRRVGIQARDVKVSRGEAPYGEDYGTRTARGEGSRGYSAKPVASWAKDVGRRVYAEGRRFRQSKLAPARAEEAFSGPSSLGAIGPTIARRPIRGS

SEQ ID NO: 52334 - protein, 125 aa, Oryza sativa
MASSGCHLLVLLLAFSALHANSSNHAASDTFHTCSPQADSAPNAICSYPKGYHSPNSRWHNSISSNSGHSDHHTNHSYSSCYPATNALNPNHYSIHSHHNPDDDPYHSRVPDATNPIHVLTSQNH

SEQ ID NO: 52335 - protein, 48 aa, Oryza sativa
MLVYRLLSVSTLFVIYLLPPSKKKNSTKERSVFWDGWSIMQGKGLFSW

SEQ ID NO: 52336 - protein, 246 aa, Oryza sativa; identical to SEQ ID NO: 30378

SEQ ID NO: 52337 - protein, 327 aa, Oryza sativa
MADMINYRATTMARWGWRLSLGAGIVPAVIVIVGAAFIPDTPNSLALRGRLDEARDSLRRIRGAADVDAELKDIVRAAEEDRRYKSGALRRLLRREYRPHLVMAVLIMVFFEMTGAIVVAIFTPLLLYTVGFTSQKAILGSIITDVVSIVSVAAAAAVVDRHGRRRLFMVGGAVLILCQVAMAWIFGAQLGADGGRAMPRGYAVAVVALVCTYTAGLSVSWGSLSSVVTSEIFPLEVRSAALGLGGTISSALTFMQSQSFLEMLCSFKYGAFAYYAGWLVMMTAFVAAFLPETKGVPIESMGAVWAQHWYWKRFVKLAPAKQADGPE

SEQ ID NO: 52338 - protein, 75 aa, Oryza sativa
MYHAATIRPLFCFYPPVSSWLKVTFVMNLDYHSILKISLIDKCTAMFQITFYSLISPNFPSIWQFSWCWFVCTAL

SEQ ID NO: 52339 - protein, 464 aa, Oryza sativa
MALALLSPSSASAHRLPRPISSPPLGRAASATSIGSSFFPLCSSPPSSGSCSLRRASSAGGASEPEASGATSLDADLLRRVAGAADAGEALDIVAESAGGTGGLDASDCNAIVAAALDRGNVELALSVFEAMRSGFARAGAWRWARPDVRTYALLVQRLAAALRVSDALRIIDYVSRAGISSAEEVPFGMIIRSPSCMVAVAVAQPQHGTQTVSCSKCRYQYELFSGVIMSIESEEVSMDISALDKALRFINVIKDGLPAAVHSIVIRTPSGTARTHRFATQTVELPAQEGERVTISLAAPSNVYREMGPLKISARSQGFRPGEPMSLTNHINRQVSRLLRAPSKNEGPFVFNPYLLVSALALLASGDAASAFIDPSLPRFITATAFASGCCWNSTKSSDPARDSKASTKDSRYNCCSAATFISVRHASDSSKGSETTFRKGGVDAGKNVSTREQDISMLVEVE

SEQ ID NO: 52340 - protein, 436 aa, Oryza sativa
MDSGGASDPSRQVRVRFLTKLPAPLRAPPTSIAVPADLTRMGLSEIVNSLLLAASPDHQAQPFDFLVDGELVRLPLQEFLLAKGISVERVLELEYVKAVAPRKQEDPCPHDDWVSAVDGSNPRFVLTGCYDGLARIWRDASECTHILEGHSDGITSARFINKGETEDRLHVVTASKDRSLRLFKFDTSVSVPKQIGAYKILRGHTSSVQSVAVDPSTNMICSGSWDNSIKLWSVEGSEEDGDTVSVKKRRTNSDSSGPEESLFEGSATSTFLGHTQCVSAVTWPERQTIYSASWDHSVRQWDVQTGKETWNMVSGKALNCLDCGGESSSLIAAGGSDPVLRVWDPRKPGTLAPIFQFSSHKSWISACKWHPSSWFHLVSSSFDGKVMLWDLRTAWPLASVESHKDKVLCADWWKGDSVISGGADSKLCIASGIEIV

SEQ ID NO: 52341 - protein, 89 aa, Oryza sativa
MEGSNLKSAALLEQLHVHLASGAGKELVEMIGFVYQLNISPKKLGFDEEVFIVVDLKKGVVSKGPYEGKPDATFSFTDDDFLAISSGAN

SEQ ID NO: 52342 - protein, 258 aa, Oryza sativa
MAAAAASTSLPVPRVSLPPSARPAAAPRHGLLIPGRRGCFRLRGSPAAPAAAASGSPSVPSSSPEAGSGIGDALGGVAIYSAATGEPVLFRDLWDQNEGMAVVALLRHFGCPCCWELASVLRDTKERFDSAGVKLIAVGVGTPDKARILAERLPFPLDYLYADPERKAYDLLGLYFGIGRTFFNPASASVFSRFDSLKEAVKNYTIEATPDDRASVLQQGGMFVFRGKELIYARKDEGTGDHAPLDDVLNICCKAPAA

SEQ ID NO: 52343 - protein, 296 aa, Oryza sativa; identical to SEQ ID NO: 32180

SEQ ID NO: 52344 - protein, 102 aa, Oryza sativa
MLLPVSIPNSPLGGTVKQRQKGDAEGNMAADWEGRWSYGDGGGKGLFVTYSNLCFHSASTYGLRLTVRRPPALGPWGREWRRPRLSTSSLSAPARGGSRGEI

SEQ ID NO: 52345 - protein, 92 aa, Oryza sativa; identical to SEQ ID NO: 29861

SEQ ID NO: 52346 - protein, 183 aa, Oryza sativa
MSLMRPRSSNASSTPVAAKKEKTATRWCSQSAQEKVVVVRVQGVRGQEDVVAESDKGTSRADATAAAAAAPPPVSSKRLRWWAVVLANIVFVLGGQSVGCFSAGYTTIRGGDSLWLATVVQSCGAPLTVLLLLLLYFQMGSPAPPLIEPSERWWRQSSAGAGLDGRLSPSAAGSVEKRGEEKK

SEQ ID NO: 52347 - protein, 251 aa, Oryza sativa
MAAVLRLEQVDLGKRHGVAKVVGTVVSIGGATVITLYKGLPLFNHNLNIKSLSSSSLILNWTLGCVFILGHCLSWSGWMVLQVPVLKRYPARLSVLSLTCIFGLLQFLVIAAFTEEDLSRWKVNSGSELFTILYAGLVASGVAFALQIWCIDRGGPLFTAVFQPVQTVAVAVMAAIILGDQLYSGGIIGAVLIVIGLYFVLWGKSEEKKSKNNNLQDQPVQGGGDDIRRHLLGQEDASRKDEEAAVTDELA

SEQ ID NO: 52348 - protein, 247 aa, Oryza sativa
MPLSQEDERISLEGSSNILIFLLMHIMVLMREMQLPGLGRSACLQSMHDCTLEQLDLDSAQSKFDDILNSSSLDDACDKIKSLAKTKELDSSLILLINRAWAAAKDSTTMKNEVKDIMCHIYTTTKESLKSISPPEMKLLKYLLNIEDPEERFGALATAFSPEVEHEAKDEDALYTTPNELHKWTKMMLDSYHLNKEETDFMDARKMSDPVIIQRLTLLKETIEEEYMKKYIHPEEQESEDDEDSEE

SEQ ID NO: 52349 - protein, 188 aa, Oryza sativa
MMGLASSRPPLVSAPATATARLPPHRHRRRRLYLSATSCASTNSYSSSVLSHGGTCAPRSLVAAELQSQSRPPPLAAGVSVRGDAATGLAFLLFVLAVVMSSFLSLAIFSFPTWRALKRLEIAVHKLSKVVAEEVPGTLSSLKLSCLEINDLTSQLKNFRQRLMINIFGNNSSVDARSQTGWPKRGKI

SEQ ID NO: 52350 - protein, 102 aa, Oryza sativa
MQRNFHGLEDKSPGCSNFLALVPWTPPQIATVSNWSASDSEKREFFEVPMESDETEVDSMDVEESPEANVAAIDGESLHQWQQHCMTPSSLPNPSAPVMWSR

SEQ ID NO: 52351 - protein, 734 aa, Oryza sativa
MDVELNSRALMDEALKARDAAERKFHARDVKGARRSAIKAQNLCPSLDGISQMVSTLEVLLASESKVDGENDWYRILSLSASADEEEVKKQYRKLALQLHPDKNKSVGAEGAFKLISEAWAVLSDKSRKMQYDQKRKDHPVTNGANGLYTYDKKAHKRARKNAAASAAAAAAAAAAAAEATTRPVGLDTFWTSCNRCRMQYEYLRIYLNHNLLCPNCHHAFMAVETGYPCNGTSSSFSWSTKQQQQNHKHSYSSASRTSGVPGTGHGVYQQENTYETYNNQSFQWNQYSKTNNSAGTNAYSSTASEKPKRKHEESYIYNYSSSGNEFGQERPTSGRGRFSKRRQNINNGYASVDCNGDNKETVAATAGTTVLADVGRVNGTSVEKFRSAVSGRRANVMREIFQLDTRGLLIEKAKAAIREKLQDLNISATRHIAAKGKAERKNHVDHDVKGNGILPHNPSHKFKICNSKGADVENPATDENNLEQKRVPVSIDVPDPDFYDFDKDRTERTFDNDQVWATYDSEDGMPRLYAMVQKVISRKPFRIRMSFLNSKSNIELSPINWVASDFSKACGDFRVGRYQIFETVNIFSHRVSWSKGPRGIIKIVPKKGDTWALYRNWSSDWNELTPDDVIYKYEIVEVIDDFTDEQGVTVIPLLKVAGFKAVFHRRTDSDVVRRIPKEELFRFSHRVTSRLLTGEEGNNAPKGCHELDPAATPVDLLKVITEVKEVATTEISE

SEQ ID NO: 52352 - protein, 270 aa, Oryza sativa
MAAAETSGTVAAPGRWSLHGKMALVTGGTRGIGRAVVEELAALGAAVHTCSRNEAELGERLKEWEARGFRVTISVCDLSARDQRERLIGDVADRFGGKLDILVNNVGTNIRKPTTEYSADEYSFLMATNLESAYHLCQLGHPLLKASGSGSIVFISSVAGIVALFSGTIYAMTKGAMNQLTKNLACEWAKDNIRTNCVAPGYILTSLSEGILANKEFEGSVKSRTPLRRVGEPAEISSLVAFLCMPGSTYITGQTIAVDGGMTVNGLYPS

SEQ ID NO: 52353 - protein, 146 aa, Oryza sativa
MAAAASSSSPPGTASPVLSVRIVSLDYYMAPPLPGFDFSYSHFHGGEVEEVPVIRIYGSTPAGQKTCLHIHRVLPFLYVPCKEDLLHNVEKGNSFISGLLSDLEKALQIRSSSKKKHVHGCTLVRAKKLYGYHTSEELFVKIYLYP

SEQ ID NO: 52354 - protein, 110 aa, Oryza sativa; identical to SEQ ID NO: 50886

SEQ ID NO: 52355 - protein, 54 aa, Oryza sativa
MNRIKETAEHRGIPTFVVADAGRTQVQAGSKTVLAVGPGRKADIDSVTGKLSLL

SEQ ID NO: 52356 - protein, 226 aa, Oryza sativa
MAWEEEAAVEEEYEYGEEMEGSGSEAEDVVVGQMPTVMVPKHINKRALKNKALSVSLDKKALKDFVTGFHKRKKKRRKEAQKILQEKERKKRIEERKRRKQEKEIALYGRVLSSDNADGEDVENDGDEMETDDLPEPEVKTYEDGGTKITVTTSEITPEDDDEDLGPKRITPASTGYANKSVSKKSASLGVKKKPSKRTFRNKSKSKKGDQKRGAAKGKRKNKGRK

SEQ ID NO: 52357 - protein, 472 aa, Oryza sativa
MHHARMLHMAVLRQLQVGQLGVPRGLRHAGRHGHLAGLRPRRRRRRRRRAAAAAGALPRLRVGDLRPVHGPGRGVVLPHVPRRRRVRPRPLGLPAPARRRLPRQRRLPRRPLLRPGRPPRRGQEHDLRLRALLRRRRVAPHRGRLPQPADHGGAPRRELGGEDGGVRRQLRLHLGLGVQDERLHQARGVSHRSPRSEGDGVRARRRGGAGRARHAGGGEHHRRVPRPLRDLPPRPRRRRHQQLLRQEHRHRRRARRRRRRGGRHAEAELLDGAAGGGGEGGGRAGGPRRRRPGRPGVRQPGEEDEDGERGRVPRRPRRRDGGVGAGRRRLPAEARRLLQEAGAGDAVQQVGEVGVGAVRRPEHRRRRPRCVERAGQGDPRRGHRAVVHGGAAPRAVPGGLPGDADAERRARAPAVQLLREEPAVDDDADRPWPASRQLLVRRRRLHFQMTIAACTCNGQRVQVGLTRAVASE

SEQ ID NO: 52358 - protein, 91 aa, Oryza sativa
MVLGMLPTLKSVFAWPSSSPSPAEGAPCSLSQAFFLLCMRATIILGACYTVFLFWVAFAYPRSWLEYLQLSPLFVVAVTAPTLGVVMIRNG

SEQ ID NO: 52359 - protein, 607 aa, Oryza sativa; identical to SEQ ID NO: 50136

SEQ ID NO: 52360 - protein, 308 aa, Oryza sativa
MPVRRRQPRRRETGAAERYREMGISAALSRPWDYPTACGEIAALLRIGYGDLPKAAQALVAGDVLLAFRLLPDVQTGYALSAANGLLQAVDGSLPKQKKAQAVSEFKRSVVAHKRRARVQQDPGVPHIPYDVLVHIFSFLDMRSLVAAGLVCWPWNSAANDNHLWEMNYSLFFGICHINCNSTPTAGNVQNTDYHVQNSIYQVSPDPGFNWKEAFHKKYAEQETWSSASNRALCGYCRSVIWLCDLTCATPHYCLNNGKDGVKLGPLLPHTVADYILDIADLAASSTESDDTDSDSENYPQARFWSLS

SEQ ID NO: 52361 - protein, 276 aa, Oryza sativa
MLSISPLVVESSLSPCLPWLPPEPNLITSTPTGASLPQFTPLFFNLPLPLIHCCLYSAIKDWRSLLPLQMPQLFLLFLSFSLAVEALHAFMQDESEHKHYLIVSAVTNLLVNLLGVWFFRSYARVNIVYRKAEDMNYHSVCLHVLADSVRSAGLILASWFLSLGVENAEVLCLGIVSVAVFMLVLPLFKATGNILLQIAPGNVPPSALTKCFRQITACEDVSEVCQGRFWELVPGHAVGSLDIRVKNGGDCQSVLDYVHGLYQDLGIQDLTIQTDE

SEQ ID NO: 52362 - protein, 254 aa, Oryza sativa
MISPDAARNVVGIIGNVISFGLFLSPVPTFWRICKRKDVEQFKADPYLATLLNCMLWVFYGIPIVHPNSILVVTINGIGLIVEGTYLFIFFLYSPNKKRLRMLAVLGVELVFMLAVILGVLLSAHTHKKRSMIVGILCVFFGSIMYFSPLTIMGKVIKTKSVEYMPFFLSLVCFLNGVCWTAYALIRFDIYVTIPNGLGAIFGAIQLILYACYYRTTPKKTKAAKDVEMPSVISGPGAAATASGGSVVSVTVER

SEQ ID NO: 52363 - protein, 144 aa, Oryza sativa
MPKNKGKGGKNRKRGKNEADDDKRELVFKEDGQEYAQVTRMLGNGRCEAICVDGTKRLCHIRGKMHKKVWIAAGDIILVGLRDYQDDKADVILKYMNDEARLLKAYGELPDTLRLNEGVDVDGPEDGGDHDDYIQFEDEDIDKI

SEQ ID NO: 52364 - protein, 951 aa, Oryza sativa
MPRRSASRYAAYWAADALAGDDALDFSLTKALVGVSPDSLTGAPEAVRERVALRCLQEVVSLASDGDYEATPTAGGVLSVDASRSCEDSLLQLIREIGSSGSLEKVMLLPFSQDVQKFICIKRPTLPETSFELLREVYPEITPVVLPSPVEQNGNDQHDNVSHDLENTEKTGFNTDGAQLQQDDLANLVNESNTGNLQKDAMATPDFHQPCTSENRCFDQPQEDSINAVGVNIRSPKDSPTNVDRHIQVAAEPSLATSADLLGSNTGTISEQDMIDDTTMVQSQSQGVKNPNTLHYNNGDEPLVASIQSPKDSIHEGLTIQATVSPAFDRSNDALPASTSEISQLPEFITARDTVMNSEPRINKSHPNSPKHDTVDKANQDVDYGSVGIQKAAAFLSEDRNGATQGEKSEIKDPPENTAEHTKMFEQENSVEAQLEVGCSDKVNQDIQDDGNIMTKNMVCDGLNVQTAPEPHSCRMALHNKNLVANHLSEQNIGRNTTAVEKDCCSIPTSPQVANDTRVKQPSNKRTMGNTVVETSHVHSSDDSLSGFAATGLLSMADKIPFCTQDQDANGPVEGLSEQDLCIKCGKDGQLLKCSSCLLAAHDSCFGSLATLDDSGQLYCPVCFYTKATEAYQKAKKTYSEARKNLSAFLGRKQLAEQHQQAAVGQRAANNEDHLNGCNDASKRKDNHQSEGNNLSHRDEDPTRKRKKQKTNATSDACAQEVVTEKVPVVQNSDVAPMNKHSVLQNNRKQAQVAEHEQPEENEEASGESGNDNSLHKTTHSSQTKCSPAVNQNVDADKENGLASSQQSEDSDEIEATSSNDSTKKSSPPWRKLRHRKAIYQDKDTAMPSNSKKVLGNRDQHMASPSRKRNYACPPKRYSNPIVPAGRRTKLCWTEKEEITLREAMAKFTPRDNGPIPWVQILEHGRDVFHRTRLPSDLRVKWRNMKKKSGS

SEQ ID NO: 52365 - protein, 212 aa, Oryza sativa
MGTEMATVEVEGIPFPQEITVSKPLSLLAHGITDIEIHFLQIKYNAIGVYLEKDNVLGHLESWKGEKAEELVQDDGFFQALVSAPVEKLFRIVVIKEIKGSQYGVQLESSVRDRLVSVDKYEDEEEESLEKVTEFFQSKYFKPNSVLTFHFPNTPGIAEISFVTEGKGEAKLTVENKNVAEMIQKWYLGGESAVSPTTVKSLADQFAALLSA

SEQ ID NO: 52366 - protein, 115 aa, Oryza sativa
MGRGRGVSSGGGQSSLGYLFGGGETAPAAKAKPAAAAEKETTPAPVKKAAVAAAASPSAAEKMKEIPAGIQSTQANNYFRAQGQNCGNFLTDRPSTKVHAAPGGGSSLGYLFGGK

SEQ ID NO: 52367 - protein, 213 aa, Oryza sativa
MIADEIQTGIARTGKMLACDWENIRPDVVILGKALGAGVVPVSAVLADKDIMLCIKPGEHGSTFGGNPLASAVAVASLKVVTDEGLVERAAKLGQEFRDQLQKVQQRFPQIIREVRGRGLLNAVDLSNEALSPASAYDICIKLKERGVLAKPTHDTIIRLAPPLSISPEELAEASKAFSDVLEHDLPQLQKQIKKTESAAEKQSCDRCGRDLY

SEQ ID NO: 52368 - protein, 89 aa, Oryza sativa
MASSRWVRPEVYPLFAAMGVAVGICGFQLFRNITGNPEVRVNKVGRAAGVLENHEEGRRYAEHGLRNYVRDKTPEIMPAINKFFTEPTK

SEQ ID NO: 52369 - protein, 326 aa, Oryza sativa; identical to SEQ ID NO: 32000

SEQ ID NO: 52370 - protein, 191 aa, Oryza sativa
MSKRQGPPKHQNRYAWKPNLGQKINETEPGGRFRPLSEITGVCQRCKDQIDWKRRYGKYKPIVEPAKCQKCGKRNVRQAYHNVCTACSKDLGICAKCCTCVKALVGRDLSEQESERKELEEAIRGARERERRTLLRLMNKGGGESGPSVPKIADRSREGDIFPAASLDEYAEQARQQDDSDEEEARDFVED

SEQ ID NO: 52371 - protein, 307 aa, Oryza sativa
MLDYNVLGGKLNRGLAVVESYKILKAASATEPSEEELFLACILGWGIEWLQAYFLVLDDIMDNSQTRRGKPCWFRLPKVGLIAINDGLVLRSKISRIFRRYFRGKSYYVDLLDLFNEVEIQTTSGQLLDQITTNEGRKDLNKYNVHVYRRIVEYKTAYYSFYLPVACALLLFGESLDNYAQVKHILVEMGVYFQSQDDYLDCFGEPEIIGKIGSDIEDFKCSWLFVQALERADEKQKGVLFENYGKSDPACVAKVKDLYNELHLQRVFSEYERESYEKLISAIEAQPNEAVRAVLKSFLHKIYKRSK

SEQ ID NO: 52372 - protein, 373 aa, Oryza sativa
MAEWLPVAARRLAGDLLLFNMAPKRDAKDDDDEEGKDGSPFLELPCFGSATKLSLDLGFLPLAVPVSGVFARLTDLSLDSVRFHGPCEFGDAASSRRFPSLKNLNIRNTQGLSNFIIHSDSLLQLDLRSVRGLKQLNVVAPALQVLSVFFCFADTQARSQPVADIAAPQLETLQWEDAFDPSSVEFGEMASLRCLGTYFFLVYGLEDFKNNRDCLRLLKRFRRDAISRLTLTLAFLPKDLCDFEYLMENMTMLPDIVSLNLNVLANGHAIGPSLFHVLRMCTSVRRLKLVTHISLDLEAQAVCSSDCVCDLPPNWKTEELLLKFLHEVEINNLRGTGHEIALVKWLFSWAVVLKDMTINFYHSVPESTAKEMA

SEQ ID NO: 52373 - protein, 92 aa, Oryza sativa
MVSCPEHDNCIPGAPHDGGCVERRNGYLISGPCLLHRWDEQVLKKSSSSLAVATSDSYLRGESRRSTVIRRLVKSMQFNGDEMEVDDERAVL

SEQ ID NO: 52374 - protein, 129 aa, Oryza sativa
MSSWAGPDEIFLSTSLAGFLDKKLIVLLRDGRKLLGTLCSFDQFANVVLQGACERVIVGELYCDVPLGLYVVRGENVVLIGELDREKDELPAHMTCVSEAEIRKAEKAEREARDLKGSMRKRMEFLDFD

SEQ ID NO: 52375 - protein, 307 aa, Oryza sativa
MERLQRIFGASGMGQPPTDSPLLDSSEQVYISSLALLKMLKHGRAGVPMEVMGLMLGEFVDDYTVRVVDVFAMPQSGTGVSVEAVDHVFQTNMLDMLKQTGRPEMVVGWYHSHPGFGCWLSGVDINTQQSFEALNPRAVAVVIDPIQSVKGKVVIDAFRLINPQTMMLGQEPRQTTSNVGHLNKPSIQALIHGLNRHYYSIAINYRKNELEEKMLLNLHKKKWTDGLILKSFDTHSKTNEQTVQEMLNLAIKYNKAVQEEDELPPEKLAIANVGRQDAKKHLEEHVSNLMSSNIVQTLGTMLDTVVF

SEQ ID NO: 52376 - protein, 124 aa, Oryza sativa
MLASCQGSKGWNRFQAQICHEWSSWKNGMVSKLATTLLYICMYVCMPYLSRISIAESSCNVPANCHFCCDMNSLIKKNFLLIWCSQAENQKKYAEFDSRFKSSQVLKDLLEKSKQNKLKYPNFR

SEQ ID NO: 52377 - protein, 87 aa, Oryza sativa; identical to SEQ ID NO: 33041

SEQ ID NO: 52378 - protein, 209 aa, Oryza sativa
MAAAVTRPPPTHRRPPSSSQAYPMGMGGFLVFPPGTHPDVERAFRAVDRDGSGSIDERELQDALSSAYHRFSIRTVRLLLFLFNKPASHSPSRMGPAEFVSLWNCLGQWRGIFDRYDRDGSGKIEKDELREALRSLGYAVPPSVLELLIANYNNGVSSRGALDFDNFVECGMIVKGLTEKFKEKDTRYSGSATLSYDGFLSMVIPFIVP

SEQ ID NO: 52379 - protein, 167 aa, Oryza sativa
MAGASTFSGDETAPFFGFLGAAAALVFSCMGAAYGTAKSGVGVASMGVMRPELVMKSIVPVVMAGVLGIYGLIIAVIISTGINPKAKPYFLFDGYAHLSSGLACGLAGLAAGMANGIVGDAGVRANAQQPKLFVGMILILIFAEALALYGLIVGIILSSRAGQSRAD

SEQ ID NO: 52380 - protein, 349 aa, Oryza sativa
MWRGCVSRGLRSLSKGKGSSSSAPVSAAARLFSTASSSYTVVDHSYDAVVVGAGGAGLRAAIGLSEHGFNTACITKLFPTRSHTVAAQGGINAALGNMTEDDWRWHMYDTVKGSDWLGDQDSIQYMCREAPKAVIELENYGLPFSRTEDGKIYQRAFGGQSLDFGKGGQAYRCACAADRTGHAMLHTLYGQAMKHNTQFFVEYFALDLIMDSEGTCQGVIALNMEDGTLHRFRATNTILATGGYGRAYFSATSAHTCTGDGNAMVARAGLPLQDLEFVQFHPTGIYGAGCLITEGSRGEGGILRNSEGERFMERYAPTAKDLASRDVVSRSMTMEIREGRGVGPLKDHI

SEQ ID NO: 52381 - protein, 403 aa, Oryza sativa
MAISSLHATTSLHSPCTTNTSFRQNQVIFFTTRSNSRGSTRYGGARTFQVSCSVDKPVVIGLAADSGCGKSTFMRRLTSVFGGAAEPPKGGNPDSNTLISDTTTVICLDDYHSLDRTGRKEKGVTALDPRANDFDLMYEQVKAIKEGKAIEKPIYNHVTGLLDPPELIQPPKIFVIEGLHPMFDERVRDLLDFSIYLDISDEVKFAWKIQRDMAERGHSLESIKASIEARKPDFDAFIDPQKQYADAVIEVLPTQLIPDDNEGKVLRVKLIMKEGVKNFNPVYLFDEGSSITWVPCGRKLTCSYPGIKFAYGPDTYFGHEVSVLEMDGQFDRLDELIYVESHLSNLSTKFYGEVTQQMLKHADFPGSNNGTGLFQTIVGLKIRDLYEQIIAERAGAPTEAAKV

SEQ ID NO: 52382 - protein, 353 aa, Oryza sativa
MGSGDWFKTIISKKKSKRGKSKHAKVAGQVPNGPNSTNQKSNNGPSSSSDPEDNAALEEWAATRIQNAFRCYKAKKTLRCLKGVKRLHIIGQTNPVNKQTAATLNYIQSWNKLQAEIRNRRAFMVTEGRNRKKKQENQMKLEAKLQNLQVEWNGGSDTMEEILGRIQQREEAAVKRERAMAYAFNHQWRARSATSLGNFNYEVGKGGWGWSWMDRWIAARPWEPRSLVHPENLKKGQAKKENASTNPSALKLQGSISLSNNINDRKAPKKKSSPSPPDQKKPVAASPPDQKKPVALSPPDHKKTVTPSPPDQKKPVARVQKAKAAGPPKAKPKDMKGGQQKKQQQLEVPSLSV

SEQ ID NO: 52383 - protein, 155 aa, Oryza sativa; identical to SEQ ID NO: 47369

SEQ ID NO: 52384 - protein, 222 aa, Oryza sativa; identical to SEQ ID NO: 33356

SEQ ID NO: 52385 - protein, 221 aa, Oryza sativa
MTGVGSAVRRLYLSVYNWAVFFGWAQVLYYTVTTLLESGHEAVYAAVERPLQFAQTAAFLEILHGLVGLVRSPVSATLPQIGSRLFLTWGILWSFPETHSHILVTSLVISWSITEIIRYSFFGMKETFGFAPSWLLWLRYSTFMVLYPTGISSEVGLIYIALPYMKATEKYCLRMPNKWNFSFDFSYASILSLAVYVPGSPHMFTYMLAQRKKALAKAKAA

SEQ ID NO: 52386 - protein, 212 aa, Oryza sativa
MAARTSANFSSCFTFLKEALVLPTQNPKLFTPVFLLIALPSFLVLSTNVLFVQPLSMDMAELAIKLQTTDRYSLPELLRKAMKGNLKGPLITIAMVTVLRVTYMALLGGRHGAPRDPGAPAGVAADDAGEEEGGPRAGGGHLPLVDSCQPGEPGRCCVHEEHGTGAMPLGRLCSAVWCRAAVLLCSSHGVLLPGNGQQGRGHGLCIRQDPYR

SEQ ID NO: 52387 - protein, 195 aa, Oryza sativa
MFFVCGNCSLYFALELTWFSDQVRNSNLIEVNKTEFMTPSAFIFLYENNLFLTFCNRTVAAWNFRGELVTSFDDHELWHSNCNTNNIYITADQDLIISYCKASKEVRDSGGCEGIAPPTGSINMSNIFTGKCVAKISPLDPTLTIAPRKRGDSSRSTIRSTVSDALEDITALFYDEDRNEIYTGNSKGLVHVWSN

SEQ ID NO: 52388 - protein, 518 aa, Oryza sativa; identical to SEQ ID NO: 37102

SEQ ID NO: 52389 - protein, 760 aa, Oryza sativa
MAASLAIVAVVVALCVAAAASAETATYIVHMDKSAMPSGGGGGDGSTSLESWYAATLRAAAPGARMIYVYRNAMSGFAARLSAEQHARLSRSPGFLSSYLDAPVTRRDTTHTPEFLGVSGAGGLWETASYGDGVIVGVVDTGVWPESGSYRDDGLPPVPARWKGYCESGTRFDGAKACNRKLIGARKFSAGLAAALGRRNITIAVNSPRDTDGHGTHTSSTAAGSPVPGASYFGYAPGVARGMAPRARVAVYKVLFDEGGYTTDIVAAIDQAIADGVDVLSISLGLNNRPLHTDPVAIGSFAAMQHGIFVSTSAGNDGPGLSVLHNGAPWALTVAAGTVDREFSGIVELGDGTTVIGESLYAGSPPITQSTPLVYLDSCDNFTAIRRNRDKIVLCDAQASSFALQVAVQFVQDANAAGGLFLTNDPFRLLFEQFTFPGALLSPHDGPAILRYIQRSGAPTAKIAFRATLLNTKPAPEAAAYSSRGPAVSCPTVLKPDIMAPGSLVLASWAESVAVVGNMTSPFNIISGTSMATPHAAGVAALLRAVHPEWSPAAIRSAMMTTAATLDNTGRSINDMARAGHAATPLAMGSGHIDPNRAADPGLVYDAVPGDYVELMCAMGYNLSDIRAVTQWSTYAVNCSGASSPDLNYPSFIAYFDRRSAAAAAAETKTFVRVVTNVGAGAASYRAKVKGNLGGLAVSVTPSRLVFGKKGETQKYTLVLRGKIKGADKVLHGSLTWVDDAGKYTVRSPIVATTLSSTRL

SEQ ID NO: 52390 - protein, 760 aa, Oryza sativa; identical to SEQ ID NO: 52389

SEQ ID NO: 52391 - protein, 250 aa, Oryza sativa
MGVREDSRPLGGLDGLYGVQLAGRSMYSDDEAVKTSIIDPLAREPQEGVGTSRRLLIRRLWQQRPPCLRPIHCSLSCDKHPGETIANVVTSIPFIVLGLQTPRKNLNTALYANSLIGVGIASSLYHTSRGRIRKYMRWADYTMIATTTLCLSRALRNGHPKLLMAASTLLLPFQPLVVSAVHTGIMEVSFAKRASMEPELRMAHNLHKMSSLLGGALFIADDAFPETPYLHAAWHLAAALGVGTCNKLLE

SEQ ID NO: 52392 - protein, 592 aa, Oryza sativa; identical to SEQ ID NO: 32680

SEQ ID NO: 52393 - protein, 279 aa, Oryza sativa
MALAAAAAAHHLVAPAAVSPYYSARVSPGFLRLHDFPRSVGLAATAAPRIFCQSINSADVLGASSTTSDDAIPQPVVLIDQDSDRDATIVQLSFGDRLGALLDTMKALKDLGLDVTKGSVSTESAVTQTKFHIMRSGRKVEDPDTLEKIRLTVINNLLQYHPESSENLAMGEFFGIKAPEKKVDVDVVTHVIVEDDGPKRSMLYIETADRPGLLLEIVKIITDVNVDVESAEIDTEGLVAKDKFHVSYRGAKLNSSLSQVLVNCLRYYLRRPETDEDSY

SEQ ID NO: 52394 - protein, 577 aa, Oryza sativa; identical to SEQ ID NO: 44814

SEQ ID NO: 52395 - protein, 842 aa, Oryza sativa
MESPAARGALGYDASGASTSQAAPGAVDGGASPDSLRNTPSNIARLEDAIEHCAARRKYLARTKSPSDGEDVRWYFCKLPLADKALSASVPRTEIVGKGDYFRFSMRDSLALEASFLEREEALLAYWWREYAECSEGPKGSLVAADASDSKSLYKVEEERVGVPVKGGLYEVDLMRRHCFPVYWNGENRRVLRGHWFARKGGLDWIPLREDVSEQLELAYNCQVWHRRKFQPSGLFAARVDLQGSTPDLHALFTGEDDTWEAWLVFDTGPKLGGNTIKLRRGFSSSGSAKPTQDELRQQKEEEMDDYCSQVPVGHLVFMVHGIGQRLEKANLVDDVVDFRRVTANLAERYLTPYQRSTQRVMFIPCQWRKSLKLSGEQSVGKITLDGVKGLRVALGATVHDVLYYMSPIYCQHIIDSVSNQLNQLYTKFIKRNPGYSGKVSIYGHSLGSVLSYDILCHQESSSAPFPVDYMNMEVSSDEGHIAKSPDTVTAHESVMKEQDTSSISGHSCADNVNDVVDEGSTRTGTSCTEDTTLPTCALENSPKLTTDALPTAVDGEQIEVEKQVDNHKIACSEEGDNSSVRAKDIDSCIISRSAEGVHADVPDKDTLISSLKEEVERLKARLAQLEQHNDLVTESSAESHQGKSATHAVNLSSGKNRIGQGSTSESYTPHIRYTKLNFKVDTFYAVGSPLGVFLSLRNVRIGIGRGQDYWQNENIVEEMPCCRQMFNIFHPFDPVAYRIEPLVCEDYISKRPVIVPYHRGGKRIHVGVQEFTEDIAARSQAVARQFKSLKVKAVAALLSLSRNDTDEDVDSNNEKEKSYGYMMMERLTGSPDGRIDHVLQE

SEQ ID NO: 52396 - protein, 173 aa, Oryza sativa; identical to SEQ ID NO: 29014

SEQ ID NO: 52397 - protein, 520 aa, Oryza sativa
MAEVSISSFAITVLEKAASFGTDWAVSEIKSAWNVKKELEKLETSLRSICAVLRDAECKQSTSHSLQEWLDNLKDAVYDIDDVLDDVSTEALEQEVRNSFIHRTRNMLTYPFKLSQKIKEVRKKLDEIAANRAQFGLTEHVIDVHTSGSSNRETHSFITEPEIIGRDEAKRKIVETICTATESNPLSVLPIVGLGGIGKTALAQLIYNDVQITETFQKKLWVCVSNVFDLKKILDDIMQSGTGKSNKHLNLEMLQSKVRGFLCEKRYLLVLDDMWNDKVNEWDELKCLLSSGGSGSVIIVTTRNMSVASIVKTLEPYDVAKLTDDKCMQVFMHYAFRGGGPHDPKLLEIGKSIVEKCCGIPLAAKTLGSLLCTSHDVGEWRRVMEDKIWNTEAKVYGLIPALKLSYDALPPHLRACFSCLSIFPKDHQLFYSTTVMLWMALGMLNTGKESKQMISAGSKCFHDLLGRSLFQDQIIVYDETIQSCKMHDLIHDLAQFVSENEHAVISCEKTAFSKRVKHLV

SEQ ID NO: 52398 - protein, 75 aa, Oryza sativa
MISPRRGITVMAMISMKISCHHASILQIDRRHDLSNEGVCVQGLGTSLCRILAGYCALHHPCIAVLGLELIRKLR

SEQ ID NO: 52399 - protein, 228 aa, Oryza sativa; identical to SEQ ID NO: 32583

SEQ ID NO: 52400 - protein, 271 aa, Oryza sativa; identical to SEQ ID NO: 30111

SEQ ID NO: 52401 - protein, 290 aa, Oryza sativa; identical to SEQ ID NO: 33840

SEQ ID NO: 52402 - protein, 438 aa, Oryza sativa
MGKSKKSKVRGVGGGDDLIDSSDADSVGSSSTALSDLSMSYATEHVGSQEFVLDKYIDALYEKRGSTREAALSQLVDAFESFILHGLVENKYATLLSLFNSSIKKGSTKEACLASRAIGLLALTVGAGSSSHEIMEESHAQLSRVLQTWPDASKMISALDCLAVVTFVGAADLAETELSLKAMWDVIHPKSGSNVGIIRKPRPPVLAAAISAWAFLLTTIGSWRINADSWKEPIAFLSTLLGAEDRAVRMAAGEALALCFELNLLDVSFGEDDDVENGGTVGSKSKLFLDMQALKAKISSLASNLSMEAGGKGADKKNLTDQRDLFQRILDFVKYGECPEESVKISGKRDVLRVSSWSELIQLNFLRRFLGRGFLKHVQENGLLQDVFDIKTDKAETLSSTDKKIFRSGEEKGRALKLNKDRRLAQERKNAVMLDLDE

SEQ ID NO: 52403 - protein, 268 aa, Oryza sativa
MLFGLVECSLDNESVSPPPLHLEGAPLPREVLCTLPCVGSVLRVFSNRFFKKMLHLQKGIYWARFCNMTCKQQFGMWKGILLPSSRVRLLSNEDGSVADRLKLFDSRIATQIHRQPMASLPNASDIADVEYERAGYTTLMESLTHGEVTHKFKTLVRVVAAYPRGASHLCSLLAGNCCLRLTLEDPTARIHAYIHKDDGAKFFGGFLTAEAVIRKMNKLLGIPEDTEEGAPSNRNPPWIWCCLKSYRLDKNDPWGSRRYRIFGTEIRD

SEQ ID NO: 52404 - protein, 102 aa, Oryza sativa
MVLRRATAAVGDCPKKVAKLVDLVNLPTALREFAGGQSQMSHLSFFLRVWSHIKSNNLQDPSNRNIVNCDDKLKTVLLGRSKVELSELPMLVKLHFPKFQKS

SEQ ID NO: 52405 - protein, 455 aa, Oryza sativa
MHQRPRLPNPTNQPPPRQQKDPQFPRKTLEFDPASRRVGCSPMEAAAAAAAALLSPPAAAAPSRRPGTPGATSLPFARRRGVAAVKGLGRQQLTCRRRGVVVRAASWSPSGPESLPPPPSSSIAPLQMESPVGQFLSQILATHPHLLPAAAEQQLEQLQTDRDAAKDNGGDKPAPSDGDIVLYRRIAEVKEKERKRALEEILYALVVQKFVEAGVSLVPALSHSISSSGRVDQWAESVEGKLEKMHSQEAYEMIENHLALILGQRQADATVAAISKLRVGQVYAASVMYGYFLKRVDQRFQLEKSMKTLPWGSEEEDKLNQVMTTDSRPSPQTSTSHPEMASWTSPNFSAGGPSQSVKPCRLRSYVMSFDSETLQSYATIRSKEAFGIIEKHTEALFGKPEIVITPEGTVDSSKDEHVRISFAGLRRLILEAVTFGSFLWDVESFVDTRYHFVAN

SEQ ID NO: 52406 - protein, 117 aa, Oryza sativa
MESFNNVKEWMSEIDKYANDSVCKLLVGNKCDLAESRVVETAVAQAYADEIGIPFLETSAKDSINVEEAFLAMCAAIKKQKSGSQAALERKASNLVQMKGQPIQQQQQPQKSSCCSS

SEQ ID NO: 52407 - protein, 52 aa, Oryza sativa
MQTDPRAMSSVLRTLSTLSSSCNGHLLKRGGSCWLKYLLLLVLQCRRFFTFH

SEQ ID NO: 52408 - protein, 122 aa, Oryza sativa
MWPQVIADYHMRGRPRPGQLHLPLPPLYLVRYHCLEPSSASSSWALRHHSALMLVTSALAPVPLPYACLGHFCPSPILSPPLPLVYIPLGLVSTPSRVMMLKTGVAFPDRSPPYPDLVANVI

SEQ ID NO: 52409 - protein, 223 aa, Oryza sativa; identical to SEQ ID NO: 30852

SEQ ID NO: 52410 - protein, 333 aa, Oryza sativa
MGECKVGGGGGGGDCLIKLFGKTIPVPEPGACAAGDVDKDLQHSGSSTTEPKTQENTVQDSTSPPPQPEVVDTEDSSADKNSSENQQQQGDTANQKEKLKKPDKILPCPRCSSMDTKFCYYNNYNINQPRHFCKNCQRYWTAGGAMRNVPVGAGRRKSKSVSAASHFLQRVRAALPGDPPLYAPVKTNGTVLSFGSDLSTLDLTEQMKHLKDKFIPTTGIKNTDEMPVGLCAEGLSKTEESNQTNLKEKVSADRSPNVAQHPCMNGGAMWPFGVAPPPAYYTSSIAIPFYPAAAAAVAAYWGCMVPGAWNAPWPPQSQSQSVSSSSAASPVSQ

SEQ ID NO: 52411 - protein, 188 aa, Oryza sativa
MESAAALALVLAVLLLSSTLAASDFCVCRSEQPTALLQKAIDYSCGQGADCTSILSSGGCYNPNTVAAHCSWAANSYFQKFRASGATCDFGGAATLSSSDPSFSGCTFPSSASAAGTTGLSPGVGTGTGTLSPGGGIGTGTNGTGMGSALSPPGTSNFDGAAAEAGLLPRAEPAIFFTVLLLSFLALP

SEQ ID NO: 52412 - protein, 388 aa, Oryza sativa
MWAPASSPTILAAFGLVGLVLAWQAGLQLHRLWWRPRRLEKALRARGLRGSRYRFLTGDLAEEGRRRKEAWARPLPLRCHDIAPRVEPFLHGAVGVGAAHGKPRITWFGPTPEVHVADPELARVVLSNKFGHFEKVSFPELSKLIPQGLSAHEGEKWAKHRRILNPVFQLEKLKLMLPVFSACCEELISRWMGSIGSDGSYEVDCWPEFKSLTGDVISRTAFGSSYLEGRRIFELQGELFERVIKSIQKMFIPGYMYLPTENNRKMHQMNKEIESILRGMIGKRMQAMKEGESTKDDLLGILLESNTRHMEVNGQSNQGLTIKDIMEECKLFYFAGADTTSVLLTWTMLLLSMHPEWQDRAREEILGLFGKNKPDYDGLSRLKIVSIL

SEQ ID NO: 52413 - protein, 198 aa, Oryza sativa
MVVDMCKGVQYLNEIKDSVVAGFQWASKEGALAEENMRGICFEVCDVVLHADAIHRGGGQVIPTARRVIYASQLTAKPRLLEPVYLVEIQAPENALGGIYGVLNQKRGHVFEEMQRPGTPLYNIKAYLPVIESFGFSSQLRAATSGQAFPQCVFDHWDMMTSDPLEAGSQASTLVQDIRKRKGLKEQMTPLSDFEDKL

SEQ ID NO: 52414 - protein, 200 aa, Oryza sativa; identical to SEQ ID NO: 33044

SEQ ID NO: 52415 - protein, 191 aa, Oryza sativa
MGGGKDKHDESDKGLFSNMMHGVAGGHGYPPHQGYPPQGYPPPPGAYPPPPGAYPPPPGAYPPPPGAYPPQHGYPQPGGYPPPGGYPQHGGYPPAGYPGSSGHQGGHGSSGGGHMGAMLAGGAAAAAAAYGAHKISSHGHGGHMGYGGHGGFGGYGHGYGGHHGGKFKRGKHGHHGKFKHGKHGHGMFGGG

SEQ ID NO: 52416 - protein, 220 aa, Oryza sativa
MERDEVCCSCAMRQCRICHEEEEEGCTAMESPCGCSGSLKYAHRGCVQRWCDEKGSTLCEISLQNFEPGYTAPPKKAQPAHVAVTIRESLEVPRPSYEPEDTPLIGEQDYAECAGAAGRSATWCRSVAVTFTAVLLLRHLVAVVTVGAAHQYAFSLLTIYLLRASGILLPFYVVMRLISTVQKGQRQYQLQLLQEQRRNAARMHRLHGQEEQNQHAILVR

SEQ ID NO: 52417 - protein, 198 aa, Oryza sativa
MENQFQDGKEEVIEAWYMDDSEEDQRLPHHREPKEFIPLSKLSELGILSWRLNADDWENDENLKKIREARGYSYMDICDVCPEKLPNYEAKLKNFFEEHLHTDEEIRYCLEGSGYFDVRDQNDQWIRVAVKKGGMIVLPAGMYHRFTLDSDNYIKAMRLFVGEPVWTPYNRPHDHLPARKEYVEKIINRGGTQAVEAR

SEQ ID NO: 52418 - protein, 854 aa, Oryza sativa
MAGGGRAGTEKGAAAGRGQTAIQSTIQSIKEVVGGHSDADIYAALRECNMDPNETTQKLLNQDPFHEVKRKRDKKRESAGQKTVPDASAQAEHNSQWTKPRTQRVENDQRRAYSHGQASGPNREFRVVRDSRHGVVENRPELGHKGSPNVKVSDRSVPVVQTGRNHPPATTSEGQITQGAKHSYNSDVHQVKRQAQGTAQKYVKPHLKNSQDEQHPPTSDPAHTRPNLKAAEGAVGSVRRHVGVVNVQRQPSGRSSSHLHVQSGGSHVNNQRGNFVPGGPSGRHFMSKNMQSVHRTALDSVHRGRSGGRSFVASSSKYQQGPASNQKVTQPAKEWKPKSTKKSSNIDTDNNNGTDVITTSASNTENSNVLDENALCEKTSQACIHEVEHVIIPEHLRVPEYEQTGLRFGSFSPGSGADQVSSSESPSESEEQEHVQEPVQLVVEDDSLRAGHDEVDVEARSSQLNLSTLTAEISLPPSEDSVEMNGEEVENDDGLGLVQSDTPLAPVDGQNMQSASNLTAFSTYGHEDPNMHPSNEAQLYRLVEPNVHPQVMASPSQGYPSENPEADNAVQVFRIPESNVHSQVLPSTSEAISSQIVSSSPVAISKQLQHMSQPQQAAQLYPPVHMQHYPNFMPYRHHIYSPVYVPPMAMPNFPTNIPYPSNGNNYLQMPGGGSHLAAGGMKYGVSQYKPVPAGSPSGYGNYTHPAGFTFSSPGVGVIGGAVGVDDVNRIKYKDNNLYAPSPQVETSDIWIQTPREMPTLQCPPYFNLSGQATSGAFVPNPGNASFNATAQSSHAQFPGLYHAQQPSSIVSPHPMVHQQVQSAIGPNGGVGVATPAPQVGAYQQPQLGHWRPGF

SEQ ID NO: 52419 - protein, 200 aa, Oryza sativa
MRNSPRNAGASGRGFGRGFTGNGYSCWNGPVRSHALFVDENKCIGCRECVHHAGETFAMDDVLGSAHVEVQFGDQEQKIQVAVESCPVNCIHWVMSEELAVLEFLARPQQKEAHGVFGGGWERPRDVFAAANNFTKRLQREEQQDMARQQRYNNGDACEEGETERQAEARRRAGQELRWKRLRDVWNGLRDWTKPGVDGP

SEQ ID NO: 52420 - protein, 110 aa, Oryza sativa
MAPEVLRNEPSDEKCDVFSYGVILWELFTLLQPWEGMNPMQVVGAVGFQQRRLDIPAHVDPTIAEIIRRCWQTDPKMRPSFSEIMSSLKPLLKNTLANQPQRQRVQRADG

SEQ ID NO: 52421 - protein, 460 aa, Oryza sativa
MAEEGDKATAAAEAGGGAAATAAAGGGGGGGGGGAEEESVKLFVGQVPKHMTEAELLAMFQEVAIVDEVTVIKDKATKASRGCCFLICPSREEADKAVNAYHNKHTLPGASSPLQVKYADGELERLEHKLFIGMLPKNVTDTELTDLFSKYGNIKDLQILRGSQQTSKAGCAFLKYETKEQAVAAIEALNGKHKIEGSSVPLVVKWADTEKERQARKAQKAQLQSSNMPSASPMQQSSLFGALQMGYMPQYNGFGYQPPGTYGLMQYPLSPMQNQATFPNMVQPVNQGNSIRGVNPELSPNSVPRSFNAMQLSSPYPPVPGVQYAGSYPGGLMNNRPFGNSFSSIKVPIVNANSPASSSPSSNPGGQIEGPPGANLFIYHIPQDYGDQDLSNAFQRFGRVLSAKVFVDKATGSSKCFGFVSYDSPASAQAAIGVMNGFQLGSKKLKVQLKRDNSKHSKPF

SEQ ID NO: 52422 - protein, 429 aa, Oryza sativa
MATPSAARFSPSSNPARPPPPRLPLPRFLPPTPPQALLRARPLRTSAAVAAAAAVVEVGGVKIAREDVVKEEDPTNNVPDTIYSKIGLQLHRRDNHPLGILKNTIYDYFDKNFSGNFNKFDDLCPLVSIKQNFDDVLVPADHVSRSYNDTYYVDAQTVLRCHTSAHQAELLRDGHTHFLVTGDVYRRDSIDSTHYPCFHQMEGFRVFTPDEWSDSGMDGTAYAAADLKKTLEGLAKHLFGAVEMRWVDTYFPFTNPSFELEIYFQDDWLEVLGCGVTEQEILKNNGRIDNVAWAFGLGLERLAMVLFDIPDIRLFWSNDKRFTSQFSEGKLGVKFKPFSKFPPCYKDMSFWINEEFTENNLCEVVRGIAGDLVEEVKLIDNFTNKKGMTSHCYRIAYRSMERSLTDEEINDMQWNVREEVQNKLKVELR

SEQ ID NO: 52423 - protein, 224 aa, Oryza sativa
MARALVRRALSLAAAASSPAKPSFSTVVAPLRSPMDDRLLRLLRSEINYISERRPPYPPPKAFKSFGVEDRPGEQWVRLRATRGAQDEEVKVDATMFDGAAAPPPDAPLFRRVESLERGPRLHLSLIVEVSRADRVLGFICSAWHDELVVRHVLTLRDADGSSTSSGGRDFVKLEARERESVRKFLQEREVDDELAEFLHDYMANKEKMELLRWLKTVESFVEK

SEQ ID NO: 52424 - protein, 224 aa, Oryza sativa; identical to SEQ ID NO: 33107

SEQ ID NO: 52425 - protein, 71 aa, Oryza sativa
MRLTDATSGQHALALSLLPSLSLSPRAPPSTRRRPPPVRSHLLERVHGRERERASDRVGRDMTCGPMDSFC

SEQ ID NO: 52426 - protein, 86 aa, Oryza sativa
MRGCSPSRRCRRCGCPQGDSRCSPPAAASFSSASRAGTSTAAAHASGGRGHHHPEVSTGFLLGERLLRLEESGVVGVQAERKEHQQ

SEQ ID NO: 52427 - protein, 198 aa, Oryza sativa; identical to SEQ ID NO: 30707

SEQ ID NO: 52428 - protein, 147 aa, Oryza sativa
MLVIPELEQEVKLLSESKSTRKELRHLRMERDSIEDKIHRLEWSLKFENLTEDEKEKLFSEHDILLQKKEHVRRLHQEAQRQHHHKFHKVWGQLMKTGYQNSRFAHQVERFACLYSSQVTNFALYSPNKYYRPSEDYMPHEFDVLGL

SEQ ID NO: 52429 - protein, 207 aa, Oryza sativa
MTCRKLRKVLICTDLDHEQATKCVTEALLYKADAPHRQRALAADVTTCQKFAERAYKYRPLKVVEFDRPYPQCIAYLDLKREECSRLFPSGRMYSQAFHLAGQGFFLSAHCNMEQQSTFYCFGLFLGMQEKGSMSVTVDYEFAARTRPSGEFVSKYKGNYTFTGGKAVGYRNLFAIPWSTFMADDSLFFLDGVLHLRAELTIKQPTV

SEQ ID NO: 52430 - protein, 133 aa, Oryza sativa; identical to SEQ ID NO: 49210

SEQ ID NO: 52431 - protein, 119 aa, Oryza sativa
MSGGVQEQFEIKFRLPDGTDIGPKRYPAASTVATLKESIVAQWPKDKEKGPRTVNDLKLINAGKILENNKTLSECKSPICDFSGLTTMHVVVRAPTSDKQSNKIVAKKPKDFRCGCSIM

SEQ ID NO: 52432 - protein, 531 aa, Oryza sativa; identical to SEQ ID NO: 43539

SEQ ID NO: 52433 - protein, 153 aa, Oryza sativa
MQIFVKTLTGKTITLEVESSDTIDNVKAKIQDKEGIPPDQQRLIFAGKQLEDGRTLADYNIQKESTLHLVLRLRGGTMIKVKTLTGKEIEIDIEPTDTIDRIKERVEEKEGIPPVQQRLIYAGKQLADDKTAKDYNIEGGSVLHLVLALRGGY

SEQ ID NO: 52434 - protein, 54 aa, Oryza sativa; identical to SEQ ID NO: 29655

SEQ ID NO: 52435 - protein, 297 aa, Oryza sativa
MRAVVIARAGGPEVLEERDVGEGLPPPGEGEVLVGVSAAGVNRADTVQRQGRYPAPPGASPYPGLECSGTILALGPNVPSRWAVGDQVCALLSSGGYAEKVVVPAGQLLQVPEGVSLTDAAGLPEVACTVWSTVFVTSHLSPSESFLIHGGSSGIGTFAIQIAKHLGIKVFVTAGSEEKLAACKGLGADVCINYKTEDFVARVKEETNGKGVDVILDNIGGLYLQRNLNSLAVDGRLFIIGFQGGAVTEVNLQPMLARRLTIQAAGLRNRSLDNKALIISEVEKNVWPAVVQGKVNQ

SEQ ID NO: 52436 - protein, 173 aa, Oryza sativa
MASSALAVSVAKPAASPPVAVAAVTPQRRLLPQCRGVRAAPVVRLRSGRARGVSVVCAAQGQETSFQVPDVTKSTWQSLVVESELPVLVEFWASWCGPCKMIDPVIGKLSKEYEGKLNCYKLNTDENPDIATQFGIRSIPTMMIFKNGEKKDAVIGAVPESTLVSSIDKYIGR

SEQ ID NO: 52437 - protein, 147 aa, Oryza sativa
MLLLRAARASPAMAAVVRCKPTRLTPIAGLSSSSGGAGGRRPGGGARPSPHPHPRRSCGAARRRRRRSQTRGRRRRRRKGCRGMRSRGGRSRRRRRRRRSRRRRSAWCGGSARPGAARAASWTRAPTSPPPRRSSPSTPRTSSCTRA

SEQ ID NO: 52438 - protein, 234 aa, Oryza sativa; identical to SEQ ID NO: 33371

SEQ ID NO: 52439 - protein, 202 aa, Oryza sativa; identical to SEQ ID NO: 31787

SEQ ID NO: 52440 - protein, 61 aa, Oryza sativa
MLQPAAATAPLVRAHRRHSARAAALTTPLPRRHLGSPVAAASRQSRRRRCRGKRAASPPPL

SEQ ID NO: 52441 - protein, 194 aa, Oryza sativa
MFIQLSLPDSVVKSMFSHAVLHLLRRMLMVCWSTAVGWMQFAHRKCIQRWCDKKGNITCEICNQVYSPNYVLPPTKCCSAEMDMDLRQSWVGRIDPHDSHFLAIAIAEQQLLQAEFDDCVSSNSSGATCCRTVVLILMLLLLVRHVVVFVRDVSMLQDATVLFSATLQFAGFFLPCYVIARSCYAFQHRRRRQV

SEQ ID NO: 52442 - protein, 104 aa, Oryza sativa
MKPLLLLISSIVVMTFLLLLSGAGALTADHATVGVAVAGGKRTRHAEELSEMDSVPYPQRRVLQGGNTVYRPLGRGAACNPICPGRGDRYTGRGCKSRYQCRGM

SEQ ID NO: 52443 - protein, 203 aa, Oryza sativa
MFSLFYGLWQHVFSKAEFHVVILGVHKAGKTTLLEKVKSIYLKEEGLPHDRIVPTVGLNIGRIEDANVKLVFWDLGGQPGLRTIWEKYYEEAHAVIYVIDSAAASSFEDAKSALEKVLHHEDLQGVPLLIFANKQELPAAVTEEELARHLHLKGLDERPYMFQAGSAYDGTGIKAGIDWLVEEMERSKRTEVLMARTETAEKI

SEQ ID NO: 52444 - protein, 261 aa, Oryza sativa; identical to SEQ ID NO: 32542

SEQ ID NO: 52445 - protein, 189 aa, Oryza sativa
MSPDQPSDLPDSTCAQVIHPTSEICSNRWLPTANKRSGKKHKENNDDSMGKYLEIGAPRNSSMEYQSSPREMSVNPTEKQHETLMPQSKTTRETDSRNTQNEPTTQTVDLISSIARSTDDKQVVRINNAPDCSSKVPDGNDKNRDSLIDMTSEELGLKRLKTTGSATEIHDERNILKRSDLSAFTRCKK

SEQ ID NO: 52446 - protein, 297 aa, Oryza sativa
MNLGLIEESKISRSLPWRPPTNVFRVKEDVRPIFWANRPKSYISRTLGWDQYPHGRWGDSRNPSYGALTDYQFTRPRGRGKKLQEEWAVPVKSVEDINERFMNFCQRKLTSSPWSELDGLQPETKIIDDQLVKINQKGFLTINSQPAVNGERSDSTSVGWGGPGGYVYQKAYLEFFCSKEKLDQLIEKSKAFPSLTYIAVNKDGESFSNIPTNAVNAVTWGVFPGKEIVQPTVVDSASFMVWKDEAFEIWSKGWACLFPEGDSSREILDKVQKSYFLVSLVDNDYINGDLFAAFKEI

SEQ ID NO: 52447 - protein, 380 aa, Oryza sativa
MGSVELGAEEREVAGGEGGSKGAAPPARDIRRYKCDFCSVVRSKKGLIRAHVLEHHKDEVDDLDDYLGRGGGETCKEMDHDCKVCGASFKKPAHLRQHMQSHSLERPFSCHVDGCPFSYSRKDHLNRHLLTHQGKLFACPMEGCNRKFTIKGNIQRHVQEMHKDGSPCESKKEFICPEENCGKTFKYASKLQKHEESHVKLDYSEVICCEPGCMKAFTNLECLKAHNKSCHRHVVCDVCGTKQLKKNFKRHQRMHEGSCVTERVRCHLKDCKLSFSKKSNLDKHVEAVHEQKRPFVCGFSGCGKSFSYKHVRDNHEKSSAHVYVQANFEEIDGERPRQAGGRKRKAIPVESLMRKRVAAPDDDAPACDDGTEYLRWLLSG

SEQ ID NO: 52448 - protein, 405 aa, Oryza sativa
MIALVGLLRYAKCVLFTAATPRPMDTKVDVDDDDDDDDAEPPSPPPDFRCPISLDLMRDPVVSASGQTYDRESITRWFGSGKSTCPKTGQVLANLELVPNKALKNLISRWCRENGVAMESSEPSKPEPAPVVTANKAALEAARMTASFLVKKLSVSFSPAAANRVVHEIRQLARSGNDTRAFIGEAGAVPLLVPLLHSDDTATQLNAVTALLNLSILDANKKRIMHAEGAVEAICHAMGSGATRRAKENAAATVLSLASVHSYRRRLGRNPRVVERVVHLVRTGPSSTKKDAIAALLCLSGERENVGKLVEAGAAEAALSAISEEETAVAVLASPPPPSSSSSYSSSASDGEILRSLHRLARDLAAARWCASWPSCGAARSGQGSARPPRWCCSAAAWAPPWWRR

SEQ ID NO: 52449 - protein, 265 aa, Oryza sativa
MAACLPSLSPPPHQAPVPAATTALAGNLTSSLLSLPPPLPRLAVSHRRAVVAAASSRPPPPPSREGGDGGGEEEEEVERAMGMDGGIPGTSGEFLRRVSSRAYGMRRHLMESLDSLAYDVLETNPWREDSKPVYVLARRDNHLWTMKTRRSRSEVERELGMLLKGGGSGVGTKSKYSGSKFNMLVEDIREGILVFEDEDDAAKYCDILQGGGQGCEGIAEIEASSVFNICHKMKALAVLFRRGRTPPLPQSLERDLRARKRSLED

SEQ ID NO: 52450 - protein, 273 aa, Oryza sativa
MEHIARFFFGVSGNVIALFLFLSPVVTFWRIIKKRSTEDFSGVPYNMTLLNCLLSAWYGLPFVSPNNILVTTINGTGSVIEAIYVVMFLIFAERKARLKMMGLLGLVTSIFTMVVLVSLLALHGQGRKLFCGLAATIFSICMYASPLSIMRLVIKTKSVEFMPFLLSLSVFLCGTSWFIYGLLGRDPFIAIPNGCGSFLGLMQLILYAIYRNHKGATPAAAAGKGDAADEVEDAKKAAAAVEMADAKTNKVVADDADADADGKSADDKVASQV

SEQ ID NO: 52451 - protein, 156 aa, Oryza sativa; identical to SEQ ID NO: 31111

SEQ ID NO: 52452 - protein, 179 aa, Oryza sativa
MGDAASNQPVLAASDLGQSNLDAGAGAGAVGGGGFIALDVSALSSLAGDGPDTTAAPPRTPKVVRSLSRKGERKPADGDGNGAAGTGKRPPLSPLFVHVAAADDMGGLGRLVHTPVAGTPGGKSRRLGRQPAAPWLDPRRVVFFFATLSSVGTLILLYFTLSMSKMGGDSGGGGSSDAR

SEQ ID NO: 52453 - protein, 83 aa, Oryza sativa
MAGGGMFGGAGAFWATRALEVVKRNDSPGLLWKRIKLTTTRKNNAKKRLKRLWQNEAVIRACGEAESSSSSTSNTASASGKQQ

SEQ ID NO: 52454 - protein, 130 aa, Oryza sativa
MSFRLRHGTPRTHSSRARSAGGPRSVGATPRSEGAVCGGGAEDARHVFDELLRQGSGASMYSLNGARSRRRRALHPRGRCVPLQPHGPSRRRQGNSSHRAHLWHPHRLLLPCGPLGPRFRGLGQCRQEGI

SEQ ID NO: 52455 - protein, 185 aa, Oryza sativa
MPMPSSSSSLLSAIRRLLASLARSPPPAAAAAMPPSSPEPEEEGMGRSDAGVGGGGGGEGGGGGGGRALSYGKAEYWDARYVEEGGAPYDWYQRYAALRPFVRRFAPPESRVLMIGCGSALMSEDMVDDGYTEIMNIDISSVVIEIMRKKHFNIPQLQCILNCFSILFLSPPPLKFTIHWSPYDT

SEQ ID NO: 52456 - protein, 266 aa, Oryza sativa
METAPAANGCSGGRRLQEEEPAARWCAVTGGRGFMARHLVAALLRSGEWRVRITDLAPAITLDPVEEKGLLGEALRDGHAVYDSVNVCDITQLTKAFQGVEVVFHTAAADPDINDFQLHYKVNVEGTKNVIDACVTCKVKRLIYTSSSGVVFDGVHGLFDVDESMPYPNKFPDAYAQSKAEAEKLVRNSNGICELLTCSIRPGSIFGPGDTIVPHLLSHWRTMFIIGDGMNCDDFVYVENVVHGHICAEKTLSTKEGSKISGGKNV

SEQ ID NO: 52457 - protein, 211 aa, Oryza sativa
MRQQQQQQQESRFKRTCVFCGSSQGNKTTYRDAAVDLAKELVARGIDLVYGGGSIGLMGLVSQAVYDVGRHVIGVIPKTLMTPEIIGETVGEVRPVSDMHQRKAEMARQSDAFIALPGGYGTLEELLEVITWAQLGIHHKPVGLLNVDGYYNSLLTFIDQAVEEGFISPSARRIIVSAPTAQELMDKLEEYVPYHDRVASGLNWETGHLGF

SEQ ID NO: 52458 - protein, 714 aa, Oryza sativa
MTPTVLMEFGQQRQIKRGYDEMAFRGMASAAPRGYAETVGESEGAAGSPVRVDSEDSSAPKRKCISLNSDGFDVKREIFVPAKMSSSERRHLRKRFRTELDSVRNLLKKPEFAVPVPVNRAPALSSSAAPRGKKGQRGNHVVRGAKGRFLPTKPRPEASTVLTEDAIFKQCDAILKKLVTQKCSNIFDSPVDAVKLNIPDYFQIIKKPMDLGTIRNKLDSGSYTSPSEFAADVRLTFSNAMTYNPRGHVVHDYAIQLNKMFESRWRTIEKKLASIATEAHVEVDRAGSKRRKTPPVDCSEVSTECVRPTESVRPTESVKPKMTFEEKESFGNCLASLSEDPEVPSHIIDLLQQCIDNNTDQLGDGEIEIDIHAVSDDLLFELKKHVDKYLQEREQSQQAKSEPSENEAANVSGLSHSSTNPCKGGDPVEEDVDICGNASPILIEKDAHNNPNKCGSPSSSSSDSGSSSSDSESGSDSESEQEKGGSPGKPKGSKRSEQLVEQEKSDVISPVDAIRPADDVELREQDNESKPAPEGENSKPDRQVSPDKLLRAALLRSRYADVIVKAQGILSQGGDKQEELEKLQKEEKARLLAEGNAAMEARRAEAEAEAKRKRDLEREKARQALQEMERTVEINDNLHLKDLEMLGTATTEHIVSSVDETSPEHSQDGMPSFLPGSGNPLEQLGLFMKADEEEEEEDPSSVPSTKDAEEGEIN

SEQ ID NO: 52459 - protein, 449 aa, Oryza sativa
MAQTCLPPGFRFHPTDVELVSYYLKRKIMGKKPLIQAISDVELYKFAPWDLPAQSCLQSRDLEWFFFCPRDKKYPNGSRTNRSTPNGYWKTSGKDRTIELNSRIVGSKKTLIFHEGKAPKGNRTDWVMYEYKMEDNQLVSAGFSKDDFVLCKIFKKSGLGPRIGEQYGAPFNEEEWEHADAEMFPLLPNVETSVFPLLPSSEVVNSTDDTRVQPSVAARAIEELPVQHLPHVCAGNGSTYQNITVTGESALMELPSQHSVESIGDEVVSVDNCSNVVNNADSPVIEGLVLEELSRFLTDSPHHGNPVGEHSGLPPMSEAEAHAFEVSTNDLYNEIAGLAELGVPNGDGFSPSNAGVTEQQPTYFGVPNSENYVNMDDIFAPDTRLSYAYPLPNNQFWHYPMDQFTYSTTLSAAFPSGDSRPTMRIVDDLPAAANNGGFASKPSMQFPLS

SEQ ID NO: 52460 - protein, 135 aa, Oryza sativa
MKTEANDPVEEATVEEPAVEAGTIEEIATAEARDEKTMITEETAQDPMVEDEKTMTTEETVQEPMVEDEKTVTTEETVQDPMVVDDKTMTTEKTVQDSMVEEGGTNIAAAEETVVHAAATAEALAGQASSTEQNG

SEQ ID NO: 52461 - protein, 58 aa, Oryza sativa
MVPSGTSMVVGLQVFLSFLERTLSPTCNLSLKNDQLVRLGRAGLTILRFSEFPWSVFS

SEQ ID NO: 52462 - protein, 191 aa, Oryza sativa
MATLTMQPIGPLPSTKQEGTRGEKPAEGGADLSDIDSGWVVLGKSDIVPADLAAQSLRSSPKTIPTWARWVIGGVLHTVVPFYERARYVEDETARNVETAAEVVEQIAEVTEKLASNVADHLPENGCLQKVVEKIEYIAEVVDEDAEKVEAITEKIENFSDKIDAKVEPIFTEIEKEFEDSTSNDGVNANI

SEQ ID NO: 52463 - protein, 315 aa, Oryza sativa
MEYHGIMQYLFDEAHNLESICADAASFDLLPNNLSSCIAEAQECIQLCSAKRTFENSADKQFDPENYAILKALLMALEKKISEVVIDSKELGHTKPGNYIYEFLSELNITSETSKKLIDTIDGASLLLEEGNSAETGPGMKAKATVCRLETIRDILDIIFRGGGQSHAKYYRFHVNECQQNSGDALKVLGKVSRTLSWWCFNPGLAMEEFLKLGVRSIILTSGTLSPLDSLALELNLEFPVRLENPHVIASDQIWVGVVPVGPSGHPLNSSYRTRETLKYKQELGITIVNFARIVPDGLLVFFPSYSMMDKCINC

SEQ ID NO: 52464 - protein, 215 aa, Oryza sativa; identical to SEQ ID NO: 31927

SEQ ID NO: 52465 - protein, 197 aa, Oryza sativa; identical to SEQ ID NO: 36298

SEQ ID NO: 52466 - protein, 155 aa, Oryza sativa
MESSVRFRGQVWFHINFWARSRKSKKIKRFFAEVHYKPPSSSSSVCSYLPFPVPGAERPPSSSSVSSDLLLPLPIPVVEACTIIEEPLGQYRKSCAFCRGHLDILHPMGRKFVCGNDKDRFEQQLLPCGSIGLEMPFTCRLGPASVNSSHGEKED

SEQ ID NO: 52467 - protein, 328 aa, Oryza sativa; identical to SEQ ID NO: 38174

SEQ ID NO: 52468 - protein, 53 aa, Oryza sativa
MKMVLPVRKPNQTKESRTPGIAGSLLTYSSYRRKHEVAARNLEQWLLSTGIHS

SEQ ID NO: 52469 - protein, 255 aa, Oryza sativa
MIHGPCGEGHPSCACMVNGECSKNYPKEYCEKTTILQNGHVRYARPKNRISTKKNGVAVDNAFVLLHNVDLCVKYQAHINVERVSRDGMEKYLFKYFTKGFDCSKVGLQRKRASGESSTCTKGVNEIQDYLECRCIASNDAAWRLLQFEIHHTNPSVERLPVHLPLGNSVVYNEDDSLEQVLQNPWNQITKLTAWFEANKTYPEAVCYTYAEFPEHFTWHADGKYWDYRRGTGNVGRLANVGPNQGDSYYLRMLL

SEQ ID NO: 52470 - protein, 849 aa, Oryza sativa
MKMESFAWLLLILVLFSILEDVRGSKSKPILINCGSDSTTDVDGRRWIGDSSPKNFTLSLPGTVATAPDSDGKETYGDLYKNARIFNASSSYKFIVAAAGSYFLRLHFSQLPTNFSTKESLFDVSANGLKLVSKFNVPAEIYLRNSKINSTSRAIVKEYLLNVTSSNLEIEFSPDAESFAFINAMEIVPVSGNSVFDSVNKVGGYGLKGPFSLGDSAVETMYRICVGCGKIESKEDPGLWRKWDSDENFIFSMSAARAISNSSNISYVSSDDSTSAPLRLYETARVTTESSVMDKKFNVSWSFNVDPDFDYLVRLHFCELEYDKAEQRKFKIYINNKTAAENYDVFAKAGGKNKAFHEDFLDAASPQMDTLWVQLGSESSAGPAATDALLNGMEIFKVSRNGNLAHPTVRIGGFNSAMGKPKRSPKWVLIGAAAGLVIFVSIVGVIFVCFYLRWKKKTSANKTKDNPPGWRPLVLHGATTPAANSRSPTLRAAGTFGSNRMGRQFTVAEIREATMNFDDSLVIGVGGFGKVYKGEMEDGKLVAIKRGHPESQQGVKEFETEIEILSRLRHRHLVSLIGYCDEQNEMILVYEHMANGTLRSHLYGTDLPALTWKQRLEICIGAARGLHYLHTGLDRGIIHRDVKTTNILLDDNFVAKMADFGISKDGPPLDHTHVSTAVKGSFGYLDPEYYRRQQLTQSSDVYSFGVVLFEVLCARPVINPALPRDQINLAEWALKWQKQKLLETIIDPRLEGNYTLESIRKFSEIAEKCLADEGRSRPSIGEVLWHLESALQLHQGLLQSANTDDLSQPELKLSDASCNLGCIEEVEESCRAGSQDVNEEYVDVKIEVP

SEQ ID NO: 52471 - protein, 652 aa, Oryza sativa
MPISHELGEPDESFYNLWKEECEELWEEEDELWGDEDVEEELSLRHPGFNKWTVQQGAAGGDHIRAKDKNFYCFEVQVHFTGELVDGTQFVSSRENDIPERFILGQEDVMHGFNLAVSSMQPGEKAIFTIPSALTMTKAGSPASIPSNIPPNQTLRFEIELIAMFTIIDIFKDEGILKKIVKNAEPDRKQSHSSDFVFVKYDACLMDGTSVSKSEGVEFSLTDGFFCPAFAHAVHTMKEGEEAVLIVKPKYAFGEQGRPSQGEEAAVPPDATLYVHLLFVCWIRRIGEDQAIAKKTLRIGNSQRIHTQSQAVVKVRLLGKLQDGTVFDRRGYGDDEPFEFVVDEGQVIDGLDESVMTMEEGEVAEFTIPPQHAFDAVGSDQHQFAFVPRNATVVYKIELLSVVNEKHPLYIPSRDEIVEYASRKEEEGDIYFNLGKHLRAHRRYFKARQIIEYSRFGVRRGKINLIKLLSIPTSEIDAQLEEMWISCTFKAAKCAIQLGCYMQASCYYSEVLNYDVANVQAQQQQTLLQEFPDGSSRDPDAMQRGFEQFPPEYESELQLNATFTPAAFSPRRKGEHPYRGEIIGFPDVQANSSQPASTPSTAPSTPNPATPQTNALATGTSGTPSGSAAQSSGTINTNRGFLFRCFGPSPTS

SEQ ID NO: 52472 - protein, 479 aa, Oryza sativa
MYCSHCQDNCPVVKDPDKNYTCCGLCGKVLDDQVYDGEPTFQKGADGQARLAGSILSSIESGNSVSHERTINKGREEIRQIVSSLHVAGGDTIISMAHRYYTLAVDKNFTRGRRTTHVAAACLYIACRQSKKAYLLIDFSDHLQISVYVLGAVFLQLCQVLLLAEHPVIQKLIDPSLFIHRFTERLLGKRDNAVSDTALRIVASMKRDWMQTGRKPSGLCGAALYIAALSHGYDYTKADIVAVVHVCEATLTKRLIEFENTDSGSLTIEEFLAKADEQVLVTKISPKSGEVLCKHKDKAEHFAHGLCEKCYNKFMKLSGGLEGGSDPPAFQRAEKQRLEAAKNAKGTAASKEAALESVCEARESDVENNITTPPKNIIGDKHSTIPSVKVAGDSVATEDPEGEVKNDKADEGPESLSDIDDAEVDGYLHNEEETQYKKIIWEEMNKEYLEEQAAKAALAAELAARGVVVEEGKRKRRRQ

SEQ ID NO: 52473 - protein, 233 aa, Oryza sativa
MDASPSSSSSSPVAPEVVQWAGGADGFGSAAIGFACRVLCAVATCVFAAVGSVVGAVTGSAIGLATESGMLRGAGIGAISGAVFSIEVAESSRDLWHSSDSAVWCLVYMVDIISSLLSGRLVREKVGPAVQSAVQSQISAISSPFAETSDLFETGGTKGLPADTLRRLPAIKITGDNAVDSAGEHICCSVCLQDFRVGEMARRLPSCRHVFHVPCIDCWLVRHGSCPLCRRDI

SEQ ID NO: 52474 - protein, 266 aa, Oryza sativa
MMKLNKKEDVRLGLTRSDYMIDGATDQLLQVELNTISTSSNGLACGVCELHRNLIRQHERELGLDPESVVGNTAIAQHAEALAGAWAEFNNQSSVVLVVVQPEERYMYDQYWITVALREMYGVTTIRKTMAAIDAEGELRPDGTLTIDGLPVAVVYFRAGYTPNDYPSEAEWRARLLIECSSAIKCPSIAHHLVGTKKIQQELAKENVLERFLDNKADIEKVRKCFAGLWSLENDSIVMSAIESPELFVLKPQREGGKQHLWGQSA

SEQ ID NO: 52475 - protein, 191 aa, Oryza sativa
MSRYLKQYEKEHMKMAMLRQEETFKQQVQELHRLYRVQKLLMDAGSAITMQGISCIPEDDYHAEENEAGSSRPWHTFPGSDNDKPQAHTSVLEESELDLTLAIGRTTTTKKEAPSSSVDSRTSNSSSSTESGSTNCRAVMPHRPSRLGSSSAVKVVAGGPGVGTTQQHLDLEQQDALKQPPWLHRCLNLAR

SEQ ID NO: 52476 - protein, 228 aa, Oryza sativa; identical to SEQ ID NO: 33000

SEQ ID NO: 52477 - protein, 214 aa, Oryza sativa; identical to SEQ ID NO: 32289

SEQ ID NO: 52478 - protein, 241 aa, Oryza sativa
MAPNKISSMDAGAAFDDEDASSSNSLQELWPVGEIDPKRARFPCCIVWTPLPIVSWLAPYIGHAGICREDGTVLDFAGSNLVSMDNFAYGSIARYLQLDRKKCCFPVNLATHVCERSYKHAEAGTAISWDDALQLGMRSFGHKFYNLFTCNCYSFVANCLNRLAYNGSVKWNVLNVAALVWLRGQWVDKMSVVRSFFPFLTVTCVGILMAGWPFLIGMAAFSSLLIGWFVFAVYCMKDLVC

SEQ ID NO: 52479 - protein, 261 aa, Oryza sativa
MAAAALLLAPVAAPWSRVPSAGRRVRCAATAPAPMGEKTEYRDGPVERAFMGLFARKMEKYAVVSSSGGKGKEKKKEKSSRSVWEWDYESFVDVSRRVMVGRTRAQQQEAVREVLLSMLPSGAPEQFKKLFPPTRWACEFNAALTVPFFHWLVGPSEVVEVEVNGVKQKSGVLVKKCRYLENSGCVGMCVNMCKIPTQNFFTNEFGLPLTMNPNFEDMSCEMIYGQVPPPLEEDPASKQPCYANLCSISTPSAPICPKLQT

SEQ ID NO: 52480 - protein, 260 aa, Oryza sativa
MLNLHTIRMSIPSLHRSSPYRCALLKRKRSCIRACSSEDDGSDASSSLGGDKRQQEVLAKIAMLQAQKVRITSFLDERSAYLTKFAKDADTEFDLIGQNAMKELDEVGDQIMERLDSKMQAFEETAEVQRQEIEMNERVLEDFEDWIEKEKNEGMFFKSLGKVKPRNKKKLTVKPIPKLEAQKVKDIAKESAGSKTRMNIYLGLMAILGLTIANAVFATPEVEWRKVAALGLIFIGLVAQVIYEQDISSPEAEKKGGKEE

SEQ ID NO: 52481 - protein, 351 aa, Oryza sativa
MLNWKSKCSTRSPRTTVAGAKPDDSEFESVNAPLEPQTWEGSFLCGLLKNQPQVLPVAAAKQLQELSNQRKDTLIRWEHSIGSPEDCLHRRIAEMKEHECQTAIEDIMYTLIVYKFFKIEVPLVPNLSKLISNKRLQIWPPREAELESIHGPEVLGLIREHLTSIIRWVHRNGPKINRSTLRIKRMQFSRIYSASIMYGYFLKSVTTRHRLELILAQSQEFCPPIQFLNAQFNSTQKQEQEESIGGSAEISSSSKPSSVVDLHDLKSYMMGFDPKTLELCARLRSCEASNLIEKHSWALFRESMKDFLEPDEAVILDPSSLKRLLLEAIAFGSFLWDVEDYVDEIYKLHDS

SEQ ID NO: 52482 - protein, 276 aa, Oryza sativa; identical to SEQ ID NO: 32516

SEQ ID NO: 52483 - protein, 1064 aa, Oryza sativa
MPVDLQVNSCTKAIRQTEVAVPSWRSKNLDSSREPSEKKCKLVVKVGSLTRTEEVASNSSTVSDPMASKTCPVCKVFASTSNTTLNAHMDQCLSVESNTEPVEKVILKPKVKPRKKRLMVDIYKTARLFTLEDLDQRNGTNWAIELATPTTNKEVCTENRSPEVVPFDPRDDEREGDVYVDSNGIKIRILSKSSDASLVLRDEHNSRKVAKNETGKSMLMSKTCLKSKICKNKRLKFPGKKHSKTNRLNTQVRTHTDGDMHEHTSEDEEESTMHVQKPTESTSYGGSETIRQWVGSKRSGLSKNCAREVTDKASKSITPGTKKLARSSIRGFDDSQISDSPPEAFSSQPPEEMTITSEANDDDERNGTSRLLRSIPRWSLKTTPSSNVIPKVPRSAAALAKRKIKEIGRRESYRSDNYDTVRNSTSIRNSVRRGPSSSVAGLSDGSNRVASTKKFRKNRSLLRTGRREFSPSNSGLVHGFGQDHGSNPNHTNKRFRVSNKETSKKLKHTQEDTADNDFSYESDVPALGQGDDQYDAAQQAGISQMYYEGEEPETEMQCASPSRSDPVDCSNDMSSDSLSPENNETADDVLVEGYSVAIVDPCSNEKSAYHAHIPNDVANNEVEEWQIDPSSTKESSACLTNNRDMGLGAPQDNSSITSNREDSNLDHGLVFDRGSSGSPVSTASTLSPSTSLRDSRTNRSEPGPSTVSLPTVEERVSGSSNQETKSTPLAREGEQLPEKSCCCNCRESISRDSQVHDQSAMARPVPAFTGRPVPQLNIGLRASSSFSTYQRTSTKANPCLDSHDQTLAGKVSAEPTMTHPSYTTDCMSPSIQTQLPSPSNPILRLMGKNLMVMNSEESGHPQAPSSDYIMRGNYMAPGCFMPQNYQHIGDPAFMNTTPSTANHQIPLSSVQAGNFSAPTLHNGSMVQSDYHSPQKPYRNLLPVMHHPSYMMKEVIMIDDSPEHRSDPQISMLLPSAPSPATISVPNTVASRPFYCLPSQNQLLPRESAVGPLPVFTNINPIVGVSSSSQGNNAEVAHPYMSNPFYVQSPAGYINPSVYYSQNLR

SEQ ID NO: 52484 - protein, 307 aa, Oryza sativa
MSDTEMLLPITVGDYTDFFCSVHHARNCGFIFRGPQTPVNPNWFQLPVGYHGRASSVIVSGTDIIRPKGQGHPTGDSRPYFGPSSKLDFELEMAAIVGPGNELEKPIDINDAEEHIFGLMIMNDWSARDIQAWETIPLGPFLGKSFSTTVSPWIVTMDALKPFTCEAPKQEPEPLPYLAEKNHVNYDIPLEVWIKPKEQSEPSMVAKSNFKHLYWTLTQQLAHHTVNGCNLRPGDMFATGTLSGPETESLGCLLELTWNGQKEISVGNSTRKFLEDGDEVILTACCKGEGYNVGFGTCTGKVLPALP

SEQ ID NO: 52485 - protein, 770 aa, Oryza sativa; identical to SEQ ID NO: 49995

SEQ ID NO: 52486 - protein, 831 aa, Oryza sativa
MESVAVEAARWMVGKALSPLSGGLVEAWLACSELGTNVGAVKLELLYAQVMLDNARGRETRSPALKQLLLQLRGLAYDAEDVLDELDYFRIQDELDGTDEAADEHTRGCLHGLLLNTRHTARNIKKRYLSACCSGGGDEKAVAGSDLSLAGEHDADDDCTDEDDNDTGSTDIDHSSTATHMPRKEKQWGSQREDTMKTPKLKFDRVDLSTRTKHISEQLKLVCAKVSTILNLELPESNRTIRSSIAMLRPVTTSATIEPEFYGRKGEKDRIIKDITHGDCCVKDLTVIPITGPGGIGKTALTQQIYKAVKNLFDVNVWVCISLNFNAYRLKQEIADSIPKVENEQLGDLDENEQLGDLDDLIERRLKSKKILLVLDDMWNCSNEDDWKRLLAPLRNAQTKGNVILVTTRFPAVAEIVQKTYRPIQLEGLEFEELWELFQAYVFGDEKLINHHAILQQTGEMIAKKLKGSPLAAKTVGRLLRNHLDFNHWTSVLESKEWELQTGDNDIMPALKLSYDYLPFHLQQCFIYCALFPEDYKFDSDELIHLWIGLDILQSHQDQNKRTEDIALSCLNHLVDFGFFKKNVNEDGSPYYSMHDLLHELALKVSSCECLAVSSSNVRFVQIPPSIRHLSIVIDDMDVNDRVTFESIKTDFSTLSKRLDVEKLHSFMLFGRFHGSFISPLGDLLSNAKSLRVILLSTPSYAVENMLHNFSNLVHLRYLRIIRGYFPEIRLPNTISRFYHLRILDVRKCNGHFGLPRDIDNLVRLRHFLVPDDNLHSDVANVGKLKCLQELRRFKVKRQSEPFALRQLGQLELISSPPTHHLPHLSHFLPP

SEQ ID NO: 52487 - protein, 85 aa, Oryza sativa
MAQDDEDVGLALGLSLGSGGHRRQRESRDEAPSSAAASLLTLRLPAESGGQPQVVVKREVVRAEEEEYEYEYERALYSSSSPPAS

SEQ ID NO: 52488 - protein, 186 aa, Oryza sativa
MASPRCAAVALLHPAGVAAGGGARRRVLLLDQERPLWGTEVRRRRRRRFSSLETPPRCSKMYVPGFGEGSPEKKAARNLQHFFNYIAVRVVLTQLESYNREAYGELMDFVNRNSLNDADTFCKKLIRESPRHKQLAMRILEVRSAYVKHDFEWDNLKRLSFKMVDEANTKLMRDYVLETSHIEDDN

SEQ ID NO: 52489 - protein, 78 aa, Oryza sativa; identical to SEQ ID NO: 34344

SEQ ID NO: 52490 - protein, 102 aa, Oryza sativa
MYSLWAKGDHVYVIHPAAGRISGYDVVMQSWEMVCGADYEFPLNIDLKNVEVHVHGDLGYVTCLEVVKTKGRTWGKQVATNVFEKVDGTWRMCVHHASHIEE

SEQ ID NO: 52491 - protein, 200 aa, Oryza sativa; identical to SEQ ID NO: 30667

SEQ ID NO: 52492 - protein, 305 aa, Oryza sativa; identical to SEQ ID NO: 33009

SEQ ID NO: 52493 - protein, 175 aa, Oryza sativa
MAPTVMASSATSVAPFQGLKSTAGLPVSRRSNSAGLGSVSNGGRISCMQVWPIEGIKKFETLSYLPPLTVEDLLKQIEYLLRSKWVPCLEFSKVGFVYRENHRSPGYYDGRYWTMWKLPMFGCTDATQVLKELEEAKKAYPDAFVRIIGFDNVRQVQLISFIAYKPPGCEESGGN

SEQ ID NO: 52494 - protein, 120 aa, Oryza sativa
MKALADEIASSGKPLDEEDLVAYVLNGLDDDFEPVVSAIVARNESTTMAEVYSQLLNFENRQALRQAHASANAAVVVFSVVAAAAVAHVGAAILLLQDVGAALEEIRLGVVMTAPSAKCA

SEQ ID NO: 52495 - protein, 27 aa, Oryza sativa
MLAQHDPDLFCICIHGQIIHSYLYSCS

SEQ ID NO: 52496 - protein, 646 aa, Oryza sativa
MDKASCGLGFGDSINSLDTSRHWSTVQHTSGLKATTIDYSTYSSFSIASSKTLKRKRSAMAGPEGTGNPLLTLGLGHSPSSSDNSKVSSATAYAMSPSSLKEADEESSADLGLNFELCLGNDMVHCQKKSPVGAENSPLTNSHKLDLQLSLSTGSPESAVTNTNMVSPIIHGGLEIPVTNCSPAIIGEGSVPCTWVFEKSVISSSYASEATYTFPFSKVPKTGDAAMSSPVISSTLVTSMKSPVACTSGSINPQQRNSITKNCQFPGCVKGARGASGHCIAHGGGRRCQKPGCQKGAEGRTIYCKAHGGGRRCQFLGCTKSAEGRTDHCIAHGGGRRCSHDGCSRAARGKSGLCIRHGGGKRCQKENCIRSAEGHSGFCISHGGGRRCQFPECTKGAQGSTKFCKAHGGGKRCTFSGCNKGAEGSTLFCKGHGGGKRCLFQGGGVCPKSVHGGTQYCVAHGGGKRCAISGCTKSARGRTEYCVRHGGGKRCKFEGCAKSAQGSTDFCKAHGGGKRCSWGQVDLNFGVGAPQCDKFARSKTGLCSAHCALVQDHCVRGGTLGAATFQFATDAKFDEMEVTPVKGDPHAQASSDDQSHLGGAHPPAVPAITSDRFSEGRVHGGGLLALLSRGGNHANAGNSKNGALLP

SEQ ID NO: 52497 - protein, 394 aa, Oryza sativa
MAAAADDLARRLAAFIPLPQPPQKEQLSGVAAAVLDAGGRLGRAVGDVFRRLRIDEGLDVALAQRHRRNGGSRIAAAAAAVDARVSKDSGGGGVAGHDPVGVSGRFARSQGSMNLSATYDSRTSDVESSVVARGDLWRAEASHSSAAAAAPPLFMVQLGPVLFVRDTTLLFPVHLSKRHLIWYGFERKNGVHSVCPAYWSAHRRWFFMSMICLNPFTCSFMDMQFPNGQLRYVAGDGFTTRAFLPLCRGIFQAHAKFPGEKKFSYSFKNRSGGSITPMVQWPDKSFSLGTIQTLSWKRCGLMLQPALQFSICPTFGGSRPGLSMELIHSVNENAGVVCGYSHTASPSAYASISIGRSKLNGSAASSGLVLRVDAPLHSFGRPWFSIQMNSGLEF

SEQ ID NO: 52498 - protein, 109 aa, Oryza sativa
MRRRRVVTAGGGRPGFPTTTRRAAAAGGGAPPTPTTREATATGGATAAGAPARSPLMVAVAVATVVTRAPGGREMRGAGTGAVARSDAGALIGRSRLRRCPRHRRSCRS

SEQ ID NO: 52499 - protein, 638 aa, Oryza sativa
MQRICPAHCSVTHSLTMKSMRLSYIPPAASAAPQSPSYGRKKNASAAPPSAAASTTVLTSPLVTTTRTPKQTEQEDEQLVAKTKTTRTVIATTNGRAAPSQSRPRRRPAPAAAASAASLPMTFCNALEEVINTFIDPPALRPAVDPRNVLTSNFVPVDELPPTPCPVVRGAIPRCLAGGAYIRNGPNPQHLPRGPHHLFDGDGMLHSLLLPSPASSGDDPVLCSRYVQTYKYLVERDAGAPVLPNVFSGFHGVAGMARGAVVAARVLTGQMNPLEGVGLANTSLAYFAGRLYALGESDLPYAVRVHPDTGEVTTHGRCDFGGRLVMGMTAHPKKDPVTGELFAFRYGPVPPFVTYFRFDPAGNKGADVPIFSVQQPSFLHDFAITERYAIFPEIQIVMKPMDMVVGGGSPVGSDPGKVPRLGVIPRYATDESEMRWFEVPGFNIMHSVNAWEEAGGEELVLVAPNVLSIEHALEHMELVHSCVEKVRINLRTGVVTRTPLAAGNFDFPVINPAFLGRRNRYGYFGVGDPAPKIGGVAKLDFDRAGEGDCTVAQRDFGPGCFAGEPFFVADDVEGNGNEDDGYLVCYVHDEATGENRFVVMDARSPDLEIVAEVQLPGRVPYGFHGLFVTQAELQSQHQ

SEQ ID NO: 52500 - protein, 688 aa, Oryza sativa
MRAAEERKGVVPAARRRDQFPVGMRVLAVDDDPVCLKVLETLLLRCQYHVTTTNQAAIALKMLRENRDMFDLVISDVHMPDMDGFKLLELVGLEMDLPVIMLSVNGETKTVLKGITHGACDYLLKPVRIEELRNIWQHVIRRKFSTRDRANLDFYEECNKPPNADSDHVHGHVTCGSPDQSGRPSKKRKEYCSEEEDEGEVNTQDIDDPSAPKKPRVVWSVELHRKFVAAVNQLGIDKAVPKRILELMNVEKLTRENVASHLQKYRLYLKRLSAVASQQVSIVAALGGRDPFLHMGGFEGLQGYQAFTSSAALSSFTPHGLLNSPRNNPAALGTQGVPASKSIQTMSGSHTLSHSINDANKYHLSLPGNQKGNLGQGLATSLGQTQMQQKWIHEETDDLSTILSGNGLSNGMSGTLQSVTSSPLLPQELAECTQAKIVSQPSIRTSSVSSEHIEGAVGVSSGLLESRVSQQSTIPLSGFSANGLLIHGSFNNTCANKLGGTSSSCAPARSSNDLMVARDTKGGASSFGGAMLLPPDTEQKYLNFGGGNGLKQKFDDRTADSLFDLKFVWSSVPSSQLASNIGAHHAMSQRWNNSSSNSSNIGARMIGQATSSGSTVIPQMKTDFLVSGDMAMPKNASDLSIPKLQSELSSSSCSFDGLLNSIVKVEKDDVTFSDDLGCGDFYSLGACI

SEQ ID NO: 52501 - protein, 445 aa, Oryza sativa
MVQNFSKFSLSDIDECALPEEYPCYGECTNKPGSFSCMCPGGTHGDAMNEGGCEPTTLLVAIGGTIGIGIPSVFVIGMAMTNMIKARRAKKLRAVFFKQNRGLLLLQLVDKVIAERMVFTLEELEKATNRFDEMRKLGSGGHGTVYKGTLPDRRVVAIKKSNITVRKEIDDFINEVVILSQINHRNVVRLFGCCLETQVPLLVYEFISNGTLSDHLHVEGPTLLSWKNRLRIALEAASALAYLHSSASVSIIHRDVKSANILLDGRLTAKVSDFGASRGIPVDQGGVTTVIQGTFGYLDPEYYQTSRLTDKSDVYSFGVILVEMLTRKKPTVFESSDNVSLIALFNLLMVQDNIYEILDPQVISEGMENVKEVAALASACLRLKGEERPTMRQVEIRLERLLGGDILQGLSAELHCLPPQLSNTDTTSKLYNMERDFLLSSSFPR

SEQ ID NO: 52502 - protein, 486 aa, Oryza sativa
MKDLKAVAYEADDVLDDFEYEALRREVKIGDSTTRKVLGYFTPHSPLLFRVTMSRKLGDVLKKINDLVEEMNKFGLMEHTEAPQLPYRLTHSGLDESADIFGREHDKEVLVKLMLDQHDQQNLQVLPIVGMGGLGKTTLAKMVYNDPIVQKHFQLKMWHCVSENFEPISIVKSIIELATNRKCDLPDSIELLRRRLEGVIDRKRFLLVLDDVWNEDDNKWNEHLRPLLNSVGGPGSIIVITTRNRRVASIMETLQPYKPACLSEDESWELFSKRAFGRDVQEQEDLVTIGKCIVHKCKGLPLALKTMGGLMSSKHQVKEWEAIARSNIGDSVKGKDEILSILKLSYKHLPSEMKQCFTFCAIFCKDYEMEKDMLIQLWIANGFIQEEGTIELSQKGEFVFNELVWRSFLQDVKTILFRSLDYDFVVCKMHDLMHDLAKDVSSECATTEELIQQKAPSEDVWHVQISEGELKQISGSFKGELRSSNS

SEQ ID NO: 52503 - protein, 883 aa, Oryza sativa
MADDGKSSNQILQELDALSHTLYQAHTNRRTASLALPRSASEVNGGGADVVRAESRPRSRRLSLSPFRSRPKQDKNAIVDDDDDDDGDDDGDKGARRAPSKSQSFAAVTTPGGEAAAVAGEKKGIWGWKPIRALSHIGMNRLGCLFSVEVVAAQGLPPSMNGLRLAVAVRKKETRDGAMQTMPSRVQQGAADFEETLFVRCHLYCSGGAGTGKPLRFEPRPFLLSAVAVEAPELDFGRSAVDLSLLVKESTDKSQQGERVRQWDMALPLAGKAKGGELVVKLSFQIMDDGGVGLFNQTGAATKINSSSSSSSLFARKQSKLSFSITSPKVSRSEPKLTPTKGSPSPDLRGIDDFKLDEPSLPSLAEAKQEQKEPEPPEPEEKVDDSEFPEFDVVDKGVEGQEENVVEAKGAAEEEAKEEKAAAEEAPTSAAGDEVVKEVVHDSAHAWRINELEAITNQIKALESMMLGDAPAAGKTEDTRDGDAAALDTDEEEVTREFLQLLEQGDGKATLAKSVSSLKSGAKRDTGGAADASAACYISDLGKGLGPIVQTRDGGYLAATNPFDIPVERKELPKLAMQLSKPVILRDQRLPGGGAELFQQLCAGGCEALFEKLAALVGTDEVVGKTAEQIAFEGMATAIISARSAALGASSSAAQTVSLLRTMSSAMSDGRQERIDTGIWNAHETPVTVDEILAFSLQKIEAMAIKALKVQADMADEQSPFDVSPASDKRGGGHLLDAAVPPEDWALACVGADTVTMLLVAQLRDPLRRYEAVGAPSIVIIQAVRIAGNDDDDEPKFKVANMHVGGLRLKSADRRNVWDGEKQRLTAMHWLVAYGLGKAGRKGRTAAAAGKSGHDVLWSMSSRVMADMWLKPLRNPDVKIPLK

SEQ ID NO: 52504 - protein, 418 aa, Oryza sativa
MAAATVAASSRFGPAHLLPRSRRKGRAPAPSARATACGAVGRGRRLRCEFVAGGGNGALSGEDDPRLIDRQKALDAAMNDINSSFGKGSVTRLGSAGGAFVETFPSGCLTLDFALGGGLPKGRVVEVYGPESSGKTTLALHAIAEVQKLGGNAMLVDAEHAFDPAYSKALGVDIENLIVCQPDNGEMALEIADRMCRSGAIDLICIDSVSALTPRAEIEGEIGMQQMGLQARLMSQALRKMSGNASKAGCTLMFLNQIRYKIGVFYGNPEVTSGGIALKFFASVRLEIRPIGKIKSAKGDEDVGVKVRVRVQKSKVSRPYKQAEFEIIFGEGVSKLGCVLDCAELMEVVAKKGSWYSYKEMRLGQGREKALQYLRESPTICDEIEKAVRAMIPEGARHMSLLAFGRSSLTEEEQVDDE

SEQ ID NO: 52505 - protein, 454 aa, Oryza sativa; identical to SEQ ID NO: 37040

SEQ ID NO: 52506 - protein, 447 aa, Oryza sativa
MAGHGTQEMECCFVVPSEKTPKHVLWLSPLDIVLANRGALTPLVHFYRRRHDAAGGGGGFFDVGRLKEALAKALVAFYPLAGRFRVGGDGRPEIDCNADGVFFAVARSELAVDDILTDLKPSPELKRLFIPRTEPPSAVLAVQVTFLRWGGIVLGTAMHHAAVDGHSMFHFLQTWAAFCRDGDAAVVELPCHDRALLRARPRLAIHPDASSVFCPKLNLRPPSASGSGLISAKIFSISNDQIATLKRICGGGASTFSAVTALVWQCACVARRPPLCSQTLVRFPVNIRRRMRPPLPDRYFGNALVEVFAAAAVEDIVSGTLAAIAARIKGVIGRLNDDEMLRSAIDYNEMAGMPDRPDNGSLPETELRVVSWLGIPLYDAVDFGWGKPWAMSRAESLRGGFFYVMDGGAADGDGGDAAAVRVLMCMEAANVEEFERLLRAKFVYPRI

SEQ ID NO: 52507 - protein, 229 aa, Oryza sativa
MASFPTTAAAAAAQAFAFALAPKPSSSAAAPSALFPRTAAAVAFPTLAVRGSGKARQPVVAAAAGAGTGSEQRETILLPGCDYNHWLIVMEFPKDPAPTREQMIDTYLNTLATVLGSMEEAKKNMYAFSTTTYTGFQCTVDEETSEKFKGLPGVLWVLPDSYIDVKNKDYGGDKYINGEIIPCTYPTYQPKERRTSKYESRRYERRRDGPPASRRPRPQTAQPESASSS

SEQ ID NO: 52508 - protein, 402 aa, Oryza sativa
MPEPEVGVLGGRGLHRDGLKGWPDLRSLSGKKMTTPPPPPVEKQQQQARPAAVAPPDQTLEFSDGLLLRVLACLPEPHLTGAASLVCRRWMRLAGRLRRRLVVRDWAFVTHRLHHRFPELADLDLFPASIVAPAVPSPTSPLLTCAEVSLTLDTGADPPLVACRFLADDVLDRGLVAVAASFPNLRRLSATAASESGGLMDIAGGCATLQELELHRCTDLALRPVSAFAHLQILRLVAASSALYGTSEDGGVTDIGLTILAHGCKRLVKLELVGCEGSYDGIAAVGRCCAMLEELTIANHKMDNGWLAALAFCGNLKTLRLQGCCRIDDDPGPAEHLGACLTLESLQLQQCQLRDRRALHALLLVCEGARELLVQNCWGLEDDMFAMAGLCRYSNHQSHFSI

SEQ ID NO: 52509 - protein, 176 aa, Oryza sativa
MALQLQAATPHPPLPLRSSRRRFAAPPSPLVLRAVASSRDGPSTRLSSPAPAPPRRRRRASVRARAGAGRGGRGESPYDVLGVPPSAPPEEIKRAYRRLALKFHPDVNKEPNAQEKFLRIKHAYNTLMNSESRSKYASTSSNTYYSSRTYGKSSTTSADEEEPFYGFGTGIPSLLH

SEQ ID NO: 52510 - protein, 477 aa, Oryza sativa
MAMQAAFAASMFPQLAQRRGSDRAVVVAPPAPAPVRVAMRSGGAAAAAARGVRCRASLIEPDGGRLVELVVPEEGGRREAARREAAALAHRVRLGRVETECLHVLSEGWASPLREFMREAEFLQALHFNAIRGGGGAMVNMSVPIVLPLGDAQRRAIEASGARRVALVDAADRPLAVLSDIEIYKHNKEERIARTWGTTAPGLPYVDEAITNAGDWLIGGDLEVIEPIKYNDGLDQYRLSPAQLREEFARRNADAVFAFQLRNPVHNGHALLMTDTRKRLLEMGYKNPVLLLHPLGGFTKADDVPLSWRMKQHEKVLEEGVLNPESTVVAIFPSPMHYAGPTEVQWHAKARINAGANFYIVGRDPAGMGHPTEKRDLYDADHGKKVLSMAPGLEKLNILPFKVAAYDTKQKKMDFFDPSRKDDFLFISGTKMRTLAKNCQSPPDGFMCPGGWKVLVEYYDSLTPSADSSKLREAVAA

SEQ ID NO: 52511 - protein, 539 aa, Oryza sativa
MPSCCCLLGLGFPSPPSALRILRRRMASRAFQLRLNPLTGDSEWLVVEEEEEEDHHPTPPPKQLLATTSYLDMLNDSARNRAYRRAIEAAVTDPSSRVLDIGAGTGLLSMMAARALAAVGGETRGGSVSACESYLPMGKLMRRVLRANGMENRVKVFHKRSDELKVRDDLDSPADILVSEILDSELLGEGLIPTLQQAYDMLLAKNPKIVPYRATTYGQLVESTFLWKLHDLHNNEANAADGVWLTPGEMERIVSVKPQQHAMQCDALEDEIRLLSEPFKVFEFDFWKRPDSHREANIKIRTTRDGYVHAIISWWVLQLDSAGSIFYSTAPRWARQSSSEGPQRDMKDWCDHWKQCVWFMQGKGIPATEDQVLSLRARHNQTSISYQLNINDEACDRSSKGDHLTLLPERIALYGDKDWRSALINTIKNALTVKSSPTCVVADDSMFLALLISSMSPTSKVIAMYPGLRDKGAAYLRSVADANNFSIDQIQVIGKRASSITADDLKHKKVNLLVGEPFYLGSVNASVAKSTFLECEDPT

SEQ ID NO: 52512 - protein, 416 aa, Oryza sativa
MEGSRISTELALSFQEAAGCSYIWDNICDIQRNIQFNNLGVGPRPTSVSLEASRVLHSNDESFRSVNGELRELPPVELSNLPLILKTILEGGITDQMRVAELITQDREFFPKLLDIFRICEDLENLDDLHMIFKLVRGIILLNSSSIFDKIFSDEFILDIIGALEYDPDVPKVQKHRAFLKDHVVFKEAIPIKNVSVVSKIHQTYRIGYLKDVILPRVLDDGTLASLNTMIHSNNAAVISLLKDDSCFIQELFARMRLSNISMESKRELVLFLHEFCTLSKSLPLVQQLRLFRDLSGEGVFDIISDVLQSQDRKIVSAGTDVLILFLNQDPNLLRSYIVQQEGNSLLGLLVKGMVTDFGEAMHCQFLEILRILMDSFTMSGAHRDAVIEIFYEKHLDYLVDVIASSCPPRNIFQSI

SEQ ID NO: 52513 - protein, 47 aa, Oryza sativa
MFFTVAARTTSLNSITYSPSRPQHRRAAWHRSVAFLFGIKVDSVAHC

SEQ ID NO: 52514 - protein, 133 aa, Oryza sativa
MCQVLLLMASSISMDMADPIVGSKNEIRERYMRLAEITELIHVTSLIHDDVLDDANTRRGMDSLNCVMGKKLAVLAGDFLLSKAFSTAAVSLDNAEVILLLATAVNNLVTGEFMQMRITPIQRCRSHITRQLH

SEQ ID NO: 52515 - protein, 321 aa, Oryza sativa; identical to SEQ ID NO: 33200

SEQ ID NO: 52516 - protein, 408 aa, Oryza sativa
MTSVGLVDSSSGFPETSTSGATDRLTDDISEMSIRDKEVEAVVVSGNSMDIGHTIVTTVGGRNGQPKQTISYIAERAVGRGSFGVVFQAKCLETGERVAVKKVLQDARYKNRELQTMQVLDHPNVACLKHYFCSTTAKEELYLNLVLEYVPETVHRVIRHYNKMSQRMPLIYVKLYMYQICRALAYIHNCVGVCHRDIKPQNILVNPHNHQLKLCDFGSAKVLVKGEPNISYICSRYYRAPALIFGATEYTTAIDVWSAGCVLAELLLGQPVFPGDSGVDQLVEIIKVLGTPTREEIKHMNPNYTEFKFPQIKAHPWHKIFHKRMPSEAVDLVSRLLQYSPHLRCSALEVLIHPFFDELRDPNARLPNGRTLPPLFNFKPRELKGASMEFLVKLVPQHAKKQCAFLGL

SEQ ID NO: 52517 - protein, 236 aa, Oryza sativa
MDPRFPPPAPSGGAPPRGHHRRAHSETFIRLPDADLLLDPDGEFGFSDLDFPSLSDDSPAASDPTPPPPPPALPQAAPRPPGGAHLRSLSLDAAFFDGLAFQGGGGGGGAGSGSSGGGAGHKRSGSMDGESSLFEGESAPPDYAKKAMPADRLAELALLDPKRAKRILANRQSAARSKERKIKYTGELERKVQTLQTEATTLSTQLTLLQVCIIAQACGASATTTIKVRLVLYLIS

SEQ ID NO: 52518 - protein, 253 aa, Oryza sativa
MFDFQILSLSCPGARRLRFTMQRGRKNGATPEGDVQQPGRVQGARQGSLRYLGPRRWPEPVDGVDALPGTRPRAAARQGGPAAWRRNGADEGAARRGGAGVEEPAEEEGCGDGARGGAGLDGERSSRHHAERVNAKLGKALADAERELEREWRSRERLEKVCDELVRGGLTGGVDGNRGGKEEVEEMRREAERAQEELEKEREMLRLADELRHRGLPTRGAAHRHTKAMNCGDQLRRSSTGAYSHLSFSLRFP

SEQ ID NO: 52519 - protein, 653 aa, Oryza sativa
MFYISCFDQNKLRVYLAPFIHGMRYTSFGRHFTKKEKLIEIAEKLHWYVQPGDMIVDFSCGTNDFSQFMKEKLDKVGKRCNFKNYDVIQPKNSFSFEKRDWMTVRQKELPHGSKLIMGLNPPFGPKAMLANKFIDKALTFKPKLIILIVPKEAERLDRKQQPYDLVWEDDQRLSGKSFYLPGSLDVSDKQIDQWNKSPPPLYLWSRPDWTQKHKRIAEQHGHTKANVFSHNEEDLVYLFEDRATQNHDVNNKNYTSGNGNFTAEKPVQADAFPPEKLVEVAYEEMKVASNRSSMYQSDQISVHDERDAHSDLPMSRHNSMKAKEVSNSSRDRRKSDKTGHEADSDMSILPSDSRNFLHKSGNLEPPISSRSGYTLERLRYHDNHFDHLVGEHSSSSLQMPIFEDSYFRSVNEYGVASVENNIALSTDNVGAGSRMYSPDPELNGYAVDPTVNAYGSVSGGTGGSFYRRQNLEDYTMDSSESAQMNPVPGRDVQEYARTYYGHNRDEVPQTAINTPSMDIRTHIRMYGRHIRDDHTQTTMNPPANDIRAQIRMYGQHATSDHQHASRYSSGSPDARFEQQPSFTSYGMPSLGSTGRSMMDRYSPSIDETSYRTGQRGPYNASDFRRDRHPDDMNFALHNQYPYPHPGSSGGWHD

SEQ ID NO: 52520 - protein, 273 aa, Oryza sativa; identical to SEQ ID NO: 49752

SEQ ID NO: 52521 - protein, 314 aa, Oryza sativa
MEESVGSRGGGGGGLDAQIEQLMECRPLSEPEVKTLCEKAKEILMEESNVQPVKSPVTICGDIHGQFHDLVELFRIGGKCPDTNYLFMGDYVDRGYYSVETVTLLVALKVRYPQRITILRGNHESRQITQVYGFYDECLRKYGSANVWKIFTDLFDYFPLTALVESEIFCLHGGLSPSIDNLDSVRSLDRVQEVPHEGPMCDLLWSDPDDRCGWGISPRGAGYTFGQDISEQFNHTNNLKLVARAHQLVMEGYNWAHEQKVVTIFSAPNYCYRCGNMASILEVDDCRNHTFIQFEPAPRRGEPDVTRRTPDYFL

SEQ ID NO: 52522 - protein, 234 aa, Oryza sativa
MLVIYQKSANHVPLKILSIEDGTPLKTFTQLLHRSRKVDFIEQFNEKLLVKQDKENLQIIDVRNSNLIEVNKTEFMTPSAFIFLYENNLFLTFCNRTVAAWNFRGELVTSFDDHELWHSNCNTNNIYITADQDLIISYCKASKEVRDSGGCEGIAPPTGSINMSNIFTGKCVAKISPLDPTLTIAPRKRGDSSRSTIRSTVSDALEDITALFYDEDRNEIYTGNSKGLVHVWSN

SEQ ID NO: 52523 - protein, 323 aa, Oryza sativa; identical to SEQ ID NO: 31644

SEQ ID NO: 52524 - protein, 353 aa, Oryza sativa
MSTIYMSQLPATLPLMEGDQDQGLYPAFHRAKDPPILFPFMIDSAVEHQGQIYGDQGLRRQQVLGESNQQFNDHMMMGGSDVFLTPSPFRPTIQSIGSDMIQRSSYDPYDIESNNKQHANGSTSKWMSTPPMKMRIIRKGAATDPEGGAVRKPRRRAQAHQDESQQQLQQALGVVRVCSDCNTTKTPLWRSGPCGPKSLCNACGIRQRKARRAMAAAANGGAAVAPAKSVAAAPVNNKPAAKKEKRAADVDRSLPFKKRCKMVDHVAAAVAATKPTAAGEVVAAAPKDQDHVIVVGGENAAATSMPAQNPISKAAATAAAAAASPAFFHGLPRDEITDAAMLLMTLSCGLVHS

SEQ ID NO: 52525 - protein, 884 aa, Oryza sativa
MNVVGRVGSLISQGVYSVATPFHPFGGAVDIIAVEQPDGSYRSTPWYVRFGKFQGVLKGAEKVVTITVNGVYASFHMQLDNSGQAYFMRELVPGSENSGTSSEEEEASCEPEPPARSKSDGDLYIGAKGRPGSPESNVECQEKQAIEEFDSYGYSRMEVAEDSAKQPDGSNSEMVLVSVDGHVLTAPISSTEENVEDVQLSEPQFHLGPGESSSGDFSRSGEVWEAGIVGDLYMPQEKVKFDSGNQQEALEELGDVPIETDKSHHVPVTGDEVLHTSVYEDVTSALTNEVESLVVPELGNNDEDYQALINVDEVHDISENKNEGCRPPSSQYEVCDVSKTDDEGYQPLATEELGDVPIETDRSHHVPVTGDEVLHTSVYEDVPSALTNEVESLVVLESGNNDEDYQALINVDEVHDISENKNEGCRPPSSQDEVCDVSKTDDEGYRPLATEDEARDVSKNNDEGYQPLATENEACDVPLLENDEACRVPANVDKVCDVSNEDTELEIASPSFGKYDTFKSCLDLSSQIDDGDSGTEPFSPEFDHQQGFEFSLSNRSVVDIDLEEDISKTTHCDRNDPLQYLEEDNKTEGEDSSAHCRKVSDMSIVGGSHGKTKETASSENEANRPDGLHSTIGTSDKDKLGSIPENSAAEEELNKEEHPKLQKGLGFEISLCGHMLRPGMGQASAEEVFQQHLVLEEDFKLSGSSIMKNVNLVVKFDSQYFLWSKISHIILGKAVFGPNFCTEHIDAIPVEHQETPTSRDSLGLSPSSRRWRLWNIPFRISRSLQRSNSDSSEDIFLDTETVLSPMDEQTPENNINQSPRKQFVRTLIPTSEQVASLNLKEGQNIVTFSFSTRVLGKQQVEAHIYLWKWNAKIVISDVDGTITR

SEQ ID NO: 52526 - protein, 936 aa, Oryza sativa
MVAPKEGTLQALAYFIVPSELPPGIDPDAAFIVCVRFGQYTAKLDDGSSVHVPSKYAEWVVDYRQCTLESLEKDFAARVKWGRCQQVVVYGYDKRTGKETKFLDNMDLAHALFDWKRERRLILFVDVEDKSGQLVTSSSISEVNELVMGEVVTAKQGDALDSSNQHLIDWDSFKISPILEEQIGSSVPMMKEDEMSIPQEQVPQHVIDWDGLEIAPIPEEQIGSSLPVMEEDEMYDFLGLRTEDERADQARLEAEKQRDSAPGPAPRLAQRDLNLDEAEIDARFEAEIFYDRDDPPMIVGSSYGSMVEFRSAVRQHAIKGQFELGTEKSDPERFRGYCKAEGCPWAIVARLMPDGKSVKVTLNRFAHACTSIEGVKTKMVSYKWVAEKAIPFLKKDPNMGAKKLKEELETKYNVTVGYSKVWQGRQKAVEQIFGSWEESYLFNFKAEVELKMPGSVVEIDVQEDDDGIYFCRFFCAFKPCIDGFMNGCRPYLSIDSTAFNGKWNGHLPFVTSIDGHNWMFPVAFGFFQSETTDNWTWFMQQLHKAIGKPSHLAISSEACKGLENAVKSVFPWAEHRECFCHLMQNFVEKFPGPMYGNMYPAARSYMQDRFEHYMNIIHETNSDVKPYLETYHKLLWMRSKFSEEIKCDFISNNLADLWNKWIKDMKDLPVAELADAIRSKIMDLLARRKKIGEKLDGEMLPIIVRQLNAMTRSLGHLRVVQGDRDQAEVAEITPEHEIIRHRVNLAKHTCTCREWQVSGKPCPHALALIISTRNPRMADYLDPCYSVQKYKLAYAGVIHPLSDKSQWPKVNLGFNLLPPLTKKDVEKQRKNMIVGCLDKEQGKLRTKGKWQVQCKSCLGMGHRATSPKCPLNSQKIMKNSDKQGRPLGSTSCAAGASTPKRQKVSRNDSSNASPGPVSERQLALTKAAGEDNFYCA

SEQ ID NO: 52527 - protein, 447 aa, Oryza sativa
MFKHLGRLLSWRSQGGKDLLVRTCVVAALASALFTNDTCCVVLTEFILKIARQNNLPPKPFLLALASSANIGSAATPIGNPQNLVIAVQSGISFGQFVFGILPATLVGAVVNAAILLCLYWRHLSDEKCVEVVAPVPTDVVEEEDVTSHRFSPATMSHPRSSSHHHHHQQPGSSLSSPDCEVFEPVKPVPVTSNGDSNNKPDAADAAVVVGIHQRRGGVGGGVRMKEEHAFRWVEEKEEAMEQWKSTVWKTGVYVITLSMLVALLLGLNMSWSAITAALALIVLDFKDARPCLEKVSYPLLLFFCGMFITVDGFNKTGIPSAFWEFMEPYARIDTPTGIVILALVILLLSNVASNVPTVLLLGARVAASAAAISPAAETNAWLILAWVSTVAGNLSLLGSAANLIVCEQARRSEQYGYTLSFFSHLQFGFPATLIVTGIGLLLIRSN

SEQ ID NO: 52528 - protein, 456 aa, Oryza sativa; identical to SEQ ID NO: 46313

SEQ ID NO: 52529 - protein, 366 aa, Oryza sativa
MLRERSSRRRMASSSTAAAALVVAALLLSSSPSPAAAAAGRGGELRMEHSDGGYSYNRTLAHIFVQYASAVYTSDLTSLFAWTCPRCQSDTKGFEMIEIIVDVENCLQAFVGVAPDPQSILIAFRGTQEHSVSNWIEDLFWKQLDVGYPGMPDAMVHHGFYTAYYNTTVRHEILESVRWARKTYGRLPINVVGHSMGGALASFCALDLSVKYGSQEVQLMTFGQPRVGNPSFAAYFSDQVPRTIRVTHQNDIVPHLPPYFCYLGEWTYHHFSREVWLHETIVGNVVTRNETICDGSGEDPTCSRSVYGRSVADHLEYYGVSLHADSRGTCQFVIGSTNMAYGTILEVDRTIIMTRYPQEWHAVESI

SEQ ID NO: 52530 - protein, 249 aa, Oryza sativa
MLRRNTRLRREYLYRKSLEGKERQHYEKKRRLRAALREPKILLTTSRNPSAPLTQFVKELKVVFPNSQRMNRGGQVISEIVESCRSHDITDLVLVHEHRGQPDGLIVCHLPFGPTAYFGLLNVVTRHDIKDRKAMGKMSEAYPHLILDNFTTKTGERTANIVKHLFPVPKPDSKRIITFANRDDYISFRHHVYEKHGGPKSLDLKEVGPRFELRLYQIKRGTVDQAEAQNEFVLRPYMNTAKKQKSLGA

SEQ ID NO: 52531 - protein, 245 aa, Oryza sativa
MAGSSSELIYRRGHDAQPAAGDVDGCGVMAAAGYSSSAKPPHKPPLGPLRYLLAEQRLVFALVGMAIASLVFLLAAPSSGNGGRHEVMNGGAARLAAAGLAVRQYSGVAAAAAGARVPLGLKKKGLRVVVTGGAGFVGSHLVDRLLARGDSVMVVDNRALQAQPRQDHQDQRRRHPQQARPRQARRRPLPPHQHQRGLRRPAPAPPGRDLLGQRQPHRGEKLLRRGEEDGGDTDHGLPPWRQPRG

SEQ ID NO: 52532 - protein, 512 aa, Oryza sativa
MASPEREEEEAARSPPPKRPRRDGDAPPEPQPARVGLNPADCDLDFDVGGGGLRGEALHDGGFAYCWSGARATVGVRGGGKYCFGCKVVAEQAVEMEDTAADQQHLCRVGVSRGGDPVGALGETGHSFGFGGTGKFSHQGKFVEYGVKFGVGDTVVCAVDLDSKPLASIGFSRNGEWLGIAKHFDASDKGLGLVESPVSSMQWESAIFPHVLLKNVVVEMQFSKEDGLQLVDGYELWPSACVDGNAVSGPVFAEQKECEIMMMVGLPASGKSTWAEKCIKEHKEKRFILLGTNLALVQMKVPGLLRKNNYGERFERLMDRATMIFNTLLTRAAKIPRNYIIDQTNVYKNARSRKLRPFANYRKTAVVVFPSPSELKVRAAKRFKEMGKDVPADAVNEMTANFVLPLSKDMPDSKEPFDEVIFVELSRDEAQRNLDEMKRLLPKASTPSYANFSNQNVSSTYSGTIAGTMPSLSPGYHRQMDSPYGSGVQTAKGLDTPTGSMGCSGFPESSRD

SEQ ID NO: 52533 - protein, 248 aa, Oryza sativa; identical to SEQ ID NO: 30794

SEQ ID NO: 52534 - protein, 331 aa, Oryza sativa
MATSPESLCGIGPPPFRQFVEYVVNLKFDEEPNYAKCIALFDGIVGPNPDGRPLNTDGAQKLVYQVGQKRGRLTAAEDEEQPKKKIRMGMPATQWISVYNARRPMKQRYHYNVADDRLAPHIQKGNEDGLFISSVSSCSDLWALIMDAGTGFTAQVHELSHYFLHKEWIMEQWERNYYITSLAGSNNGSSVVIMSTGTPYAQQSYKVSDSFPFKWINKKWKEGFYVTALATAGSRWAVVMSRNAGFTHQVVELDFLYPSEGIHQRWDSGYRITATAATCDQVALILSIPRRKPNDETQETLRTSAFPGQHVKEKWAKNLYLGSICYGRSVS

SEQ ID NO: 52535 - protein, 146 aa, Oryza sativa; identical to SEQ ID NO: 43044

SEQ ID NO: 52536 - protein, 540 aa, Oryza sativa; identical to SEQ ID NO: 44008

SEQ ID NO: 52537 - protein, 488 aa, Oryza sativa; identical to SEQ ID NO: 31696

SEQ ID NO: 52538 - protein, 143 aa, Oryza sativa
MLATLITIPSMPTSPLGGTSGAAWGPYTGWWNGHAHCPGHCVAELPTHASERTKSVTTAFCAGVNRPYQRIDTGMSPLSTAPLWYVSWFGWGLTKDISFLSAIADTANPATTSIIASNKLCFFAIPARRAQINLGEDCVCVSV

SEQ ID NO: 52539 - protein, 120 aa, Oryza sativa
MNAPDRYERFVVPEGTKKVSYERDTKIVNAGSFTIEREDHTIGNILRMQLHRDPNVLFAGYKLPHPLQYKILVRVHTANQSTPTQAYTQAINDLDKELENLKQAFEDEKIRYEERPKQGY

SEQ ID NO: 52540 - protein, 68 aa, Oryza sativa
MPSVQAAGTAMPVPLAPYPTPVPFTPPNGAQSQLVCSGCRNLLMYPAGATSICCAVCSTVTVVPAPEI

SEQ ID NO: 52541 - protein, 718 aa, Oryza sativa; identical to SEQ ID NO: 42874

SEQ ID NO: 52542 - protein, 785 aa, Oryza sativa
MEASSWLCYQARGFGSSRVWLWLLLALVLLNCSLVLSASPYLVGMGSFDITGPAADVNMMGYANTEQIASGIHFRLKSRAFIVAEPNGKRVVFVNIDACMASQIVTIKVLERLKARYGDLYNENNVAISGIHTHAGPGGYLQYVVYIVTSLGFVRQSFDVIVDGIEQSIVEAHNNLRPGKIFVNKGDLLDAGVNRSPSAYLNNPAEERSKYEYNVDKEMTLIKFVDDELGPVGSFNWFATHGTSMSRTNSLISGDNKGAAARFMEDWAEQMGLPKQSAHANSDDLRSLHKTSVLPRRVSTIIPEPNEITDDLIQLASSYEASGGRRLAGSSITRRIRSTQQNKPKFVSAFCQSNCGDVSPNVLGTFCIDTNLPCDFNHSTCNGKNELCYGRGPGYPDEFESTRVIGNRQFLKARDLFDSASEEIQGKIDYRHTYLDFSKLEVKVSTSAGGQQTVKTCPAAMGFAFAAGTTDGPGAFDFRQGDVKGNPFWKLVRNLLKTPGKDQVECHSPKPILLDTGEMKEPYDWAPAILPVQMIRIGQLVILCVPGEFTTMAGRRLRDAVKTVLTSGNSEFDKNIHVVLAGLTNSYSQYITTFEEYQIQRYEGASTLYGPHTLSAYIQEFQKLAMAMIANKEVPTNFQPPDMLDKQIGLLPGVVFDSTPLGVKFGDVNSDVPGNSTFNKGSTVNATFYSACPRNDLLTDGTFALVEKLDGNNNWVPVYDDDDWSLRFKWSRPARLSSRSFATLEWTVPEDAAAGVYRLRHFGASKPMFGSVRHFTGTSRAFAVR

SEQ ID NO: 52543 - protein, 320 aa, Oryza sativa
MGSRSGGRHRLFLRFIALWSLLLIAAGEVIFEERFEDGWESRWVKSDWKRSEGKAGTFKHTAGRYSGDPDDKGIQTTLDARHFAISAKIPEFSNKGRTLVLQYSIKFEQDIECGGGYIKLMSGYVNQKKFSGDTPYSLMFGPDICGTQTKKLHLILSYQGQNYPIKKDLQCETDKLTHVYTFILRPDASYSILVDNRERESGSMYTDWDILPPRKIKDVHAKKPKDWDDREYIEDPDAVKPEGYDSIPKEIPDPKDKKPDTWDDDDDGIWKPRMIPNPAYKGPWKRKVCFFCLWQPILLGALSFKSSYSYILLCTENQES

SEQ ID NO: 52544 - protein, 439 aa, Oryza sativa
MSGAEEEEEEEEVSYEARDRVLSSSSCSSTSASDDDDHPRRGRDAAAAAAAAAAAALDVWTSEPAPVQERRRRLLQMMGLSGDPSLARLEMGRSASYDGPIRPETVSPISRSRSDGSVPASATKPPLAARSRQTSSDSSEATPGGDDADPRCLIRNLDDGSEFVVKEESALREVGTGRQLTMEEFDLCVGRSPIVQELMRRQNVASSGSSNGASALIQRSSSDSSNGATRHRRRGSWLRSIRNVAGSMVVGSRDRRSSDEKDTSSEKGGRRSSSATDDSQESASAVRRGPERVKVRQYGKTCKELSGLFMNQDIQAHNGSIWSIKFSHDGRYLASAGEDCVIHVWEVSELERKREGNGVCNQLVAVVCNGSPEPILALASVDGSCWEKKHRARILETRKSASSDRLMFPEHVFALSEKPVKTFEGHSEDVLDLCWSKSQ

SEQ ID NO: 52545 - protein, 298 aa, Oryza sativa
MKVGRGSRGGGGRDGGGVVEEERSGGVEAAPPVKRRRVAVAPSAGAGGSRRVQAEASPLQRLFRACRAVFRGTGTVPAPGEVDLLCSMLDKMKPEDVGLRADQEFFTARDDDEGIPLIKNTTLYECDNFTMIIFFLPRNAIIPLHDHPGMTVFSKLLIGSLHIRSYDWVDPEPALSCSSSSGDQLRLAKRVVNGVFTAPCDTSVLYPTTGGNMHRFRAIAPCAILDILGPPYSTEDGRDCTYYRAIPYSRHSVKNGAADQLTGVDEEGHRLSWLTETIPRMLRMRQIRYGGPPISDDE

SEQ ID NO: 52546 - protein, 656 aa, Oryza sativa
MSHPSSSSSSAPPAAAEATSLAPGFRFHPTDEELVSYYLKRKVHGRPLKVDAIAEVDLYKVEPWDLPARSRLRSRDSQWYFFSRLDRKHANRARTNRATAGGYWKTTGKDREVRNGPTTVGMKKTLVFHAGRAPKGERTNWVMHEYRLDGQTTIPPQDSFVVCRIFQKAGPGPQNGAQYGAPFVEEEWEEDDEDVGLLPVEEKDNSDDQEKEISGAMEKGYLQMSDLVQNLVDQNENGTIALPVSDNSNNSNHSEDVDGNSGDILSDQNLGSNFLHHVEPVEQNGLVLNENMFSSANAGDLFNISSPNDGFLELKDFADIADLENPLANESTIWPSDGWPWKSTDSMEAVNGASNEFSPLAGEQIFQPEELEQLLQSLQEDSHMGSTISDPPHSSITNLAKPEEDCLMFYDAPFDSSMCDDGFRQLNGFLGSPSTNLSGIDMVDDGMPYYDAMDDNLFNDLLSSVQPSAGSSSHAFSGPVLTQEVNNSTYTYSPTQKVLEPNFVVGAPSSARLPEAGSQLNYVVLPDSQTKSSLIGKRFVKILDSISAPPAFAAAEFPASLRKSLAPISGAHHNTIRVSAEVISIGSLTPDSQDKWSLEKDEGMELLFSAGFEPDTRVHFGCNTITAVLRGGFCLFFFSAIMLLVSYEVGMCIYGK

SEQ ID NO: 52547 - protein, 319 aa, Oryza sativa
MAASSHYALLHHHLPNPLHPRHLSSSSSPSPPPPLHLHLHLHRHRLALSTARFFRLAERRASAGPLVFETEEERSGWSGAEAAESNYDDEEDEEEEQGWAGGNAAGWRGESHEDDQEEGSGSGEGRRPRRSRPRELFVCNLPRRCDVDDLYELFKPYGTVLSVEISRDPETGLSRGCGFVTMRSLPEARTAMNALDGFDLDGREMLVKLSSDVVSKRRNINMTHTPPVKDHIFESPHKIYVGNIAWSVEPQELREYFSQCGTVVSTRLLTDRKGGRGRVYGFLSFASAEELEAALKLDNTHFHGRNILVRQAHEERQAH

SEQ ID NO: 52548 - protein, 189 aa, Oryza sativa
MVDIGCGSGRFLIWLAKNSGERRNYLGLEIRQKLVERSQFWVTELGLRNVYFMFANATVSFNQIASSYPGPLSLVSILCPDPHFKKRHHKRRVLQSQLVDSITNNLCLGGRVLLQSDVLEVAADMRERFDEYSDVFEHVDCIDKDLRCDNEGWLLDNPMGIRTEREVHAELEGATIYRRMYQKTRDVSH

SEQ ID NO: 52549 - protein, 68 aa, Oryza sativa; identical to SEQ ID NO: 40551

SEQ ID NO: 52550 - protein, 523 aa, Oryza sativa
MVVLAASIISKSGKALVSRQFVDMSRIRIEGLLAAFPKLVGTGKQHTYVETENVRYVYQPIEGLYLLLITNKQSNILEDLDTLRLLSKLVPEYSPSLDEEGVCKTAFELIFAFDEAICLGNKENVTVQQVKQYCEMESHEEKAHKLMMQSKINETRDVMKKKASELDKMKMERGKLDKGGYSAISGPRVVEKAFGDMSITGSGFGSGSGLGGLSMDMDSFASKPKGRPSAAATAPGKGLGMKLGKTQKTNQFLESLKAEGEVILEDVQPSSVQSRVSPLPPSDPVTVTIEEKLNVTVKRDGGVNNFDVQGTLALQVLNDTDGFIQLQIENQDVPGLSFKTHPNINKDLFNSQQVVGAKDPNRPFPSGQNETPLVKWRIHGMDESSLPLSVNCWPSVSGNETYVNIEYEAAEMFDLHNVVISIPLPALREAPSVRQIDGEWRYDSRNSVLEWSILLIDQSNRSGSMEFVVPPADPSTFFPISIGFSASSTFSDLKVTGIRPLKDGNPPKYSQRARLVTANYQVV

SEQ ID NO: 52551 - protein, 561 aa, Oryza sativa
MITAADFYHVMTAMVPLYVAMILAYGSVKWWRIFTPDQCSGINRFVALFAVPLLSFHFISTNNPYTMNLRFIAADTLQKLMVLAMLTAWSHLSRRGSLEWTITLFSLSTLPNTLVMGIPLLKGMYGEFSGSLMVQIVVLQCIIWYTLMLFMFEYRGARMLITEQFPDTAANIASIVVDPDVVSLDGRRDAIETETEVKEDGRIHVTVRRSNASRSDIYSRRSMGFSSTTPRPSNLTNAEIYSLQSSRNPTPRGSSFNHTDFYSMVGRSSNFGAADAFGVRTGATPRPSNYEDDASKPKYPLPASNAAPMAGHYPAPNPAVSSAPKGAKKAATNGQAKGEDLHMFVWSSSASPVSDVFGGGAPDYNDAAAVKSPRKMDGAKDREDYVERDDFSFGNRGVMDRDAEAGDEKAAAAAGADPSKAMAAPTAMPPTSVMTRLILIMVWRKLIRNPNTYSSLIGLIWSLVCFRWNFEMPAIVLKSISILSDAGLGMAMFSLGLFMALQPHIIACGNKVATYAMAVRFLAGPAVMAAASFAVGLRGTLLHVAIVQAALPQGIVPFVFA

SEQ ID NO: 52552 - protein, 407 aa, Oryza sativa
MAWSSCRAAFQSAESPSCLSGTCAAKPGGGEHMPEADHDHEPPCGAGGVGVGDGGGLFSSASNPLFFPDNGDHHGMSLSGSVFTFCALNSPEKGNLPLARAGRGGGGCGGAAPARLEENTAARLLSQRYVLRSTAAPPCKCRSFPANSISSPLSTGSAVELLDGGGPPHRTWHGHGDGDDTKKKPPFHPLSLGNPVKSTPSAPAPRLPRKWYQPFSLDKNSLKKRRNTASDGGAAAWWESRRNPATTRHPLGVIWLGATPRWRRSSQAKGCSGRRIPASSARAYTHAAPGGGAEHARRSPAGRAANSARTPYFLQTASTASCVRRDEAMWSATDLGNGESAAAASARRWSGSVERERKASASMISTEDDGEEEEECIVFCASFLSPSSNGAFTPVSLSKIFTSYQNI

SEQ ID NO: 52553 - protein, 248 aa, Oryza sativa
MIRITLKLQACHALRCHQRGLFLDQLTAGHESPSSCRSSGPTLYFPFQQPLGYSNECGTGDGASMNSLWFNQNDFNCSTISTVMPPVSPSALSTSMGLNLPPENPRHGGTGIGNTPFYWDGSNPSSSGSTGSSGSNSMGFEPQSTTSILENSVFPWTDIGQEKDTRVHLVEELKWPDLLHGTFAEATTAMQNQSQSLYDDVIKAESQFNMEGICASWFQNQQPQQQLQAASDMYDKDLQRLPLSFEHI

SEQ ID NO: 52554 - protein, 463 aa, Oryza sativa
MESEVCWLLCAALAAAMACYYLTGTMRRRSRRLPPGPTPLPVIGNVLSLRGNMHHALARLAGEHGPVMALKLGLVTTVVVSSAGAAREAFTKHDRRLAARAVPDTTRARGFASRSMIWLPSSDPRWKTLRGVAATHVFSPRSLAAARGVRERKVRDIVGHLAGHAGEVVDVGKVVYGGVLNLRRLDLQGWRRWAEKRYDKVFGIFDSVINSRLADASTGKHADAGAGDFLDSLLDLMSAGTIARDDVTSIMYDLFGAGTDTIAITVEWAMAELLRNPSVMAKARAEMNHVLAGKVKATEMEENDVEKLPYLQAVVKEVMRLHPAAPILVPHRAEEDDAEIGGYAVPKGSTVIFNVWAIMRDPVAWERPEEFMPERFLDMAEEVDFRGKDHKFMPFGTGRRLCPGLSMAKRVVPFILASLLHAFEWRLPAGVTAEALDLSEKFTTVNVLVTPIKAIPILASDQI

SEQ ID NO: 52555 - protein, 80 aa, Oryza sativa
MLILMKKPHVCLGTEDNVKTQLTSMRSLAAAAMAGPTIAWSMRFVGAGTTVTIWVGMAVMRSSSLAAITGMAGLTTTWSS

SEQ ID NO: 52556 - protein, 265 aa, Oryza sativa
MLLCLLFFAGFTSCSDARVMWDQKTGRSRGFGFVSFRNQQDAQNAINELNGKWLGNRQVRCNWATKGANAGEEKQNTDSKGMIELTNGSSEGGKDNANEDGPENNPQYTTVYVGNLPHDVNSNDVHRFFHSLGVGSIEEVRVTRDKGFGFVRYSTHEEAALAIQTGNGQLIGGRQIKCSWGSKPTPPGTASAPLPPPAPAPFNPGMSATDLLAYERTLALSKMAANPALMSQHAALKQAAAMGMGAGASQAIYDGGYQSANAVFY

SEQ ID NO: 52557 - protein, 394 aa, Oryza sativa
MMAVLARLGVIVVLWAVVAEGILDPVDFLALQAVRRSLDDMPGSSFFEAWDFTADPCGFPGVFCDGNKVSALALGDPRAGSPGLSGRLDQALGRLSALTELSLVPGRVEGELPESLSSCRNLRFLAVSKNLISGQIPDGLGGLSNLRTLDVSFNQISGTIPASIATLPSITNLILCHNHLTGGIPSFPDSSPLIRLDLKHNDLSGGVPNLPSTLQYLSLSANRLTGTVDSVLPRLTRLNYLDLSMNQLDGPIPASVFTLPLSVLQLQRNFFSGLLQPANDVTIQVVDLSYNRFWGPVSPLLAGVGQLYLNNNRFTGEVPARLVQELVGSGGLQVLYLQHNFLTGIEISPASSLPSSVSLCLMYNCMVPPVYAPCPLKAGSTNTRPADQCPEWRG

SEQ ID NO: 52558 - protein, 304 aa, Oryza sativa
MAPPATASASASAPVSLLFLSLPLSPSSCRGLPAPHTHLPPRRLALAPARLGAALLSSLGDAQEEEEYDDEEEEELVVVGYVSGAHGVRGDVLVSPRTDFPQLRFATPGKRWLRARAAGKQQVKEFELVRGRAHTGKKSWIVTFDGVDSVDEARQIVGSAILVKVGDRPKMEEDEIYSLDLVGMRVIVKDTGKLVGTVGQVFNFGAGDLLQVMVGGTEDTVSQPNSENQGSTPSGEHVWIPFAEDIVPDIDMESREMWITPPKGLLELNARSDKRSKKERRAMVRSASSFSCMLCSMYKAFFRT

SEQ ID NO: 52559 - protein, 91 aa, Oryza sativa
MLCNMESLQPITWLWKHLFLWMKVQHFQNSLLSHQLLLLCQISLLVPIDPFQLYLFYKCLLLHHQTIACKHLMCKRMVQHLMVFKQWTKQW

SEQ ID NO: 52560 - protein, 146 aa, Oryza sativa
MLSLPLSCPLAPLGGVPDLLLGSSDPMTSVSPLHSSSLPPRPPPSLSPFPPLPFALHSSLCQIRLMDCVVCYKDGVGALGLWGGQATAARPGRRGVGRESGSSATTTTTTLARHDGCDGEGHYPGISCYTNARGGCWLVPGYSRCS

SEQ ID NO: 52561 - protein, 424 aa, Oryza sativa
MEAGAGSSSAKLVAACVIGGIVLGASVVALHLAGPVAIPALPPVDALRRRFRRGRRRPVRVYMDGCFDMMHYGHCNALRQAHALGDELIVGVVSDDEITANKGPPVTPLHERLIMVRAVKWVHDVIPDAPYAITEDFMNKLFNEYNIDYIIHGDDPCLLPDGTDAYALAKKVGRYKQIKRTEGVSTTDIVGRMLLCVRERSASDSHNHSSLQRQFSHGHGQKIDDSGSGSGTRISHFLPTSRRIVQFSNSRGPGPDSRIVYIDGAFDLFHAGHVEILRLARELGDFLLVGIHTDQTISSTRGPHRPIMNLHERSLSVLACRYVDEVIIGAPWDVSKDMITTFNISLVVHGTIAENMDFMKDDLNPYAVPRAMGIYRRLESPLDITTSTIIRRIVANHEAYQKRNEKKEASEKKYYDSKSFVNGE

SEQ ID NO: 52562 - protein, 248 aa, Oryza sativa
MGRKGCQSGSVFSRAHGTHFYFFKDEEVNHDPQLLLMKAHAATTSVGSATVIIAMLEKTGILKIASVGDCGLKVIRKGQVMFSTCPQEHYFDCPYQLSSEAIGQTYLDALVCTVNLMEGDMIVSGSDGFFDNIFDQEIVSVISESPGVDEAAKALAELARKHSVDVTFDSPYSMEARSRGFDVPSWKKFIGGKLIGGKMDDITVIVAQVKAVMIPDDEGVDEEKGQGDEQGSAVAVASSEQKEDSITT

SEQ ID NO: 52563 - protein, 496 aa, Oryza sativa; identical to SEQ ID NO: 43459

SEQ ID NO: 52564 - protein, 528 aa, Oryza sativa
MASRAPCLLAARGIASSPHLARRLKQTENEIVQMFRTPSPRNEDAVAALSPRYTNSVRVLDERFIRILKIFKWGPDAERALEVLMLRVDHWLVREVMKTDVGVNVKMQFFRWAAKKRNYQHDTSTYMALIHCLELVEQYGEMWKMIQEMVRSPICVVTPMELSQVIRMLGNAKMIGKAITIFYQIKARKCQPTAQAYNSMIIMLIHEGQYEKVHELYNEMSNEGHCHPDTVTYSALISAFCKLGRQDSAIRLLNEMKENGMQPTAKIYTMIISLFFKLDNVHGALSLFEEMRYMYCRPDVFTYTELIRGLGKAGRIDEAYHFYHEMQREDCKPDTVVMNNMINFLGKAGRLDDGLKLFEEMGVSHCIPNVVTYNTIIKALFESKSRVSEVFSWFERMKGSGISPSPFTYSILIDGFCKTNRIEKAMMLLEEMDEKGFPPCPAAYCSLIDALGKAKRYDLACELFQELKENCGSSSARVYAVMIKHLGKAGRLDDAINLFDEMSKLGCTPNVYAYNALMSGLGESMHAR

SEQ ID NO: 52565 - protein, 461 aa, Oryza sativa
MSEMLAYAHDTQHEKIIRGLSLGIALTVYGREEEADTLIEQMTRDQDPILRYGGMYALALAYRGTANNKAIHQLLHFAVSDVSDDVRRTAVMALGFVLDNEPEQTPRIVSLLSESYNPHVRYGAALAVGISCAGSGLSDAISLLEPLTSDVVDFVRQGALIAMAMVMIQTNESFDSRVGTFRRQLEKIILDKHEDTMSKMGAILASGILDAGGRNVTIKLLSRNKHDKLTAVVGLAVFSQFWYWYPLLYFISLAFSPTAFIGLNSDLKVPKFEFLSHAKPSLFEYPKPTTQQTTTSAVKLPTAILSTYAKAKSRAKKDAESKANQEKATEDASGSSSSKATKTQEKDADAMQVDNAAEKKAPEPEPTFQILTNPARVIPTQEKFIKFIEGSRYVPVKPAPSGFILLQDMQPTEAEVLALTDAPSTVAATTGSAAAATGQQASSAMAVDDEPQPPQPFEYTS

SEQ ID NO: 52566 - protein, 96 aa, Oryza sativa
MLLQYRNHVHTIWWNYGSCYLPHHHHMPHLQFILHSPAGSPWRSPMQFQIQYQDTEDLLVLHHSEVTKFESGTRDLSMEFGCSIVIYPVQFSLVAQ

SEQ ID NO: 52567 - protein, 527 aa, Oryza sativa
MHSTNLLLEEPIRMASILEPSKPSFFPAMTKIVGTLGPKSRAVDTISSCLKAGMSVARFDFSWGDAEYHQETLENLKLAIKSTKKLCAVMLDTVGPELQVVNKSEAAISLEANGTVVLTPDQGQEASSELLPINFSGLAKALKPGATIFVGQYLFTGGETTSVWLEVSEVKGDDVVCVIKNSATLAGSLFTLHCSQIHIDLPTLSDEDKEVIRRWGAPNKIDFLSLSYTRHAEDVRQAREFLSKLGDLSQTQIFAKIENVEGLNHFDEILQEADGIILSRGNLGIDLPPEKVFLFQKSALHKCNMAGKPAVVTRVVDSMTDNLRPTRAEATDVANAVLDGSDAILLGAETLRGLYPVETISIVGKICAEAEKVFNQDLYFKRTVKYVGEPMTHLESIASSAVRAAIKVKASVIICFTSSGRAARLIAKYRPTMPVLSVVIPRLKTNQLRWSFTGAFEARQSLIVRGLFPMLADPRHPAESTSATNESVLKVALDHGKASGVIKSHDRVVVCQKVGDSSVEKIIELDD

SEQ ID NO: 52568 - protein, 89 aa, Oryza sativa
MSMSILAKRYEVLDLNADPISRSSVSAIVWSPLLSLSSCVWPNSTSSWSVMSPPPVTGVAAASSAEANRQARRWCALAGAMASGRWCKL

SEQ ID NO: 52569 - protein, 379 aa, Oryza sativa; identical to SEQ ID NO: 31505

SEQ ID NO: 52570 - protein, 258 aa, Oryza sativa
MLAIFQKQVAHAPAELNSPRSSAAKPKNPDEILRDFHALHPIEAFSTSFGGGAALACVAGHARNGLSGYERMFCGLDDIYCVFMGRLDNLSSLIRQYGLCSRSTNEALLVIEAYRTLRDRGPYPADQVVKDLSGSFAFVVFDNKSGAVFAALSTDGEVPLYWGIAADGSVVICDEREIVKGECGKSYAPFPVGCMFHSEGGLKSFEHPMNRLKAMPRVDSEGVMCGATFKVDTFTKINSMPRVGSATNWAATWDDAAA

SEQ ID NO: 52571 - protein, 500 aa, Oryza sativa
MGLPQVNPAEEAPTPSSRPVSSPRSFEGVGACDLDGLLGGSSSSRVFEYPSIGDSDRKTALDIPNGSTEYSRDSHCFDRPAGLRGLRIDSRDADSRSSHKLDPTVHVPTMRVVGFESGSVGGSAIIETDNCHTPFDQHELQARKRLLSPLKNVLNRQFHGDILNISAGDARFELSDSARKLNISCFQDSKKANTGMLDSFEPQAWTNSRCSNGSPEWDANKINSNLFTDGPLLGSKESLAYLDHLAASAKLAHSPLSLSPLSPKFMNRTKATGAQCRTMRDIEHHFLDSREKGGPDGIRMLSVLEETNILHDEYNVMTPKRSSCRRYQIWGPESTPTSPRVGYGRSLSLPVRRSLVGSFEESLLSGRLSYGKDNQIIDGFLAVLNITGGNFSPPTQKLPFAVTSIDEDSSLLYYSSIDLAGRSSATNCRSPKLERSLSNNDSRSAKSRLRIPVKGRIQLVVSNPEKTPLHTFFCSYDLTDMPSGTKVQDIMTNFSFKNKL

SEQ ID NO: 52572 - protein, 106 aa, Oryza sativa; identical to SEQ ID NO: 52333

SEQ ID NO: 52573 - protein, 123 aa, Oryza sativa
MLRAGGRRLLAPGLRRVLGGGAAAPVAVGGAKAYHERVVDHYENPRNVGSFENDDPSVGTGLVGAPACGDVMKLQIRVDESSGKIVDACFKTFGCGSAIASSSVGEPPNPNYSPTCSPPPSLG

SEQ ID NO: 52574 - protein, 628 aa, Oryza sativa
MQYLNCLQRSTPCFLGSPKTASFAVNCGGPLTSGSDNLRYQSDEVNLGDASYYITGEPTWGVSTVGRFMDASNGGYTIRSSRQFQNTLDSEMFQNTRTSASSLRYYGIGLENGNYTVTLQFAEFGFEDTQSWKSLGRRVFDIYLQGERKEQNFDIRKAAGDKSYTVVKRSYKVPVTKNFVEIHLFWAGKGTCCIPTQDNYGPSISALSLIPADFTPTVSTSISPEGNNNTSKAGVSTSKAGVIVGVVVGVTILGLIALAAILIWRQNRRKRKLSLEQQELYSIVGRPNVISYGELRSATENFSSSNLLGEGGYGAVYKGKLTDGRVVAVKQLSQTSHQGKVQFAAEIQTISRVQHRNLVKLYGCCLESNNPLLVYEYMDNGSLDKALFGTGKLNIDWPARFGICLGIARGLAYLHEESSIRVVHRDIKASNVLLDAYLNPKISDFGLAKLYDDKKTHFSTKVAGTFGYLAPEYAMRGRLTEKVDVFAFGVVLLETLAGRPNYDDALEEDKIYIFEWAWELYENNYPLGVVDPRLTEYDGEEALRAIRVALLCTQGSPHQRPSMSRVVTMLAGDVEVPEVVTKPSYITEWQIKGGNTSFMGSDVSWRSSSAPREIISPQDSSPFLSSVE

SEQ ID NO: 52575 - protein, 714 aa, Oryza sativa
MGDRAAGSGGGGGGGSGVRRVGDYVLVRQIGSGAYARVWLGKHRTRGTEVALKEIAVERLSSKLRESLLSEVDILRRIRHPNVIALHESIRDGGKIYLVLEYCRGGDLHSYLQQHKRVSETVAKHFIQQLASGLQMLRENNVVHRDLKPQNILLVANNENSLLKIADFGFAKFLEPSSLAETLCGSPLYMAPEVMQAQKYDAKADLWSVGIILYQLVTGSPPFTGDSQIQLLRNILNTREIRFPSDCDMSHGCIDLCRKLLRINSVERLTVEEFVNHPFLAEHALERTLSRTPSDIRDGFPFINSSPTRPSSQSSQEDCMPFPLDDKSTGQDEGPVSDSKSAIKSYGFATSKRLDKTSGQSPTKHSSLVSKYIRGNNYASSSQRLDHPRRIKENKGDEGHNPKGGYPEDSPIIDSLEFVDQEYVFVHPEGSSSSMNDSRQRTMPSKLDSSSLSPPKLLTAVSAPRPIHGMAINRQQSGGTGSLDSHCSPVSGTSQGSADLNDAMDQPPSDCLTRVRLLEQYASTIAELVKEKIKDAKHLEGFSIQLVVLATWKQAIYICTSYASSATRENPSHDVTAKGFGSNAPHLLANSQLLYDTCMEIESQFLVQMEYAEELANTIGQTVDATEMPDAIEIIFQTALNLGRHGGVDEMMGKSASAMVLYSKAVSMLRFLLTEAPSLALNPALSLTRDDRRRLRTYIEAVNARLVPLQYQRH

SEQ ID NO: 52576 - protein, 635 aa, Oryza sativa
MDWREPANICEQKLPTKRPYPSLSDTSSEGSCNRYPRNHYDDTPMRIKFICNFGGRFLPRPSDGQLRYVGGERHLIKISRDISWKELICKTSKLIRRAHMIKYHLPGEPMNMLISITCDDDLRNMIDECIVLERTKVLLTVYLFADNDDERHVHFVLGSSSSTDKEAQFIALVDGLVRPGEELKKQRLRNTSANDLDQLMFDINEEGLLARTDKASPNVQSKLSPSIVKVPLKTSREQLENMPPSSQLAVTNQDYKAPRNEDDPLCTARKTNNAHLGSSVPSESTCIGKVEAGAHAVSRHHPGQRNTATNMTRKSNQATEDQVKGSPRKQLPIQVDSRGVNVVSSNSNNNSLTMHIHLPVYEKVASLSGGSEKTVNQPTSHDNKMKLKTYSTQEEAVSHSASHNKTEMHKRSLDFPTPSRCHDDTYNSTNSTNLHILEKSITTNNKQKQQPAVMCIDILKKNHPPEPTKGETVLSCSYLSSDKTTELQKNILVRSSSERQERPNSPKPDEHLSTARSRSVGADRISPQIRTPSQESKDNVAPFIEESEACETKNSEEALSANTVMGRELISNVQVINNGDLEDLREIGSGSFGTVFHGRWKGTDVAIKRIKNSCFMYPSSQADKLVSLYELTQMI

SEQ ID NO: 52577 - protein, 485 aa, Oryza sativa
MISSSKLKSVDFYRKIPRDLTEASLSGAGLSIVAALAMVFLFGMELSNYLAVNTSTSVIVDRSSDGEFLRIDFNLSFPALSCEFASVDVSDVLGTNRLNITKTVRKYSIDRNLVPTGSEFHPGPIPTVSKHGDDVEENHDDGSVPLSSRNFDSYSHQYPVLVVNFYAPWCYWSNRLKPSWEKTAKIMRERYDPEMDGRIILAKVDCTEEIDLCRRHHIQGYPSIRIFRKGSDLKENQGHHDHESYYGDRDTESLVAAMETYVANIPKDAHVLALEDKSNKTVDPAKRPAPLTSGCRIEGFVRVKKVPGSVVISARSGSHSFDPSQINVSHYVTQFSFGKRLSAKMFNELKRLTPYVGGHHDRLAGQSYIVKHGDVNANVTIEHYLQIVKTELVTLRSSKELKLVEEYEYTAHSSLVHSFYVPVVKFHFEPSPMQVLVTELPKSFSHFITNVCAIIGGVFTVAGILDSIFHNTLRLVKKVELGKNI

SEQ ID NO: 52578 - protein, 718 aa, Oryza sativa
MRLAGGLLLLLLLLTIPDDGALSASPAAAGGERCRRQCGGLDAVPYPFGFSGSCPIKLACNESGSTAALILPDNAAADTAAESYTVVASSFNRTASTFVVSLPPACNRTVAGARRRLSGANYGVSSRTGMFLRGGCRNATGATACSVPAEVMSKMLRTAQCAGGDEAASASSLTCIASIPPNSTAEALGVGVFARWDTVEEPRCDNLLTSAFYGETPEGVFALELAVAELGWWVNGSCKHSAAAAGDLSGRCAANATCHDVQTPGGEWGHQCKCLPGFTGDGFAAGDGCNLSAKKSSTKKILIIVGGVLAGTVAAGVLFLCCARCRRSGGGGGRSGFDRLAAKRLLSEAASSSGVPVYSYHEVARATNSFSHTHRLGTGAYGTVYVGKLPASSPSLVAIKRMRRRHDDGDDDAAVAVLLNEVKLISSLSHPGLVRLLGCCLDRGEQILVYEFVPNGTLAHHLAGGGLPWRARLGVAAETAAAIAYLHAKRPPILHRDVKSSNILLDGDLRPRLADFGLSRAVGRLDQASLSHVSTAPQGTPGYLDPEYHQNFHLSDKSDVYSFGVVLLELITAMKVVDFARPAAEVNLASLALDRIGKGRVDDIVDPALVDRADEWVMRSVRHVSELAFRCLAFQKDVRPAMSEVAAELARIRDAAPASVPGARTGAGSRPPMVIDVGVGFDGVDAAVKKVGSPVSVQDVWVSDQSSPSTNGSMPRFA

SEQ ID NO: 52579 - protein, 174 aa, Oryza sativa
MVREVAESCVDGVVMEMVAAYCGRFYAAKPELAARRIEAIGFQVGHQLTERYTMERPRFSDHLEAIKFICKDFWSELFKKQIDNLKTNHRGTFVLQDNRFRWLTRVSIDPSVESMDATDNDSATLGDSAAQTTSMLLYFPCGIIRGALTNLGISCSVTADMSNLPACELHYSFS

SEQ ID NO: 52580 - protein, 174 aa, Oryza sativa; identical to SEQ ID NO: 52579

SEQ ID NO: 52581 - protein, 501 aa, Oryza sativa; identical to SEQ ID NO: 44270

SEQ ID NO: 52582 - protein, 631 aa, Oryza sativa
MSLTFECIRTVLTALPAHDAAVRLAIGKAKEFLAAEDDPNLRYLGLLALGMLGPAYASTLHECRGVIAQSLGDADSNICREALHLMMGLIDDSNVTDIAGMLVSHASKSDPEFANDILGAVLSACGRNVYELVSDFDWYVSLLTDMGRNLHCAQGDEIGRQLVDVGLRVQDARPELVHSSRTLLIDPALLGNHLLCPVLSAAAWVSGEYVNFTKDPVELVEALLQPRISLLPMSVRAVYIQAVLKVITFCCNLYVERLSDSSKEVSVALNGLSMDQTVSGGSDAPIGSSNGQITVPRMMEKDPFSLKSVVHMINLIGFVYSLREIQELKGSKFDDDKHSRVKELVKNMQTVLSHEIGPVSLNAQEKVSLPDDLVLNENLAELVDIISEDDTTLSSSIVFYPRSCGSVETRDEPALSLGSSSLLSEHRKRHGLYYLPTGKAEDGPVDYPHANDPLLPASSESALDDKLKTIQPVTGGKKPKAVKSRPKVVKLDGEDFLSSMVASASVPKEDSLSGAVRGVLLGRDLKPSSSQKASDKAYEGIINKMDSGESSSQWKNNVDADFVGHPTSSSRPSIQQSHDKESTNPLESDGKEARKHRRSRSGHRQGKHKHRERHCTQPDVPQAPIIQDFLL

SEQ ID NO: 52583 - protein, 572 aa, Oryza sativa
MPDWRVGEFEGKLKDGFARSNNSEHENGAGTVSISSKKSKHRVDSEKKPHVDISGVIDSDSQKCNSEQIHSANGIVSRDVNHDHIENCKVESNDFPLNTISETRYPTDNWNSSQFALSNDGSPVLNNQGTPQTGHGYGDNDLTYIDWPAIDNFEDVDNLFRRCDSTYGQQQLPNTDELSWIPSSDAMYSSDVAMQPGFESSYSDYGILDDLSAFNCTEDKSLTTADPSSAVCDEQFDDSYLFNEQKPEDVYGEQAYQRDAMELLSSDQICTGQENLDMIGNRYSSENAMEQPEDQKFSIASGSQLSSSQNLLNQKNHLDSTSPSNITSESYPERNCQIIPSGASFAERNLKVQKKVASSASGQLISDNVTGHPGHQTLTRRASYPCENHEIGKRSLGKRGLGHSDVAMGTSMVVDGSFVSSISSDNSVEENSFRQLQDAVSQLDVKTKMCIRDGLYRLARSAQNRQVFPNTMNNNGDSHNVKDMQNAETSGKFVDPGSIETQTNPIDRSIALLLFHQPSEHVTGAVDEAASLKSHNDNHQAAAKNQRVMHASSVHSPRGQGDPMDAKSCRNN

SEQ ID NO: 52584 - protein, 372 aa, Oryza sativa; identical to SEQ ID NO: 44248

SEQ ID NO: 52585 - protein, 218 aa, Oryza sativa
MLHSGMKIVKYSSRHTKVFVSEYAVNNDKGGDAGNGSLLASLAEAAFLTGLEKNSDVIQMASYAPLFVNENDRTWNPDAIVFNSWQQYGTPSYWMQTYFRESSGSVIHPVTISSSYFDLLAASAITWQDNEDIFLRVKIVNFGPSAVNLTISSSGLQAGVNAAKSTVTVLTSSNLLDENSFSEPNKVVPVTRELPNAGQEMQFLLLPFSLTSFDLAMF

SEQ ID NO: 52586 - protein, 348 aa, Oryza sativa
MGDSGGSVVSVDVERISFGGKEHHIQTNHGSVSVAVYGDHDKPALVTYPDIALNHMSCFQGLLFCPEASSLLLHNFCIYHISPPGHELGAAPVSPSSPVASVDELADQVSDVLDFFGLGPVMCLGVTAGAYILTLFATKYRERVLGLILVSPLCRTPSWTEWFHNKVMSNLLYYYGMCNMVKDCLLQRYFSKGVQGCSAVPESDIVQASRSFLDQRQSMNVWRFIHTINERHDLTESLKELQCRTLIFVGQNSQFHAEAVHMTSKLDERYSALVEVQGCGSVVTEEQPHAMLMPLEYFLMGYGLYRPSQISCSPRSPLNPFCISPELLSPESMGVKLKPIKTRANLEV

SEQ ID NO: 52587 - protein, 104 aa, Oryza sativa
MYGPMNADTIMFAEFSYSAHILHVTLNPIYCRGSDWRGTSKQFNKDDITTYNISCFLLPIYDIQMLIKSVVWQELSSHHGVLQCQMADVQKRLRFSSRMRHSNR

SEQ ID NO: 52588 - protein, 549 aa, Oryza sativa
MVAAMEKRREIRELRDRMDRTLALPDLADEELLRSLVKRQILASSLSAGNDEGNIDLIAEARSKEISNFLEMLNTSGNERSSKIHEASHKEWKVKQDTDQLRVMYREGPEGTPFHTLLAEGFADGPIDVCTCVSWESSLYKKWFPQYNLPTFKVAQSGCLKKVRVGEEISLVRVKVPWPVSEREALLHYFELEYLKEDLVIVIMKTISDTDNINIETHGFSRDGIPEAGDTVRIDVVGGFVLQRITKEKSFFRAIANMDIKLDFVPPWLINFISRQLIGSGHKLYQKAVSTVANCDEDYKKALREPLYVRIREHRGSTDIANVTPVEERATEALPDNPTLQNVLAVTNITSNSEIVEEESEQKALFKLDHHAIGPSNPPAEQEQHVENKPYISPEVEQALNILDKAIAIIRGNNAGSASVVQKFIGYDVTLDGSTTDSRNSHNIPNEHPATLPPRDSRETQHTYSLSNENVNHREKDALDSDSQRYTTASTVTKTMSMTRRSTTRVHGEESLDTNGLHQNGFHKDKESKRTRKRKTNSWLCCLTPSTTG

SEQ ID NO: 52589 - protein, 610 aa, Oryza sativa
MDHLSIRNPLSLLLSLQLSLLLFNPLSVADLTSEKQALLDFASAVYRGNRLNWSQSTSLCSWHGVKCSGDQSHIFELRVPGAGLIGAIPPNTLGKLDSLQVLSLRSNRLAGSLPSDVTTLPSLRSIYLQHNNFSGDLPSFLNPNLSVVDLSYNSFTGEIPISLQNLSQLSVLNLQENSLSGSIPDLKLPSLRLLNLSNNDLKGQIPQSLQTFPNGSFLGNPGLCGPPLAKCLLPDSPTPSPASPSSAPTPMSAHHEKKFGAGFIIAVAVGGFAVLMFVVVVLVVCNSKRKGKKESGVDYKGKGTGVRSEKPKQEFSSGVQIAEKNKLVFLEGCSYTFDLEDLLRASAEVLGKGSYGTAYKAILEDGTVVVVKRLKDVVAGKKEFEQQMELIGRLGKHANLVPLRAYYYSKDEKLIVCDYLTNGSFSTKLHGIRGVTEKTPLDWSTRVKIILGTAYGIAHVHAEGGAKLTHGNIKSTNILLDQDYSSYVSDYGLTALMSVPANASRVVVGYRAPETIENRKITQKSDVYSFGVLLMEMLTGKAPLQSQGNDDVVDLPRWVHSVVREEWTAEVFDVELIKQQNIEEELVQMLQIAMACTSRSPQIDAHRWRM

SEQ ID NO: 52590 - protein, 73 aa, Oryza sativa
MLLAMPPLLLPPLVAAPPHRCCYCCCCRRRAASAAAAANAPLRRKRGGRRKGKKEEGKRGSLVYFFSGNASKR

SEQ ID NO: 52591 - protein, 525 aa, Oryza sativa
MGTGGGRVALDGGGRRRRKLDEEDDEEYVADDDEEEDEDEDEEEYQQAAAPSDDGEEGGDDEAEPEDESDADFVGDEEEEEEDLEDEDDLEEVKAPRPKRPPKGKPPPRSRRRRQKDDDDDYEEEEEEDADFDPDVDEDDEEEVDEDEEEFEQDDDDSDDFAPIRVRKTSTKNHVAKRKPPPGRKKKKRKPSRVSKAKPKKPTSGRRRRKRWATDDDEEEEDDADFIVEDDQEEEEDDHRPKKKAKAARKTRDVTPEPDVEASAWPAVESDTSEFEFVTSDEEAADKEAPAAEPAKTKGKKGRKRWGSGSESSSDSDYVISEQELKDLEVSMPPDAALQSPATLPRRTFLSRRVGEKGKEPEEAWKQTCGICLSEEQRATIQGVLNCCAHYFCFACIMEWSKVESRCPLCKRRFTTITKSSMADLGLGSRKAVIRVEKRDQVMASLSYCYLFSFARIIAIEFNICNVSKPLSVVWHLHGNSSICQCPLTSYCKRHDYLTPCEIPCGCMLLHLAVIFSSKCSSFYL

SEQ ID NO: 52592 - protein, 782 aa, Oryza sativa
MAIQDKVENNDPTVTVGLAVSSSKSSKYAVQWAVKNFCTNGSVRFVLIHVLQRITTVPTPMGNYIPIDKVRADIASAYVKEVECKARTMLLFYKNMCDEKAKAEVLVVKGEDVAETISNVVSMYEIHKLVVGDSSQGNFIRKSKGTRTSSQICRSVPSFCAVYVVSKGGLSAVYSPGFEGHKSSELFLSSDSSKTEIHSDDKPSLSDATPSRSFRSNLTWENLESLSSADHDRPRSLHEYLTESTSASVGDNNSNSPCASGQTPRPSSVLISDKAPMTSSPLQELMLSEDMDDVNSELEKLRLELRHIKGVCKLVQDESINASQHVTDLAAKRAEEEARLSEVYSRINRVNEQAHQEKEQLNALEAQCRHVRDLARKEALQKQILQLRTSKEADKMQRLEKLLELDGMSYSTFTWEDIESATSSFSEALKIGSGSNGTVYKGNLRQTSVAIKVLTSDDSHRIKHFKQELEVLGKIRHPHLLLLIGACLDRPCLVYEYMENGSLEDRLQLKGGTAPLPWYQRLRIAWEIALALVYLHSSKPKPIIHRDLKPANILLDSNFTSKIGDVGLSTLLPLGDALSTTRTIFKDTDLVGTLFYMDPEYQRTGQVSTKSDTYALGMVLLQLLTGKPPVGLADLVEQAVENGHLVDILDKSAGKWPAQEAHELAQLGLSCLEMRSKHRPDLKCKVLVELERLKKIASAVSDPVRPVISGPPSHFICPILKRIMQDPCIASDGYSYDRVAIEMWLCENDKSPITKSRLPNKDLVPNHALLCAITSWKAEARD

SEQ ID NO: 52593 - protein, 230 aa, Oryza sativa
MDGMGLGVLAEQLGELKLGELLDTPPPGLDEAIAISKVMQFLEAQEYSMFRRIVFDTAPTGHTLRLLSLPDFLDASIGKILKLRSKIASATSAIKSVFGQEVQQQDAANKLEQLRERMVQVRELFRDTESTEFIIVTIPTVMAISESARLHSSLRNESVPVKRLIVNQILPPSSSDCKFCAIKRKDQTRALDMIRNDPELMGLNLIQAPLVDMEIRGVPALKFLGDIVWK

SEQ ID NO: 52594 - protein, 616 aa, Oryza sativa
MAGAAPLRDSLRRLCTDVGWSYAVFWRATRAADSQRLKLVWGDGHYERAAGAPSISGFEAMDLLLKEKAAALRSGTGRGGGGGEGHAADGAAGHSHDRVDALVHKAMAQQVHVVGEGVIGQAALTGLHRWIVHDIVDECEEEDEVLLEMKGQFCAGIQTIAVIPVLPRGVIQLGSTKMVMEEAAFIDHVRSLFQQLGSSTAVVPCGSFVQDSIMRTPFHKSLGVPTSSHSEDLAGGGNTYNDDMINHQFRHQKSPASTIQSFNPVQQFYAGPTFCRPVTIASRCDLFQPDHGSTFTLNSQSEDNRSTALLKNSVSHSKTSNDAFSHAFNPLNEPNVSISGRRECVSIEQHGSCRNGEMEITIGRTASSSCTGKTNIINKVDDLLSQDCLVGCQASNATSVNRKFQTMSIVDNTKLQDGSYAIPHAALVDSTQYSDCFQSLLGTIQGSSSSNSNAIHVDTSHNAVHGKSNFCPLGDRNAANSSDLAELLASPIPLELTGGNDLFDVLQLQQKPNGSNNSEVNNRQSMPYGSEQAVKSLIGCVDDDFTGLITEADPDQLLDAIVSKIITGHKQNVDTSASCSTTVAGFDRPLHSDCHLYTPQDHHQGQYFVILPVLLL

SEQ ID NO: 52595 - protein, 295 aa, Oryza sativa
MAGARSVGSLPVPNVQALAEICNDPDEHIPERYIRPEASSEEVINNYQGDMAIPIIDLKKLLCPQSSEEECVKLRSACQYWGFFLLINHGVPDEVIANLKRDIVDFFSQPLDTKKEYTQLPNSLEGYGQSFVFSEDQKLDWADMLYLHVHPSDSRDLRFWPTSPASFRQSIDAYSSETKSLALCLFEFMAKAVGAKPESLLDLFEEQPRGLRMAYYPPCRQADKVMGLSPHSDAGGLTLLLEINNVQGLQIKKDGKWFSIDAPNGALIANIGDTLEVMTNNKLCFHMSKDLDVFG

SEQ ID NO: 52596 - protein, 82 aa, Oryza sativa
MFRNKQAICICSLIFWFASKILGTFLAEMLFMRFKKRASIYFSYICICCSIFYFRKFSSCMALRSFVGQNLYVYCVFLNKVK

SEQ ID NO: 52597 - protein, 537 aa, Oryza sativa
MELATATAAAAASSTTRAHRPRSSRLAVPTRDSCSLLPSSSSRQFAALSTSAASTASRSRAQRRRLPVASAAVELREASSQGGDSVRVTETLQPGSSVKFSVEVPPSICQQCYETTLQEYAKRFKIPGFRPGKVVPENVLINYVGPKHVQDATVEAILRHTLPQALSSVEDRALEDSVRILTKFEDMANSFSLDNVFRYDVSVDVAPEVRWLSEDKYKNLKVVVEIDEIVDAEKAAEIELKRRHKALGLLRIVADRGLQVGDLVVLDIFAESITSDGSKGEKIPSAESKGFHLDTEENNNLVPGFLGSLIGIRPGETRSFPLQFPESFEQESLQGVRAQFTVVCKELFYRELPELDDSLAGKLLPGCTTMDQVRERILQRCKEVEKTAIEQATDNAILDQLGKLVEVDVPRALFQEQGQQLYGAKLLQLQAERKLDKDQLASLSSQKSVQEYLESERENINRIIKQMLAVGEIFKAENLQFSTEQLVKEVENSIEEFKHYNQDYDEGSIKQQVQDVLEAAKVLEWLKENCIIEYIRP

SEQ ID NO: 52598 - protein, 513 aa, Oryza sativa
MKGSHSQSQAQAQSQAGRRRRCGWLLPLLVGAAFLAEIAFLGRLDMAKNAAAVESWTTSFYARSSAPARDGKAAVVVPGADADDAPPGGGEVVEEDDGDIRLCEERLEREDGVPHDRDFDKDPVLVGGAANDWNKCSVGCEFGFSATKTPDATFGIAPDPTVESILRSMESSQYYSENNIAVARGRGYKIVMTTSLSSDVPVGYFSWAEYDIMAPVPPKTEEALAAAFISNCGARNFRLQALEMLESLDVKIDSYGSCHRNHDGKVDKVETLKRYKFSLAFENSNEEDYVTEKFFQSLVTGAIPVVIGAPNIQEFSPGEGAILHIKELDDVPSIAKTMKHIASNQEAFNQSLRWKYDGPSDSFKALIDMAAVHSSCRLCIHVATKIHEKEERTPKFMNRPCSCSSKRGKVYHLFVRERGRFKTESIFLRSDQLTMGALESAVLAKFRSLNHVPVWKDERPPSIRGGDELKVYKIYPIGLTQRQALYQFRFREDADLDKYIKDHPCAKLEVIFV

SEQ ID NO: 52599 - protein, 318 aa, Oryza sativa
MIHQILNTQPGAIPPLAFHWCCNQLLQHLVNSVRTQGQPTVEPNVHGHQRCRGAGWSSGIPERLADRNVSEDGGIGGVDSRRNIREMNGKTKETNASRESPRILKPTGEPNPSTGGIRIQNNRQEQPAEMTIFHPWKNITDRTSAYELSHIDNLVNHEDDETKRQKEQSVHITLLYEINLINEELFDTVISITGHKHGGTVIKFSYNAVSLAQDMELPFAAYGTSPLKPAKLFVPADYPRSSPVYEDGDEQHQGMYSVISGMVDKVFQRALRKLPVPMSIRDMARQWGISVRTVTNGGGTFSSGYGQWESCTDEFASP

SEQ ID NO: 52600 - protein, 581 aa, Oryza sativa
MVIDCLGHDPRGPSMPGKSFLHYKWLKKHFYELPEGTDDQTVERHVRAYILSLLCGVLFPDGTGRMSLIYLPLIADLSLVGTYSWGSAVLAFLYRSLCSVASSHNIKNIGGSLLLLQLWSWERSHVGRPLVRSPVCPETDIPQDVLPVGFRWVGARTQSENATRCLKQYRDELNLQRADQVKWEPYLHIESASLPLLCTKNADLWLTQAPLINFPIVEMYLPERVMRQFGLRQSIPPPFRPTLQALHRISRRGRERENWEETHHEYIQEWEARRQRIFPESEQYDPSSYEEYLHWYTGATRRYLVPSISDDVEAGSSLQPDDSINLHYQAKAPMIRKAVDKLHGMVKKAKIAMASTADTTTQALVFEFLHGFQDVLHDLGEIKENGGSATSPHVESAATQDMPLLLLETEQNIVDADQEAQHQEEEELHMVDDATMTLEPMDEENNDFNNVICPCPSLELEEHCHLATPAIDECNTATPAPDSVIPQQNTDFDQDGHLENPNEMDQIELMVEPICVDHNDSDNVLSSSPSAQALEENCEVAKAVNGNVDPTTQVTGSSTPQQDTDVKLVAEQENPGTTEGN

SEQ ID NO: 52601 - protein, 110 aa, Oryza sativa
MGGSSIGEGTLSLGDFVASAKALIEKWKVIDVEDSLPDWQWKPCGKTGVPSEEEGYLALEGVYRNPGGRHEQIGDSSNFDDADIVSDDAWVTFQYTLFILCFCYLLIDGA

SEQ ID NO: 52602 - protein, 309 aa, Oryza sativa
MGSFKGHVLPGTLFLAVGAWHVWAAAARFAADPRGFRLRAWNPVDVGGGGAPAWLPAHLELYVIAGGAFLDMCVEVLYSTHLHIFADGGINPAHLNDLEHGGMLLMFFLFGILALLSQKTRYLPLPEGALCLVASTAFMAELLLFYFHSTTHQGLEGYYHYLLVVVVALCVATTVLGALLPASFPVDIASGAAIALQGLWFYQTAFTLYGPSLPAGCRRDADGHIDCHTHAAQERAEQLANFQLFGLVFLVCAYALGCFAVAAARHGHPDLATMHAKHVAAMEAQLAGAGAGEGDRFVGSALPLEDTAI

SEQ ID NO: 52603 - protein, 845 aa, Oryza sativa
MSGRSSPMYEGLASRPDEWDVVLKVKYGETLKRFGGYVQGPQFSLNLSALRSKIASAFKFGSDVDFILTYTDEDGDIVMLDDDDDLHDAAIHQKLNPLRINVQLNNSHTAAPQAKQQDSDNIPLRSTTTEDPLAHIKSVIDEVLKPISMKSIQEPVPETLAKLSHEVLEAASPQLAELIKPFVKLVTPSNNNPSNGHADGSCSSSTGLPQTQVDPKTNDEPKIDTSLGSQPLDTQNSKSSGARGLKTLSVEAPATSGVKSSQGQQASLYPSIEELLFSPFLPNSGDDKSASKGISDAQSKGKSVMTSATPPTPPAAPAFRPAPPIPSLNDWSQPPARGSTFYPSIWQSEADPKANSDSRWRVPLCRAGHPFQPHAPLSRPPPPMPAPMSYGPSPHFPYPGRLLSSGHLHGDLGNNIENSPARTFHRWIQCDGCGVQPIVGPRYKSKTKEDYDLCDACFHRMGNEVEYTRIDKPLLPQRLLRDPTLCRKIHSRAAMKSKREKLESRFILDVTVLDGTLMAPSTPFTKIWRMHNNGSIMWPLGTQLIWVGGDQFALQTYVPLEIPVDGFPVDQEIDVAVDFVAPARPGRYISYWRLASPSGQKFGQRVWVHIQVEDPSFVSNNRTAAINLNLPPESNITNTSNLIDVNIEPVDQVFNQHVNSTNKELLEHLIHHQIDEPKNPEPAPLPVPIVSSTTSLHPIIDVDVPSSSTAAAFVPVFDEPAPEPAVTPVPPTVNVPAGNAPASVGASSSDHHGIDNLTEEKLLKELEEMGFRQVDLNKEILRQNKYNLEQSVDDLCGVSEWDPLLEELQEMGFEDTEINKEMLEKNGGSIKRAVMDLIAREKKDQ

SEQ ID NO: 52604 - protein, 823 aa, Oryza sativa
MMSPCDCFLHATAPPLNPPSSLAAAAPGARWRDSNLSFQSSAVSAPARNVETSPNLVVPCTVHTQAAERKKSGRWVKYGGSIPAMLEALERNEDIGEALRPWRDTMSNRERTIILKEQKDWRRAVEIFNWFRRRRRHEVNVIHYNVVLCAVGRARRWDLVARLWHEMHSGGVAPDNSTYGTLIDVHCKGGRERMALLWLGDMIKRGLLPDEITMSIVLQVHKKAGEYEKAELFFKRWSLKSDVKMKGHPCYSLYTYNTLIDTYGKAGQLEKVSDTFNQMLREGVSPNVVTFNTMIHVWGKHRRMEQVASLMRTMEEFQCLPDTRTYNILISLYREINDIDVAEYYFRKMKAENLLPDVVSCRTLLYGYSIKGMVTEAQALLKEMYERNMVIDEYTQSAVTRMYVDAGMLEQAWCWFEKFNYQLNSECFSANIDAFGERGHILLAEKAFMCCIKRKMLSTCVCNVMIKAYGLVEKLDEACEIADGMERYGILPDYLTYSSLIHLMSTAKLPEKALYYLRKMQAAKLLIDCVPYSVVISCFAKNGNLHMVDCLFREMITSGIQADTYVYSILIDAYAEVGDVQKAEAYFGLLKKAGLCESATIYNSLIKLYTKVVYLAEAQKTYKLLKSLNADTNLYASNCMIDLYSDHCMVKEAREIFENLKVTGKANEFSHAMMVCLYKKIARFDEAHRISKKMQASGFLTQALSYNSVIQMYVSGGRMEDALKIFQKMLASNTPPNDATFKALKIILVKRGVSNNDIRRLELLRKNRIHDCLRHWYRMLCMAVRSGGSSSRRISDNSALRTHIFDIGNSKSGKRNTRKHVTS

SEQ ID NO: 52605 - protein, 148 aa, Oryza sativa
MGLLVHLPNLAGARRPSPCGGHRRARGGARFSVSAAAPGGGVKEEEEEEEEEEEKGTRGKERIVIRVSDPVRERRLPPPLFSSPDAPSPAAGRRRRKGEDEDDGEDRRRRYHVNVGDAIRALREELPAAFYREPSFHIYRFVNRESST

SEQ ID NO: 52606 - protein, 971 aa, Oryza sativa
MAAAAAVAGAGGVGHVVERFRARLREEQEEEEGGGGEVAAAAVVRVYVEVLSELTFNCKPIITELTIIAGQHAALAARGIADAICARIAEVSADQKLPSLYLLDSIVKNIGREYVGHFAARLQKVFCDAYRKVHRNQHAAMRHLFGTWSQVFPSSVLRGIEDELQFSPLENKRSATATDIRQSESISPRLSHAIHVNPKYLEAQQQFKQSTSVHQPITRGNRQMNDVEEDQINGLTSKSSRGWPATNSKLQKSTMLYADDLDQQEAFCSHTGLIRPSSPHLLSKHPSILNTEGPLANSRRTMSRSPPLDVLPRNASPKRALERPPLSHSVLGPDPRRLPDRNGWFERKWAFEDGAQRPSMSILDEEYRKQSARELIDAYGNSQGKDVDERLPKMQRLDSNGMAGRPSAQKWLTSEEEEYTWEDMSPTLTDRNRTSVPSLPPLGTLRAGFLGPNSGLLESDIVRHSWPGQAPRPAIDGPPLNLEDRIPTNGPVDRTNNRRYPGNFGVQNGAFLDYQSSEHTLDPGRTTMPVPPWQQTIGQPLRVQAPQPASILNRMPLPTDSEVPVKRLATGGTYDALNVDIPLLEKQRSSPAHAPMEWPLNTQSLTIQPIPPDTKHPRGASDGLDSRPFISQGSSSSVFVPQHHALDRRTMNADDLAQPSYQHPDLLSLSQQNQGTVLGNQGQPHHPPQFHPHPHSHLQETIRSFAPSMSVAPPQNIFHGQGGSAAALLPSSFPVPPAVPPYGLQSMPGFPLPSLPSGPPPPSQIGPSSSQVGGPPLVSGLLSNLMQHGIISLQPPSQPQDSVGVDFNVDLKVRNESVINALYQDLPRQCKTCGLRFKCQEEHRAHMDWHVTKNRNSKNRKQTSRKYFVTVGEWLRAAETVGNDGVPSFEPAEPVADAKEEKELAVPADEDQTTCALCQEPFEDFYSDETEEWMYKGAVYMNAPDGNIGGLERSQLGPIVHAKCLSGPNNT

SEQ ID NO: 52607 - protein, 520 aa, Oryza sativa
MRSRGMSLCDIAVVVVDIMHGLEKQTVETLALLKDRNVRFIVVLNKVDRLCGWKHCPDAPIKKALENQSGDVKREFGWRLTKVVTQLKENGFNTALYYDNQKFRKVFDIVPTSAISGEGIPDLLLMLVLRSQATMMEKLTFVNTVECTVLEVNDDKDLGTTIDVVLINGVLHKGDQVNVCTKQGPVTTTIRDLLTPHPLKELRVKGIYKHHKELKAAQGVKIVARGLKYAIPGTSLVVVKPGDDLGQSEAKSQRNENEEGNVIQEISRLKTCKEGVYVQASTFGILEAIIEHLNSPGVNVPVSGCNLGPIEKKDVMKASAMLKRKEEYAAILAFNVRVMPEADVLASESGVKIVTADTVYKLVDSFNEHIKRSKELKKMQCAANAVFPCTLKILPNRVYRKKDPFLCDVEVLEGVVKVGTPICVYVGGTVHGLGRISSMQTSNGNQIDSAKRGVVVSVKITGESPKEKTWLYGRHFDESNELISQISRRSIDVLKEYYRDEMNDENWQLIRRLKKLLDIA

SEQ ID NO: 52608 - protein, 198 aa, Oryza sativa
MAKLILATFAVVFMALAATSLAGDPDMLQDVCVADFFFDGLMKAGNTGNAVGSVVTAASVESLPGLNTMGVSMARIDYAPWGLNPPHTHPRATEIIFVVEGSLDVGFVTTANKLFTRTVCKGEVFVFPRGLVHFQKNNGNTPAFAIAALNSQLPGTQSIAAALFGAAPPLPSDTLARAFQVDGGMVEFIKSKFVPPKY

SEQ ID NO: 52609 - protein, 188 aa, Oryza sativa
MLPAASGDHKSAFARSSVQKSVKYSLEGGQLEFEAKSVRDGAWYDVAAFLSHRLSQSGELEVWVRFSGFGARDDEWIDVRTCVRQRSHPCVSTECAAVLPGDQILCFQEGKHQALYFDAHVLDAQKRRHDARGCRCRFLVCYDHDDSEEIVPLRKMCRRPETDYRLEILHAAGAANAAKEAVVDSVIA

SEQ ID NO: 52610 - protein, 637 aa, Oryza sativa
MAPAAATIRDLLTSFSPAADFLALSSGDGRIKVWDAVRGHLQTEFADIPPVEVGGGARAPGAKRGHLALDYTCMKWVQLSSKKKRKAGSSLLVLGTGSGDVLALDVAAGQWKWRVTDCHPGGVTAVAYSKHGRSLYTGGTDGMVCRINASDGSVVEKFKSSSKAISALAVSPDGEILATAAGQLRTFDASDNKKIQKFSGHPVAVRSMVFSGDSQYVLSSGVGERYVAIWKLGSGKTQSSSCILSMEHPAIFVDCKCSDINDTEGEIHVLAISEIGVCYFWSGTNMDDLRNKKPTKIALSDSSLSRSKQGFAIFAAKLQGIDGPNSAHVLLAYGSVVKPSFDKLLVRYGMDISLGVSDDGVLLPMIQPTKPQKGQSAKKQGIITALDRANAEDAILPLPQLHTQEKKRKHNATESSGDIQSAPHSDLSSTKLIEKRAPMQRIEDDSVCIEDMMRKCGVIDSRVDQGMEGHPSIPTSILSDLFGSSSKIDANLPNKKIRAHLRSLKPGDACELLEKLVSSWKTRSGSAEVVLRWIYCLLIIHGRFIPFEKSKKIISDLEKMCGERYKAAEDLLKLSGRLRLLMAQIVKDPNDVSELPSEEMQDSAAAQSDEEEEDDEIDETVYGEDADSSQTSDDDAE

SEQ ID NO: 52611 - protein, 308 aa, Oryza sativa
MSPKKDAGLSPPVAAPPPLSLAGVPVLTGSLRPAECADLLGLVAGVKRPLEDVVADFLARIQPERRLRFGAAINFVLKDKMMLRPAERLVAFTILHQGYSSQLENPFVPLIIHAACDETSDKPEQLFLQLLLNSTNGDNDREILKHSAADYLEESAYASQVLLTREQLERQYTCNEVQPQPSTGSFREATVRSVIPDPDISQSCTDSSEISITKSNRDNLVTCLLQQTSLDGIGPQWIRPPPPRLEILDGELQWLNLDNNHELLWDSSMCADTSRGAAIRDLVGKACKGHFHLPNRSKFWWNWQRTGS

SEQ ID NO: 52612 - protein, 473 aa, Oryza sativa
MVGNLWQIKPVRCRGFLEWAERYGPIVSVWFGSSLNVVVSTSELAKEVLKENDQLLADRPRNRSTQRFSRNGMDLIWADYGPHYIKVRKLCNLELFTPKRLEALRPIREDEVTAMVESVHRAVTQPGSEHKPIVVRNHLAMVAFNNITRLAFGKRFMNANGDIDEQGREFKTIVNNGIKIGASLSVAEYIWYLRWLCPLNEELYKTHNERRDRLTKKIIDEHAKALKESGAKQHFVDALFTLREQYDLSDDTVIGLLWDMITAGMDTTVISVEWAMAELVRNPRVQKKLQEELDRVVGRDRVMSETDFQSLPYLNAVVKESLRLHPPTPLMLPHKASTNVKIGGYNIPKGANVMVNVWAIARAPKVWSNPLEYRPERFIEENIDIKGSDFRVLPFGAGRRVCPGAQLGINLVASMIGHLLHQFEWSLPEGTRPEDVNMMESNGVVTFMSTSLQVIAKPRLDNPDLYKRFPVEM

SEQ ID NO: 52613 - protein, 249 aa, Oryza sativa
MSARVPRSYEMGHTLLSDLSLGDDNERICVRVSRFWAFCDQKDDDKILHFGFVLIDEKGTSIAAQIYPPCDEIFRPIITEGKVYYIKYFRVRKCNRQYKPVDNCMSIYFTRWTELEERVDPPAEIPLYTYSLSPFGGLRSRVGKKDSFTDIIGIITQLSPVTPLQGTVKRSVFIRNTDNAILNVALWGERATSFPADEVFVAGQKEPQIVIFVGTLVKGYGDVSLSGNSACKWYINADTPEVISLRNSI

SEQ ID NO: 52614 - protein, 374 aa, Oryza sativa
MASSSSPPPPPQIRCASFNQDNSLFYVGTKDGFRIFDAHTGKLHYQKNIGGIGNMEMYFRTNILAIVGTGEQPVLSPRCLRLIDTVAAVTKKDLNFKTSVLAVRLSRTRLVVVLQDRTFIYDVNSTTILEEIETVPNTKGLCAFAPNSEACYLAIPASTSKGSALVYKASEPELICQIDAHESPLAAMAFSSNGTYLATASGKGTIIRVFLVAQATKSHSFRRGTYPSTIYSLSFGPSDDLPDVLVATSSSGSLHMFFLDAARNRRNQTSKLLGSMIPGAITRALDPANHHIIHNVIPAGIKSCVAVHKVENSQNSSKLPALRTVVYIITHDGYFREYSINTTKSNESSWVLQRELNLLDTGCSTPQREEQHKD

SEQ ID NO: 52615 - protein, 553 aa, Oryza sativa
MRAAVQGRAHAWTTTTTTPPGAMRGRALVLVAALLLQLLLLAAAGGAGAAATERKAHNYEDALRKSLLYFEAQRSGRLPHNQRVAWRDHSGLTDGLEQGVDLVGGYYDAGDHVKFGLPMAFTVTMLSWSMIEYGDDVEAAGELGHALEVIKWGTDYFIKAHTKPNELWAEVGDGDTDHYCWQRPEDMTTSRQAYKVDRERPGSDVAGETAAAMAAASIVFRKSNPHYASLLLHHAQQLFEFADKYRGKYDSSIAEVKSYYASVSGYKDELLWAALWLHRATGKAHYLDYVVDNADCFGGTGWAITEFSWDVKYAGVQILAARLLLRGEHEERHRSTLEQYRAKAEHYVCGCLGRNADGGADANVERSPGGMLYVRQWNNMQYVTNAAFLLAAYADYLGDDAGGAVSCAGGETAGAGEVAALARAQVDYVLGTNPRGISYLVGYGAKYPNRVHHRAASIVPYKHSKEFIGCTQGFDHWFGRRSSNPNVLVGAIVGGPDRRDRFRDNRENYMQTEACTYNTAPMVGMFAKLNRMARQEREQEEVAAPARSTAADV

SEQ ID NO: 52616 - protein, 923 aa, Oryza sativa
MSSSAMEAMDELVQLAESMRQAASLLADDDPSDEASPRRPSTFLNAVALGNVGAGKSAVLNSLIGHPVLPTGENGATRAPIVVDLQRDPGLSSKSIVLQIDSKSQQVSASALRHSLQDRLSKGASGGSGKGRNDEIYLKLRTSTAPPIKLVDLPGIDQRVMDDSTISEYAGHNDAILIVVIPAMQAADVASSRALRLAKDIDPDGTRTIGVLSKIDQASADAKTVSCVQAILSNKGAPRAAAEIEWVALIGQSVSIASAQAGSVGSENSLETAWQAEAETLKSILTGAPRSKLGRIALVDTIAKQIRKRVKIRLPNLLSGLQGKSQIVQNELARLGEQMVSSAEGTRAVALELCREFEDKFLAHVTSGEGSGWKIVASFEGKFPDRIKQLPLDRHFDINNVKRIVLEADGYQPYLISPEKGLKSLIKGVLEMAKEPSRLCVEEVHRVLLDIVNASANATPGLGRYPPFKREVVEIATNALDVFKSDAKKMVVALVDMERAFVPPQHFIRLVQRRMERQRREDEVKNRSSKKAQDAEQSNKGSGTGSEQSGGALKSLKEKFSQQDKDKDAKEGPNLQVAGPGGEITAGYLLKKSAKNNEWSKRWFVLNEKSGKLGYTKKQEERHFRGVIVLEECNLEEIEEEELSKSLKDSKKANGAEKGPSLVFKITNRVAYKTVLKSHSAVILKAETIADKVEWMKKIRGVIQSKGGSVKGLNTPEGGSMRQSHSDGSLDTMARKPADPEEELRWMSQEVRGYVEAVLNSLAANVPKAIVLCQVEKAKEDMLNQLYSKISAQTNAKIEELLQEDHNAKRRREKYQKQSSLLSKLTRQLSIHDNRASVASYTNDSSGAESSPRTSGQSGEDWRSAFDSASNGSVDRSSSHNETRSRSADSRGKRYENGDVNGGNSGSRRTPNRLPPAPPGQKY

SEQ ID NO: 52617 - protein, 620 aa, Oryza sativa
MAAVAAAEKAVRCLGRGFDMAGDLRLKYCKGGGAGCLVARRGETTPLTVPGVGVIADVPADVRCDKGDRVRFKSDVLEFNKMSELFNQRSSVEGKIPSGQFNASFDLDSGSWAHDAPHTRCLAMDGYFISLFDLRLDHRHLALDAGVLADVPPAWDPSAIARFIEKYGTHVIVGLSMGGQDVVYVKQDKSSSLSPSEIKEHLDRLGDQLFTGTCAMPPLHCRSKDKFKIPEAFNVFDAQVAQQRLHGITTLVSSKEGVTVIYSKRGGNTTVSSHSEWLLTVPAMPDVINVKLVPITSLIRGVPGTGFLSHAINLYLRYKPPVADLRYFLDFQHHCVWAPVLGELPLGPCSHRQGSSPALHFSLLGSKLYVSSTEVVVPKLPVTGMRLHLEGKKNNRLGIHLQHLSTTPTFVAAARADKPPVWRGTEAVTDDRYYEPVQWRMLARVCTAPVKYDPRWCAGDRRRRPAACVVAGAQLHVVAHDAANNVLHLRLLYSQLPGYAVVQSKWARGAARPPSGRSSSFLSIPFSGSPSTSSGAAEKGGRPEQGASLVGVANVNSGVFAGGPPVPVGAQKLLKFVDTSQVTMGPQDSPGYWLVTGARLDVDKGKIMLHVKFSLLAQVS

SEQ ID NO: 52618 - protein, 155 aa, Oryza sativa
MESSPPPPPPTITVQVKFGGRTIPVEVPAAATAADLKRLLQPLTNVLPRGQRLICKGKVLADAASLSSMQVVNGSKVMLMASQGLHQGDGPITKNSSVPAPSTRRASNVKEAQIQKSDTNVSKIRPERWKATGIIALSDSSLKVTDSNFLTLLLN

SEQ ID NO: 52619 - protein, 473 aa, Oryza sativa
MALKVVSFPGDLAAVSFLDSNRGGAFNQLKVDLPFQTRDRRAVSLRRTCCSMQQAPPPAWPGRAVVEPGRRSWDGPKPISIVGSTGSIGTQTLDIVAENPDKFRVVALAAGSNVTLLADQVKTFKPKLVAVRNESLVDELKEALADCDWKPEIIPGEQGVIEVARHPDAVTVVTGIVGCAGLKPTVAAIEAGKDIALANKETLIAGGPFVLPLAQKHKVKILPADSEHSAIFQCIQGLPEGALRRIILTASGGAFRDWPVDKLKEVKVADALKHPNWNMGKKITVDSATLFNKGLEVIEAHYLFGAEYDDIEIVIHPQSIIHSMIETQDSSVLAQLGWPDMRIPILYTMSWPDRIYCSEVTWPRLDLCKLGSLTFKAPDNVKYPSMDLAYAAGRAGGTMTGVLSAANEKAVELFIDEKIGYLDIFKVVELTCDAHRNELVTRPSLEEIIHYDLWAREYAASLQPSTGLSPVPV

SEQ ID NO: 52620 - protein, 175 aa, Oryza sativa
MVREVAESCADGVVMEMVAAYCGRFYAAKPELAARRIEAIGFQVGHQLTERYTMERPRFSDHLEAIKFICKDFWSELFKKQIDNLKTNHRGTFILQDNRFRWLTRVSIDPSVESMDATDNDSATLGDSAAQTTSMLLYFPCGIIRGALTNLGISCSVTADMSNLPACSFVVRIKT

SEQ ID NO: 52621 - protein, 510 aa, Oryza sativa
MFTRPLTSYLLGGLHSKNCSKKEWCFMCEFEKLVGEGRQGKIALSPTGILSHLPDIGSSFGPGKQEDAHEFLRYAIDAMQSVCMKEARKSGTHRLHEETTLMQLIFGGYLRSKIRCTRCDATSEQHERILDLTVEIDGDISSLEGALERFTSTEVLDGDNKYKCSRCKSHERAKKKLTISEAPNVLTIALKRYQSGKFGKINKAIRFPETLNLQRYMSPKADDTSPVYSLYAVVVHHDIMNAAFSGHYVCYVKDTHGKWYKTDDSQVKPVSLENVMSKCAYMLLYARCSPRAPSSVRPALMAQDPARVKKDKARVNSGRWHGGGPIHQGGQMYADHMTDDLPHTYDEFGHGPYSPAESPSPSESSSIFTSSDTGSHSTDSSESTRNSTSEDMERLIFGDQVSYFDGSMFGHGENGRMTYSRSKSSLGTSSSGQEVDQYRPDEHRLQGAREGWNQGDESSSLYTNQSKHQFSSKLTEQYRRRLDGTEHDPGEANSVLLRRSARERTAQTFY

SEQ ID NO: 52622 - protein, 288 aa, Oryza sativa
MSKAVLAPLETIRTRMVVGVGSRHIGGSFVEIIEQNGWQGLWAGNTINMIRIIPTQAIELGTFECVKRTMAEAQEKWKEDGCPKIQIGKVKIEFPLQFLSPVAVAGAAAGIAGTLVCHPLEVIKDRLTINREVYPSISVTFSKIYRTDGIRGLYAGLCPTLIGMLPYSTCYYFMYDTIKTSYCRLHKKTSLTRPELLVIGALSGLTASTISFPLEVARKRLMVGALQGKCPPHMIAALAEVIQEEGLPGLYRGWGASCLKVMPNSGITWMFYEACKDILLAGKDKRKA

SEQ ID NO: 52623 - protein, 63 aa, Oryza sativa
MEAAAVSPGVCGGFTGGGGATARRRRLWRWLHNRATTTMSGQRQSGLDSFFFIIAKIWDEFEG

SEQ ID NO: 52624 - protein, 216 aa, Oryza sativa
MVDDDILRANSCTIFRQIALDCMFLESQSIIDYSMLLGIHFRAPNHLKRITSCQNALESTGISAETECSVALHHEETISSKGFLLVAADEPGPAVRGSHIRGSMVRAAEGGYEEVDLVLPGTGRFRVQLGVNMPARARKVQEDVNVEVENRDTIEEYDVVLYLGIIDILQEYNVSKRVEHAVKSLKFDPLSISAVDPNLYSRRFISFLEKVFPEQD

SEQ ID NO: 52625 - protein, 971 aa, Oryza sativa
MRALVVLVGLACLAFVAEAKGGGAASAAALDDDVLGLIVFKADVVDPEGRLATWSEDDERPCAWAGVTCDPLTGRVAGLSLAGFGLSGKLGRGLLRLESLQSLSLSGNNFSGDLPADLARLQDLQSLDLSANAFSGAIPDGFFGHCRNLRDVSLANNAFSGDVPRDVGACATLASLNLSSNRLAGALPSDIWSLNALRTLDLSGNAITGDLPVGVSRMFNLRSLNLRSNRLAGSLPDDIGDCPLLRSVDLGSNNISGNLPESLRRLSTCTYLDLSSNALTGNVPTWVGEMASLETLDLSGNKFSGEIPGSIGGLMSLKELRLSGNGFTGGLPESIGGCKSLVHVDVSWNSLTGTLPSWVFASGVQWVSVSDNTLSGEVFVPVNASSMVRGVDLSSNAFSGMIPSEISQVITLQSLNMSWNSLSGSIPPSIVQMKSLEVLDLTANRLNGSIPATVGGESLRELWLAKNSLTGEIPAQIGNLSALASLDLSHNNLTGAIPATIANITNLQTVDLSRNKLTGGLPKQLSDLPHLVRFNISHNQLSGDLPPGSFFDTIPLSSVSDNPGLCGAKLNSSCPGVLPKPIVLNPDSSSDPLSQPEPTPNGLRHKKTILSISALVAIGAAVLITVGVITITVLNLRVRTPGSHSAAELELSDGYLSQSPTTDVNSGKLVMFGGGNPEFSASTHALLNKDCELGRGGFGTVYKTTLRDGQPVAIKKLTVSSLVKSQDEFEREVKMLGKLRHRNLVALKGYYWTPSLQLLIYEFVSGGNLHKQLHESSTANCLSWKERFDIVLGIARSLAHLHRHDIIHYNLKSSNILLDGSGDAKVGDYGLAKLLPMLDRYVLSSKVQSALGYMAPEFACRTVKITEKCDVYGFGVLALEILTGRTPVQYMEDDVIVLCDVVRAALDEGKVEECVDERLCGKFPLEEAVPIMKLGLVCTSQVPSNRPDMSEVVNILELIRCPQDSPETELG

SEQ ID NO: 52626 - protein, 122 aa, Oryza sativa
MSSSRCTLALRRLERMNSMPSPLARTVMTRADDHPYQSYSHSEPPSPAAPHAGDHRHQRSSFAADHDDDDDDVASTSSECWWTRSSWAFLNETPSPEQQMFGKSQTYACVQFHVSRVVTGNA

SEQ ID NO: 52627 - protein, 277 aa, Oryza sativa
MKRPGGAGGGGGSPSLVTMANSSDDGYGGVGMEAEGDVEEEMMACGGGGEKKRRLSVEQVRALERSFEVENKLEPERKARLARDLGLQPRQVAVWFQNRRARWKTKQLERDYAALRHSYDSLRLDHDALRRDKDALLAEIKELKAKLGDEEAAASFTSVKEEPADSDGPPAAGFGSSDSDSSAVLNDVDAAGAAPAATDALAPEACTFLGAPPAAGAGAGAAAAASHEEVFFHGNFLKVEEDETGFLDDDEPCGGFFADDQPPPLSSWWAEPTEHWN

SEQ ID NO: 52628 - protein, 364 aa, Oryza sativa
MAGGKIQKKRHGGGAGGGGGGGGGGARLQGGIPFEKSKGQHILRNPALVDSIVEKAGLKPTDTVLEIGPGTGNLTKRLLQAGVKAVVAVELDPRMVLELNRRFQGDPLASRLKVIQGDVLKCDLPYFDICVANIPYQISSPLTFKLLSHRPIFRCAVIMFQREFAMRLVAQPGDSLYCRLSVNVQLLSRVSHLLKVGRNNFRPPPKVDSSVVRIEPRKPLPPVSFKEWDGLVRLCFNRKNKTLGAIFKQKRVLELLEKNYKTMQSLQLTSDAEKGEEKMSPDDVALLSSMVDDMNMESSYENDDDDEMEMDDADMVVESRACFKEKIMGILQQGDFAEKRASKLSQVDFLYLLSLFNKAGIHFS

SEQ ID NO: 52629 - protein, 809 aa, Oryza sativa; identical to SEQ ID NO: 42835

SEQ ID NO: 52630 - protein, 564 aa, Oryza sativa
MANRTELATLLCIPLFSLLLLDVVAGNFTGPHQIRLRCGGTSTAIDSDGRTWEGDANSKLALDGLAANASYLDPLLPSPVPYMTARIFSSNFTYWFGLNPGRVFLRLYFYPTEYADRAAADALFSVTAGNLVLLNDFNPSQVAHAMGRTYLILEYSVNVPSGDLDVTFSLSPHHTGSYAFVNGIEVVSTPDIFTKPAPTFLNVGISDPFPISVNIGLQTMYRLNVGGETISPKDDSEFCRTWGKDSPYISGDSGLNFFKDDTVTISYPRTMPSYIAPVGLYETARSMGLKGYINLRYNLTWILPIDAGFHYLLRLHFCEIQHPITKANQRTFFVYINNQTAQKMDVIVLSGGIGVPIYTNYIVGPIGYGQTDLRVALHPDVETNPEFVDAILNGLEVFKLQDVNKSNLAGMNPIPWSHRDGDPRLATIGGAIFVLVVLLIASLSMYIINIRKKRVDHGNTNKELLLATLLSKKSNLCHQFTFLQIQEATSNFDEAFLLGKGGFGNVYKGELDHGMKVAIKRGDPLSQQGINEFQTEIEMLSKLRHRHLVSLIGYCEDENEMILV

SEQ ID NO: 52631 - protein, 576 aa, Oryza sativa
MAGRSSASSAVASRPSSPAAASRPARTPSTPRSPTSSAFASRLVTGGRGWGRSWWAGWRSGSGRAGRSTRTWRRSRTTRRRCASSPAAAATPSSGRRRCSCTRLKMKSSSRKAPSPQAQQSAKRVRKRLDRTKSSAAVALKGLQFVTAKVGNDGWAAVEKRFNQLQVDGVLLRSRFGKCIGMDGSDEFAVQMFDSLARKRGIVKQVLTKDELKDFYEQLTDQGFDNRLRTFFDMVDKNADGRLTAEEVKEIIALSASANKLSKIKERADEYTALIMEELDPTNLGYIEMEDLEALLLQSPSEAAARSTTTHSSKLSKALSMKLASNKEMSPVRHYWQQFMYFLEENWKRSWVMTLWISICIALFIWKFIQYRNRAVFGIMGYCVTTAKGAAETLKFNMALVLLPVCRNTITWIRSKTQVGAVVPFNDNINFHKVIAAGVAVGVALHAGAHLTCDFPRLLHASDAQYELMKPFFGEKRPPNYWWFVKGTEGWTGVVMVVLMAIAFTLAQPWFRRNKLKDSNPLKKNDWLQCLLVYPPPVCHCVHFALCPWNVLVSKQEMVQEDDMDVPRCSCCPVCK

SEQ ID NO: 52632 - protein, 697 aa, Oryza sativa
MVRKNGWQLPAHTFQIIAITVFFLLVVAFYAFFAPFLGKQVLEYIAFGIYTPVAFVVFILYIRCTSINPADPGIMSKFQNGFRNAPTSGTGLQDTNLPGRGDVATGTNSPTSTFKSSLDGRSNHAGLAAGDGNNLSSQPPRSSSCSLVGGLICALFVEEDCRTLVDSEHQADGEDALFCTLCNAEVRKFSKHCRSCDKCVDGFDHHCRWLNNCVGRKNYFTFLALMITSLLWLAIEIGVGIAVLVVCFVNKNSESIIQDKLANGLTRPPFATIVAIFTLLSIIACIPLGELFFFHMILIRKGITTYEYVVAMRAMSEAPQEEEEEDGVNIVYSPTNSATTGFSGGSSLGLPYKGSWCTPPRIFVDQDEVIPHLEAGMVPSTIDPDTAGNAERANRAKKQVKISAWKLAKLDTNEAMKAAARARASSSVLRPVDARHRGGHDAGDLSSSGNGSVRSSVSAAAKEQRRRASSLPSSCAQSVASQDEYEQSGSSVMSSPVRLHKLAPPPLPAAHNVPPRPPPPVNAAPEAAIPRPPPPVPPATRISNPMFQSATSYVRENRRASVVWDQEAGRYVSVAPAPATARPGGGGGGAEQPAARAPPFLANPGGEREPLSAARSRNNPAAPAPTNAAPSSSSTLPSERLTYSGQSIFFGGPLLGGAAAAGEPRRDEAAGTRARGGESFPVFVPGTFQKKPPPFRR

SEQ ID NO: 52633 - protein, 672 aa, Oryza sativa
MLILSSILYFLSSLIMLWSPNVYVLLLARLIDGFGIGLAVTLVPLYISETAPSEIRGLLNTLPQFSGSGGMFLSYCMVFGMSLLPSPDWRIMLGVLAIPSLFFFGLTIFYLPESPRWLVSKGRMAEAKKVLQKLRGREDVSGEMALLVEGLEVGADTSIEEYIIGPAIEPADEHVVDGDKDQITLYGPEEGQSWIARPSKGPSILGSVLSLTSRHGSMVNQSVPLMDPIVTLFGSVHENMPHAGGSMRSTLFPNFGSMFSVTDQHPKVDQWDEENLHRDDEEYASDGAGGDYEDNVHSPLLSRQTTSAEGKDIAHHAHRGSALSMRRRSLLEEGGEAVSSTGIGGGWQLAWKWSEREGEDGKKEGGFKRIYLHQEEVPGSRRGSVISLPGGGDAPEGSEFIHAAALVSQPALYSKDIIEQRMSGPAMIHTSEAAAKGSSWKDLFEPGVRRALLVGVGIQILQQFAGINGVLYYTPQILEQAGVAVLLSNLGLSSASASILISSLTTLLMLPSIGLAMRLMDISGRRFLLLGTIPVLIASLVVLVVSNVIDLGTVAHAALSTISVIIYFCCFVMGFGPIPNILCAEIFPTRVRGICIAICALTFWIGDIIVTYSLPVMLNAIGLAGVFGIYAVVCSIAFVFVFLKVPETKGMPLEVITEFFAVGAKQMQATKA

SEQ ID NO: 52634 - protein, 967 aa, Oryza sativa
MAPAKKSPRPCCHVSFLLLQLVLLSVIVFPATAAAASTFRCSNPSPVPNEVPEGNDARELLRSFQITTGYFSGGDRLFAPDDDSAYIPRSFALSPYKVAHTTDPAILEVAATLALYGPSSDHGSGGGARRRRHRYLVSQLVASFVLHGYYSSASGELCVVGGSGSYSVDGGSVEHLRDVNLHLRVPNAPSLADPFVTGLLDGADFETISLVAYVENDRYVYSEKRPSCPPPMPAHAARGALQALEANFSCSHLRELFVSSYRLENTSSDASSPAASTFQFPLSHGGLRMLVNQMHCTANGSVRAYVVFSNYTDSERRWRRDMVINNRFLVKEEAVVADGYWDSTTSRLCLRACRVAHSSAAETELKVGEQCGLGMSFWFPAVWTIRDRSIVAGLLWNANQEESGGNKHAGASLSGVMSVSSIDGDGYNRRRSNLTDVKYNYTMVEKAKKQYLSCKFSKRKTGRFPGNSSMYSYSDFRFDFIETLGAGGQASPVTIGSVMVDGDQLAAEYMFFRHAMGEMNKSRTTVVRMDHSQLLNVSYDISYRVRSANSKARKNSSSLFSHPLSIERREISAEGVYDPKTGILFMVGCQEINGSSTDCQILVTVHFASLDAKGNGHGRGKISSTRDKADRLHFEAMDITLYGMYREQIGESIWRMDLEIIMAVVSATLSCVFAALQIRHARANPASAPSATSVAMLAVLALGHVTHLALNVDALFVSRRTHYIPISADGWLELNEVMLRVPTLIAFALHLCLLQLVWSSRRSAPRAIAEKWSAAERRSLWICLPLYLLGGLLAGAVHVINNGRAAAENSLVVRVAGDSGTLWDDLASYAGLVLDGFLLPQVILNALSRSRARAISAWFYVGVTVLRAAPHVYDALRARGYVPSVRPSSTYVYASPRDDLFGVAWDVAVPLGAASLALLLFLQQRLGGAFFVRGRRFGEYEMVPTTVSSHQEGDKKMDHERGDVIAN

SEQ ID NO: 52635 - protein, 550 aa, Oryza sativa
MLSLAASSLPSTRTHRPDAASHSSSSSVRLLRSLARSRRADLAHRALLLFRSLQSTPSPPPPHVSLPAVLSAAAFLSALPEGRQLHALAAKLGLAPSHTVVANSLLHLYSSCGLPGAALDLFRRIPDRSLVSWNTAVDALVGNGDHLAALDLFREMQRDTELAPDAYTVQSVLGACAGAGALSLGVYAHALLLRELGGDGDGEAVSRDMLINNSLVDLYGKCGALELAQQVFDRMPARDLASWNVMILTLANHGRVCESVELFDRMTQVEKMAPNAITFVAVLSACNHGGLVEEGRRYFAMMVDQYRIKPRIEHYGCMVDLLARVGFIEEALDIVAGMNCRPDAIIWRSLLDACCKKNAGLELTEAMAKLALEVPDDAVSGVYVLLSRVYASAQRWNDVGMVRRLMVEEGVKKEPGFSSIEMDGLVHQFVAGDTSHPQSEAIYEKLDEIQLKLTSAGYKPDLSEAPLVASIDNAKGAALRLHSERLAISFGLLNATPGAPIRILKNLRVCKDCHTISKLISKLYGVEIIVRDRIRFHHFKDGSCSCKDYW

SEQ ID NO: 52636 - protein, 285 aa, Oryza sativa
MRRKKPIPFTQKFPNADPLAMRLLERMLAFDPKDRPSAEEALADPYFKNIANVDREPSAQPITKLEFEFERRRITKEDIRELIYREILEYHPKMLREFLEGTESTGFMYPSAVDHFKKQFAYLEEHYAKGSTAAPPERQHNSLPRPCVVYSDNRPQSTASVTEDLSRCLIRDNNLKSQDSASVGASRIPQGAAARPGKAVGSVLRYGNCSTSAAEQQYEQRRVVRNPAIAPNSSVPLGSSYPRRNQTCKSETGDVERIDSSQTGPPKPYVANKLPATVDGRSGHW

SEQ ID NO: 52637 - protein, 354 aa, Oryza sativa
MCVEELEGAERLDFGGVAELETTPADFEMEKVCENTVSLDFKQARSSSFVPVIRSGDWSDIGGRDYMEDAHVCISDLANNFGHNSVDDEIISFYGVFDGHGGKDAAHYVRDNLPRVIVEDADFPLELEKVVRRSFVQTDSQFAERCSHQNALSSGTTALTAMIFGRSLLVANAGDCRAVLSRRGTAIEMSKDHRTYCLNERKRIESLGGYVDDGYLNGQLAVTRALGDWHLEGLKEVGEPGGPLSAEPELKMITLTKEDEFLIIGSDGIWDFFSNQNAVDFTRKRLQEHNDLRLCCKQIVEEAIRRGASDNLTAVMVSFHQEAPPQLRVNRTGRVERSISAEGLHSLRVLLEGQ

SEQ ID NO: 52638 - protein, 651 aa, Oryza sativa
MAGRSGGGGGGSSGKSGTGRMVSLQEFVSSMAPLIDLEKAAEISAESATSSKTLERRGCVMANLKCTDAQTGLMGKTLLEFQPNKGDVLPPHKFGTHDVVALKPNKADAGSAALGQGVVYRLKDSSITVAFDDIPEDGLNSPLRLEKLANEVTYRRMKDALVQLSKGIQTGPSANLIPVLFGENPPMSSKDVAKFSPFNKNLDESQKDAISKALRSRDVFLLHGPPGTGKTTTIIEIILQEVKRGSKILACAASNIAVDNIVERLSRYRTKLVRLGHPARLLPQVLDSALDAQVLRADNSSLAGDIRKEMKVLNSKLLKAKDKNTKRDIRKELRTLAKEERKRQQLAVADVIKNADVVLSTLTGASSKKLDGITFDLVIIDEAAQALEMACWIALLKGPRCVLAGDHLQLPPTIQSAEAEKKGMGKTLFERLTEAYGDQITSMLTIQYRMHELIMNWSSKELYNNKIKAHSSVADHMLYDIEEVKRSSSTEPTIILIDTTGCDMEEVKDEEESTMNEGEAAVSIAHAKLLVESGVRASDIGIITPYAAQVTCLKMMRNKDTKLKDLEISTVDGFQGREKEAIIISMVRSNSKKEVGFLSDHRRMNVAVTRARRQCCLVCDVETVSNDKFLKRLVEYFEENGEYLSASEYQS

SEQ ID NO: 52639 - protein, 488 aa, Oryza sativa
MKDGGGGGGRGQQQQWPCDYCGEAAAALHCRADAARLCVACDRHVHAANALSRKHVRAPLCAACAARPAAARVASASAPAFLCADCDTGCGGDDGAALRVPVEGFSGCPAAAELAASWGLDLPGGCGGEEEEADDAFFSALDYSMLAVDPVLRDLYVPCDPPEVVVAGGGRRLKGEALGHQLAEMARRKAETAHPHTQPHSDLSPRTPRRTSAAASGRLQEKQAPPPLPHAAATAAPLPYTSLLMMAPANCTELMENNRVGDEDENVLWESTAPSVPPTQIWDFNLGKSRDHNENSALEVGFGSNNGGFMIKSYNDMLKEISSGTTKDLEDIYDSRYFAAAEDIMSTNVCQLSSKNPSTRSNKRKASSCASTIDGPTTSTSHVPAASGALGGSSNDRGSALPKEISFCDQTVVPTGADQRPCTIKIDSETLAQNRDSAMQRYREKKKNRRYEKHIRYESRKLRADTRKRVKGRFMKSNGAPDDVSNGG

SEQ ID NO: 52640 - protein, 86 aa, Oryza sativa
MVLSNDIDLLNPPAELEKLKHKKKRLVQSPNSFFMDVKCQGCFNITTVFSHSQTVVVCPGCQTVLCQPTGGKARLTEGCSFRRKGD

SEQ ID NO: 52641 - protein, 758 aa, Oryza sativa
MKFDLEGLTVHFPYAAIYPEQHAYMGELKRALDARGHALLEMPTGTGKTSALISLITSYSLASPSRPLRLIYCTRTVHEMEKTLAELRLLFAHLPAAASRSLLALGLSSRKNLCVHPQASAAAARDSVDTACRRLTASWVRDRAASDPDSTPLCDFFESFDRAAAAGDLASYMPPGVYTLADLRALGRDRGICPYFLARQMVKYANVVVYSYQYLIDPKVASIVSREMQKECVVVFDEAHNIDNVCIEALSVSIRKQTLEGAERNLRRISQEIDRFKATDANRLRAEYNRLVDGLAQRGNLPISDAWLANPALPEDILKEAVPGNIRRAEHFLAVLRRLVRFLDGRLETENVENEMPVAFVASIHSQAGIDQKMLRFCYDRLHSLMLTLEITDTDEFMHIQTICDFATLIGTYTRGFSIIIEPYDERMPDIRDPVIQLSCHDASLAIQPVFERFQTVVITSGTLSPIDLYPRLLNFNPVISRSFTMSLTRDCTCPMVLTRGSDQLPVSTKFDMRSDPGVVRNYGRLLLEMASAVPDGIVCFFVSYSYMDGIVNSWNEMGILQDIMQHKLVFIETPDVVETTLALDNYRKACDCGRGAIFFSVARGKVAEGIDFDRHYGRLVIMFGVPFQYTLSRILLARLEYLRETFQIKEGDFLTFDALRQAAQCVGRVIRSKADYGMMIFADKRYSRHDKRSKLPGWILSHLHDAHLNLSTDMALHIAREFLRRMAQPYDKTGSGGNKTLLTEEDLQNMAQDAMEM

SEQ ID NO: 52642 - protein, 959 aa, Oryza sativa
MASPQESNSLCLKRKLVDDCLSKECKSRRIKTEKGPSSDSSAKRCKCCCTRPNLASDCVNYLKSGVPSRVMFYKQGSWHNFPEQIMKSLIEEFRSNKSSVVAVMDDEPVLVDFLSMTLVNLKSRKQRSVAWFDDTGKCFYPSLFFDEEADEVAKVGGDFEGATQGIMLDKVANSPPEVVKQVVLESSPPVPQKPATADILRKKIASVERGSEGFLFAQDLFLSGMGPFATPNNILHIHRYSPNDITAQCRLQAFEKQMMSTKEERGDANVRYGWLGSRKNDIVRILINGFGNNGKPAEKAGLSAGVYLSPEDRAFSSVGLCDVDEKGVQYMLLCRLILGNMEAVMPGSQDSFPSSDIYDSGVDDCSNPKCYVMWPSHLSTHIRLEYLVSFRLSSKVRNYLLGLKGLWFHPSPKEVAVDISTLVPIMSGNAEGPTSPWISFRVLFAMIQENISSVARELLFHHYEELKENKITREEMVKQMIILVGEKLLLETLKRLHYCPSLWYKSAGKIASSDPARTAAEDRSLDQTGNCSLIVSVAHGDSHAPNAVAENSTSLCTKGCDTPATGMISKGYDSLAPKGVPETSTSVGPVHGASPSVEPKVRDSPIQTVLSGNIATDCAKRQDPLVSRVAPVAHNGLLRMPSGKSASLAAQVCNSVRPSTGPSGRASTEPNNASKSCGIFAPGIRPKGGESLVPSLALGNSKYAGVEGLNSAPRATPPGIRPKGGESLVHGLALGNSKCAGAEGINSAPRVTPLGIRPKGGESIAPSLALGNSKCAGAEGINSAPRVTPPGIRPKGGESIAPSLALGNSKCAGAEGLNSAPRVTPPGIRPKGGESFVPSLALGNSKCAGAEGLNSAPRVTPKDKEFLSLSISSQQSPVLNSGKGHDGTSGAARPVHAPGHGNPKALATEARGSLSLSIAPNVHDPPASSKEPKDDASPIAGMVSESQHSQAPNAVTKGT

SEQ ID NO: 52643 - protein, 84 aa, Oryza sativa
MRALEGHKVVHLNSDLRANLYTDVVVQSPNMYTLHFVRALTFFLSQIYIILIKFTEKHDNIFNSKQTCYQNIFNIRFNGSNLMF

SEQ ID NO: 52644 - protein, 585 aa, Oryza sativa
MAAMAAPKLLLGLVMLVGCAAADSHRYRPGDAVPLYANKVGPFHNPSETYRYFDLPFCAPEKVKDKIEALGEVLNGDRLVDAPYKLDFRVDFDAKSVCSRRLSKDDVVKFRHAVSKDYYFQMYYDDLPFWGFIGTKPEKADAGDKYYLYRHIIFDILYNKDRVIEINVHTDQNAVVDLTEDKELDVEFLYTAKWKETQIPFEKRMEKYSSSSVMPHHLEVHWFSIVNSCVTVLLLTGFLATILMRVLKNDFVKYSHDEEEPDDQEETGWKYIHGDVFRFPTNKSLFSAALGTGTQLFALTTFIFLLALVGVFYPYNRGALFTALVVIYALTSGIAGYSATSFYCQFEGKNWVRNLLLTGCLFCGPLFLTFCFLNTVAIAYNSTAALPFGTICVIVLIWTLVTFPLLVLGGIAGKNSKNEFQAPCRTTKFLREVPPLAWYRRTIPQMAMAGFLPFSAIYIELYYIFASIWGHRIYTIYSILFIVFIILLIVTAFITVALTYFQLTAEDHEWWWRSFLCGGSTGFFVFAYCLYYYRERSDMSGFMQTSFFFGYMACICYAFFLMLGMVGFRAALLFVRHIYKSIKCE

SEQ ID NO: 52645 - protein, 65 aa, Oryza sativa
MPLLLNMIDLYIYKILNHLVESTLFCPTEICHILYCPLLACLFIPCIFSFRWVLCQTLPQSQRVD

SEQ ID NO: 52646 - protein, 261 aa, Oryza sativa
MHPLSMEQQPSRFSREHDLSSQANKSLELGLTSLLYEDNSQASFPTMGSSNWEQNFVGDLHFTNGNQGLHYDSESAAGFSDSFASDYAAATDDVLDPLAYLASQFPDFSSESLAELYYANGCDFNHTIEILTQLEMQVDATSNPTLTPRTPNFSTGDFPALPTVEDQNGFSKGNADILSIFNGRSSPSVSTGTGDFVSAVRNLHRKILAIGSIRKVLNTVMVFQLFLYPSSTVLRPKHLLETSFKVLAVQELLHGSKLEMQ

SEQ ID NO: 52647 - protein, 532 aa, Oryza sativa
MSLDELPHKVSDERVNHDTVTSHESEIGSGSISTVSSTVSSVESEKAAYEFLAQTPIKSTDAHLVEFSEAMRTVAKALRRVAEGKAAAQAEAEEWRRKYELEMAHKQQRKIKGYGSCANNELEKLASQLTLETPASDQAGCCGNHGICSHEVLQDESPGPNPRSSHKLVSRKASFRLSWGCNGDKNGQHKHDFVSFEKGDITTAERSNKQILLKWESSPQTVLFITKPNSNSVHVLCAEMVRWLKEHKKINVVVEPRVSKELLTEDSYYNFIQTWDDDEEKKMLHTKVDLIVTLGGDGTVLWAASLFKGPVPPVVAFSLGSLGFMTPFPSEQYRDCLDNVLNGPFSITLRNRLQCHVIRDAAKDELETEEPILVLNEVTIDRGISSYLTYLECYCDSSFVTCVQGDGLIISTTSGSTAYSLAAGGSMVHPQVPGILFTPICPHSLSFRPLILPEYVTLRVQVPHNSRGQAWASFDGKDRKLLSPGDALICSISPWPVPTACLVDSTTDFLRSIHEGLHWNLRKSQSFDGPRD

SEQ ID NO: 52648 - protein, 161 aa, Oryza sativa
MSRNPGCTVFIGNLDEKVPERVLYEILIQVGRVVDLHIPRDKETNRSKGYAFAEYETEEIAQYAVKLFSGLVRLHNRTLRFAISGQDKQSSNGNIPVTPKVNPIPPPKPAQLMRSSDTPASQHTVVNGRIAGISPNHSYSAHSEGERVSLFLSKYKTLYGF

SEQ ID NO: 52649 - protein, 472 aa, Oryza sativa
MKEPAQVRTARGGAADGVEVGVEEEEEPPRSATVKQEEANAVLGAEGSRPFAMRELKEDHEVAAGSGVKAASGERNGIGSADAQGSSYSQESMQQFSSHHDVAMDLINSVTGVDEEGRSRQRILSFAAKRYISAIERNHDDPDAYYNWALVLQESADNVDPNSSSSKDALLEEACKKYAEATRLCPTLYDAYYNWAIAIADRAKMRGRTKEAEELWKQAILNYEKAVQLNWNSPQALNNWGLGLQELSAIVPAREKQTIIKTAISKFRAAIQLQFDFHRAIYNLGTVLYGLAEDTMRSGKPGVSASEFYSQSAIYVAAAHALKPNYSVYRSALRLVRSMLPLPYLKVGYLIAPPENSAIAPHKEWERSQFVLNHEELQQVNASDQPPSQSPGHVDSGRKLFRIVVADIVSVSACADLTLPPGAGLRIDTIHGPRFLVADNWETIDSWLDAIRLVYTIFARGRSDVLAGIITG

SEQ ID NO: 52650 - protein, 381 aa, Oryza sativa
MASSTQGQVITCKAAVAWEANRPMTIEDVQVAPPQAGEVRVKILFTALCHTDHYTWSGKDPEGLFPCILGHEAAGIVESVGEGVTEVQPGDHVIPCYQAECRECKFCKSGKTNLCGKVRAATGVGVMMNDRKSRFSINGKPIYHFMGTSTFSQYTVVHDVSVAKINPQAPLDKVCLLGCGVSTGLGAVWNTAKVEAGSIVAIFGLGTVGLAVAEGAKSAGASRIIGIDIDSKKFDVAKNFGVTEFVNPKDHDKPIQQVIVDLTDGGVDYSFECIGNVSVMRSALECCHKGWGTSVIVGVAASGQEISTRPFQLVTGRIWKGTAFGGFKSRSQVPWLVEKYLNKEIKVDEYVTHSMNLTDINKAFDLLHEGGCLRCVLATDK

SEQ ID NO: 52651 - protein, 440 aa, Oryza sativa
MDFSEQDVEIFGEDYDDAEADGGGGGGASSGSSSPSSSSSSSAAGSSSSSSGASSSSGGGGGGGEDEDGVDQGDARGYDDDPFDGAPARAAGGYGDEERGEGDAEEEEEEEERDLFGSDNEDYVKTPARSNYLVPVLPSIRNTNNHSRGGYGGRNGRGPPLLPRPGGHPGRHNFGYGGRFSHGNGRNVEGFVSEMKLNKSEETLSRKFVAFQEPSEIACYSRIEGGDVYFDDRSLRLFKRNICDYVGENLNKGFESFIEKRDLGSEGFGDLLACIRNSTVPLQNIHFVTYRNNLNKILATAYLREPWKMGVHKRNGVVYLDVHKLPERPQSEVERRRCYWGYSFENLATENSIDEDGRGIDANVEFCAVIKTKLGAHRIIMGAEMDCCDATDDGRRFYVELKTSRELEYHTVEKFEKEKLLRFWIQSFIAGVPYVVVGFR

SEQ ID NO: 52652 - protein, 371 aa, Oryza sativa
MEASAGLVAGSHNRNELVVIRRDGGGGGGVGGRRAAEAKAACQICGDDVGEGPDGEPFVACNECAFPVCRNCYDYERREGSQACPQCKTRFKRLKGCPRVAGDEEEDGVDDLEGEFGLDGREDDPQYIAESMLRANMSYGRGGDLQPFQPIPNVPLLTNGQMVDDIPPEQHALVPSYMGGGGGGGKRIHPLPFADPSVPVQPRSMDPSKDLAAYGYGSVAWKERMEGWKQKQERMQQLRSEGGGDWDGDGDADLPLMDEARQPLSRKVPISSSRINPYRMIIIIRLVVLGFFFHYRVMHPVNDAFALWLISVICEIWFAMSWILDQFPKWLPIERETYLDRLSLRFDKEGQSSIRSPVQTSIRVSSQTVNP

SEQ ID NO: 52653 - protein, 392 aa, Oryza sativa
MTTATAIVAGHGLALRRSLHLSKPSCATFSARALPPAAHCCRTVVAAAAPSSRTCRCRSVSSESSTAAAADTADDEEEVTKSDSEEEEMDPLAEVCYLDPEADAEGIREWELDFCSRPILDARGKKVWELVVCDATLSLQFTRFFPNTSINSVTLRDALASVATSLGVPLPDRARFFRSQMQTIISRACNELGVKAVPSRRCVSLLLWLEERYETVYSRHPGFQSGTKPLLTLDNPFPTSLPENLFGDKWAFVQLPFSAVREEVESLERRYAFGAGLDLDLLGFELDENTLIPGVAVESSRAKPLAAWMNGLEICSMEVDTGRANLILSAGVSTRYVYAGYQKSAATTQEAEAWEAAKKACGGLHFLAIQENLNSDGCVGFWLLLDLPPPPV

SEQ ID NO: 52654 - protein, 467 aa, Oryza sativa
MAALLHLQSSATAAAAPSFLLLRRRGGGVTAPAGSSRRRRACFRVEAKIREIFMPALSSTMTEGKIVSWTASEGDRLAKGDPVVVVESDKADMDVETFHDGFLAAVLVPAGESAPVGSAIALFAESEDEIPAAQSKAASLSSSSSSSPPPPPPQESTPPPPPPPPPAPVAAAVSAPAPPSPASQGGLRVVASPYARKLAKDLNVDLNSITGSGPGGRIVAKDVEAAAAAPKKAAPVAAARPDVPLGSTVPFTTMQGAVSKNMVESLAVPTFRVGYTFTTDALDALYKKIKPKGVTMSALLAKATAMALVQHPVINSSCRDGKSFTYNSSINIAVAVAIDGGLITPVLPDADKLDIYSLSRKWKELVDKARAKQLQPHEYNSGTFTISNLGMFGVDRFDAILPPGTGAIMAVGSSQPTLVGTKDGSIGIKNQMQVNVTADHRVIYGADLAAFLQTLSKIIEDPKDLTF

SEQ ID NO: 52655 - protein, 29 aa, Oryza sativa
MGSHDHHPSWPVLHFTSICCFLVSWCMGD

SEQ ID NO: 52656 - protein, 296 aa, Oryza sativa
MVGGGGGGGHGVRTPANFPPRQKARLPRGPVHEKSLEQQKKGPSSSSPSVSSNKSPLQLAAAIVQPQKPLESPQHMVTPVRLQESPGPRTIPCSSGSVGSGSGAAPFDICIKRDDKCSIKLSRSLLEINREKRREREQLSKEAAPLQYLRPGMVLLKKFLKHDDQVDIIRRCQKLGIGSGGFYTPGYRDGGKLSLQMMCLGKNWDPNSRSYGDTRPFDGAQPPSIPEVFSKIVKDAIQASNEFLRQKARPANDVEELPPLSPDICLVNFYTSSGKLGLHQVRRSTIFNVIQLYFKD

SEQ ID NO: 52657 - protein, 631 aa, Oryza sativa
MASRRSRRLGSLVPFAAAVVLLLLIASAAAAAAGSPDRAGPARPPLVLPLTLAYSNATRLPASSARRGLGDGHNPNARMRLHDDLLTNGYYTTRLYIGTPSQEFALIVDSGSTVTYVPCATCEQCGNHQDPRFQPDLSSTYSPVKCNVDCTCDNERSQCTYERQYAEMSSSSGVLGEDIMSFGKESELKPRRAVFGCENTETGDLFSQHADGIMGLGRGQLSIMDQLVEKGVISDSFSLCYGGMDVGGGTMVLGGMPAPPDMVFSHSNPVRSPYYNIELKEIHVAGKALRLDPKIFNSKHGTVLDSGTTYAYLPEQAFVAFKDAVTNKVNSLKKIRGPDPNYKDICFAGAGRNVSQLSEVFPDVDMVFGNGQKLSLSPENYLFRHSKVEGAYCLGVFQNGKDPTTLLGGIVVRNTLVTYDRHNEKIGFWKTNCSELWERLHISEVPSSAPSDSEGDMAPAPAPSGLPEFDVGLITVDMSINVTYPNLKPHLHELAELIAKELDIDSRQVRVMNVTSQGNSTLIRWGIFPAGPSNSMTNTTAMGIIYRLTQHHVQLPENLGSYQLLEWNVQPLSKRSWFRDHVVSILLGILLVVLLTLSALLVLIVWRKKFRGQAAYRPVDSAVPEQELQPL

SEQ ID NO: 52658 - protein, 678 aa, Oryza sativa
MEPARRSTAASDGGGGSSAAGSDGEDDRYLSASSALGTPSSLATLLPSSDLWDHQMDLLLLDDPVAGFPKAHQLARLHPPPEPPRPDPPAPAAAGDAVLPRPPEPDPTQVDNLDDNHLFDDMVQEMEHILLNSGEPHESASFTDYRANNSSQAHHFRDGSTTASTSGTDDAYVYPLPHHPSKIYWVEVVGAKQRTGDVSFGERMVGVRKYTVYLLKVKSGEDDWEIERRYREFYALYQQLKLLFAEKGFSLPPAWRNVEKESSKLFGNASPDIVNERSSLIQDCLCSLLVSSYPFGTPTPLVSFLSPGSPAYEYSLLKTLIPRSLQRLSSDSHSKGSSCNGTSHKDSASMGKTISLVVEDRPRKSTRQLLELQHYNCAGCHRHLDAGRTMLQEIVQTIGWNKPRFCAYTGQLFCASCHTNDTAVLPAKVLHHWDFSLYPISQLAKAYLDSIYDQPMLCVSAVNPFLFAKVPALLNIMSIRKKIAAMLPCVQCPFRNSIFRGLGARRYLLDGNDFFALRDLVDLSKGAFAALPVKVQTISNRILLHITEQCLVCYDSGVPCAARQACDDPLALIFPFQEDEATKCGSCGSIFHKQCFRKISICPCGKGAASKGRKIVALEQAVRDDASRPSTQLIQPSSFSSSSGFFSDIISKARPDKLWKPRNSSPVILMGSLPDTST

SEQ ID NO: 52659 - protein, 408 aa, Oryza sativa
MGSVGVAPSGLKNSSSTSMGAEKLPDQMHDLKIRDDKEVEATIINGKGTETGHIIVTTTGGRNGQPKQTVSYMAERIVGQGSFGIVFQAKCLETGETVAIKKVLQDKRYKNRELQTMRLLDHPNVVALKHCFFSTTEKDELYLNLVLEYVPETVHRVVKHYNKMNQRMPLIYVKLYMYQICRALAYIHNSIGVCHRDIKPQNLLVNPHTHQLKLCDFGSAKVLVKGEPNISYICSRYYRAPELIFGATEYTTAIDIWSAGCVLAELMLGQPLFPGESGVDQLVEIIKVLGTPTREEIKCMNPNYTEFKFPQIKAHPWHKVFHKRLPPEAVDLVSRLLQYSPNLRCTAVEALVHPFFDELRDPNARLPNGRFLPPLFNFKPHELKGIPSDIMAKLIPEHVKKQCSYAGV

SEQ ID NO: 52660 - protein, 503 aa, Oryza sativa
MRLILRQEHVPRSLSMRFTYSIPKEHMQILKATYPDRSYYGGLDYECNHCGALFWYQERVVSQSSHRAKRIAYNLCCRGGKISLPPPKPFPPILQDLIRFDGGARSNSFMRLIRQYNSLFAFTSLGANIDRSINTGQGHYVFRINGVVHHRIGSLVTAPGQRPEFAQLYIYDTANELQNRLNIFYHTDDPGDVPDPVIVQELISMLDQFNPLVQQFRLARDKLLSPSAPEIAIKLIGSDHSQSDHYSLPTISELATLIIPGASCEVSKFDVIVQKHSGELCQLSPIHPALMSLQYPLLFPYGDVGFHTGIKLREVDDQPPGSCDEASMLEFYRYESHYRKDEPNPFTCCGRLSDQLAANAFSCIETSRLTYHALNQKKLRSETHQGISDAVVRGDSDGKDVGTKVILPSSFIGGRRYMVQNYHDSMAICRSYGPPQIFSTFTCNSKWPEIIEAIRFEAGQKPSDRSDMVTHVYHMKLDEYITSIKNGEAFGPIKAEDCRIPTH

SEQ ID NO: 52661 - protein, 435 aa, Oryza sativa; identical to SEQ ID NO: 46175

SEQ ID NO: 52662 - protein, 845 aa, Oryza sativa
MEKNVVAVIGPQSSGIGHVISHVVNELHVPLLSFAATDPTLSASEYPYFLRSTMSDYFQMHAVASIVDYYQWKEVTAIFVDDDYGRGAVAALSDALALSRARISYKAAVPPNSNAATINDVLFRANMMESRVFVVHVNPDAGMRIFSIANKLRMMDSGYVWIVTDWLAAVMDSSMSGDLKTMSYMQGLIVLRQHFPDSETKREFISKWNNVARNRSIASGLNSYGFYAYDSVWIVARAIDQLLDNGEEINFSADPRLHDSMNSTLRLSALKLFDSGEQLLQQLLLTNFTGLTGQLQFDSDRNLVRPAYDILNIGGSVPHLIGYWSNYSGLSVAAPEILYEKQPNTSTSAQRLKNVVWPGHSASKPKGWVFPNNGQPLRVGVPNKPSFKELMSRDTGPDNVTGYCIEIFNAAIKLLPYPVPCQFIVIGDGLKNPNYDDIINMVAANSLDAAVGDFAIVRNRTKIAEFSQPYIESGLVIVVPVKEASSSAWAFLKPFTLEMWCVTGVLFIFVGIVVWILEHRTNEEFRGSPRRQMITIFWFSFSTMFFAHRQNTVSALGRFVLIIWLFVVLIINSSYTASLTSILTVQQLATGITGLDSLLSSALPIGYQAGKFTRNYLIEELNVPESHLVPLNTIDEYADALNRGPKDGGVAAIVDEMPYIEIFLSYHCNFRIVGQEFTKEGWGFAFQRDSPLAADMSTAILQLSESGQLQRIHDEWFSRSSCSSDDSEMGATRLGLRSFWGLFLMCALICVFALVMFFARVCWQYSKYSGSEEPDEPKDDSAGTAEIAAEAVAEMQRRRPKRLGSFKELMQFVDKKEEEVRKSMKRRPSEKDNQGVGSSDAQSVA

SEQ ID NO: 52663 - protein, 582 aa, Oryza sativa
MVLFSVTKKATTPFDGQKPGTSGLRKKVTVFQQPHYLQNFVQSTFNALPADKVKGATIVVSGDGRYFSKDAVQIITKMAAANGVRRVWVGQNSLMSTPAVSAVIRERVGADGSKATGAFILTASHNPGGPTEDFGIKYNMENGGPAPESVTDKIFSNTTTITEYLIAEDLPDVDISVVGVTTFSGPEGPFDVDVFDSTIDYIKLMKTIFDFESIKKLLASPKFTFCYDALHGVAGTYATRIFVEELGAAESSLLNCVPKEDFGGGHPDPNLTYAKELVDRMGLGKSSNAEPPEFGAAADGDADRNMILGKRFFVTPSDSVAIIAANAVQSIPYFSSGLKGVARSMPTSAALVVVAKNLNLKFFEVPTGWKFFGNLMDAGMCSICGEESFGTGSDHIREKDGIWAVLAWLSILAFKNKDNLGGDKLVTVEDIVRQHWGTYGRHYYTRYDYENVDAGAAKELMANLVSMQSSLSDVNKLIKEIRSDVSDVVAADEFEYKDPVDGSVSKHQGVRYLFGDGSRLVFRLSGTGSVGATIRVYIEQYEKDSSKTGRDSQDALAPLVDVALKLSKMQEYTGRSAPTVIT

SEQ ID NO: 52664 - protein, 268 aa, Oryza sativa
MSVIDILTRVDSICKKYDKYDVERLNGANVAGEDPFARLYGSIDADINECVEKAEAAKQEKNRATVVALNAEIRRTKAKLVEEDLPKLQRLALKKVKGLTKEELATRSDLVAALPDRIQSIPDGSSSAKKNGTWGASGSRTGGAIKFDTSDGNFDDEYFKGTEESNQFRREYEMRKMKQDEGLDIIGEGLETLKNMASDMNEELDRQVPLMDEMDEKVDRANTDLKNTNVRLKETVLQLRSSRNFCIDIVLLCVILGIAAYLYNVLKK

SEQ ID NO: 52665 - protein, 554 aa, Oryza sativa
MSYSYSIFSHNPSCSLTHNSTDIYAAGEGTNGSVHSRFNFRPMGDGSVAFATPPLKEGTSSFFPTELPARMAAAAAAAAASAGGSFDGGRGGLHASRPDKILRDIVSDSVTAMAQVLQDFPSERLELLREAVRGMIDSHEKRDELASLQRKLERRSDLTTETLGRANRTQLEILVAIKTGIATFVTGKGRVPSSELVEMFLMTRCRNLNCKSTLPVDDCDCKICSTKKGFCSACTCSVCHKFDCAANTCTWVGCDVCGHWCHVACALERNLIRPGPTLKGPIGTTEMQFQCLACNHSSEMFGFVKEVFNCCAENWNAETLMKELDFVRKIFAGCEDFEGKGLHAKAEEVLSLLGKKIISPLDATNSILQFFKYGVTDYSVTGSTSKGILAAQASQSTDMRSLQTPTITPPKSSFNFKTTTSILDTDALKPSPKPLSIEPHFSTASKEDDSSLETIVKCKEAEAKLFQKLADDARKEVDSYRQIVRSRTQKLEEEYAAKLAKVCFQETEEKRRKKLEELKMLENSHYDYLKMKMRMQTDIQGLLERMEATKKMWV

SEQ ID NO: 52666 - protein, 419 aa, Oryza sativa; identical to SEQ ID NO: 31590

SEQ ID NO: 52667 - protein, 72 aa, Oryza sativa
MIIYRFYRKIELGVTVTPSDSKYDNLGPDWTPLSKFVVLGYVQFCPSCYILGLRSMNYEIFMLKWFSSKYSR

SEQ ID NO: 52668 - protein, 275 aa, Oryza sativa
MASSPSLPLVTCALLLLLAVACQAHPYWPLELAYYRDKCPQAEAVVKAVVGEAVRQNPGNGAAVIRMLFHDCFVEGCDASILLDPTPFNPTPEKLSAPNNPSMRGFDLIDAIKHAVEAACPGVVSCADIIAFAARDAHLLPQRREGLLRHAVGPPRRDLLQRLRPDRLPPAADVQPQRPRLQLRRQGPLRGGHGGALGRPHRRPLPLLLLRPRPPQRLRLLRHRRRLRLVPQVAVPARRDARRQRSHGDAGLRDAQHAGQPVLQERARPQGALHL

SEQ ID NO: 52669 - protein, 209 aa, Oryza sativa; identical to SEQ ID NO: 30266

SEQ ID NO: 52670 - protein, 500 aa, Oryza sativa
MKFIFYLFSIFCCLCSCAQSQNISGRPDAVRIGAQFARNSTIGRVAAVAVLAAVNDINNDSNILPGTKLDLHMHDSSCNRFLGIVQALQFMEKDTVAIIGPLSSTTAHVLSHLANELHVPLMSFSATDPTLSSLEYPFFVRTTVSDQFQMTAVADLVEYYGWKQVTTIFVDNDYGRNAISSLGDELSKRRSKILYKAPFRPGASNNEIADVLIKVAMMESRVIILHANPDSGLVVFQQALKLGMVSNGYAWIATDWLTSYLDPSVHLDIGLLSTMQGVLTLRHHTENTRRKSMLSSKWSELLKEDSGHSRFLLSTYGLYAYDTVWMLAHALDAFFNSGGNISFSPDPKLNEISGRGLNLEALSVFDGGQLLLEKIHQVDFLGATGPVKFDSGGNLIQPAYDIVSIIGSGLRTVGYWSNYSGLSVISPETLYKKPANRTRETQKLHDVIWPGETINKPRGWVFPNNGNEIKIGVPDRFRIGLYLLGTTGRIQAIRSLSIKL

SEQ ID NO: 52671 - protein, 568 aa, Oryza sativa
MLVLFETPAGFALFKVLDEGKLDKVEDLWKEFTTSDSARKVVELKAFNKFENTSDALSAATLIIDSKPTKGLRKFLQKHCEGETLAVADSKLGNAIKEKLKIDCLHNSAVMELMRGLRNQLTELISGLGAQDLGPMSLGLSHSLSRYKLKFSPEKVDTMIIQAIGLLDDLDKELNTYAMRVREWYGWHFPELTKIVADNIQYAKVVKMMGDRTNAESLDFSEILSDDEVEAQLKEAAVISMGTEVSELDLLNIRELCDQVLALSEYRAQLFDYLRSRMNTIAPNLTALVGELVGARLIAHGGSLVNLAKQPGSTIQILGAEKALFRALKTKHATPKYGLIYHASLIGQAAPKHKGKISRSLAAKTALAIRYDALGDGEDNSIGLESRVKLETRLRVLEGKELGRSAGSTKGKPKIEVYEKDRKKGAGALITPAKTYNPAADLVLGQSTEETPKKPEGASKKRKHQEAEPAGAEETIQEDGDQEGQKKKKKKKSKDSEDSPVADADGGKKKKKKSKESEEPPVATAEGEKKEKKKKKKSDSQDAKDVAMETEASGKKDKKKKKKKHGDE

SEQ ID NO: 52672 - protein, 579 aa, Oryza sativa
MDVHKKLLLASLSCVLLIQVASSDGTAEGVGTTSWTCVCTAHPLGEPNSNSSLSSNCSSSCHCLQDDDGGTGSWNCTCASDKALKKEHTAVHDRGCFTSCNCTSGISQEGKKHVSNKTVIVTLLVCVILTTIAFLGTTAYYLRRKDALSPHSHAYSFDKYTSWSSRSNLVSHRSSPLPQPKPKPRISVLKEFLCSCNPICGNEGGPLPGVIVRFSYSELEQATGKFSDEHLIGVGGTSKVYRGQLSDAKVIAVKKLRPLGGADEYFEFLSEVELLSRLNHCHVVPLLGYCMESQGRQLERLLVFECMGNGNLRDCLDLKQGRKAMDWATRVGVALGAARGVEYLHEAAAPRILHRDIKSTNILLDDKFRAKITDLGMAKCLMNDGVTSCSSSPARMLGTFGYFAPEYAIVGKASLKSDVFSFGVVILELITGRQPIHHHRPPAAAGESLVLWAAPRLRDSRLVVAELPDPALQGRFPQEEMQIMAHLARECLQWEPESRPTMSEVVQILATIAPSSRKHAAAATLVTRIGRSSSAGDTMHSTRLAVKCSVGESWRSPEMEEETVVDLTEPRLEPAIFFN

SEQ ID NO: 52673 - protein, 502 aa, Oryza sativa
MEAAAKLKRSISRQLSSGAARVWRQLSLEPVYTPRRAGAVGGGGGGGGGGGGGGGGARPTRFGLARQSSLDPTPREGGGAAEDGSGAAAMLAVPENLDATMRLLFAACQGDVAGVEELLRDGVDVDSIDLDGRTAMHIAACEGQGEVVRLLLSWKANMNARDRWGSTPAADAKHYGHFEVYNLLRARGAKTPKQKKTPMTVSNPKEVPEYELNPLELEFRRGEEVTKGHYVARWYGSKVFVKILDKDSFSDANSINEFKHELTLLEKARHPNLVQFVGAVTQNVPMMIVSEYHQKGDLASYLETKGRLQPYKAIRFSLDIARGLNYLHECKPEPIIHGNLSTKSIVRDDEGKLKVAGFGSRSLIKVSEDNPQMDQTTSKFNSVYTAPEMYRNGTFDRSVDVFAFGLILYEMIEGTHAFHPKPPEEAAKMICLEGMRPPFKNKPKYYPDDLRELIQECWDPTPSVRPTFEEIIVRLNKISTSFTKQTRWRDTFKLPWKQASER

SEQ ID NO: 52674 - protein, 1126 aa, Oryza sativa
MLRRHMNESEVINMVAHSSEFENIVVREEEQDELESLFKNACPHDIKGGPTDKHGKISILIQVYISRAPIDSSSLHSDAQYISQSLARIMRALFEICLRRGWSQMTSLLLEFCKGVDRKIWPEQHPLRQFDRDLSHEICKRLEEKHVDLDRLYEMEENDIGALIRFSHLGKVVKQYVGYFPYVNLSATVSPITRTVLKVDLLITPEFLWRDRHHGMSLRWWIIVEDSENDTIYHSELFTLMKKARGAPTKISFNVPIFEPHPPQYYIRAISDSWLGAESLFTVSFHNLTLPQTQITHTELLDLKPLPLSALGNKTYQDLYRFSHFNPIQTQAFHVLYHSDNNVLLGAPTGSGKTISAELAMLHLFNTQPDMKVVYIAPLKAIVRERMNDWRQRLVTQLGKKMVEMTGDFTPDMMALLSADIIISTPEKWDGISRSWHSRSYVMKVGLMILDEIHLLGADRGPILEVIVSRMRYISSQTERSIRFVGLSTALANARDLADWLGVRDDGLFNFKPSVRPVPLEVHIQGYPGKFYCPRMNSMNKPAYAAICTHSPDKPVLIFVSSRRQTRLTALDLIQLAASDEKPRQFLSMADNSLDMILSQVSDTNLRHTLQFGIGLHHAGLNDRDRSLVEELFSNNKIQVLVCTSTLAWGVNLPAHLVIIKGTEYYDGKTKRYIDYDITDILQMMGRAGRPQYDQHGKAVILVHEPKKSFYKKFLYEPFPVESNLREHLHDHINAEIVSGTISNKEEAIIYLTWTYLYRRLVVNPAYYGLEDTETYTLNCYLSRLVETTFEDLEDSGCIKVDDHSVKYLILGKIASQYYLSYLTVSMFGTNIGPNTSLEAFVHILSASAEFDELPVRHNEDNLNRTLCGKVPYSVDQQHLDDPHVKANLLFQAHFSRAELPISDYVTDLKSVLDQSIRIIQAMIDICANSGWLSSALTCMHLLQMIIQGLWFERDSSLWMLPSMNDNLLDHLKGRGVSTIPALLGLSREELHRLLQPFSASELYQDLQHFPCVDVKLKLQNEDKDQSRPPILSIRLQMKDARRSTSRAFSPRFPKAKQEAWWLVLGNIRSSELYGLKRINFMDRVVNTRMELPAMFDIQETKLILVSDSYLGFDQEYSLGHLAKGV

SEQ ID NO: 52675 - protein, 872 aa, Oryza sativa
MSSKFMITYKRKRVTSHVYTADGTNLKSSGASSSVPVSSLSPKYGVGADNNMLEEDNFSTSTKQQDVFDSREQVIKEESPKQSANAPGKERAELKSRESLSQKEQPEICSTHTAIGDACENKLECIDGTHNQSLVSSCVHADRTTNQAEDSSASVSVGVNSHQQPNNSTRPSQSKSRFSPMLTFHRRVKNKIGLEEPAAGSCSRDNDKHCSKLSCNPPSSPLDAIPLCRQTAGSSLDVEDKVTIAGTSTGQSVIVDHLLEQKSSHIPKSSVHHMVPSQPAKDANQSSIPEEGTPVSEFTRVLETSESDARVEDSNRTPVDAIEVPKVIEVKRDEHGNGQTNCLQSPRKNINVNLLKPTNRSEAADLLESQDSTKNIPIIVLDDDSDERGKEQEKSEVLDQLIQEKNKGRFSLGQINLNLNCAELPQERLLSLDETSVYKLKDQDQCVHERKQMSHPVERLFFTKEKDAMHGKKHHEETSTMHSSYSNLFDPAPSSSWITGNFKEPSVMPSELKFRILDKAPEFNLDLKLDSFPDSSVLALRHDKLFRGGTSSGSHFLTERLGTYSYKRHSSPWSEEELDFLWIGVRRYGTNNWNAMLRDRRLRFSNSRNAEDLAKQWDKEQRNLLGVDFLQSLRSSARGPPPPSHIPEDYVGSSSWTGCSKSPFLSAPTDLSLGDMYLRSARTSERGQHHLSNLGMLNLHATDNVPRNLSLGGFPVASSPYGRSSSKRRRASKLPKSYYDNKAVWCQDPSERVAQFLPINQEPINNLPEWLTKDAEMAGVRRLDADLWPSMQAPGHSAADRLNEMKPHVLPDGSLKRAPKRKAEWRAFSKKLFKSGDGALDLNQRAAAIAGPLGAIGTSDTGASSEETASDS

SEQ ID NO: 52676 - protein, 276 aa, Oryza sativa
MHFYVVGVLATTILLLAIWFYAYMKMTPLLPESSSYSTIASHLVGSNSFSFGRVHSRTMGHKYHVWRTVFVLLLMEIQVLRRLCETEHVFHYSPSARMHIVGYLTGLFYYVAAPLSLASSCIPEAAEYLQGQVAEFIVKGRARMPDLVIDSSSLLQPLLKLGWTQWIGAVIFIWGSLHQIRCHAILGTLREHKDSDEYVIPCGDWFNRVSCPHYLAELVIYFGMLVASGGEDIPVWFLFVFVITNLSFAAVETHKWYLQKFEDYPRSRYAIIPFVC

SEQ ID NO: 52677 - protein, 213 aa, Oryza sativa
MDSILEEPDTKTSVKDLTFSSDEHFLAVNRSSGPCRVWDLKSAEVVANLPREAGEIFGFCRFSNQTDNSQILFVTAMQGDYGKIISWNTTSWTRIGSNKITREAISAFAVSPDCTLLAIGTIEGSIIVLSSKNMRSLVTVKKAHLGIITTLAFSQDSRTLLSTSFDSTARVTSIGSPKSRGISIWTMILVIILAILAYYYMQHKEDLLARFLH

SEQ ID NO: 52678 - protein, 206 aa, Oryza sativa
MPFFSAKANQESLRRVLIIFSKLNPTIRYVQGMNEVLAPLFYVFKNDPDTSNSASAEADTFFCFVELLSGFKDNYCKHLDNSQVGIRSTLSKLSQLLKRHDEELWRHMEITTKVYPQYYAFRWITLLLTMEFSFNVCIHIWDAILGDPEGPPDTLLRICCAMLILVRRRLLAGDFTANIQLLQHYPPTNIDHLLHIANRLRGSVAS

SEQ ID NO: 52679 - protein, 610 aa, Oryza sativa
MKSHGSRDKLQAAASSSHRRVLLLLFATCFALATFVTFVYNTSHFASASGSGAAADSSGGGASAGSGTGAVSALPLPVFDALVHFASISNAAPPAALFIIGVEISERFAFGGISGNLITYLTGPLGQSTASAAAAINAWNGAALLLPLLGAAVADSWLGRYRIIICASLLYILGLGMLTLSPVLVPHQQAESGDNADNNASSSMDIHVAFFYLSLYIVAFAQGGHKPCVQAFGADQFDENDPEECASRSSFFNWWYFGIYGGNVITVSILNYIQDNIGWQLGFGIPCIAMSLSLAVFLLGTKSYRFYPLRSNTSLFDQVGKSLLAKIRWWCASWCSKSSGDLHCTQASSSQGDHNDAEKACFPDEATAVLKLFPIGATCLIYAIVFAQWITLFTKQASTLDRWIGKVHIPAAALQSLISVSIVISVPIYDRILVPLTRRYSKNPRGITTLQRIGIGLIISVILMVVSALVETRRLMVARDFGLVDNPEATIPMSFWWVVPQFILTGLADMFTMVGLQEFFYDQVPDGLRSLGLALYLSIFGIGSFISSFLVYAIDKVTSMTGDSWFSDNLNRGHLDYFYWLLAVLSVLGLAAYLHFSRVYVHKKKGISVQ

SEQ ID NO: 52680 - protein, 163 aa, Oryza sativa
MEVGAKVPKKAGAGGRRGGGGPKKKPVSPSVKAGLQFPVGRIGRYLKQGRYSQRIGTGAPVYLAAVLEYLAAEVLELAGNAARDNKKNRIIPRHVLLAIRNDEELGKLLAGVTIAHGGVLPNINPVLLPKKTGSAAAKEAKEGKTPKSPKKATTKSPKKAAAA

SEQ ID NO: 52681 - protein, 846 aa, Oryza sativa
MGKSSSKKKKDKVILPPQLPPEVDDDDVVVSDEDVEFFRGNEGHARALATLDRKSIDSYVTRVAHHDEDEVERLYEERERRRKAVEALRPKNHDDDDFEVDRVDALPVKTLQGELVYNNAKKARFDDSSNSVESKSEDKVGNSKQTIQKGERKEKSKSKKGDGKLQNVQAQTEASNGKLQSKVLEEVKEELSAEELFEKKKAQLAEIGMSMLEDPESHIRSLNDMLNICNDKDQKVVKLSLMSLLAVFRDIIPSYRIRQLTEKELTVEVSKDVKKMRYYEYTLLRSYKAYLQKLISLEKQPNFSALAVRCMCTLLDTAPHFNFRESILASVARNLSSPDDAVRKMCCETIRSLFVDEGKHRGEATVEAVRLIADHVKLNDCQLHPDSIEVFLSLRFDDDLGKDDTEEEKGKPKKNKRRQNQEVPKQLPVSDNKKAKQELISKAREEVDAELRSVSFTLDPKERRRIQKEALSALFETYFRILKHSMSISNSRGKVINVSPDGSHPLLAPCLEGLGKFSHLIDLDFMGELVACLKKLSGYTDHHSGTVHDNTLSVSERLQCCIVAFKVWRSNLEALNVDLQDFFVQLFNLILEYRPDRDRGEVLADALKTLLWEGKQQDMIRAAAFIKRLATFALSFGSAEAMAALITLKHLLQKNSKCRNMLENDSGGGSLSCLVAKYDPEAKDPYLSGALASVLWELSLLQKHYDSSVSSMASNILSMANLNPTQNPVPISNASPLEAYRDLSMERKLSKPANKLLPLNCRKKRRGKEFVALSPAALEGSDCVAGGDELKEKLKNHFAVLRGISENERLRAELNHTLSSINLYKEYKKQKKSRKSKAVKKKVSRA

SEQ ID NO: 52682 - protein, 269 aa, Oryza sativa
MAPRMTDLIKTPFRINNSASNGAIQDESLPISLDVHLISSEEDPMSFQLVWLCHDEFRVQVSVFSNDTRDWCFLPWVDIEERVSSPDVPQDGTKYWLMSGMQANGLIFWPFQNGKHMLVLDTGTMEFSVYEFPIYSKLVQGCSFGVGETKDGIPCIAYVNGATIVVLIRRFDKKQGVQGWRFVDGVNCDDEADQLGINGGLDVVAIKDGFVYLAATGMILSLCLETRKLEKLFPMSFQFPLHPYIMAWPPTLVGNYGSFAEIQDDISNV

SEQ ID NO: 52683 - protein, 341 aa, Oryza sativa
MMVSTALVTLVMLLIWQTNLFLVMCFPVIFGSVEFVYLTAVLSKIQEGGWLPLAFSSLFLCIMYTWNYGSVLKYQSEMRGKISLDFILDLGSTLGTVRVPGIGLVYNELVQGIPSIFGHLLVTLPAMHSTIVFVCIKYVPVPYVPFEERFLFRRIGQKDYHMFRCVARYGYKDVRKEEHGFFEQLLVETLEKFLRKESQEMALEASAMAVERDDVSVVSDIPSSPVEAGDLHVPLLSDQRLGDGTQTFITEGNSPVLPTSSISEEDPSLEYELESLREAIASGFTYLLAHGDVRARKESFFTKKFIINYFYAFLRRNCRAGTATLKVPHSNIMRVGMTYMV

SEQ ID NO: 52684 - protein, 332 aa, Oryza sativa
MLCSARMLACSGLGGPGGRLRPSPRPGAYADRLRPPLPARRWRVASSAAASGGSPDLPSSSSSSSPPPTPAAASFGSGDEQAAGSPGFCIIEGPETVQDFEKLDLQEIQDNIRSRRNKIFLHMEEIRRLRIQQRIKNVELGISVDVPEGELPDFPSFIPFLPPLSAANLKIYYATCFTLIAGIMVFGGFLAPILELKLGVGGTSYADFIRSVHLPMQLSQVDPIVASFSGGAVGVISALMVVEINNVKQQEHKRCKYCLGTGYLACARCSSTGTLVLTEPVSTFSDGDQPLSTPRTERCPNCSGAGKVMCPTCLCTGMAMASEHDPRIDPFD

SEQ ID NO: 52685 - protein, 146 aa, Oryza sativa
MLDNMLEKNLEIVKTTCSNLADPMETDGGIKLFKKAPPGIRMDAMDKYHVQLKRPRILPGTDVDEKSKKFRHMLKSVAVDGNDILVSAKKSSERSLARLEAREAAAKAAAKREEERVRELKKTRGEKWLPSIARQMKEEKAWEQRK

SEQ ID NO: 52686 - protein, 342 aa, Oryza sativa
MRAGDMPGRGARRRPDLTLPMPQRDAPTSLAVPLPLPPAATTTTSAPPAGGAMHPLASAGAAPPPPLEELERVRRVGSGAGGTVWMVRHRGTGKEYALKVLYGNHDDAVRRQIAREIAILRTAEHPAVVRCHDMYERGGELQTLLEYMDGGSLDGRRIADERFLADVARQVLSGIAYLHRRHIVHRDIKPSNLLIDSARRVKIADFGVGRILNQTMDPCNSSVGTIAYMSPERINTDLNDGAYDGYAGDIWSFGLSILEFYMGKFPFGENLGKQGDWAALMCAICYSDPPEPPAAVSPEFRSFVGYCLQKNPAKRPSAAQLMQHPFVAGPQPQPLAAPPPSS

SEQ ID NO: 52687 - protein, 366 aa, Oryza sativa
MYNISWSSSSRIFLCCAYMSRLICFRVQHHHFQFEKMVISSKGKVCVTGASGFVASWLIKRLLEAGYHVIGTVRDPSNRDKVSHLWRLPSAKERLQLVRADLMEEGSFDDAVMACEGVFHTASPVLAKSDSNCKEEMLVPAINGTLNVLKSCKKNPFLKRVVLTSSSSTVRIRDESKHPEISLDETIWSSVALCEKLQLWYALAKISAEKAAWEFAKENNIDLVTVLPSFVIGPSLSHELSVTASDILGLLQGDTDRFISYGRMGYVHIDDVASCHILVYEAPQATGRYLCNSVVLDNNELVALLAKQFPIFPIPRSLRNPYEKQSYELNTSKIQQLGFKFKGVQEMFGDCVESLKDQGHLLECPL

SEQ ID NO: 52688 - protein, 1042 aa, Oryza sativa
MVQRMPADEVAPKKLTLQLDLEKPSLGDEKSPSERRPQPALQQQKPKNEIKHEKSAMPAVTPPMPIPVGSWLGSFPPFGYLGPVPALSAAGLHHPMDVKPGSSAGLQHAALLPPVRPKRCATHCFIAQQIRYNQQVTAKMQNFWTPATAAAAAAAASRSAAPFFGPRPFNMGVVPPAEAASLLVNPMQGSYPVRAHAPLQEAKAPSMATSPFQGSLSKDKAAMNNAAVAESSQRKQPPAHEAQQPGPVPNMLQGPAFIFPFNQQQAAVVAAAANAASRVGDAKPSVGSNTMPPSAAAHNSSANPGAAAMNLSFANLPPADAQLFAILQNGGYPFQVAAHAGGPPAAYRGMAPPGPAVPFFNGHVYPSHMLHPSQQQGASPQNLQKNPMSNMSASSQKHQPQQSQGLLGYAPNANAAAAASNSQSYSSGNQRPVLLPGLAHRQDSEKTVQDGPSGDDKSSHPQKGGYDHNYAVPVHLPNFALMPPTSAAGGGGQSDKKLSDHHPHQLPPASRGQGVRIDLASSPSFVVPFGSVGAPGSAPGGLDFSSLGPNHQLFQSHQEAGRHGYPQLNFATAQSVQAGQHKPQRQVSGETKSVAGDSSTHNTVDSERKKSAAAKYPGDSQQHSLSFSRQDNKSYVPPFLSGSTNDSSSRTLSLIGSEPSNAFSLGGKSANTSAPAATSAAAPSPSSIPQQQQQQQQQQHFLQLHKQQQQLIQHHHMNSRPRSAAPSNTGGYSDRLNMPSFRGMMYPSSAAQVGVPSQSPQLKPSSARATGAPAGVASPGASPSNLIVMKSGLHQQQAKAPMQSLSTSNHQPQSSSKMGPVTNMSTGGGDLSRSSNAPVASGSPSNSVSKSTGGSPPASGSAKGVPPAVQLPSPQQQSAKNPASTSGAKSAPTNHYSSMPMPSILGQQPNVPPGSNSGSKQQSHMMKQQPFPQGGHFFISNAYTPQAPGAAGGVALGLYQKRSADKTQQQQQPHQQSAMSAAASNNMKTHHPPAGSFMHLAAASQSPSGVPHSHMSAAQLTFGAPMSMSVKPSSDQKPAAGK

SEQ ID NO: 52689 - protein, 515 aa, Oryza sativa
MGSLGEVVEHGVSKDMLPFDGHPDPVVDELNRLENLLREKDRELGHAYSEIKGLKVTEALKDKAIAELTKELKKQDEKLSSLEKQLEQKNLDVKRLSNERKEALSAQFAAEATLRRIHSSQKDEEVVPFDAIIAPLESDIKAYRHEIALLQDDKKALERHLKLKEAALVEAGNILRSALERALIVEDVQNQNIELKKQMEIYHEENKLLEKSNRQQVLDIERLTHTIAELEESILSTGDVANAVRFYQNQAAKLNEEKRTLERELARAKVYVNRVASTTANEWKDDADKLMPVKRWLEERRLLQGEIQRLRDKIAMAEKSAKAEAQLNDKLRRKLKALEDDMRNESSNTSASNKDNATSKQATPKRSSSQPRRPIISADGADKRRPASQPRASVSGKVLNKQPGSETEAAEKNRHAAAKRFDSPRSAKSVAAGGRGERPVRSHLWAHRSKVADDAGKENKEQNPNYKAHLGDSHADGDCGVQCSEHEEAMDLRKLDEGKADDSDAVKSTKDSCEI

SEQ ID NO: 52690 - protein, 577 aa, Oryza sativa
MSTRARSPWWSRRRTAPTLSTTLSSLLLLLATTTTKLCRSCSDGERHALLRRIQPLIGPEFSSSGRLDWDEAVDCCRWEGVTCSVAGRRREAAAGGRRVVSLSLPGVGIAGAVDAAVLAPFTALEKLDLSGNQITSFSAANRSDMVVGAVLNNLTALTELHLAGNEITTTGWISNLTSLQVIDMSSNKVHELNGICGLHQLKYLSLGFNMIQGVINPCLGKLQYLVYLDMGSNFLTGEIGQYLLSNLTQVEEVHLGDNNLTGTFDFSSLANNSELHSIVLSNNCKLEIETELVRWTPLFQLEYLNLSNSIVNKRSNGIIPTFLSAQVSLSGIDLSICSLQGRIPSWMLLYNVSLGFLLLRGNSMDFLDTGNLGANVTSSMEVLDLSDNRISMKMPYNFGSLFPYLKYLDMSSNMLNGGVPSLAEAASSLQFLDLSFNMLNGEISPELIGNASILTSLLLSHNDLTGPMPPFHWSLGQLTHLSVENNQLSGRLPPLLTNCTNLENLNVRNNRLSGVIPVGLLSFEKLGALLLGGNQFHGVIPWDICLNNHIHFIDLSNNWFSGEIQVAYTVFSGQSCQ

SEQ ID NO: 52691 - protein, 351 aa, Oryza sativa; identical to SEQ ID NO: 32734

SEQ ID NO: 52692 - protein, 1315 aa, Oryza sativa
MEDIVDTFLVHDDGPDPTDPHMLLRLRKKLGKLFKKSKARRKISNLIQDINKKFEQVKARHVKYTVDSVVLKSLAATTIDPRLQNLYKRATELVGIDGPRDDLINKLSLGGDVDVSDKKMKVISVVGFGGLGKTTLAKAVYDHFKPHFKCRASVPVDQNPDMNKAFDDQVEPHFECGAFVPVGRNPDMKKVFRDILIDLDKEKYTNPNMMVLDEKQLMDELKEFVKEKRCFIVIDDIWDKESWKLIRCALQESDCGSRLVITTRISEVATHAGEAYKIQPLSRDNSEKLLYARIVDGEWKYFDNPSAKACEKILKKCGGVPLAIITIASLLASKPGEDWSEVYNSVGFGHEDNDDVGNTRRILSFSYYDLSSHLKDCLLYLCVFPEDHVIEKNSLIWKWIAEGFIHEELAAGLGLFELGERCFNELINRSMIQPVETKHEGYVDGCCVHDMVLDMIHSLSSEENFVTVLNGDERQKLPGSIARRLALQRVLVHKDGQLANITLKNVRSLIASQCFGSLCLHTPVLRVLDVINCAESETPNVLEDRDKTMPSHLGSLLHLRYLGLVDTYITKLPREVRYLKFLQTLDLRGSRIKELPEEVGLLTQLVCLRADWEIMVKIGLIGKLTSLQELWIEPAAAVYDDDAASVDDDDDAAAVDDTTKSTMKFVNELGLLRELRVLRTYFEDLNESMERALLESLSKLHNIRDLHIEGPPLVTRRVTSSARSVSCLHLRYLCLNCFVFSGLPAWIKSSLAPNLSCLDVVVLIVKEQDMETLARLPELRCLVLRLHETELVSIKIHTEDVGYFRKLRILRILGTSIWFDLHGSKCNITDNRSLASIIMPSLEFLEFAVHMRFLKDATQLGFDKLLSFEKLGRSSLQKVTIVLKCGDARLSEVEEVAAALMNSAAVHPKHPTVQTKWQDEQAVLSPYQEAYMHVSRTPELVNEAWKANIVSSGRIRALRMPVTEASSSKVICLLYRKSGKGLLALSSNAVHKLWKWESNDKNPAGMSTTSVPPQVWQPESDILMNDTANGNPEEAAACSLLSKNDCYLISASGGKVSLFNMLNFKTMTTFIAPPPSATFLAFHPHDNNIIAIGTDDSSILLYNIRVDEVKWVLKGHQKKITGLVFSLSMNVLVSSGADSQLCVWSMEDWAKKKSRYIQPPSNHSGALVGDIMVQFHYDQKRLLVVHESQLAIYDEELECLCSWFPSDPLSAPVSSAVYSSDGLLIYAGFCDGAIGIFQVESLMLQCRIAPSAYIPSSVSSGGEIVYPMVVAAHPWKPNQFAVGMSDGAVHVLEPLDTPDDIISNSIQQGRFGDSG

SEQ ID NO: 52693 - protein, 474 aa, Oryza sativa
MATPKLSPVSPVRPEDKQRASSSSSSGAVAAPLRVQDDTAVEEYEQYLRLPELARLWKDRCCPEWADEGLVKPALQALEITFRFISVALSDPRGYASRRELARRLEALAAREVELVAALCEGEQCPPLAELSASKGVLPRERSASEVWKIPGSAAAVVCQVSEASLLPRLAAWDKSETVAARIKYAIESQMQGCVFTLGLGEPNLAGKPVLEYDRVVRPHELHALKAKIAPEPKTGYRNKENEALFTIHQILESWLCAASQLLTRLNNRIEARNWEAAASDCWILERVWKLLADVEDLHLLMDPDDFLRLKSQLAIRAAPGSDASSCFRSRALLHVANATRDLKKRVPCVLGVEVDPNGGPRVQEAAMRLFHSRRRGEGEEAGKVELLQAFQAVEAAVRRFFFAYRQLVAAVMGTAESSTNRALFSPAEEMDPLAQMFLEPPYFPSLDAAKTFLADYWVRRMAGDGDSASSRRS

SEQ ID NO: 52694 - protein, 628 aa, Oryza sativa
MAEARLLRRRRLCLAVAVVWVVAVAVSRVGANTEGDALYSLRQSLKDANNVLQSWDPTLVNPCTWFHVTCNPDNSVIRVDLGNAQLSGALVPQLGQLKNLQYLELYSNNISGTIPNELGNLTNLVSLDLYLNNFTGFIPETLGQLYKLRFLRLNNNSLSGSIPKSLTNITTLQVLDLSNNNLSGEVPSTGSFSLFTPISFANNKDLCGPGTTKPCPGAPPFSPPPPFNPPTPTVSQGDSKTGAIAGGVAAAAALLFAVPAIGFAWWRRRKPEEHFFDVPAEEDPEVHLGQLKRFSLRELQVATDNFSNKNILGRGGFGKVYKGRLADGSLVAVKRLKEERTPGGELQFQTEVEMISMAVHRNLLRLRGFCMTPTERLLVYPYMANGSVASRLRERQPNDPPLEWQTRTRIALGSARGLSYLHDHCDPKIIHRDVKAANILLDEDFEAVVGDFGLAKLMDYKDTHVTTAVRGTIGHIAPEYLSTGKSSEKTDVFGYGIMLLELITGQRAFDLARLANDDDVMLLDWVKGLLKEKKVEMLVDPDLQSGFVEHEVESLIQVALLCTQGSPMDRPKMSEVVRMLEGDGLAERWEEWQKVEVVRQEAELAPRHNDWIVDSTYNLRAMELSGPR

SEQ ID NO: 52695 - protein, 576 aa, Oryza sativa
MAARFGPLLLVLPLSSALLVLSAATAPRGRPSQVDVGRQLREELWERNQGHEMLRSWRDGDPCSPSPWEGFSCRWKDGNLFVVKLNFSSKKLQGPIPAAIGNLTELDEIDLQDNNFTGSIPESFFDLTHLLKLSVKCNPFLNNQLPHGLSISVEFSYGGCAYHSPPGASNQRIAVIGGVAGGSLACTFALGFFFVCFDKREKNPQKKDCSSTRNPVFEECSTHKATNSAVQQLSLKSIQNATCNFKTLIGEGGFGSVYRGTLAHGEEVAVKVRSTSSTQGTREFNNELRLLSAVRHDNLVPLIGYCCEKDQEILVYPFMSNGSLQDRLYGEASKRKVLDWPTRLSVCIGAARGLAHLHGFAGRCIIHRDVKSSNILLDHSMCGKVADFGFSKYAPQEGDSNASMEVRGTAGYLDPEYYSTQSLSTKSDVFSFGVVLLEIVTGREPLDVQRPRDEWSLVEWAKPYIREYRIEEIVDPGIKGQYCSEAMWRVLEVASACTEPFSTFRPSMEDVVRELEDALIIENNASEYMRSIESTGTLGSNRYLSIDRKMFASGSARFASFDATKGHLQTMPSLPG

SEQ ID NO: 52696 - protein, 131 aa, Oryza sativa
MAASPASTAAAVVNAPAATGGLLLPRGRSSWSWSCCNNNNSSMGRRWRAAAVGEVAAEGNTYLIAGAVAVALVGTAFPILFSRKDTCPECDGAGFVRKGGATLRANAARKDLPQIVCPNCNGLGKLGQIDK

SEQ ID NO: 52697 - protein, 1099 aa, Oryza sativa
MKVFENRVRQILMSSGSTTFTKIVNKWNTALIGLMTYFREATVHTQELLDLLVKCENKIQTRIKIGLNSKMPSRFPPVIFYTPKEIGGLGMLSMGHILIPQSDLRYSKQTDVGVTHFRSGMSHEEDQLIPNLYRYIQPWESEFIDSQRVWAEYALKRQEAQSQNRRLTLEDLEDSWDRGIPRINTLFQKDRHTLAYDKGWRVRTDFKQYQVLKQNPFWWTHQRHDGKLWNLNNYRTDVIQALGGVEGILEHTLFKGTYFPTWEGLFWEKASGFEESMKYKKLTNAQRSGLNQIPNRRFTLWWSPTINRANVYVGFQVQLDLTGIFMHGKIPTLKISLIQIFRAHLWQKIHESVVMDLCQVLDQELDALEIETVQKETIHPRKSYKMNSSCADILLFAAHRWQMSKPSLVSESKDVFDQKASNKYWIDVQLRWGDYDSHDIERYTRAKFMDYTTDNMSIYPSPTGVMIGIDLAYNLHSAFGNWFPGSKPLLQQAMNKIMKSNPALYVLRERIRKGLQLYSSEPTEPYLSSQNYGEIFSNQIIWFVDDTNVYRVTIHKTFEGNLTTKPINGAIFIFNPRTGQLFLKVIHTSVWAGQKRLGQLAKWKTAEEVAALVRSLPVEEQPKQIIVTRKGMLDPLEVHLLDFPNIVIKGSELQLPFQACLKIEKFGDLILKATEPQMVLYNIYDDWLKSISSFTAFSRIVLILRALHVNNEKAKMLLKPDKTIVTEPHHIWPTLTDEQWLKVECALRDLILSDYAKKNNVNTSALTQSEIRDIILGAEIAPPSQQRQQIAEIEKQSRETTQLTAVTTRTTNVHGDELIITTTSPYEQQAFASKTDWRVRAISATNLYLRVNHIYVNSDDIKETGYTYIMPKNILKKFICIADLRTQIAGFLYGLSPQDNPQVKEIRCIAIPPQHGTHQMVTLPANLPEHEFLNDLEPLGWMHTQPNEAPQLSPQDLTSHAKILENNKQWDGEKCIILTCSFTPGSCSLTAYKLTPSGYEWGRSNKDTGSNPHGYLPTHYEKVQMLLSDRFLGFYMVPDNTPWNFNFMGVKHDPLMKYNMKLGTPRDFYHEDHRPTHFLEFSNIDEGEVAEGDREDTFT

SEQ ID NO: 52698 - protein, 458 aa, Oryza sativa
MALHLLHLLAFSLLFAVATPIRDITDVCSSQIKDFQYLNSTGLHLELHHPRSPCSPAPVPADLPFTAVLTHDDARISSLAARLAKTPSARATSLDADADAGLAGSLASVPLSPGASVGVGNYVTRMGLGTPATQYVMVVDTGSSLTWLQCSPCLGSCHRQSGPVFNPKSSSTYASVGCSAQQCSDLPSATLNPSACSSSNVCIYQASYGDSSFSVGYLSKDTVSFGSTSLPNFYYGCGQDNEGLFGRSAGLIGLARNKLSLLYQLAPSLGYSFTYCLPSSSSSGYLSLGSYNPGQYSYTPMVSSSLDDSLYFIKLSGMTVAGNPLSVSSSAYSSLPTIIDSGTVITRLPTSVYSALSKAVAAAMKGTSRASAYSILDTCFKGQASRVSAPAVTMSFAGGAALKLSAQNLLVDVDDSTTCLAFAPARSAAIIGNTQQQTFSVVYDVKSSRIGFAAGGCS

SEQ ID NO: 52699 - protein, 1790 aa, Oryza sativa
MSLLRNRRAAAAAGSGEQTVVQAAYNIIPIQDVVMHGDHPSLQVPEVRAAVEALSHASDFPAPPLARVWDPHRADIFDWLGATFGFQADNVRNQREHLVLLLANAQLRAAPGFPKDHPIDVLHLTVARGIRRKLLKNYTSWCAYLGQKRHFRVPSGGGGGRRTGAATGNDVRMDLLYTALYLLIWGEAANLRFMPECLCYIFHYMALDLHHVVEQSIDIETGRPAMPAVCGEDAFLIRVVTPIYNVLKNEVEASRNGTKPHSAWRNYDDVNEYFWSRRVFKRLRWPLDPSRSFFVEPGKTGRIGKTGFVEQRSFWNVYRSFDRVWVMHILFFQAAMIVAWDGKTPWVSLRFRDIQVRVLSVFITWGGLRFVQAMLDAGTQYSLVSRETKTVAVRMVLKVLVAAGWTITFSVLYKRMWDQRWRDRRWSFAANTRVLNYLEAAAVFVIPQVLAIVLFIIPWIRNFLEKTNWKILYVLTWWFQTRTFVGRGLREGLIDNIKYSIFWVCLLVSKFSFSYFLQIKPMVGPTKVIFKLHDIKRNWFEFMPHTERLAVIILWLPVIIIYLMDIQIWYAVFSSLTGALIGLFSHLGEIRSVEQLRLRFQFFASAMQFNLMPEEHLDTVHGGIRSKFYDAINRLKLRYGFGRPYRKIEANEVEAKRFALVWNEIIQTFREEDIISDKELGLLELPAVVWRIRVVRWPCLLLKNELLLALSQAAELVADDRTHWNKICNNEYRRCAVIEAYDSIRHLLLEIIKERTNEHIIVNQLFLAFDGAMEYGKFTEEYRLTLLPQIHKYVISLVEQLLLKDKDQIKIVRTLQDLYDLAVHDFPKIKKDFEQLRREGLALSRPTESQLLFQDAIKCPDDNDVSFYKQVRRLHTILTSRDSMDDVPKNPEARRRITFFSNSLFMNMPRAPTVQRMMAFSVLTPYYNEDVLYNKDQLRRENEDGISILFYLQKIYEDDWKNFLERMQREGMASDDGIWAGKFQDLRLWASYRGQTLARTVRGMMYYYRALKMLAFLDNASEVEITEGTKQLASFASVQYENDVYPMNGGLSQRPRRRLERGTSTVSQLFKGQEDGAAIMKYTYVVACQIYGNQKKAKDQRAEDILTLMKKNDALRVAYVDEVHPEIGDTQYYSVLVKFDPVLQREVEIYRIRLPGQLKLGEGKPENQNHAIIFTRGDAVQTIDMNQDNYFEEALKMRNLLGQYDYYHGSQKPTLLGVREHVFTGSVSSLAWFMSAQETSFVTLGQRVLANPLKVRMHYGHPDVFDRLWFLTRGGISKASRVINISEDIFAGFNCTLRGGNVSHHEYIQVGKGRDVGLNQISMFEAKVSSGNGEQTLSRDIYRLGHRLDFFRSLSVFYTTVGFYFNTMMVVLTVYTFVWGRLYLALSGLEAGIQGSANATNNKALGAVLNQQFVIQLGLFTALPMIIENSLEQGFLPAVWDFFTMQMMFSSVFYTFSMGTKSHYYGRTILHGGAKYRATGRGFVVQHKSFAENYRLYARSHFIKAIELGIVLTVYAAHSVIARDTLVYIIMMISSWFLVVSWIMAPFAFNPSGFDWLKTVYDFDDFMNWIWYPGSIFSKAEHSWEVWWFEEQDHLRTTGLWGKILEILLDLRYFFFQYGVVYQLKIANESRSIAVYLLSWICVAVIFGIFVLMSYARDKYAAKQHLYYRVIQSGVIILAVLVLIIFLKFTKFQIIDIFTSLLAFIPTGWGLISIAQVIRPFIESTVVWASVVSVARLYEILLGVFVMAPVAFFSWLPGFQEMQTRVLFNEAFSRGLQISRILAGKKTIAV

SEQ ID NO: 52700 - protein, 360 aa, Oryza sativa
MELKEKFEKNIKEAADKNQGTNLYLKNLDDSIDDDEKLKEIFADFGTITSCKVMRDLNGVSKGSGFVAFKSAEDASRALVAMNGKMIGSKPLYVALAQRKEERRARLQAQFSQMRPMVMPPSVAPRMPMYPPGVPGVGQQLFYGQPPPAFVNPQPGFGFQQHLIPGMRPSVGPIPNFVMPMVQQGQQPQRPAGRRAGTGGIQQPMPMGHQQMLPRGSRGGYRYASGRGMPDNAFRGVGGLVPSPYEMGRMPLSDAGAPPQVPIGALASALANSPPDQQRLMLGESLYPLVDQLEHDQAAKVTGMLLEMDQTEVLHLIESPDALKAKVAEAMEVLRNAQQQQANTPTDQLAALTLSDGVVS

SEQ ID NO: 52701 - protein, 886 aa, Oryza sativa
MPCSPPSYLFIIVTGVLLVLVHSQTSLDEDFISIDCGLPSGFSYVDEKTNITYISDDQYIDTGENHNISSQLQGAEQFRSGLNLRSFPTGGRNCYTLYPAIKGQKYLIRGMFMHGNYDNKGQDLVSSPVTFDIRIGLNFWNRLNIINATMTYTSEAIVVAIVNSVSVCLVDNGEGTPFISSLEMRPMKSSNYPAATPNHPLLLQDRRSMGASRIIRYPDDPYDRVWWLPQITSGLIKISTRSLISRYTDDVYEVPVAVLKTAATTSSTSTALNFLWAAPTGWDATPGYLIGLHFTDFQQGQLREFDIYYNNDLWNYDNKKTKPPYLLANYINGTTPYTSDNYLYNISLVATNASVLPPMLNAIEIYYQVQQDEKMTYSEDVEAMMTVKIDYQVKKNWMGDPCLPEKYTWSGLKCRSQGVTSRIISLDLSSSDLQGAISEQFSMLRSLEYLNLSNNDLTGSLPESLTNLPNIHVLDLSGNQLNGTFPEALCKNRALTLRYDTANGDPCSPRSSKKKHKAVLAVAVVVPVVIVVILISAMLMLLFWKKQAIVKSRGQEQYGDHIHIPENREFTYEELVKITNNFSVFIGEGGFGPVFHGQLKDGTQLAVKMRSPTSMSGKGMPEFLAEVESLTTVHHRYLVLLVGYCTDQDHLGLVYEYMPNGSLYDHLRGKNAIIQRLSWQHRAKIAHEAAQGLDYLHTGCVLPIVHRDVKSHNILLGCDLTAKISDFGLSKSYLNVAQSHITATAAGTLGYIDPEYCLSGRLTISSDVFSFGVVLLEIVTGEPPIIPTNGHIVQRIKEKVNMGNIEAIADPRLHGEFDISSIWKVVDIALLCTKEASSERPTMSMVVAQLKDALALEEARLSYSTSDISQGGANAELSINSMPTAR

SEQ ID NO: 52702 - protein, 298 aa, Oryza sativa
MELHHKEQLHDNVPVMQAQQYPMSRSVGFNLGSNYPPNRQQHQQGANSVQNAGPQNIGLRSSASQTSSLGSYEQLIQQYQQPQTQNPFRLQQVSSATQSYRDQSLKSIQGGQTPPDPYGLMGLLGVIRMNDADLASLALGMDLTTLGLNLNSPDNLYKTFGSPWSNEPAKGEPEFHIPACYNAEQPPPLQPIHFQKFQTLTLFYIFYSMPRDEAQLCAASELYNRGWFYHKEVRVWLTRIPNVEPLVKTPHYERGSYGCFDPNNWETIRKDNFVLHYDQIEKKPAIPSSSQTVRGNIS

SEQ ID NO: 52703 - protein, 523 aa, Oryza sativa
MALLLPDDAVADVLRRLPPRGLAAARCVCKPWRDLVDVRALLRPRLLPRSAHGVLINYIDHGRPHLFSRPSSSSPSSAAAIGGEIIDGNLTFLPNDGDRDWWCVLDHCDGLLLCGIEWGSQLCACNPATRRWATLPAARQGPSRYAAAYLAFDPAASPDYEVLLIPNLPEKPSPPVPNQPRRRRRRRQDELAGPFCLHMLFSPLDAADESDLDGDVDVAVDVDVDVDDDEVATPAASSVDDDQYKLMEWPPSPYLLEVFSSRSGRWEERAFVREGEKVTTVEDMMPLGYPYRGPRRGYSVYHHGSLYAHCRGAFVTRYSLANGKYQVIETPINMANYKWEKPYLGKSEMGVLFGMIHGGQLSVWILQESAGQMGWILTYQHDLRPFAKEVSSLRYNGNLTTGSWTVEENSTGMHGNRDTLSAEDFEWDSDNDDFLAVEVRNEEYDDDCEHFDILGFHPYKEVVFLDQSFKTIAFHFNSSKIQYLGYSRPKCYYRNYTNGIYESFVYTPCMIGELHGVIGQSSS

SEQ ID NO: 52704 - protein, 796 aa, Oryza sativa
MASEAEAEVAAGPEVVLPIGAQKHDPAWKHCQMVRSAGRVRLKCVYCHKHFLGGGIHRFKEHLANRPGNACCCPKVPREVQETMLHSLDAVAAKKKRKQSLAEGIRRITHSAPAAAASASPPAPADAAEMESPIHMIPLNEVLDLGSVPLEETPPETREMKGSISKKRKKLAARQASTAPLAHQNQQPLQSTPAGLTQPFHQMVVAFDSAASQLMHFDQPGSNKEQVYMAIGRFLYDAGVSLEAVNSVYFQPMLEAVASAGGKPEAFSYHDFRGSILKKSLDEVTAQLEFYKGSWTRTGCTLLADEWTTDRGRTLINFSVYCPEGTMFLKSVDATDIVVSSDPLYELLKNVVEEVGEKNVVQVITNNSEIHAVAGKRLCETFPTLFWSQCSFQCIDGMLEDFSKVGAINEIICNAKVITGFIYNSAFAFNLMKRHLHGKDLLVPAETRAAMNFVTLKNMYNLKDSLEAMISSDEWIHYLLPKKPGGVEVTNLIGNLQFWSSCAAVVRITEPLVHLLKLVGSNKRPSMGYVYAGLYQAKAAIKKELVRKNDYMAYWDIIDWRWNKDAPRPLHLAGFFLNPLFFDGVRGGTSSEIFSGMLDCVERLVSDVKIQDKIQKELNVYRSEAAGDFRRQMAIRARHTLPPAEWWYTYGGACPNLTRLAVRILSQTCSAKGCDRRHISFEQIHDQRMNLFERQRMHHLTFVQYNLRLQHRQQHKTKAFDPVSVDNIDIVDDWVVDRSALISGQAEQSNWTEINQPVNNITSMGPSDDDEFESFIEGVDDKMIQGASRGTQEDDE

SEQ ID NO: 52705 - protein, 561 aa, Oryza sativa; identical to SEQ ID NO: 47332

SEQ ID NO: 52706 - protein, 585 aa, Oryza sativa
MLGKVTIDSDAVSVLRGVYNSLLKFRDILAWEAAVAMAVIEMDSSIEKPQACEENEAGSSTENPHASGEKPKGDKKSKKKKTLGKGTSAVLMLLRDLVTNGKEVLSVNSALLAEWGTELSLLFDPKCPRLVSLVDKVKEIVETNEVRRLPKIPKGTRDFGKEQMAIREHAFSIITGVFKMHGAVSLDTPVFELRETLMGKYGEDSKLIYDLADQGGELCSLRYDLTVPFARYVAMNNISSLKRYQIAKVYRRDNPSKGRYREFYQCDFDIAGVYETMEPDFEVIKVLTELLDQLDIGTYEIKLNHRKLLDGMLEICGVPPEKFRTVCSSIDKLDKQTFEQVKKELVDEKGISNETADKIGDLVKTRGPPLEVLLELRKEGSKFMGNAGSVTALNELEILFKALDKANAIGKIVFDLSLARGLDYYTGVIYEAVFKGTTQVGSIAAGGRYDNLVGMFSGKQVPAVGVSLGIERVFAIMEQQEMEKNQIRATETEVLVSIIGKDLILAAELVSELWNAGIKAEFKLTTRIQNHLKYATQSGIPWMVLVGESEISSGKVKLKNLAASQEEEVDRTEFAQVLKQKLRNP

SEQ ID NO: 52707 - protein, 300 aa, Oryza sativa
MEHRWDKVLFTGSARIGRIIMAKAVKHLTPVALELGSKCPCIVDWLDSKRDRQIAVNRIIGAKWSTCAGQACIAIDHVIVEERFAPILIELLKSTLKRFMAKPGGMARILNAKHFERLSGYLEDNRVAASVVHGGYMDPKKLNIEPTLLLNPPADSDVMTEEVFGPILPIITVKKIEDCIAYLKSKPKPIAMYAFTNNERLKRRIVEETSSGSVTFNDAVVQYALESVPFGGVGHSGFGQYHGKYSFELFSHKKAVFKRSFLIEFMFRYPPWDERKIGTLRHVFSYNYFLLFFNLLGFRR

SEQ ID NO: 52708 - protein, 893 aa, Oryza sativa
MMVSSRFVAVLLLVALAPAARGQGGGGGNSSAPAASPPGPFVPRDNILLDCGATGQANDTDGRLWTGDTGSKYLPANLAAAAATAQDPSVPQVPYLTARFSAAPFTYSFPVGAGRKFLRLHFYPANYSNRNAADALFSVSIPDPNITLLSNFSAYQTALALNFDYLVREFSVNVTASTLDLTFTPEKGHPNAFAFVNGIEVVSSPDLFGSSNPMEVTGDGSGTPFPIDAGTAMQTMYRLNVGGNAISPSKDTGGYRSWEDDTPYIPFASFGVSYANDTNVPINYPDSIPQYVAPADVYSTARSMGPDNNVNLQYNLTWAMQVDAGYQYLVRLHFCEIQSGISKINQRTFDIYINNQTAFSGADVIAWSTGLGIPVYKDFVVFPMGSGPMDLWVDLHPNVKNKPQYYNAILNGMEVFKLQLTNGSLAGLNPVPSIVPTASGGNSGKKSSVGPIIGGVIGGLVVLALGCCCFFVICKRRQRAGKDSGMSDGHSGWLPLSLYGNSHTSSSAKSHTTGSHASSLPSNLCRHFSFVEIKAATNNFDESLLLGVGGFGKVYRGEIDGGATKVAIKRGNPLSEQGVHEFQTEIEMLSKLRHRHLVSLIGYCEEKNEMILVYDYMAHGTLREHLYKTQNAPLSWRQRLDICIGAARGLHYLHTGAKHTIIHRDVKTTNILLDEKWVAKVSDFGLSKTGPTMDHTHVSTVVKGSFGYLDPEYFRRQQLTDKSDVYSFGVVLFEVLCARPALNPTLAKEEVSLAEWALHCQKKGILDQIVDPHLKGKIAPQCFKKFAETAEKCVSDQGIDRPSMGDVLWNLEFTLQMQESAEESGSLGCGMSDDSTPLVIVGKKDPNDPSIESSTTTTTTTSISMGEQSVASIDSDGLTPSAVFSQIMNPKGR

SEQ ID NO: 52709 - protein, 141 aa, Oryza sativa
MMRLPTHGTAAATNTATAIFSGNLSMARAMLRPPKLCPTRISLSPAGASATASRSGCEYSSKECTSSTRAGWTPDAARSSAVTRCPSERSMVTTLYQHHAPWQRPWTRMKCLLLLLLPSISCKCLWFALLQVSDAVIVAMN

SEQ ID NO: 52710 - protein, 313 aa, Oryza sativa
MVPRAGGCPDFAESAQFHKVLQGQELLGFKSHGGTAAATSQPYEARHLQYIDERSCSSDASNSILGVPRLGDRAPLGNPGFSYHCSGFGESHRLQKVLQGQELFRPYRGTLVDASMGSNGFHQQDSPRAPGVVNKWQAQLHGRAAFHGPPALALPSQSSSPPSVLMFQQANSKMPRLEFGHGQLDKHENDRRVRFGPSEGIERREQRIPLQPYPTSGEVIDGQVTVEKSHSPGRHGKDGPDNKAVGTNSCKIFGISLTEKVPAREELDDGDANYSLQSLKQVPKSLGNSCATVHEQRPVVGRVIDISTMDMMI

SEQ ID NO: 52711 - protein, 145 aa, Oryza sativa; identical to SEQ ID NO: 32872

SEQ ID NO: 52712 - protein, 648 aa, Oryza sativa
MVVIKDFISKEIISQFRAHTSPISALCFDPSGTLLVTASVHGHNINVFRIMPTVIANSSGSIRYDCTASHVHLYKLYRGMTAAVIQDISFSHFSQWISIVSSRGTCHIFTLSPFGGDASLLPQNSHSDGLPLAPCQSRPWWSKPSFLMDHQLHPAPSTVTNSVVSRIKNSSSGWLNTVSNVAASASGKLSVPSGAVTAVFHNSNYEGSLPVPSKANAMEHLLVYSPSGHVIQHELLPSGSESSDSSPIVGPGSLQIQDDELHVTAEPTQWWDVCRRTNWPERDENIANIVFHNQRNSMMAMDASDCDSEHSDSVPSDGISGKEMMRSRERSSWYLSNAEVQISSWRIPIWQKSKIFFYVIDQPPAKSGESLSSSGGEIEIEKLPLHEVELRRRELLPVFKQFHYSEQNFSDRNLAIGRFQNALTYIDKDNGAHGSKAGFPISGFYSDMRKMQNMNGLEGQLLLEPITNDLQPMEKCNSVQSPKVANFTALHNVDNESMNHVSTATGATTSVTTVDTLPSTIRPLSSYSLLDGSLDDGLPSPASNVSFRPQITNNSSVSNGTMTDISNGCLTSINSGQNEASDSHNSVEFTQYFQEGYCKISELDDCRELTEAVTDADSSSSHCEREKPEEDGDNDDMLGAVFAFSEEG

SEQ ID NO: 52713 - protein, 858 aa, Oryza sativa
MSSNPDGGRSFARRDILLKIQSDAQKWWEESKVFEAEPGNKPPGPGEKFFGNFPYPYMNGLLHLGHAFSLSKLEFGAAYQRLRGSNVLLPFAFHCTGMPIKASADKLSREAQQYGYPPAFPEVEDDSSAEVADSSQADNAASVVPDKFKSKKSKAASKVGMQKFQWEIMRGFGLSDEEIAKFQDPYHWLTYFPPLAKEDLKAFGLGCDWRRSFITTDMNPFYDAFVRWQMRKLKKMGKVVKDMRYTIYSPLDGQPCADHDRASGEGVQPQEYVLIKMEVVPPFPPKLKTMEGRNVYLAAATLRPETMYGQTNCWVLPDGKYGAFEINDTDVFIVTSRAALNLAYQNLSRVPEKPTCLMELSGCDLIGLPLKSPLAFNEIIYALPMLTILTDKGTGIVTSVPSDSPDDFMALQDLVAKPALRQKYGVKDEWVLPFKVVPIINIPEFGDKSAEKVCLDLKIKSQNDKEKLAEAKRMTYLKGFTDGTMIVGEFNGRKVQEAKPLIKNKLLEEGTAVLYSEPEKKVMSRSGDECVVALTDQWYITYGETEWKQKAVQCLEKMNTFSAETRNGFEHTLGWLNQWACSRSFGLGTRIPWDEQFLVESLSDSTLYMAYYTIAHLLQNGNMYGKEISSIRPEQMTDEVWDYVFCDGPAPNSDIPPALLSKMKLEFEYWYPFDIRVSGKDLIQNHLTFSIYNHTALLPEHHWPRGFRCNGHLMLNSEKMSKSTGNFRTLRQAIEEFSSDATRFALADAGDGMDDANFVFETANAAILRLTKEIAWMEEVIAAESSLRAGPPSTYADHVFANEINIAVIETEKSYNAFMFRDALKLGFYDLQLARDEYRLSCGAAGMNRELLWRFMEV

SEQ ID NO: 52714 - protein, 215 aa, Oryza sativa
MSCVSSMSLLLLPLPMVLTRRLPVLVRRTSSSSTLVVVPLMSLFSPLRREVKATAGDTHLGGEDFDNRMVKHFVQEFKRKSKKDITGNPRPVGRLRTACEWAKRTLSPPLPRPPTIEIDSLYEGIDFYSNITCARFEELTMDLFRKCMRGYQDGQRAACTMFILVGGSTRIPRVQQLLQDFFNGKELCKNINPDEAVAYGAAVQAPILVWRRPEE

SEQ ID NO: 52715 - protein, 548 aa, Oryza sativa
MATSTSAATAPLTCHHLGLRLRPRLPSLPLRPLSPSPSLSLSRPTPLTPSPPPRHRALHASASAAPAAPPSQPPKPVLQGAAIKPLVATIGTGVLIWLVPPPAGVARNAWQLLSIFLATIVGIITQPLPLGAVALLGLGAAVLTRTLTFAAAFSAFGDPIPWLIALAFFFARGFIKTGLGSRVAYAFVSAFGGSSLGLGYALVFAEALLAPAIPSVSARAGGIFLPLVKSLCEACGSRAGDGTERRLGSWLVLTCFQTSVISSAMFLTAMAANPLAANLTAGTIGQGIGWTLWAKAAIVPGLLSLVFVPLILYLIYPPEVKTSPDAPRLAKERLEKMGPMSKEEKIMAGTLFLTVGLWIFGGMLNVDAVSAAILGLSVLLISGVVTWKECLGEAVAWDTLTWFAALIAMAGYLNKYGLISWFSETVVKFVGGLGLSWQLSFGVLVLLYFYSHYFFASGAAHIGAMFTAFLSVSSALGTPPLIAAMVLSFLSNIMGGLTHYGIGSAPVFYGAGYVPLAQWWGYGFVISIVNIIIWLGAGGFWWKMLGLW

SEQ ID NO: 52716 - protein, 417 aa, Oryza sativa
MPALGTLSGGAAGVAGLLRLRRATPSPAVATPFPAAAAARCAAAAAAVVPDGGQLVWGRQLRPALLLPAAGGLLQPPTSPSSSQAGRRQALRPPAAATSGEAKPAGFLEKYPALITGFFFFMWYFLNVIFNILNKKIYNYFPYPYFVSVIHLLVGVVYCLVSWTVGLPKRAPINSTLLKLLFPVALCHALGHVTSNVSFATVAVSFAHTIKALEPFFNAAATQFVLGQQVPLPLWLSLAPVVLGVSMASLTELSFNWTGFINAMISNISFTYRSIYSKKAMTDMDSTNVYAYISIIALIVCIPPAVIIEGPQLLQHGFNDAIAKVGLTKFVSDLFFVGLFYHLYNQVATNTLERVAPLTHAVGNVLKRVFVIGFSIIVFGNRITTQTVIGTCIAIAGVAIYSYIKAKIEEEKRAKSA

SEQ ID NO: 52717 - protein, 790 aa, Oryza sativa
MAQQQGQGAGTTTVAMMSRNPSYYYSGEGELSLAVQRQDSLYRDASRAGQHEQAHGEGWARTLRLAFQCFGVLYGDIGTSPLYVYSTTFDGGIRHTDDLLGVLSLIIYSFLLFTIIKYVYIALRANDDGDGGTFALYSLISRHAKVSLVPNQQAEDELHLHISKSSSLRRPSVQRLASTAEERAQWVKDLLENSRPVRISLFLLTILATAMVISDACLTPAISVLSAVGGLKDKAPHLNTEQVVWVTVGILVMLFAVQRFGTDKVGYLFAPVVLLWLLLIGGVGVYNLAAHDVGVLRAFNPKYILDYFRRNGRHGWVSLGGVLLCFTGTEALFADLGCFSIRSIQLSFAFGLVPAVLLAYAGQAAYLRVYPDHVGDAFYASTPQVLFWPTLVLALAASVVGSQAMISCAFATISHSQAMGCFPRVKVVHTSRQYQGQVYIQEINLLLGAAACVVTVAARDTVVIGEAHGICVVLVMLITTLLLTVVMVLVWRVNIGWVLVFACVFASTESVYLTSVLYKFAHGGYIPVAMSAVLMGVMGVWHYVHVRRYKYEMERTVSTERVRELVSRRELQRVPGVGLFYTDLVQGIPPVFPHLIDKIPSIHTVLLFVSVKHLPVPHVDPSERFLFRQVEPQEHKLFRCVARYGYRDRLEDARDFVANLVERLQYYVRDVNLYGAAANNKVSYPSSRCDSMGIPKSASYAERLQLQRARSVAMLHSHSQHQRFIQREMEKGVVFILGESEVVARPHSSLLKKLVVNYAYSFLRRNCRQGDKMLAIPRSQLLKVGMSYEI

SEQ ID NO: 52718 - protein, 1060 aa, Oryza sativa
MISASAVAMRGEMGGGGGGGDEGELEDELDALLGTGGAGARRRGEDAGERERELNMFRSGSAPPTIEGSLNAISGLLRGGGEAAVTVAAIPDAETLNGHGGLLSEDELRADPAYLSYYYSHGNLNPRLPPPVLSKEDWRSTQRLKAGVVGGIGDGRKVSPEETGHEPTVGRPVFSQNVGFDQEEAARNDVGGAAEWVDGGGDGLIGLSLGRQRSFADILQDNIGRRTPASEHPSRAVSRNSFLDNQELLNSADSQYSMHNDILEAQRAVGNVQNVSGLPSINASASQTFASVLGSSISRNATPDSHYVPRVPSPGLPPVGVRINSNEKKLNCSSSFNTASSKAVEPDDILAAISNMNMSKDGTLGDSNSISQSKFQSEISDHQNISLDPKALQVNKNQHSLMLEADTDYLGIPPISQPSNPSFSDINKNVSGLANIRNSTNTRIDGHAEMQRSSTLSTRSYQKSPTSSNASPGGSPAQHQNIDNINSAFLNYGLGGYPLSPGLPSMMMNCMGSGNMPPLFESAAAASAIASFGADSRNLGNNILSSPTLSLSDVHNLGRTGNQTATGLLSPLSDPFYVQYLKATQYAAQGTANCSDPSLERGFMGSQYGDLTAVQKAYIEALLQQQKQYGMPLGKSTTSNHGYYGNLAFGMGMAYPGSPLGSPVASPSGPGSPLRLSERNMRFPSNLRNLGGWNSDPSGYMNDNFPSSLLDEFKSNKARSFELAEIASHVVEFSADQYGSRFIQQKLETATVEEKDMVFKEIMPQALSLMTDVFGNYVVQKFFEHGSAAQRRELADQLFGHVLALSLQMYGCRVIQKAIEVVDLDQKTKMVTELDGHIMRCVRDQNGNHVIQKCIECVPEDSIQFIISTFYGQVVPLSTHPYGCRVIQRVLEHCTDPKTQEIVMDEILQSVCMLAQDQYGNYVVQHVLEHGKPHERSVIIEKLAGQIIQMSQQKFASNVVEKCLTFGGPAEREVLINEMLGTTDENEPLQAMMKDQFGNYVVQKVLETCDDQQRELILSRVKVHLSALKKYTYGKHIVARVEKLVAAGERRIGLQAQYPS

SEQ ID NO: 52719 - protein, 203 aa, Oryza sativa
MFVFCRYMFKSIHPSKSKRHYFFSSIGNDLMKHPSKTNFGMVQKSFSRASLARPIEICDMLFFPILHLRHWFLFVVDLKDESFVFIDSLFEEEEDYQYNARCRLISKFSIVWRKFVSEHPINFASFKIIYPPRPRQTNRLDCGIFTLKFMEIWRPRVLLTNQFSQKDIPNIRIQYVNKLFFHPCNIMLNSATKKLVTDYYAKG

SEQ ID NO: 52720 - protein, 409 aa, Oryza sativa
MSGFAQNARGMGLGMPQNVMSGFKPESVPVYAALTDEFAVFDRWFASVPTSTQPNRLYVHSATSHGLTFNARKDLIHGFPQKTFFDSLEENGLSFGIYYQNIPATLFYQSLRRLKHLVKFHQYSLKFKLHAKWGKLPNYAVIEQRYFDCEMFPANDDHPSHDVARGQRFVKEVYETLRASPQWNETALIITYDEHGGFYDHVPTPVVGVPQPDGIVGPDPYYFKFDRLGVRVPSFLISPWIEKRTVIHEPNGPQDSSQYEHSSIPATVKKLFNLHSNFLTKRDAWAGTFENYFKIRKTPRTDCPEKLPEVTKSLQPFGPKEDSSLSEFQVELIQLASQLNGDHVLNTYPDIGRTMTVGEANRYAEDAVARFLEAGRIALRAGANESALVTMRPALTSRASPSSDLSSEL

SEQ ID NO: 52721 - protein, 320 aa, Oryza sativa
MTDLLDVFKDLFTEPHGLSPERHLCHRIRLEAGVSAVAVGPYRYAHIQKDELERQCDDMLRHGVIRPSSSAFSSPALLIKKRDGSWRFCVDYRALNDKTIKDKFPIPVAEELFDELRGAKFFTKLDMRSGYHQVLMHPDDVHKTAFRTHQGLFEFLVMPFGLTNAPATFQALMNDVLLPFLRRFVLVFFDDILIYSSSWSEHLRHVRTVLQTLQDHCLHLKRSKCEFGLTSVAYLGHVLSSPSTSGFQPRLHRRMRRVGYGPWRRAPPGRRSSRVLQHAHRPPSRQASRLRARIDRPRQGGPSLVTVPLGPPLHHSHGPL

SEQ ID NO: 52722 - protein, 165 aa, Oryza sativa; identical to SEQ ID NO: 46618

SEQ ID NO: 52723 - protein, 508 aa, Oryza sativa
MPDLTKPPSPRPRRRRCRLCGICLGTALLALLVSSLAHLFSPPQPQPQLQPPRPSPSSSPPRFAVIIDGGSTGSRAHVFATGPGGRPDLARSAVMRVTPGLSSFADEPARAGDSLRPLIDFAREKVGGAAAEVRLMATAGLRLQEGRLQEAILSSCRDVLRASGFRFEDSWAEVIPGSDEGIYAWVAANYALGTLGGDPHKTIGIIELGGASAQLTFVSDEVLPPELSRNFTFGGTTYTLYSNSFLNFGQNAAQESFREILRSKDSKNGTLVDPCAPKGYSRIKEVISRPSSASKSKLENQFADSGDGDFTVCRSSSLALLKKGNEECRYQQCQLGPTFVPELRGHFLATENFYFTSKFFGLKQSSSLSDFVLAGEQFCNKDLSTLRKMYPNRSDDDFSRYCFSSAYIVALLHDSLGVPLDDKRIEYSNQVGDTQVEWALGAFISNIKGVIVEPSATGRSAHRSRPLLAVLLGVFLLGGALCLARWRKPKTKIIYDLEKGRYIITRIS

SEQ ID NO: 52724 - protein, 866 aa, Oryza sativa
MNPSARISQVAMAAILPDLATQVLVPAAAVVGIAFAVVQWVLVSKVKMTAERRGGEGSPGAAAGKDGGAASEYLIEEEEGLNEHNVVEKCSEIQHAISEGATSFLFTEYKYVGLFMGIFAVLIFLFLGSVEGFSTKSQPCHYSKDRMCKPALANAIFSTVAFVLGAVTSLVSGFLGMKIATYANARTTLEARKGVGKAFITAFRSGAVMGFLLAASGLVVLYIAINLFGIYYGDDWEGLFEAITGYGLGGSSMALFGRVGGGIYTKAADVGADLVGKVERNIPEDDPRNPAVIADNVGDNVGDIAGMGSDLFGSYAESSCAALVVASISSFGINHEFTPMLYPLLISSVGIIACLITTLFATDFFEIKAVDEIEPALKKQLIISTVVMTVGIALVSWLGLPYSFTIFNFGAQKTVYNWQLFLCVAVGLWAGLIIGFVTEYYTSNAYSPVQDVADSCRTGAATNVIFGLALGYKSVIIPIFAIAFSIFLSFSLAAMYGVAVAALGMLSTIATGLAIDAYGPISDNAGGIAEMAGMSHRIRERTDALDAAGNTTAAIGKGFAIGSAALVSLALFGAFVSRAAISTVDVLTPKVFIGLIVGAMLPYWFSAMTMKSVGSAALKMVEEVRRQFNSIPGLMEGTTKPDYATCVKISTDASIKEMIPPGALVMLSPLIVGIFFGVETLSGLLAGALVSGVQIAISASNTGGAWDNAKKYIEAGASEHGKDPGPERLRLPQGCCDRRHHWGSSQGHLRPLAQHPHQADGCRVARVCPVLRHPWRHPLQVVLDGDDRFTRTLFLPGGRWKSSIYYRVHRVDTYSSLRFLFVITVCPSVDHAKLISIIPVSSFFESGSCSRWEQITGHLQVWTRVP

SEQ ID NO: 52725 - protein, 962 aa, Oryza sativa
MAALRICTPGGGAPEARRGSLAAAGSAVQHGPDLIGFSSWVLPISAGYAVDRRHAAAGGVAACHGLSCADSGRRKNHPRASLVNGVVSSLEDSSGGEPALCVSDSPEDASSSGKVLSDLRRDMVDGISGIPRISAGKKKGMKFRRRGQGGNRLTRRSAPRRASGKSGQDQRILLSEDDIAAILSSVTHESSIEECNSVLICLEKYSDKTALGFFEWMKANGKLKGNAEAYHLALQAIAWKEDWEAAGQLLHEMVADSGCALDAQAFNGLIYVCAKRRLVDWGTKWLHMMLERDVQPNVSTVGMLMGLYQRIGNLPEAEFTFAKMRKCGIKCVNAYSAMVTLYTRLGHFAKSEEVITLMNNDEVVPNMENWLVRLNAYCQQGKMEEAELVLKSLVDEGIALNVVAYNTVITGYGKVSDMQKAMEVFDRLKSAGLAPDETTYRSMIEGFGRADKYKQAILYYRKLRNSGFKPNASNFYTMINLLARHDDSEGATEILEDMRAAGCQCSSIVTVLVRAYGSVGRMHKVLQILKACFYKKILFDATSCSILVTGFVQNSLVEEAMRVLREKKWKDSDFEDNLYHILICSCKEAGCCDDAVRIYNQMPKSATHPNLRIYCSMIDVFSIMERFTDAEALYLELKASSCVLDMIAYSVIVRMYTKAGRPEDACLVLEDMEKQKEIVPDKYLFLDMLRTYQKCGLLEKLSDTYYWILKSQVELDEAMYNCIINCCGRAIPVDELSRIFDEMIQQGHLANTVTLNVLLDIYGKAGLFNKAEKVFLMARKQGMADIISYNTIIAAHAKNGDFRSMIYFVQRMQEAGFPVSLEAYNCMLDAYGKAGQLEEFAAVLQKMERAGCEFDHYTYNIMINIYGKKGWIEGVANVLAELKSRGGEPDLYSYNTLIKAYGIAGMPEDAVKLMQEMRIKGIAADRVTYTNLIAALQRNENFLEAVKWSLWMKQTGVAATRT

SEQ ID NO: 52726 - protein, 768 aa, Oryza sativa
MVDLLKNVDLEYLLERYPLDKEVNWGDELSLGEQQRLGMARLFYHKPKFAILDECTSAVTIDMEERFCKKVRAMGTSCITISHRPALVAFHDIVLSLDGEGGWDVQHRRDDSSFSTEESDYTLLETDRKSDALTVQRAFMGRAKSNASSRSKEHCYTTKVIATSPKLEIEQTIQTHRVPHLRCFPRPLPARVAAMVKILVPKLLDKQGGQLLAVALLVFSRTWISDRIASLNGTTVKFVLEQDKAAFIRLIGISVLQSSANSFVAPSLRTLTGRLALGWRIRLTNHLLQYYLKRNAFYKVFNMSGKSIDADQRLTLDVDKLTTDLAGLVTGMVKPLVDILWFTWRMKLLSGRRGVAILYAYMLLGLGFLRAVSPDFGHLAGQEQELEGTFRFMHSRLRTHAESIAFFGGGSREKAIVEAKFMKLLDHSKILLRKQWLYGIVDDFVTKQLPHNVTWGLSLLYALEHKGDRALTSTQGELAHALRFLASVVSQSFIAFGDILDLHKKFLELSGGINRIFELEELLRVSQRDTFVPSDATSAEETISFHEVDIVTPSQKLLASKLSCNVVQGKSLLLTGPNGSGKSSIFRVLRDLWPVCSGRVTKPSDGMFHVPQRPYTSLGTLRDQIIYPLSREEAEMKICSLYNDGNGSSASNLLDDHLKTILVNVRLVYLLEREGWDSTSNWEDVLSLGEQQRLGMARLFFHHPKFGILDECTNATSVDVEEHLYKLATSMGITVITSSQRPALIPFHSLELKLIDGEGNWELCEIHQ

SEQ ID NO: 52727 - protein, 223 aa, Oryza sativa
MNPVEGLVSIIALMLFSCLSALLIQVNSLLNMFIFNEYSWDEWVTNDRLLKLTDENIRKQQELEKSQVVDKSVKSGRSAQHKPKGSNDAKTDKEDTKIIIKGKKRKSQPGGTEEKERKSSESLFMSHFPSTLKKQLVDDWEFVTQLGKLVKLPRSPTVDDILKKYLEHRTKKDNKINDSYAEILKGLRCYFDKALPAMLLYKKERQQYSEEVKGDVSPSTIWS

SEQ ID NO: 52728 - protein, 275 aa, Oryza sativa
MSLDNETGLDKPGIRVRPVTGLVAADYFVPGYFVWAVLIANLARIGYEEKTMYMAAYDWRLSFQNTEVHDQTLSRIKSNIELLVATNGGNRVVVIPHSMGVLYFLHFMKWVEAPPPMGGGGGPNWCAKHIKSVMNIGGPFLGVPKAVAGLFSSEAKDVSVARAIAPEVLDSDFLGLQTLRHLMRMTRTWDSTMSMIPKGGDTIWGDLDWSPEDGFECKAKNQKINDSEVSKDANGKNEVHPEPVKYGRIVSFGKDVAEAPSSEIEQIEFRCCQRQ

SEQ ID NO: 52729 - protein, 216 aa, Oryza sativa
MADPPSFRRHPHPFSIDLIRWLPCSSSSSSDRLLAAAVHDPAAPSSSSSHLHLLPLHDPSSPLAALPLPSRAASLRCSPSVLAAATSSGSLHLLPSSLDAAGSAGVSVPAGAGFHVGPVRGLDCGGGGEEWVTAGEDGRVHVVGGGGDGRVVARRLWDGKGMAGYEAARWASAAEFATGGAGCGVAVVGQEEGGRRGGAVQGRLGPWHCHWYGSFH

SEQ ID NO: 52730 - protein, 107 aa, Oryza sativa
MQQVQRRELQLVAVSAMLIDCKYEEIWAPEVNDFIFISDSAYTREQILAMEKGILNKLQWNLTIPTPYVFIMMLSASADNKSDKEYGLVAYASAVYAARPNPRHFYI

SEQ ID NO: 52731 - protein, 195 aa, Oryza sativa
MVSAASSRAGGGPARHAPRGGAGPGSPRVSAQRRRWWWWAAPLPSASGASSLERVALAFFLASVALVLSCALYLYVFRYLGRGSAVAGFVGRDLEPCDVFDGAWVPDAGYPLYNSSLCPFAERGFNCLANGRRDTGYLKWRWKPRRCDAPRFTARAALERLRGKRVVFVGDSMSRTQWESFICMLMAGVDDPKTV

SEQ ID NO: 52732 - protein, 297 aa, Oryza sativa; identical to SEQ ID NO: 31641

SEQ ID NO: 52733 - protein, 1139 aa, Oryza sativa
MIPIGTLTPSLLTFAVLYAFLTLPLIPSLSSTALDDESNKDLQALLCLKSRLSNNARSLASWNESLQFCTWPGITCGKRHESRVTALHLESLDLNGHLPPCIGNLTFLTRIHLSNNRLNGEIPIEVGHLRRLVYINLSSNNLTGVIPNSLSSCSSLEILNLGNNFLQGEIPLGLSNCSNLKRIVLHENMLHGGIPDGFTALDKLSVLFAHSNNLSGNIPHSLGSVSSLTYVVLANNSLTGGIPPVLANCSSLQWLDLRKNHIGGEIPPALFNSSSLQAINLAENNFFGSIPPLSDLSSIQFLYLSYNNLSGSIPSSLGNSTSLYSLLLAWNELQGSIPSSLSRIPYLEELEFTGNNLTGTVPLPLYNMSTLTFLGMAENNLIGELPQNIGYTLKSIEMFILQGNKFHGQIPKSLAKATNLQLINLRENAFKGIIPYFGSLPNLTILDLGKNQLEAGDWTFLPALAHTQLAELYLDANNLQGSLPSSTGDLPQSMKILVLTSNFISGTIPQEIEQLRNLVLLQIDHNLLTGNLPDSLGNLSNLLILSLAQNSFYGKIPLSIGKLNQLTELYLQDNSFSGLIPKALGQCQKLDILNLSCNSLEGTIPKELFTISTLSEGLDLSHNRLSGPIPVEVGSLINLGPLNISNNKLSGEIPSALGDCVRLEYLNMEGNVLNGQIPKSFSALRGIIQMDLSRNNLSGQIPEFFETLSSMVLLNLSFNNLEGPIPSNGIFQNASKVFLQGNKELCAISPLLKLPLCQISASKNNHTSYIAKVVGLSVFCLVFLSCLAVFFLKRKKAKNPTDPSYKKLEKLTYADLVKVTNNFSPTNLIGSGKYGSVYVGKFDAEAHAVAIKVFKLDQLGAPKSFIAECEALRNTRHRNLVRVITACSTFDPTGHEFKALVLEYMVNGNLECWLHPTSYKNRPRNPVRLSTRIEIALDMAAALDYLHNRCMPPIVHCDLKPSNVLLDNAMGARVSDFGLAKFLHSNISSTSDRSTSLLGPRGSIGYIAPEYGFGSKISTEGDVYSYGVIILEMLTGKRPTDEMFNDGLNLHQFAKEAFPLKIGQILDPSIMPDYENEDNDANNDLDHDNCLMDGMLNCVTKLVKLGLLCSAVAPKDRPTMQSVYKEVAAIKEEFSALHG

SEQ ID NO: 52734 - protein, 724 aa, Oryza sativa
MARLERGSLVVGGRELLERAPPSVALRRPAVVAPVQPPRVLPRHPRQWVEVAVLFRFKIWWMIPTVGEDAAGVPAETQMLLLESRSEAGAALYALMLPVLDGGFRASLQGSPENELQFCFESGDPEVQTLEAVDAVFINSGDNPFKLMKESIKMLSKIKGTFSHIEDKEIPANLDWFGWCTWDAFYKSVNPVGIEEGLKSLCEGGAPPRFLIIDDGWQETVNGFKEVDEAFIEQTVFAERLIDLTENDKFRGETCKNLGDHVKKIKEHYGVKYVYIWHALHGYWGGVLTTPDAMKKYNPQLVYPVQSPGNVANLRDIAMDSLEKFGVGIIDPAMIYDFYNDQHSYLSSVGVDGVKVDVQNVMETLGKGFGGRVALTQKYQQALEESIARNFKGNNLICCMSHNTDSIFSSLKSAVARASEDFMPREPTMQTLHIATVAFNSLLLGEIFIPDWDMFHSKHESAEFHGAARALSGGGVYVSDKPGMHDFSVLKKLVLPDGLILRTKHAGRPTRDCLFNDPVMDGKSLLKIWNLNKFSGVIGVFNCQGAGNWTYPVKENAHVPTTVCITGDLSPSDVELLEEIAGDDWNGETAVFAFNSCSLSRLQKHQTMEVSLSTMTCKIYTIALIKVFGGFVQFAPLGLVNMYNSGGALENVTSTGDCSEITIQIQCRGPGRFGAYSATRPEICSVDEHEVEFKHTDDGFLAFDLSHGSSQDNLRNIEILYRAS

SEQ ID NO: 52735 - protein, 709 aa, Oryza sativa
MMPGFGTSSSMGSASHPARIEYNTSSNVSSQYIYEQGLYYPATNGYAYYAGFEPPVEWSDHTNFVGVDGQNLQLSNENLPYVYCTPGYGFSYYSPDQYTYMPGMVMGVDGSFVGSQQYFASPYQLPGSPSGFFPMSIQPTTDFSSTVSAEPPLLSTGTGTSAVASRLANTSMKNKYQMSGNTAPASQTAPSGSPAVGRPQQAYENESTNKPSNPPDANMSRRDKSSTSLVTVPVDASSTDKDGKSDEGNQSKEHVQSIQVTSGPMSGESGQGKATSNSTLEKIMIHPDQYNKVHFPVDHPDAKFFVIKSYSEDDVHKSIKYNVWSSTPNGNKRLDAAYSDVQGRALGKCPIFLFFSVNASGQFCGVAEMVGPVDFHKDMDFWQQDKWSGSFPVKWHLVKDVPNSTFRHIILENNENKPVTNSRDTQEIPFKSGTNMLKLFKDGPLTTSILDDFSFYEGRQKAMLEEKCRCSGRNFDVRMYVPAFIAKSSVVAVGEPSEVGKGQFSSKDLHSGDVEQDNGACEQPDKLNQMKDILATEALKTDGGAFVGQLEHAKTNQGSLDARVDHQSEHCSCSNPPENGERKPDSLSELVKLNGKSQRDSEAQPGINLSEPNYSSVKKGLPEEFCGQNPSNFMKEGGAGTVEDRKSTKFVTKSQGFPSSRVNKEAKGNGNEMARITTTGVVKVGSVHIKVNVAGEPSSEIIGDENGLP

SEQ ID NO: 52736 - protein, 472 aa, Oryza sativa
MYHNVLDEPSPLGLRLRKSPSLLDLIQMRLSQANSTAGQSSADDCSSEPPKKKDLKSGTSTAGERLKASNFPANILRIGTWEYISRYEGDLVAKCYFAKHKLVWEVLEGGLKSKIEIQWSDITALKASCPENGQGTLDVVLARPPLFFKETDPQPRKHTLWQATSDFTGGQASMNRRHFLQCPSSLLSKNFEKLLQCDQRLNQLSQQPDIILDSPVFEPRCSIFEDPVESKCQGFTNLKDEHELSGFSGSLSPCAGSSMSAKIEVNDSIATQAGFLAQPGNPGPSAVNVQGVSRNVNGAPELNIPSWWSQLKVPGLRPSMSVDDLVNHLGNCISEQITSVNPTLPSNEVPTKETLEEIAQYLLGDAQGPPASTSDERSLMARVDSLCCLIQKDTPPVAQPKPEPNDSDSIGGDGTEGSDEEFSSAASTVKTTGPAQPPAMSRKDSFGDLLMNLPRIASLPQFLFKIPEDSEN

SEQ ID NO: 52737 - protein, 189 aa, Oryza sativa
MIMIFVRTCESTRLLALTLRNLRFKAISISGQMSQDKRLGALNRFKTKDCNILICTDVASRGLDIQGVDVVINYDIPMNSKDYVHRVGRTARAGNTGYAVSLVNQYEAMWFKMIEKLLGYEIPDRKVDNAEIMILRERISDSKRIALTTMKEGGGHKKKRRKNEDDEEEEERNAPVSRKSKSFNKSRRR

SEQ ID NO: 52738 - protein, 215 aa, Oryza sativa
MPRRTASSAAAAPGRGGMEWELEREMVLMAAAGGEHQKKQRQQQPARRAFATDLLQNCDLPPPAKLFGPLPTLQRLENAAAWTSTSPDRKGGDGEGGGGDGGDRLMRALRLSQSRAREAEEKLAAAGASNGELSALLVRDSVVLSAHRRWVMMLEAENSGLRGAAGAAGSAKEGVGEDEDEDDDGGARRGAAAWWLALAVCVGIAGIGLAMGKLL

SEQ ID NO: 52739 - protein, 469 aa, Oryza sativa
MVQIKELGEGSSHAGQVVIRGLPSELSYADLADYFIKYGKIVDLIIIRAKGTAQAGDSAKITYADAAISDKIIKCRHIIKGKHVVVDRTLMEDTIQYKDKKTNRRITLDGLPWTVSNDDIVHFFSPYGTVVDHQITQKDENKLSEGSGFVLFSSELAVIKILSNGNTVNLGGEKVSINRSGAFVIAATGHHIKHPFLLPSEIFSSLFPHQKGGLEWLWRLHCEKSGGGILADDMGLGKTRQASAFLAGLFYSDLTQRVLIVAPGTILHQWIAELTKVGFNEDLIHSFWCAKTRHDSLAQVLKEGGVLLITYDLVRLYNEELNGMSSKSSKMRRACPSWDYVILDEGHVLKNPNTKNAAALKSLSRGQTVVLTGTPVQNNLSEFHSLMSLCCPTVLGSLAAFERDFCKPIDMGNVLEATTEVVMISSKKAMEFRKMVRPYFLRRTKESIESLLPNKADLVIWLKLTPYQI

SEQ ID NO: 52740 - protein, 340 aa, Oryza sativa
MDTDGRLRRALAAFGGGADVWDLVDAALASAARDRPAELRARRDGIVERLYATAAGGRCGNCDAPRSAEPEAAAAAAASPASSDEDADVDGLDDDEGGGMESKILAIRDFLEDPDQSEDELVSLLQSLADMDITYKALQETDIGRHVNGLRKHPSGEVRQLVKLLVRKWKEIVDDWVRLHNSGGDGGSSVLTDGDSPDKIQGRSYQNAQVSDFKYSPSPQRHNGLSSERSSNNNGVESMIEKRRTSPAPTYHNNKQNNSIGYSTTSSSAPVRTVREQKDNLMDLEKLDSARKRPQENYQEAQNAKKQRTIQVMDIHDIPKPKNRNAFIRKGGGGLPGKHR

SEQ ID NO: 52741 - protein, 115 aa, Oryza sativa
MGQEFVLEKPNLHVANRTYSSGKIFRVSGFQQVICQNMEPCLLNLVELCHQFFRDAPVKYVNVLPCPHLIVALWEHALSHLNTPAKSNLSRTFLQLLGNGNHSRMAQNVWSIVPW

SEQ ID NO: 52742 - protein, 272 aa, Oryza sativa; identical to SEQ ID NO: 31601

SEQ ID NO: 52743 - protein, 387 aa, Oryza sativa
MDQRKGSGSDANGGLAEATASRLRFEDPDEVMEENPAAAAATVGAEEEGGEGGGGEEVIGSDKTSADYYFDSYSHFGIHEEMLKDVVRTKSYQNVITQNSFLFKDKIVLDVGAGTGILSLFCAKAGAKHVYAIECSQMADMAKEIVKTNGYSNVITVIKGKVEEIELPVPKVDVIISEWMGYFLLFENMLNTVLYARDKWLADGGVVLPDKASLHLTAIEDAEYKEDKIEFWNNVYGFDMRCIKKQAMMEPLVDTVDANQIVTNCQLLKTMDISKMTPGDASFTVPFKLVAERNDYIHALVAYFNVSFTKCHKMMGFSTGPRSKATHWKQTVLYLEDVLTICEGETITGSMTVTPNKKNPRDIDIKLCYALSGHRCQVSRTQHYKMR

SEQ ID NO: 52744 - protein, 236 aa, Oryza sativa
MASTSSCLASPATAAAAPRLRVRVTPRAGRVVACSAGGGGGPEAAGLFAGERKAVGGLACGVLAAWAVASSSSPVIAASQRLPPLSTEPNRCERAFVGNTIGQANGVYDKPLDLRFCDYTNEKTNLKGKSLAAALMSDSKFDGADMSEVVMSKAYAVGASFKGTDFTNAVIDRVNFEKADLQGAIFRNTVLSGSTFDDAKMQDVVFEDTIIGYIDLQKLCTNTSISADSRLELGCR

SEQ ID NO: 52745 - protein, 74 aa, Oryza sativa
MTKLGSLRFGLFLNLKISKFSNQFKKIESKITKGKLPATRWIESHGKIGWDYQGSHVGTTAIIPSFFNRVPLIL

SEQ ID NO: 52746 - protein, 460 aa, Oryza sativa
MATFFSSSTNQRDLTGGGGDGGDMSFQHYPPPSNPYSDSSAGGLIPLPASIVSHSHIAHGGGDEPAAFREAATADGGEMGLQTQLLMAHGAAARGHQGGLSLSLGTQVPVSLYQYRPAGMAAASLLSPSQSSPMAGRSAQNSIYVQNSRFLRAARELLDEVVNVRDAIKRKGDKNQGKDSGECKGGDAAGDDKAGSNPQEQESNSAPELSPSERQDLQNKVTALMAMLDQVDRRYRHYHHQMQIVMSSFDAVAGGGAARPYTALALQTISRHFRSLRDAIGAQAQAARRGLGEQDASAQGGGGLSRLRYIDQQLRQQRAMQQFGMMQQPQHAWRPQRGLPESAVSVLRAWLFEHFLHPYPKDSEKLMLARQTGLSRGQVSNWFINARVRLWKPMIEEMYKEEFGAEMDSNSSSENGGGGGGKGKDEAISSEDRDEFQSPSSAAAARHAGVAGQLNNPFKS

SEQ ID NO: 52747 - protein, 548 aa, Oryza sativa; identical to SEQ ID NO: 50284

SEQ ID NO: 52748 - protein, 66 aa, Oryza sativa
MVSQWRLSLEVIFLLKFHQKPLKIRPNQTIKKVQMIKQAYKTMTRHLMGLHKMKIMGQARTIHKMI

SEQ ID NO: 52749 - protein, 218 aa, Oryza sativa
MSSWLRSAVSRAGRSGVARAVRGYADAVAHHAGQAVADILQDRTDYKSFKKTVARLEEAAVSCRGGERVELLRRWLGALQDIEAELSGSDLKDPEDRDPSSETDISKAPLALFYDADIEGGPMNFRDVFLYSQALEGITLSMVLEAPSEEEVSLLLEIFGLCLTGGKEVNKKIMDTVQDLAKALSNYKDEVLVKREELLEYTQSVISGLKRNADIMRC

SEQ ID NO: 52750 - protein, 225 aa, Oryza sativa
MPPLRLLPLLLLAAAAAALDPPTPTPWPEQFHAVVFTNLTGSGGRLQLIDLYYDWPRGRNLNLIRGQLSGDPTYDVEWTNGTSYFFNATSCRTKLFPVGLLPPDWLAAGAVYLGRETVAGFDCHLWTKVDIVWYYEDVVTHRPFRWNFFNGMQQHVMSFEVGGVLEDSKWQAPARCFSDQHTVIADPGAATVTDDRVEGEDGKLDVMNAFFRFVGAPAAAAAASV

SEQ ID NO: 52751 - protein, 345 aa, Oryza sativa
MQMMFSSVFYTFSMGTKSHYYGRTILHGGAKYRATGRGFVVQHKSFAENYRLYARSHFIKAIELGIVLTVYAAHSVIARDTLVYIIMMISSWFLVVSWIMAPFAFNPSGFDWLKTVYDFDDFMNWIWYPGSIFSKAEHSWEVWWFEEQDHLRTTGLWGKILEILLDLRYFFFQYGVVYQLKIANESRSIAVYLLSWICVAVIFGIFVLMSYARDKYAAKQHLYYRVIQSGVIILAVLVLIIFLKFTKFQIIDIFTSLLAFIPGWGLISIAQVIRPFIESTVVWASVVSVARLYEILLGVFVMAPVAFFSWLPGFQEMQTRVLFNEAFSRGLQISRILAGKKTIAV

SEQ ID NO: 52752 - protein, 301 aa, Oryza sativa
MALVVICGQPCSGKSAAAACLAAALCSSTSDLTVRIIDESSLHLGRNDSYKDMVVEKNLRGVLRSEVDRSVSRDSIIVVDSLNNIKGYRYELWCLARASGIRYCVLFCDTEVDHCREWNTKRQEKGEPTYDNNIFDDLVSRFEKPDRRNRWDSPLFELFPSRDGVMESSPVIAEAVSYLTKKVDSKTRDVKVLQPTIATQTARTTEANSLYEMDKATQEVINAIVEAQSCGLGLPVNKISLGPDLPTICLQRSVGLPELRSLRRTFIKLAGQYSLSGPPPPADADSATRMFVDYLNREISS

SEQ ID NO: 52753 - protein, 318 aa, Oryza sativa
MLTLMMKNNCNDDDIGSEFYDSFNLDNTIENVHSQNNKLELAKTGEFNQYEQTTGFSLPCGDLQYDVYLRTQIAGQDNKSGEGADFMDDGTFTLLKDLVTESRTSSPYYEKDHQLNSLNYVNQDGHGIPTTTNPTWDLTQSCNPLNHSLTEDSVPFNVGTSAGVLTNATSNDFIPIDELAITSGRYGVLPSIEKTEEGSIAIDEANSFGATATMCYNSVHFSHWIDQNLTGPLPDLADLPDIYPDSFLPTPRKNITLVLDLDETLIHSSAVDRDGADFSFPMYHGLKEHTVYVKKRPHVDTFLQKVSEMFKMVAILRI

SEQ ID NO: 52754 - protein, 664 aa, Oryza sativa
MRPERQSGEEAMDVVQARLPDPVPSPILRHSPSTSRSLRSVGDMPSVTFAGDMRSGSCRAESTASSFESFRRAGSRPQPVGAVARMPTRRSASERAGSQRDLRDEDARFVYVNDAARTNAPPAKFPDNSVTTTKYSVLTFIPRNLYEQFHRVAYVYFLILAALNQVPQLGVFSPVASVLPLAFVLGVTAVKDAYEDWRRHRSDKTENNRTASVLVDGVFQPKPWREIQVGELVRVVANETLPCDMVLVSTSDPTGVAYVQTINLDGESNLKTRYAKQETMSTPPEALAGLIKCEKPNRNIYGFLATVDLDGRRAVSLGTSNIMLRGCELKNTAWAIGVAVYTGRDTKVMLNNSGAPSKRSRLETHTNRETIVLAVVLTLLCTLVSLLAGIWLSDHSDELGVIPYFRKKDFSNPNEAEKYKWYGTGAQVVFTFMMAVIQFQVMIPIALFISMELVRVGQAYFMVQDEHMFDDKRQAKFQCRALNINEDLGQIKYVFSDKTGTLTENRMEFRCASVHGGDFSETDGGDADGHAVAADGVVLRPKTAVKTDPKLMAMLKDGTGAKADAARDFFLTLVTCNTIVPIIVDDDEDNDDPAAAAAKLVEYQGESPDEQALVYAAAAYGYTLVERTSGHIIIDVFGTRQRYGRRTHHLQILCFRLLFLFFWL

SEQ ID NO: 52755 - protein, 209 aa, Oryza sativa
MKFNLDLSEPHVKGCLELLFSSSYKTFHHRCYTHYLKSGGGDSARNSPYEPLRDRPGYWTWLCDHFETEEFQKKSVIGKANRMKLAYVHKKGTKPFVALQHELSCDQISLYKECYCSDKGWASRDARQNYETMLQMQHENEQEGAIQLTEQQICEKVLGKAYGYIRGRGHGPKPNRRASSTSANTYQQMEEELASTEQTVAVQQNQLAV

SEQ ID NO: 52756 - protein, 1357 aa, Oryza sativa
MASRQHNAQFHKNKTLDNKYMLGDEIGKGAYGRVYKGLDLENGDFVAIKQVSLENIPQEDLNIIMQEIDLLKNLNHKNIVKYLGSLKTRSHLHIILEYVENGSLANIIKPNKFGPFPESLVAVYIAQVLEGLVYLHEQGVIHRDIKGANILTTKEGLVKLADFGVATKLTEADINTHSVVGTPYWMAPEVIEMSGVCAASDIWSVGCTVIELLTCAPPYYDLQPMPALFRIVQDVHPPIPEGLSPEITDFLRQCFQKDSIQRPDAKTLLMHPWLQNSRRALPSLRQPVQSPSTVRDIDEDDEGSSGDNHSGFSGPPRDTQTPTASGLEQEDGRKDLVSESARQDIPDEFHDGMLKTTGSSSSNDVELMKDNVVLNKDPTLVFHEKLSLESSLGATDLNGKLTHEVSQDGPPNKLTSSGQESRKSDGKYVEDESKDGSSLEDGDAFSFQAGGQNINFQKEAKTSVEMANELSRFSDTPGDASFDDLFPPKKRGDHGAEASTSTTGEELQYNGAQNDLAKELKTRMAQKQKENDTEHMNGGKLLEYVMRLREEDIDGTAFDETIPGESLFPLQSVEYSKIVAQLKPGESEDVILSACQKLVSIFNQRPEQKQIYVSQNGFLPLMELLELPKNRIITSVLQLINQIVKDNTTFLENACLVGLIPVVMNFAVPDRAKEVRVQASRFLQQLCQASTLTLQMFIACQGIPVLVSFLEPDYAKYREMVHLAIDGIWQVFKLQHSTPRNDFCRIAAKNGILLRLVNTLHSLNEATRFASISGSGASVTQNGSTPRRRSGQLDPPMLEISKTRLDHHHSSGSLQSLQADADRHHIIMDPSASPRFTDMAAAGHMERNDNDPIRPQRLSVSAGRTSTDRSPKHIELVSNGHSSGQNDQIRPLLSLLEKEPPSRHVSGQLDYVRHLSGLERHESILPLLHASTERKTNGELDLLMAEFAEVSRQGRENGNLDSNIKTSNRVPSMKYAPSSGPTTSNEGASTSGAASQTASGVLSGSGVLNARPGSTTSSGLLAQMVSMSADVAREYLEKVADLLLEFAQADTVVKSLMSSQSLLARLFQMFNKIEPPILLKILRCINHLSGDPNCLETLQRTDAIKHLIPILELHDGPLVYQIHSEVLNALFNLCKINKRRQEQAAENGIIPHLMNFVMSDSPLRQYALPLLCDMAHASRNSREQLRAHGGLDVYLNLLEDDAWACTALDSIAVCLSHDNDHRKVEQALLKKDAIQKLVKFFQDCPEQYFVHILDAFLKIITKSSRINTAMATNGLTTLLIARLDHREAIARLTLLKLIKVVYEHHPRPKQLIVENDLPQKLQNLIEERRDGQRGGQQVLVKQMATSLLKALHINTVL

SEQ ID NO: 52757 - protein, 894 aa, Oryza sativa
MIKLRSALGVLEILSVLCISLVAAYTPVDNYLISCGSSVDTPVGQRLFVADDSGTVVLTSPASDAVKASPSAVSGLRDDAAMYQSARVFMAPSSYSFRIRDPGRHFVRLHFFPFVYLGYDLATASFKVSTQDAVLLDGFAPAAAARGNASTTTTTATAAAVCEEFLLDVARDTLVVTFVPLAGRLAFVNAIEVVSVPDDLIGAADSSLSTSDSTGQQLNPAVMPLQTVYRVNVGGQAVAPDSDTLWREWTSDQQLLVGPAMTKGVSYNRTPNYLPGQATANDAPAIVYATGRELIIMTNSTDDGMKQMAWQFDVGRSASYLIRFHFCDIVSSVPGRLHMNAYVDSSNAIQDLDLSAIGNGTLAFPYYRDFVLAASTPSGKLAVYVGSTSQKITTPAAILNGLEIMRILTTAGNVAVVEPTMPPGTKKKNNLAVVLGSVCGAFGFVSVAAALVIVLRRKEEKEELRTPTTSQPSTAWMPLLGRISFRSAPPSAVGSRSPSFTIDTNANTPGGGATPGMAAAASSSPSYRFPFAALQDATGNFDEGLVIGEGGFGKVYAAVLQDGTKVAVKRANPESRQGAREFRTEIEMLSGLRHRHLVSLIGYCDEQDEMILLYEYMEHGSLRSRLYGGGAATATATALSWAQRLEACAGAARGLLYLHTATAKPVIHRDVKSSNILLDDGLTAKVADFGLSKAGPDMDETHVSTAVKGSFGYVDPEYVRTRKLTAKSDVYSFGVVLLEALCARPVVDPRLPKPMVNLVEWGLHWQRRDELEKIVDRRIAGTVRPAALRKYGETVARCLADRGADRPAMEDVVWSLQFVARLQEVDGLDASDVSSLNMVHQLMPPTSLHARQRSAGESETGRTDADEDSSVVDDDYTDASMRGIFWQMVNVRGR

SEQ ID NO: 52758 - protein, 382 aa, Oryza sativa
MQRKRTKQFSGGWRMRIALARALFIEPDLLLLDEPTNHLDLHAVLWLETYLLKWPKTFIVVSHAREFLNTVVTDILHLHGQKLHAYKGDYDTFERTREEHLKNQQKAFETNEKARSHMQAFIDKFRYNAKRASLVQSRIKALERMEHVDAVVSDPDYKFEFPTPDDRPGPPIISFSDASFGYPGGPTLFKNLNFGIDLDSRIAMVGPNGIGKSTILKLISGDLQPTSGTVFRSPKVRMAVFNQHHVDGLDLTVNPLLYMMRCYPGVPEQKLRAHLGSFGVTGNLALQPMYTLSGGQKSRVAFAKITFKKPHIILLDEPSNHLDLDAVEALIQGLLVFQGGVLMVSHDEHLITGSVDELWVVSEGRVSPFAGTFKDYKKMLKS

SEQ ID NO: 52759 - protein, 302 aa, Oryza sativa
MRQLLFALDGLHSTGIVHRDVKPQNVIFSEGSRTFKIIDLGAAADLRVGINYIPSEFLLDPRYAAPEQYIMSTQTPSAPSAPVATALSPVLWQLNLPDRFDIYSLGLIFLQMAFPSLRTDSSLIQFNRQLKRCNYDLEAWRNLVEPRATPELRRGFDILDLDGGIGWELLTSMVRYKARQRTGAKAALAHPYFNREGLLGLSVMQNLRLQLLRATQKDYSEAARWVVGLMARSGTEAEGGFTEAQLQELREIKPKKGSARRNLLASVLRVQRKVVRTINESMDELSSQSKSIWWSRWIPKEE

SEQ ID NO: 52760 - protein, 586 aa, Oryza sativa
MWAWGLVERAAAGLLGPLGGAHGGGRWNTAVAVGVTAAAGLVLVVIVVSSRRGGLKSPWWRRRRKAALKPHEWVSLFTPEGKLKDGGVKLLKKVRSGGIEPSIRAQVWPFLLGVYSLGSSESERDAVKAQNRKGYLLLRNHCLRKSVYINEENKQSNEAAGAKHVECVSSEKGEDTVNPAGSEEVPDKSSVEEHLVGDDTVGPVVSEEVAEKSFVEDHLVSEEENPSANPGEEVQDDTSKTSPEKLTDGNHSSSSSSSEEESESSGLTHVETSHMVVASVQQSLTEDEQESIPRYSNTGGNMENDSELSKAARPVKSVRTIEDFETWQRIIRLDAVRANDEWVSYSPSQAVVSREKAIESAKAVCLKDYEHLEPHRIRHAARLVPILEAYAIYDPEIGYCQGMSDLLAPLLAVLEDDNEAFWCFAGFMRKARHNFRLDEVGIRRQLNMVARIIKYKDFHLYRHLEMLQAEDCFFVYRMVVVMFRRELTFEQTLCLWEVMWADQAANRAGIAKSSLGKLRLGAPPTDDLLLYAIAASVLQKRKLIIESYSSMDEIIRECNSMAGQLDIWKLLDDAHDLVTTLHGRIE

SEQ ID NO: 52761 - protein, 556 aa, Oryza sativa
MTRGRTRWRRRRSWWSGGILRRRGIGWCSIRRRTRGITWALQAAMARLEDEFRHLLARGMSPLAGEDLHASLLRRLSLTVPSFASSASDLDCPSFASHTGDGDESGGAGGRASVSDEEISPYLISPDTVGALRGIADVMLRAGYGPELCQVYGEMRRDTLMECLAVLGVDKMSLEEVQRVEWGVLDGKMKKWIQALKVVVRGLVAEERRICNQIFAADAEAEEDCFTEAAKGCVLQLLNFGDAIAIGKRSSEKLFRILGMYEALDEVLPELEGLFSGDARDFIKEEAVGILMRLGDAVRGTVAEFANAIQGETSRRALPGGEIHPLTRYVMNYVRLLADYSRSLNQLLKDWDTELENGGDNVNMTPLGQCVLILITHLQAKIEEKSKLYEDEALQNIFLMNNLLYIVQKVKDSELKTLLGDNWIRQRRGQIRRYSTGYLRSSWTRVLACLRDDGLPQTMGSSSALKASLKERFKNFNLAFEELYKTQTTWKVVDPQLREELKISISEKVLPAYRSFVGRFRGQLEGGRNSARYIKYNPEDLENQVSDFFEGRRPNA

SEQ ID NO: 52762 - protein, 1179 aa, Oryza sativa
MHCLAPHFLLFLPLSSASRHALPHTPPAPLLLPSHPAQAQAQARAGPLRLPSARSPSRAAAPVSDDDEDEEDDEEIDIRDDADVDEEYDDDDDEELDEESGGEEEEEEEGDDGVEELEEEEGGREGTAARRRRSEEYKSQRVGKLVAEVREFGEDIIDYNELAGIYDFPIDKFQRLAIQAFLRGSSVVVSAPTSSGKTLIAEAAAVATVARGRRLFYTTPLKALSNQKFRDFRNTFGDHNVGLLTGDSAINKDAQILIMTTEILRNMLYQSVGMAASEGRLFQVDVIVLDEVHYLSDISRGTVWEETVIYCPKEVQLICLSATVANPDELAGWIGQIHGKTELVTSHKRPVPLTWHFSKKFALVPLLDGKGKKMNRKLRMSHFQNLSSPKSEFYYVKGKRKLRTTKNEQGNRSPLDISKQVQLSKHELTNMRRSQVPLIRDTLSQLWENDMLPAIWFIFSRRGCDAAVEYLEDCRLLHDCEASEVELELKRFRMQYPDAIRESAVKGLLRGVAAHHAGCLPLWKSFIEELFQRGLVKVVFATETLAAGINMPARTSVISSLSKRIDAGRQLLTPNELFQMAGRAGRRGIDTVGHSVLVQTTYEGPEECCDVIFAGLEPLVSQFTASYGMVLNLLAGSKVTHNQKESDDIKVKRSGRTLEEARKLVEQSFGNYVGSNVMVAAKEELERIQSEIQYLSSEITDESIDRKCREELSEEDYAEISLLQKKLKEEKQMRNELKKRMELERMVAWKTRLEEFESGHLPFMCLQYKDKDSVQHTIPAVFIGSLSSFADQKIVSLVENDSPVAGKQKVDNEGQQYYPSYYVALSSDNSWYLFTEKWIKAVYKTGLPAVPSAEGGPLPRETLKQLLLREDMMWDKIAKSEYGSLLCMDGSLDTWSWSLNVPVLNSLSEDDEVERFSQEHQDAVECHKQQRKKVSQLKKTIRSTKGFKEFQKIIDMRNFTKEKIERLEARSRRLTRRIRQIEPTGWKEFLQISKVIQEARALDINTQVIYPLGETAAAIRGENELWLAMVLRNKVLLDLKPSQLAAICGSLVSEGIKLRPWKNSSYVYEPSSVVTGVINYLEEQRNSLVDLQEKHSVKIPCEIDAQFAGMVEAWASGLTWREIMMDSAMDDGDLARLLRRTIDLLAQIPKLPDIDPVLQKNAQIACNIMDRVPISELAG

SEQ ID NO: 52763 - protein, 843 aa, Oryza sativa
MAQRRQGSQRQEQAWWVAEGARDWCGEGSDDGEEGEEEEEDGVLSAFLCPITMEVMRDPVVVETGHAFEREAIARWFSECASLGAAPRCPVTMEVVDGADVKPVVALRAAIEEWTSRRETAALRRACRWLTKAASEKEALRGLDAVMRGWKLARVGKRVVRRDGMVPMVAAMLRNGSARVRLKALQALREFAREDDEYRDSVSEGDTIRRIVKFIDFEDCQERELAVSLLCELSKSEMVCEKISELNGAILILGKVACSKSQNPALAEEAEMTLENLEKCEKNVLQMAENGRLEPLLNLLIEGSPEKQLRIASSLEKIVLSNDLKNLVAQRVGLLFAGVVENGTLPAKEVAFKVLDHISTNTESAKVLIEDGILLPLFRVLSVDGVKFLPPRLQEAAAAVLSNLVACGIDFGTVPLDGNRTIVSEDIVHSLLHLISNTSPPIQCKLLEIFVMLSSSTTTVLSIISAIRSSGAITNLVQFVESDHQESRAASIKLLCKISFDMDHEIAQVLRSSPTLLGCLVRIVSENDANADEQDAALQILANLPKRDRRLTMELMEQGAFKYIARKVLNICRRGTANNIVDNTMLEGLVKVLARITYILREEPRCVALAREYNLASLFTSLLRLNGLDGVQLLSAKALVNLSVESRYMTGTPNFDEHEQKSGLTWFGKKPPGIQLCRVHSGICSIRDNFCILEGKAVERLVVCLSHQNKKVVEASLAALCTLLGDGVEITEGVSVLYMANAVEPIFEILKGNPTGTLQQRVTWAVERILRAENIAKAASSDRGLSSALVHAFQNGDSRTRRIAEASLKHINKLPTFSQIIDKHPSRRGSSIGSMERYFRSDR

SEQ ID NO: 52764 - protein, 675 aa, Oryza sativa
MASPLAVFHPASATAAAAARRHHPPRPPHLHLHLPLHHQPSSPRRRFAAEFAVGGADGGTGGGGGRRARGGGDVDVAAVGAALRDARTADEVETLVKGFLDDGGGGEEHLPLQVYTSVIRGLGKERRLDAAFAVVEHLKRGSGSGGGGGGVNQFVYNCLLGAVKNSGEFGRIHDVLADMEAQGVPPNIVTFNTLMSIYVEQGKIDEVFRVFDTIEGSGLVPTAATYSTVMSAYKKAGDAFAALKFITKLREMYNKGELAVNHEDWDREFVKFEKLTVRVCYMAMRRSLVGGENPVGEVLKVLLGMDEAGVKPDRRDYERLVWACTGEEHYTIAKELYQRIRERGDGVISLSVCNHLIWLMGKAKKWWAALEIYEDLLDKGPKPNNLSYELIMSHFNILLNAAKRRGIWRWGVRLLDKMQQKGLKPGSREWNAVLLACSRAAETSAAVDIFKRMIDQGLTPDVVSYGALLSALEKGKLYDEALRVWEHMCKVGVKPNLHAYTILVSIYIGKGNHAMVDSVLRGMLSAKIEPTVVTFNAIISACVRNNKGGSAFEWFHRMKVQNIEPNEITYQMLIEALVQDGKPRLAYEMYMRACNQGLELPAKSYDTVMEACQDYGSLIDLNSLDPRPVKKVEPIRIENKFSSSYYVGDLPSSTKHFGSTGTSSLYRYRTERWIM

SEQ ID NO: 52765 - protein, 381 aa, Oryza sativa
MASTAAAASSQGCISWALRQRGLGGGGARAVPVLPRRRFCVSAAAGAGFDNENREYVIVGGGNAAGYAARTFVEHGMADGRLCIVSKEAYPPYERPALTKGYLFPPDKKPARLPGFHTCVGSGGQRQTAEWYKENGIEVLYEDPVVAFDGKTHTLKTSSGKILKYGSLIISTGCEASRLPAKIGGNLPGVHYIRDVADADSLVSSLGKAKKIVVIGGGYIGMEVAAAACGWNLDTTIIFPEDHIMPRLFTPSLAKKYEELYQQNGVKFIKGALIDKLEAGSDGRVSSAVLEDGSVVEADTVIVGIGARPVIGPFEAVGVNTKVGGIEVDSLFRTSIPGIFAIGDVAAFPLKMYDRMTRVEHVDHARKSAHHCVEALLTSHT

SEQ ID NO: 52766 - protein, 215 aa, Oryza sativa
MATKVGMMTYFDPATGKPVPVTVVGFREGGNVVTQVKTAATDGYDAVQVGYHGVREEKLTRPELGHLGKAGAPPLRHLQEFRLQSVDGYDPGQPLDFADMFKEGDLVDISGKSIGKGFQGGIKRHNFKRGLMTHGSKSHRALGSIGAGTTPGRVYKGKKMPGRMGGTKTKIRKLKIVKIDNDLKVVMIKGAVPGKPGNLLRIAPAKIVGKNIPKN

SEQ ID NO: 52767 - protein, 438 aa, Oryza sativa
MAAPTSSQPVARVLPRGGGGGFRAFPESAPASLRFSVGRRRAARLEVKASANVFGNYFQVATYGESHGGGVGCVISGCPPRIPLTEADMQVELDRRRPGQSRITTPRKETDTCKILSGTHEGMTTGTPIHVFVPNTDQRGGDYSEMAKAYRPSHADATYDFKYGVRAVQGGGRSSARETIGRVAAGALAKKILKLKSGVEILAFVSKVHQVVLPEDAVDYDTVTMEQIESNIVRCPDPEYAQKMIDAIDKVRVRGDSIGGVVTCIARNVPRGIGSPVFDKLEAELAKAMLSLPASKGFEIGSGFAGTDYTGSEHNDEFYMDEAGNVRTRTNRSGGVQGGISNGEIIYFKVAFKPTATIGKKQHTVSREHEDVELLARGRHDPCVVPRAVPMVESMAALVLMDQLMAHIAQCEMFPLNLALQEPVGSASSVPAFAPDLS

SEQ ID NO: 52768 - protein, 438 aa, Oryza sativa
MPPSMAVAAAAAAPRSLLFPVSPSPSQPRRVPALARAGRSQRRHAALARPARRHLDDAMSAGFVRSLNAPPDEDGARSGGRYDPRPGDFAVGVVVSGTEARLDVAVGADRLATLLAKELLPLYRADLPAFAEAAPPRPGSVGAVASPAAGEGDRKPGERGGGRTLVPPGTVVFAEVLGRTLSGRPLLSARRLFRRLAWHRARQVMQLDEPIEVKIYEWNTGGLLTRIEGLRAFLPKFELMDRINTFTDLKNKVGCSIRVCITRLDEETNDLIISEKKAWEMTYLKEGTLLQGIVHKIFPYGAQVRIAGTNRSGLLHISNISRGRVLSVSDILKIDEEVKVLVVKSNVPDKIALSISDLESTPGLFLSEKARVFSEAEEMAERYREQLPADSKNAKLDADLPGGTIPFDDEATLYANWKWFKFLEDGKLGAVTTEHNGS

SEQ ID NO: 52769 - protein, 389 aa, Oryza sativa
MGAVTSTVAARFAFFPPSPPSYGAEAPPPPAAAGAGVGVEKDGGGGGVVVELTDVPRRGNVEARRLRTKRGTEVVAMYVRQAGARLTLLYSHGNAADLGQMFELFVELSAHLNVNLMGYDYSGYGQSSGKPSEHNTYADIEAVYRCLVETYGASEENIILYGQSVGSGPTLDLASRLPHLRAVVLHSPILSGLRVMYPVKHTYWFDIYKNIDKIPLVRCPVLVIHGTADEVVDCSHGRALWELSKVKYEPLWVKGGNHCNLELYPEYIKHLKKFVGAIEKSPPLYDESPESSGPSDNTQTNPEGTEESRKSTDCREKTRPSIDHRQSTDRRDKSRGSTDRRDKNRKSVDQPRASVDQPDRPRKSVDRFGGVMKSVRYIDCFRVTTASGS

SEQ ID NO: 52770 - protein, 150 aa, Oryza sativa
MVFNFIFHSSHCSYIEKQASTKFTRSAHQTNKCTTIEELSPKKKHVVLTSDGTEEDVHSLEVNNRCNITRTSSPKNQFLNVISEEININLLNLTSQTTSFSFSGYYFSHPVASHLGYPPQTGSSGYYYDGIATFGLGGTGVFYSGAWLAN

SEQ ID NO: 52771 - protein, 52 aa, Oryza sativa
MSARETCVTMVCLQLPHSLLLLLLLSCCNPLPPSTTLMRLDVPPSNKKRWTS

SEQ ID NO: 52772 - protein, 477 aa, Oryza sativa
MVEPGRARETKVTASASSSAGSDAAVMKKKKKKKKKLVVASRKVDEKDKKQVDYKCSRSSGRDECCKVESRHQQCTEPESPSYRLALRSLFSCRNSSSSSHAGHHHHRAADGKKLGCNSASICKVKQDNPMQQHMRRAEDELKVKDKPPVAEPYCKRRASVSACNISSERSVKKSVKQQQQEASSSLQSSASISASSCSSTAGGGGSFRGMQQLSLRRLSGCYECHMVVDPISGVFRDSSSMRATICSCPDCGEIFVRPDSLHLHQSIRHAVSELGAEDTSRNIISIIFQSSWLKKQSPVCAIDRILKVHNAARTLARFDDYRAAVKAKAMAHRHPRCTADGNELLRFHCATLSCDLGLHGATHLCDHLSCAACAIIRHGFRPPAPGAGIRTMATSGRAHDAVVSSGSEGDRRAMLVCRVIAGRVRREEAAAAAAEEEEEEYDSVAGTTPGLYSNLEELDVFNPTAILPCFVVVYRA

SEQ ID NO: 52773 - protein, 489 aa, Oryza sativa
MLNFDVTKKCLVGEGWCPIFAKSQIKDVLQRATLHSNSQVGIIFHEMDTIDSPPTYFQTDKFTNAFQEIVDAYGIARYEEANPAVYSVITFPFLFAVMFGDWGHGICLLLGACVLILREKKLSSQKLGSFMEMAFGGRYVILLMALFSIYCGLIYNEFFSVPFHIFGKSAYECREKTCSDAHTAGLIKVRDPYPFGVDPSWRGSRSELPFLNSLKMKMSILMGVTQMNLGIVLSYFDAKFHGNALDIRYQFIPQMIFLNSLFGYLALLILIKWCTGSQADLYHVMIYMFLDPSGNLGENQLFWGQKELQILLLLMAIVAVPWMLFPKPFILKKLHKERFQGHTYRFLGTSEMDPDSEPDSARSRHDDFNFSEVFVHQMIHSIEFVLGAVSNTASYLRLWALSLAHSELSTVFYEKLLVLAWGYDNLVVKLVGLVIFSFATAFILLGMESLSAFLHALRLHWVEFMNKFYHGDGYKFRPFSFALLADDED

SEQ ID NO: 52774 - protein, 408 aa, Oryza sativa
MAYTSSSLHLHKHLLLPKTNPSSSYSRPPPPSFVAAAAKINGVNGHSSKKSPNGKAQINGDGKKGVNGSGRKKAAAQHINGNDRIHLSVSTGGAGGQDGFGLRVAFQGAPGAYSEFAAKTALPGCDTVPCRAFADALAAVDGGAVDRAILPVESTMEGTALRNYDLLLRHDLVVVQEINLFVHYCLLAMPGVRAAEVRRVISHPMALAHCGRALARLGVDREPVEDTAGAVEMLRSNRMLDTAAIASPRAADLYGLDVLAHGLQDESWNVTRFLLLSKPPSPVTLPMDADAKTSMVVAHRGGSMMVVLKVLSAFSSRNINLTKLEVINNNDGGGGGGGAAAGHPVMILDTSARGAPTLRAFPHVLYVDCEGASHDPRVLDAIKEIERFAVFVRVLGCYAADSNVYDLQ

SEQ ID NO: 52775 - protein, 396 aa, Oryza sativa
MDFSGGGGRGDPARWLEIAGKLLAARDLVGCKRLAERAVDAEPLLPGADELLAVADVLLASQRLLPSGRPDPIAVLHLQPNPDPAEVKRSYRRLSNLLSSNPRPGADAALRCVQEAFAHLSDSSANPAPALAPPPAPASGGDASAAAADAFWTACPYCCHVYQYQRALMGRALRCPGAGCRRAFVATEIPAAPPIVPGTDMYYCAWGFYPMGFPKAADLSTNWKPFCPMYPWNLSSPQQAPADAGNVSKQNVESNGGNVNINVNTPPSNAQPANKSGASSGVGVGPSRGRIKKTTARKKVGGGFKKNASGGVESGIEPSLLGPDSWNGVAESGSMVGARGININEVAKGTDGSSMMHFGGDEEIGFDLDVDATDAILGNLQHLPFSRDDDNARRLF

SEQ ID NO: 52776 - protein, 146 aa, Oryza sativa
MMSMASTTASPFCPSPMPRGRKCTVRVQAGAAGADASDKSLEIMRKFSEQYARRSNTFFCSEKSVTAVVIKGLADHKDQLGAPLCPCRHYDDKAAEVAQGFWNCPCVPMRERKECHCMLFLTPDNDFAGQDQAITLEEIKDATSKI

SEQ ID NO: 52777 - protein, 511 aa, Oryza sativa
MAMPCRLHGDILLLLLGAVAVAVAHPAANEFCAAVGGGSGGCGVGGGGGGDGRRILIRGGTVVNAHRVEEADVYVEDGVIVAVRPNIPVGDDHVKVIDATGKYVMPALAGGTTMHIDFVIPVNGNLTAGLESYKQKAEKSAMDYGFHMAITKWNDDVSREMETMVKEHGINSFKFFMAYKGSLMVTDDLLLQGLQKCKSLGALAMVHAENGDAVAEGQQRMIDLGITGPEGHALSRPPVLEGEATARAIRLAKFVNTPLYVVHVMSIDAMDEIAKAKREGQRVIGEPVVSGLVLDDSWLWDPDFMIASKYVMSPPIREAGHNKALQVALSSGILQLVGTDHCTFNSTQKAFGSDDFRKIPNGVNGIEERMHIIWDSMVETGRISVSDYVRVTSTECAKIFNIYPRKGAILEGSDADIIILNPERSFVMGAHTHHSRSNTNVYEGRKGKGMVEVTISRGRVVWEDGILNVVPGSGRYVRTPPYSYLFDGIEKSDAAYRASLRAPVKRGKAAA

SEQ ID NO: 52778 - protein, 312 aa, Oryza sativa
MDHLGGIRLRRPVLSIDNAEPAGETGMSETKKKAAAVAEEEEELLEEPVSPAGRLFREPHFSCYIVCTLGVAEPVDLPAVRAGIEATLARHPRFCSIQVLDELDKSAKPMWVRTKVNLDDHIIVPDLGPTDTSADPEKAVEDYVSSLSTPSMPMDRSRPLWELHVLGFPTAEAAATVALRMHHSLGDGVSLLSLLIACTRRADDPDAIPALPSSAAGRRRREGPLHALPPRPPARRGRARARRVGAVLPRARVAHGGGRGLLHPHGGVAHGRRPHGAQGRRGRRVPAQALRESHDQPRRRQEHQERRGMHCK

SEQ ID NO: 52779 - protein, 112 aa, Oryza sativa
MNPNYTEFKFPQIKAHPWHKIFHKRMPPEAIDLASRLLQYSPSLRCTALDACAHSFFDELREPNARLPNGRPFPPLFNFKHELASASPELIHRLIPDHIRRQHGLNFAHAGS

SEQ ID NO: 52780 - protein, 403 aa, Oryza sativa
MGQDEVEVGAEKKDQELPEVEVVEEEEEEGSKKAAAGCDYCGDAAAVVYCRADAARLCLPCDRHVHGANGVCSRHARAPLCAACAAAGAVFRRGAGGFLCSNCDFSRHRHGGERDPAAPLHDRSTVHPYTGCPSALDLAALLGISYSDKAAAATAAAGGDDGGWWAIWEEPQVLSLEDLIVPTTSCHGFEPLLTPSSPKIQNSPDGKVNEEVIRQLTELANSDGGGAQIWAHREAAQAGDHQLPSWGTTTQHNTGHGNFGTANSNEVATMPTPGYENGGWDNSDYPALNDPCKVEFTYEQPPASSAEACISSFVQMSELCPSMSNGSSMEETHQTNPGNGTPMQVLPKMPEFVPCPDRNLVISRYKEKRKTRRFDRQVRYESRKARADSRLRIKGRFAKVNQI

SEQ ID NO: 52781 - protein, 484 aa, Oryza sativa
MPPALTSNPPSFRPLSTPLTRRRAATTFLCRVGPGKPSKDTGADDEPKKRSFFADFGKLSDGRSLIPAFPPAAAGSLFAGGRGRKDPQTVFVAGATGQAGVRIAQTLLRQGFAVRAGVPDLASAQELARLASAYRLISPTEARRLNAVESDFEDPEAIAKSIGPATKVVVTVGAAEKGPDGGVVTTDEALRVVQAADLAGVTHVVVVYDLGAGDPSGESTYNVLDGFTSFFSNLFSRVQSLPLNEFLAKVVETDVRYTLIKTSLTDDYSPESTYGLVLAKEGASSTTSSTETGKVSKLQIAGLVADVFSNVAVAENKVVQVSTSSSVTSKTIEEAFSAIPEDSRRKEYQDAVAKAQAEEETRASQRTRQAEEDTTTVKAGGKKTPSDEAAASEAQASLENLLSRAKGFGTDFSWEKLSTQLAGVATQDSDEVEPKAKKLAPQRAVVKPAAQKTRPTPKQPESKPDVRPVFGGLFKQETIFVDED

SEQ ID NO: 52782 - protein, 443 aa, Oryza sativa
MQNLSLKFFPLLGPGSVDFESLVPIPSTIKVLLLQPVSNWQAKRLFPISTSLKTSISNTLESLSLVLDIITDELVAFITGSLHNLVELCLEDNPMKEPDLHNDLTNVGLQALGLCHNLAHLSLTRGKQNCSSTFRRVTDFGIMMLADGCKQLKTIRLAGFSKVRDAGYAALLQSCKDLKKFEVSTGYLSDLTCLDLDEAAPKITEVRLLCCSLLTSETAISLSSCTKLEVLDLSGCRSIADSGLASISQLSKLTLLDLAGADITDAGLSALGNGRCPMSSLCLRGCKRISNNGIASLLCGSGTINKTLISLDIGNVPRISGRAVTLIAKNCEQISSLCLRNCLLINDSSLETLGSMRHNLGKSSLRMLDLSYCSRLSRNFLGLFEPPFFRGLRWLGVGKNMLERRGCSPTVAELLERKPGLTVCGNACEMGCRNQCHPDFRRQ

SEQ ID NO: 52783 - protein, 291 aa, Oryza sativa
MGIPAASVAARTAVGAALAAVIAARAVRRRSLDGSGGAAGFVVMAIHLACGYRYGALVLAFFFTSSKATKIGADRKRRIEDDFKEGGQRNWIQVLANSLIATILVIILATMTGGQDQCLDSHESKVITGIIGGIIGHYCCCNGDTWSSELGVLSDEQPRLITTLKPVRKGTNGGVTLQGLLAATAGGLIIGLTFVFVGLLTVECSFDVALRQLLVIPISATAGLLGSLIDSVLGATLQFSGYCSVRKKVVSKRGPTVTKISGMTILDNDAVNAVSVLLTTAVTAYACIRIF

SEQ ID NO: 52784 - protein, 284 aa, Oryza sativa
MDKKKAVDDTEPGPAPSRPVDRFGFIKPEQGTSPDGISKSKFIHERERERDGRRIKKWRKMIGVGGSDWKHYVRRNPHVVKRRIRKGIPDCLRGLVWQLISGSRDLLLMNPGVYETLVIYETSASELEIIRDISRTFPSHIFFQQRHGPGQRSLYNVLKAYSVYDRDVGYVQGMGFLAGLLLLYMSEEDAFWLLVALLKGAVHAPMEGLYQAGLPLVQQYLYQFEKLVLEQMPQLGQHFIEEMINPSMYASQWFITVFSYSFPFHLTLRVWDVFLYEVRILPAI

SEQ ID NO: 52785 - protein, 552 aa, Oryza sativa
MVAAALDAMAGTRWGRWLGLVTAVWVQCISGNNYTFSNYSHSIKTLMGLTQLQLNGLSVAKDVGKAFGLLAGLASDRVPTWLLLAVGSLEGLLGYGAQWLVVSRAVAPLPYWQMCVFLCLGGNSTTWMNTAVLVTCIRNFRRSRGPVSGLLKGYVGLSTAIFTDVCSALFADDPASFLVMLAVVPAAVCAVAMVFLREGEVGGGGADGREEEEEDGWCFAAINTLAVAIALYLLAADLTGVGGGGGVVSAVFVAVLLVLLASPAAVPAHVAWKSWMKTRKLANADVEEAEECASAPLLVAKATAAAAAEARGPGEKPVLGEEHTIAQALMSLNFWLMFASFLMGVGTGLAVMNNLGQMGVAMGYSDVSLFVSMTSIWGFFGRIASGTISEHFIKTRAIPRPLWNAASQILMAVGYVVMAVGMPGSLFVGSVVVGICYGVRLAVTVPTASELFGLKYYGLIYNILILNLPLGSFLFSGLLAGLLYDAQATKVPGGGNTCVGAHCYRLVFVVMAIACVVGFGLDVLLCFRTKRVYAKIHESKRQSRSAVVQRVS

SEQ ID NO: 52786 - protein, 279 aa, Oryza sativa; identical to SEQ ID NO: 32392

SEQ ID NO: 52787 - protein, 217 aa, Oryza sativa
MSSLVKTVKKGLAPHLKALMGPWWFSQFDPALEVAQAARHSFEAAFPQSDKRLDALMLCVKETFLHLNENLKLTTQALSDKATPMDELEDMHQRVISSSLLAMATLIDILLGVKLQNCVRDNSSSENTSLSKVLSGTLSSAESAFSMNKYFLDFLKSKSAIIRSATYSLLASYIKHVSHVFNEEAMKPVLALSTKWMLWIQASLIPSPGSVFGVYTI

SEQ ID NO: 52788 - protein, 224 aa, Oryza sativa
MGGILGRHDTMKRSSHGSKLETKMVESMQQRASHGTSLKSFDSIIMKFPKIDESLRKCKIIFEQFDEDSNGEIDKQELKHCFQKLEISFTEEEINDLFEACDINEDMGMKFNEFIVFLCLIYLLNEPTVSEAKIKMGLGNLEATFETLVDAFVFLDKNKDGYVSKEEMVQSMNETATGERSSGRIAMKRFEEMDWDKNGMVTFKEFLFAFTRWVGIDENEDDNE

SEQ ID NO: 52789 - protein, 49 aa, Oryza sativa; identical to SEQ ID NO: 48643

SEQ ID NO: 52790 - protein, 426 aa, Oryza sativa
MAAALAFPTCCCCRRPSLRPSAGRRGRRPVARCALPSSENSFSWKEYAISVALSAGLITGAPTLGWPAHASPLEPVIPDVSVLISGPPIKDPGALLRYALPIDNKAVREVQKPLEDITDSLKIAGVRALDSVERNVRQASRALSNGRNLILGGLAESKRANGEELLDKLAVGLDELQRIVEDRNRDAVAPKQKELLQYVGTVEEDMVDGFPYEVPEEYSSMPLLKGRATVDMKVKIKDNPNLEDCVFRIVLDGYNAPVTAGNFLDLVERKFYDGMEIQRADGFVVQTGDPEGPAEGFIDPSTGKVRTIPLELMVDGDKAPVYGETLEELGRYKAQTKLPFNAFGTMAMARDEFDDNSASSQIFWLLKESELTPSNANILDGRYAVFGYVTENEDYLADLKVGDVIESIQVVSGLDNLANPSYKIVG

SEQ ID NO: 52791 - protein, 324 aa, Oryza sativa; identical to SEQ ID NO: 30036

SEQ ID NO: 52792 - protein, 155 aa, Oryza sativa
MVLWKQHYLMLVHLNSLRNPGGLPNWLGNVVVSVAIAIVICFTCVYLLSYVHISDCYTCPVHEIASIQKGMKRASRHFWQIIDFVLERGIYQSIIYILVLLQYKEIKFMLLGALFIQMYKNVGVMWQFEQYWTLLLMAFQLADDCSYMLMASLYV

SEQ ID NO: 52793 - protein, 521 aa, Oryza sativa
MLGVANDVGENVGLVPGVLANRLPPWLILLIGSACALLGFGTLWLAVTKTLVMPYWVLCIALCIGTNSSAWLGTAALVTNMRNFPLSRGTVAGLIKGYVAVSAAVYTETFNGMLQNSPTNLLLLLALGIPTACVLVMCFVRPCTPSLDEDNAAEHSHFMFTQISSVVLGVYLMVATILGDTLKLSDAITYLLFGIMILLLLSPLAIPIKMTIYPNKPKREKTSTLALSYSTDSLSGPDQENSEPLLGGTSTFVTGANDSDEATDVDLLLAEGEGAVNLKKKRGPRRGDDFTFREALVKADFWLLFIVYFCGVGTGVTVLNNLAQVGMAVGADDTTILLCLFGFCNFVGRILGGSVSEYFVRSRMLPRPFWMMCTQIIMVITFLLFATGLHSLIYVSTTFLGICYGVQFAVMIPTVSELFGLKDFGLMYNFMLLVNPLGAFFFSALLAGYIYDKEAAKQQPGVLEPSTCLGPDCFRLTFYVCAIVCCCGTLVSVVFIARIKPVYQMLYASGSFRHPRSQQLH

SEQ ID NO: 52794 - protein, 284 aa, Oryza sativa
MALALLSPSSASAHRLPRPISSPPLGRAASATSIGSSFFPLCSSPPSSGSCSLRRASSAGGASEPEASGATSLDADLLRRVAGAADAGEALDIVAESAGGTGGLDASDCNAIVAAALDRGNVELALSVFEAMRSGFARAGAWRWARPDVRTYALLVQRLAAALRVSDALRIIDYVSRAGISSAEEVPFGMIIRCPSCMVAVAVAQPQHGTQTVSCSKCRYQYELFSGDIMSIESEEVRISSCRTQHGHFSFGQGIAIYKCDKRRSSSCCALYCDSHTFRNSPYP

SEQ ID NO: 52795 - protein, 926 aa, Oryza sativa
MPSRMMQAFAQEASDFDRQMGCMAGMFQIFDRRRLLTARQRGGARGTAPPGSHVLPNSNSNVSIQNPVASNNTLDKTFSKSMTENSSLSMESSRASSSSSSCSSFSSTDINRPIQQELSYINKERFAGKPPRSSQTKSVKCSKTEAKTKDPHTGFRDIVKESINRETHGMTIKTSTKESRKGLHKDSPRPLLISKSTDGTYVIGIDRSTGVPGYVHESSRPPRFSCDDRQLLRSVEAQDSKKPSAKLKELPRLSLDSRKESMNPCSRLKNSGYIRTDDNLLDVLKHQESPSHQRASSVVAKLMGLEGTTPDIHETARSPTPVHGTQIDQPSHCQRIKNQDHSVPVQKNHSPVLKTNPSPRIIPEAAPWRQNERAVTGRAAEVKPRTASIYADIQRRLRGLELSECNKELRALRILSTLHKKDGPSQSDNNPELTAIQKKASEQIVDSENFQSPIVIMKPARCITKPDASDTLVAPLSRPKGIRRLRHEETSFTRKNENSDSKRNHSPNESAHSSGEEPVNSARSPRLSSSLSPRLAQKKADSERRSRPPVLPTSPGKKSKETVSPRGRLRSRHSQTKSNSDNDNVLHIPETKINLAKQIDVGVVDHPNPLNANSPYIHQSKIASTPNREEMPTILPADKKKIHPQENIPSPVSVLDATFYHEGSSPSLKRISDSFKDGETHTSDESWNPTSLPDTPPSKASNDGNQIKAENMKALIQKLELLQMLSEEALKTDDTFSSVAANKDHQYLYEILSASGILHNKLNFQMMPHQLRPSSYPINPELFLILEQAKPDEEKLHRRLIFDLANELLAQQMDANHTVNSSVQFFQSKKLSGWQLFKDLCAEIDMIQSRSSMIRCSEEEDSRLAEDAMQGMKEWKSSDSERQGIVLAIEKSIFKDLIDEIISGVDKGKVHLTQWKLRRQLSFISI

SEQ ID NO: 52796 - protein, 245 aa, Oryza sativa
MPFWQNRSSSCIQQQSLIVNTHLLFPHDHSLSIVRLKQVYKILQYIEAYQEEHKLGPMPIILCGDWNGSKRGQVYKFLRSQGFVSSYDTAHQYSDSEEDAHKWVSHRNHRGNICGVDFIWLLNPNKSRKPLKTSWNEAVFGIIKYLLLQVASLSEENAFALLKADSPDDQITYSSFCQALCQLGMVHPDRLNSEEIKDLWSEADHDGDDIVDYKEFQRCIWSPTCCSQEEEDERNRHLRWKPCHV

SEQ ID NO: 52797 - protein, 712 aa, Oryza sativa
MAARALLSRLRFAPLSHHHHRHLGRALSAAATADPPPDESPPPPPHPPPPPTPPSNSKLFVAGLSWSADERSLTDAFSSFGTVTEDGVRGRCSMKRLGGGSGCSARARPRQMFDEMPVRDLVACSAAIYRHAKSGLFGEAVRLFAGMMRVGVSPNSFTLVGALIAAAGMGNLVLAECIHGWAMKSLLESNPFVRTALLDSYAKCGRPTKAWALFGEMRDPGIVTWNALISGLVHNDLFEEALLVFKRLLFSFGPVHNVVTMISIAQASAGCGDLGLCESAHAYSVKIGLDSDVSVTNSILGMYLSFGSLAIGREIFKKIAVNDVVSWTMMMGFLLEEAQAIEVIHMFVQMRLSGIVPDRVALVTVAQACAHLGDGRIGKLVHNEIVICGFSGELPAVNSLITMYSKCEDLSSARLLFDGTMEKSLVSWTAMVSAYIENGYALEGMYLFAKMRHEGSFMIDSVTLVTLLLACYEVAKFELCIQLHAYCYKSGLCLYKPVLNTLIAVYGKCGYATLAHKVFDEMISRNAVSWNTMILSYGVNGQGEKAVSLFNEMEKSSEDQDSVTYLNTLLACSHSGLVDDGMLVFRRMVNDKGIIPCPEHVGCIVDMLARAGRLEEAAGVASLTHNKLGANAWKALMGGGHLHGDMKFTKVAAKKVLTTESFDYGHVVLLSNAYASSGKYRAAESVRSCYAKRITRKTLGLSSIEIVPYSRR

SEQ ID NO: 52798 - protein, 485 aa, Oryza sativa
MEMESKYAALRRAAEEAAAVDAHAHNLVADGSAFPFLRCFSEADAADALALAPHTLSFKRSLRDIAALYNCEASLEKVEEFRRAEGLSSISSKCFKAANLSAILIDDGIDFDKMLELEAHKAFAPTVGRILRIEKLAETIINDESFSASSWTLDSFTEIFVTKLKSVANKIVGLKSIAAYRSGLEIDPNISKTDAEDGLRKELSGQRPLRITNKNLIDYLFTCSLEIAVSYHLPMQIHTGFGDKDLDLRKCNPLHLRAVLEDTRFSKCQIVLLHASYPFSKEASYLASVYSQVYLDFGLAIPKLSVQGMTSSIKELLELAPIKKVMFSTDGYAFPETYYLGARRARDVVYRVLSAACEDGDLSIQEAIEAVEDIFRRNALYLYKLNVANGSVGQITAIADNGIPLSEQDVLFVRVVWIDTSGQHRCRVVPAGRFYEIARKKGIGLTFASMGMTSFTDGPADGTNLTGVGEIRLMPDMSTLLRLPW

SEQ ID NO: 52799 - protein, 63 aa, Oryza sativa
MERKERRGLLALPRRLLACAGRTSRRRRRKGDMRWRRFLLGGGEGAIGGGLEVAAHGPWAVER

SEQ ID NO: 52800 - protein, 704 aa, Oryza sativa
MLPDGGADDEERWLAEGIAGVQQNAFYMHRALDSNNLKDALKYSAQMLSELRTSRLSPHKYYDLYMRAFDEMRKLEMFFREETRRGSCSVVDLYELVQHAGNVLPRLYLLCTVGSVYIKSKEAPAKDVLKDLVEMCRGIQHPLRGLFLRSYLSQISRDKLPDIGSEYEGDADSINVAVEFVLQNFIEMNKLWVRMQHQGPVREKEKRGKERNELRDLVGKNLHVLSQIEGVDLDMYKETVLPRILEQVVNCKDELAQFYLMDCIIQVFPDEYHLQTLETLLSAFPQLQPNVDIKTVLSQLMDRLSSYAAASPEVLPEFLQVEAFAKFSNAIGKVIEAQVDMPVVGAVTLYVSLLTFTLRVHPDRLDYVDQVLGACVKKLSGNAKLEDSRATKQIVALLSAPLEKYSNIVTALELSNYPRVMDYLDNSTTKVMALVIIQSIMKNTTCISTSDKIEALFDLIKGLIKDMDGAQNDELDDEDFKEEQNSVARLIHMLHNDDHEEMLKILCTVQKHILQGGPKRLPFTVPSLVFSALKLVRRLQGQDGDVIGEEVPATPKKIFQILHQTIEALSCVPSPELALRLYLQCAEAANDCDLEPVAYEFFTQAFILYEEEIADSKAQITAIHLIIGTLQRMNIFGVENRDTLTHKTTGYSAKLLKKPDQCRAVYACSHLFWTDDQDGIMDGERVLLCLKACLKNCKCRSTDG

SEQ ID NO: 52801 - protein, 140 aa, Oryza sativa
MAAAAALTVLPRAAGVLRLSQHGRSASRLLCAAAGDGEASPAPRAGRLVLYTKPGCCLCDGLKEKLQAAFLLAGTPYSLASLELQERDITTNPDWEQMYQYEIPVLAKVLPDGSEEKLPRLSPRLSVELVQKKVFSAFDQ

SEQ ID NO: 52802 - protein, 326 aa, Oryza sativa; identical to SEQ ID NO: 32608

SEQ ID NO: 52803 - protein, 246 aa, Oryza sativa
MTPRAPSMRHHPPHLYLAEVVASWHPFHKKPCLSDRSTAPPSAHFADAPETQTQTPTPPLSASGGGGGGSFRWLGPRKRRRRGAGSRSVSGRSSDRRRSGTCSDFHVTCGAGGGGATDSSGEMWASDVGEVRMRDVPMATEFGPAAPVGGAGSGSGGTGAAAEVAAADSGYGSEPGYRGDVELGYGDEIDEEEEDGRQQLFFWGEEIGDCIADMNKMGIVGDNNFGEQKSHHRCRRKKHDVRMLDP

SEQ ID NO: 52804 - protein, 135 aa, Oryza sativa
MAGRGKAIGAGAAKKATSRSSKAGLQFPVGRIARFLKAGKYAERVGAGAPVYLAAVLEYLAAEVLELAGNAARDNKKTRIVPRHIQLAVRNDEELTKLLGGATIASGGVMPNIHQHLLPKKAGSSKASTVDDDDN

SEQ ID NO: 52805 - protein, 809 aa, Oryza sativa; identical to SEQ ID NO: 42835

SEQ ID NO: 52806 - protein, 421 aa, Oryza sativa
MFVCLLHCCSAWFVVYYFVVYTYTDVQTIFLQNRARNPMSGGYSQQGYRPPRPQSNWGPHGGAPMQQPGYGYMQPGAYPGAPPQYGAPQQPYGSYPPASGGYQTGWDQSSNQQSQQAPPGTGYDYYNQQQQPQQQQSAPGTAAPGDATSYNSSQPPAYASQGYDSSYAQQSGGQQQAYDYSSYYQTQGQQQGYSQQTGYDQQGYGTSGYGSAANSTQDGSAPSYGAQGVAGQASPGQQTSTPAAGSHPGYSSQPPTSAASSYPVQGSAPQSGYGAPPPQTGYGTQPQPQGGYSQGSYGAPPQGQKAPPNTSPYGQAPPPGSAPGGYGQYGYSQNQQGYGAPPPYPGAPAASHPGYGQQQSYGDPYGSGSYGQPAAYSTEATTAAASQDQSASAPATGAAPATTAAPAPTAPENSGAQSPAS

SEQ ID NO: 52807 - protein, 25 aa, Oryza sativa
MLVWRRLPEVLPNQRWKMAHLQKSF

SEQ ID NO: 52808 - protein, 436 aa, Oryza sativa
MDVAMALAVLFFCLLLLSSAAITFLLLRHCLSGLRRRHRAAAAADVDAEAAEGGAGARQLMPPCSPPPQQELPLLRPAAKLVPSTKEEGEPWKLTWREVEALTGGFDEAAVVGRGGSSTVYLASSCRVAVVSPPVAVKVHRWCGGERWLRAFRQELDLLRRLRHPHIVSLLAYSDDHEEGGALVLEYLSGGTLADRLHGGASPPLPWRHRMRVVHDVAGALEHLHDGAPPVVHGDVSASNVLLDGRGLGARLCDLGSACEGSPPPSRPPGRPSARRATSTPSSSAPASSPRSPTSTASACFCSRPSPARRPPGYPARMAAPAGATSRRGCCRVSGRRGWTGSPTAGWATTTTRRRPATWRGSPSSAWRRSRASGRRWRRCARPSRRRRRRPSPLLITTCTMPPIPHDGYRIAVYFYFVDDLLSYFCVCVFYYWQGN

SEQ ID NO: 52809 - protein, 621 aa, Oryza sativa
MEATGAEATLSQVTAVDGEDNLFQDKESRATAKERGEAAVFGLENIVTANGATSAADLAPPKDVVDEWPEPKQTHTFFFVRICSYEDPSLKAKLEQADKECQKKIQARSHIFEALRTKRSERSNIISELKPLAAENKQYNEVVSGKLKEIEPLQKSLGKFRSENNAMRAQGAGLCSSIEELDQLIKSLNDRISHESISLDEEKRLVKEIKQLNGTRSKVIENAAKRAKMQDTVVERGTIHDQVKQTGVGIDEVKRDRQAVRDKIKVLEDQIHAVDGEIAALQDDLTAATARKDKAFEALNELRKTRDLNNTSFHQYRTISNSVRDLSARGEVEAVQQLCQNEVEKFMAQWCSSKSFREDYEKRILVSLNSRQLSRDGRMRNPDEKPIVLETQVAPPAEQEPAPLKKPAKQAKEAPAPRADVTPKDEIRAKAPAKAAKAKQPLDIDDIPDVHDDEPPKEKTKPKVDEAKLKEMKRQEEIEKNKLALERKKKQAEKQAMKAAARAEKEAEKKLKEKEKKARKRSATAGGAESEEAAESDAKSDEAEAQEEEPAAPVTIKKNARHRSTVTKTKTPLPKAVLKRKKSQAFWSWGAPMAALAAALVALLGALVYYQYYYLPASTSN

SEQ ID NO: 52810 - protein, 250 aa, Oryza sativa
MRLLSGASASRIPCPLLSLARARARCLPVPASATACRAASSSAAAAAGDGGALKPWLFVGLGNPGKVYQGTRHNVGFEMIDVIAEAEGISLSSMQFKAMVGKGRIGDAPIMLAKPQTFMNASGESVGQLVSYFKIPLNQVLVMYDDLDLPFAKLRLLPKGGHGGHNGVRSIINHLKQNRDFPRLRIGIGRPPGKMDPANFVLRPFNRKEQEELDFAFHRGLEAVRIMALEGFNKSATYVNTAQSSEMLNR

SEQ ID NO: 52811 - protein, 980 aa, Oryza sativa
MDDLEQAILLASDSPAAAAASPAVRAEALAYCARARDETPPSSLLHLCLYGLASSPHAHVHFWCLQTIHDALLLRRRLALPDDLALLRSSLLSLAVSSNAASPPFLRNKLAQLLALLVRFEYPHVYPSYFLDLIPPSPPLPGPTDMFARVLVSLDDDLLSQDYPRNAEEASDAGRVKDAMRAQCVPQIARHWHEAAVSLRAADPAVAAVALDAARRCISWIDVSLVANDVFVPLLFDIALSPGSVAPLAAAAVGCLSAVAAKRMDARAKVALLRSLMSAQKGFGSPDSGLKMAHLVTAYAVEALECYRKLGSSDADGAAALEMLEEVLPAVFAAAESGDDDEVDSGSVLEFLSGYVSTMKAPTEKQLGHLGQILEVVRMQMSYDPVYRGHLDVLDKIGKEEEDLMAEQRKDLIALFRSICRVAPGATQLFIRGLLVTALSSAEVSVEDVEVALTLFYRLGEIVGEEEIRTGAGLIRELVPMLLSARFSCHTHRLVALVYLDTISRYIKFMQENDQYVPHLLTVFLDERGIHHQNAHVSCHAGYLLMRAIRLLKAKLVPYLDTILQSLQDALVQFTATDWANKDIKFSSSEDGSQIFEAVGLLIGIEEVSPDKQVQCLTALLNPLCQQIESLVMDAKAQGLEESSPRAIGLQQIIVALTMISKGFNERLVMGSRPTLGVMFKKTLDVVLQVLISFPNVKPLRSKIISFLHRMVEILGISVLPCIPIALRQLLVDNEAKDMSEFLYLINQIICKFKSSANALLEDVFPAIASHLSVILSHDAFSNGFASNTEEMRELQELEKRFYAFLLHIATHDLSTVLLTPSCRHYLENIMQLLLITSCSHKEISHRKACVQTFVNLIKDWCSSSEIEDKLPGFRVFMIEKFATGCCLQSVLDKSFNFRDGISIALFGEIMMAQKVMYERFGENFVVNFVTKLREAHCPPDLAEQYYQKLQGNDIKAFKSFYESLVMKIRQQQNGSLVFR

SEQ ID NO: 52812 - protein, 490 aa, Oryza sativa; identical to SEQ ID NO: 40586

SEQ ID NO: 52813 - protein, 71 aa, Oryza sativa
MRRPSRLPVVYPSSSPNKCHLRYLVVVSPPSPCLLCIYYTHYVVCCIAAPYDHTGSWIHLLGDEINCSPSC

SEQ ID NO: 52814 - protein, 380 aa, Oryza sativa
MCSGPRKPSTPPLPQQQKEATVMAASLLLELAAADDVAAVRRVVEEEKVSLGVAGLWYGPSASGVARLGMERRTAAMVAALYGSTGVLGYVVAAAPAEAARASETDGATPLHMAAAGGAANAVAATRLLLAAGASVDALSASGLRAGDLLPRATAAEKAIRLLLKSPAVSPSSSPKKSASPPSPPPPQEAKKEYPPDLTLPDLKSGLFSTDEFRMYSFKVKPCSRAYSHDWTECPFVHPGENARRRDPRRYSYSCVPCPEFRKGGSCRKGDACEYAHGVFECWLHPAQYRTRLCKDEVGCARRICFFAHKPDELRAVNPSAVSVVRVPRPIRHAGGDARRGGGAGRVMGELSCQGRPRRRRHIRAVAGAGADGGMIIRGS

SEQ ID NO: 52815 - protein, 427 aa, Oryza sativa
MAERKEGEGKVVVVEEEEEERRLRGALRSLQQEAGVLERLVYKHRNQHRGAAYFQYLLKVRRDVRLLLAAGLGDVLTAVFPVLASRKPANTILAVNRQSKKKPGANHCHHERLLGVARLLSEMAEPVMMGAVQISFLLARSFFVDLCTAILALLARVRALVQQMLLDVVSVYNKASDLIDRKQSVKISIGGAQAFREYYPSSNDARTFLECVWVKDKFVLHENTKGNCEKTQAEDQKSCASESAVLYETLGQVSEDMENAEGLNSPMKLPDATLANQPEKTHCHRDEDSQSRRQLVNDNNSNSLSDAVATHVHSTPCPDVKPETKKRVAFIAVGNPKATASSIGTTLTKKQRLDVIPRATAEPEDLYVKPETKKRVAFIAVGNPKATASSSGTTLTKKQRLEVIPRATAEPEDLYGKFSEDTDKSIF

SEQ ID NO: 52816 - protein, 225 aa, Oryza sativa
MHFAAGLGSEECVRALAEAGADVGRPERAGGGLTPLHIAVGYGRPAAVRALLELGAEPEAPDGQGRTPLELVQDVLAKTPKGNPATFERRLALEAAAKELEKAVYEWGEVEKVVDGRGEGKWREYLVEWRDGGDREWVRAAWVAEDLVKDFDAGLEYAVAEAVVNKREAAEGEGKWEYLVKWVDIEEATWEPAENVDAELLQEFEQRQSGVAAGGDAPPPPPVAG

SEQ ID NO: 52817 - protein, 423 aa, Oryza sativa
MMASLHRPLSAMAVAAFAAVSSLELPDRLSHHKLPDTTVDAEAVVSIPASRPDVSAAPSASAMSRLHFLPRNLQTSHPAKAPPASLPVIHTVYHYAKFAKYYSEEEAVTTAMPSSSSPDVLYLWHLPDPKVCGDSHGKSQTVVVLLGWLGSRQKHLKRYADWYTSRGYHAVTFTLPMSDIVSYNVGGKAEKNVEMLSEHLADWVSEEDGKKIVFHTFSNTGWLCYGVILENLQRQDPSAMDKIKGCVVDSAPVAVPDSQVWASGFSAAIMKKHSVAAKGVKPNDARPDVLVVESNKDHPKPAVSEAILLSALEKLFDVVLNYPAINRKLSGVMELLSSKQPKCPQLYIYSSADRVIPAKSVESFVESQRRAGHEVRACDFVSSPHVDHYRSNPELYTSQLTEFMEDCVLARCQAKEEEEEVTN

SEQ ID NO: 52818 - protein, 539 aa, Oryza sativa
MDGSGSWDAIDWNQIKEPRPPRSSSRGMEDFLLEDEEVYAQGHGVVLLNTDEAGILSVTNFRLLFVSQATKGVIELGTIPLTAIEKINDDVKLQPLPRQHDKKQPRELLQVIGKDMRVIVFDFLPKTKQKNEVFDALRRYSKPTHLWDLYAFSCDPSTVYQKSDPKMRLLKEYHRLFRKWFPHSGSEFEKDLRNEWWRVSKVNSTYSLCSTYPSALIVPRSISDEDLLQASSFRSGRRLPVISWCDPGSGAVLARSSQPLVGLMMNFRNNTDEKLVSALCTQIIDATGSLRKLYIVDARPRANALANGAKGGGSESASNYPRSEVLFLGIQNIHTMRDSLFRLRDYVDTHGSVSSNGTSSAVSLVGDRRNRGSTWGGGNLNSMTQFSSMLGEWLNHIQSIMVGASWIAAQIVQESASVLVHCSDGWDRTTQLVALACLLLDPYYRTFNGFQALVEKDWLAFGHPFAERMGVPTITDNNSGSQFELLRQPSLGTLSNSPNRGALGSSVSTSNTTSGQSQTSNNSSPILLQVIYSFLGALC

SEQ ID NO: 52819 - protein, 337 aa, Oryza sativa
MRRRHREQLPPGADRERLLAEEVLYLHSLWRRAAPAPIPPRGSGSVAALRRVDRRRRRRLERRAQEQQREESGPEWPLAPSPPASPTTWHDNKAASSPAQRPPQQKQPSPGSLSQRAALRAAEEFFSNRGSDDDDEVVEEEGSESEGEEAAGFFMGLFERDAALRGHYERGWEGGEFVCMACVGRKGKARRFAGCVGLVQHARAATRCGRPRAHRAFAAAICRVLGWDIDRMPSVVIDPRGTLGQALAAAEAAAAVAAQENNVDAVEKTISSEDQVAEKEDVETGKNDGSLSDVDAMKENSNVGKNSSSINDNNGDVHEKGNGGAYEKDIICCIHVN

SEQ ID NO: 52820 - protein, 104 aa, Oryza sativa
MCMHSCSTPLSNLVPSSIYFTLRYYLLSTSHTLLLLLLLLLLLLLLLLLLLLLLLLLLFAKKKNFSCYSSMKCASVSKRKKKERKKDSALNYISNVRYRFIEKW

SEQ ID NO: 52821 - protein, 291 aa, Oryza sativa; identical to SEQ ID NO: 32119

SEQ ID NO: 52822 - protein, 646 aa, Oryza sativa
MAVGATATKLHMPSAGGRRPSLFHLAAVAVLCTVSYLIGIWHHGGFSASPAGGVASSVSIATTASVSCVSPTPTLLGGGGGGGDSSSSAPLDFAAHHTAEGMEVASGQVHRTYEACPAKYSEYTPCEDVERSLRFPRDRLVYRERHCPSEGERLRCLVPAPQGYRNPFPWPTSRDVAWFANVPHKELTVEKAVQNWIRVEGEKFRFPGGGTMFPHGAGAYIDDIGKIIPLHDGSIRTALDTGCGVASWGAYLLSRNILAMSFAPRDSHEAQVQFALERGVPAMIGVLSSNRLTYPARAFDMAHCSRCLIPWQLYDGLYLAEVDRILRPGGYWILSGPPINWKKHWKGWQRTKEGLNAEQQAIEAVAKSLCWKKITLKEVGDIAIWQKPTNHIHCKASRKVVKSPPFCSNKNPDAAWYDKMEACITPLPEVSDIKEIAGGQLKKWPERLTAVPPRIASGSIEGVTDEMFVEDTKLWQKRVGHYKSVISQFGQKGRYRNLLDMNARFGGFAAALVDDPVWVMNMVPTVGNSTTLGVIYERGLIGSYQDWCEGMSTYPRTYDLIHADSVFTLYKDRCQMDNILLEMDRILRPEGTVIIRDDVDMMVKIKSITDGMRWNSQIVDHEDGPLVREKLLLVVKTYWTLGEEKE

SEQ ID NO: 52823 - protein, 488 aa, Oryza sativa; identical to SEQ ID NO: 42623

SEQ ID NO: 52824 - protein, 678 aa, Oryza sativa
MGSVADDAEITGPLLAAAAGGGGDSAAAAGVERVPAWREQVTVRGIVVSAVLGVLFCLITHKLNLTVGVIPSLNVSAGLLGYFLVRSWTAVLGRLGFVIAPFTKQENTVIQTCVVACYGLAFSGGFGSYMLAMDQKTYELIGPDYPGNRAIDVMNPSLGWMIGFMFVVSFLGLFSLVALRKVMVIDYKLTYPSGTATAMLINSFHTTSGAELAEKQVSCLGKYLSISFFWNCFKWFFSGVGDSCGFDNFPSLGLAAFKNTFYFDFSPTYIGCGLICPHIVNCSTLLGAIISWGFLWPYISTKAGDWYPANLGSNDFKGLYGYKVFISVSVILGDGLYNLIKIIYATIKEVMNARSKQGRLPLVRVHDDDEGSKLSAEEKLRNDTFLKDRIPSWLAGSGYVGLAAISTATVPMIFPQVKWYLVLCAYVVAPLLAFCNSYGCGLTDWNLASTYGKIGLFIFASLVGRSGGVIAGLAACGVMMSIVSTAADLMQDFRTGYLTISSPRSMFVSQLIGTTLGCIIAPLTFWLYWTAFDIGNPDGMFKAPYAVIYREMSILGVEGFSALPQHCLAICSVFFVAAILINLLRDVTPKSVSKFIPLPMAMAVPFYIGAYFAIDMFVGTVILFVWERVNRKESEDFAGAIASGLICGDGIWSVPSAILSIMRIDPPMCMYFKPSLTS

SEQ ID NO: 52825 - protein, 236 aa, Oryza sativa
MDVDFWGVVIEPCNKKEIFCPEDTLYHLTSVALDEAYGLKDSNVKVFVEVNDEKFAIGTLSSKRHPHIKVDFCFKKNFQLFHTSLISKVAFCGYQVKNLGKFTDSEGDESDEEVPPGIRLYPKLDDNMIKEAQKSKLPAKSATVASAMQKAFVKEIEHYEKSKADDDNNERYRDISVVGESTGNEDSSDDADYEGKSSDEEETTAKEGESTDEKETPAKEGESSDEEETPAKVCVD

SEQ ID NO: 52826 - protein, 397 aa, Oryza sativa
MRGGGGGGGGGGEEAGQKLKSMDVDKLENGGDKPALKYHGWRAMPFIIGNETFEKLGTLGTSANLLVYLTQVFHMRSVDAATLLNGLNGTTSLAPIIGAFLSDAYLGRYLALAIASVASLIGMFLLTMTAAADGLHPAECGVGETCSKATSGQFAVLFMSFAFLVLGSAGIRPCSMPFGADQFDPHTESGKRGINSFFNWYYFTFTSAMLVSATVIIYVQSNVSWPIGLGIPTALMLLACVLFFMGTRLYVRVTPEGSPFTSIVQVFAAAARKRSLKQPKDPKQNPWRLCSVQQVEEVKCLIRIVPVWSTGIIYYVAVVQQSTYVVLSALQSDRHLGRSFQIPAASFTVFAMLAQTLWIPIYDRLLVPRLRRVTGKDEGLTLLQGRGSGSRCRRWRW

SEQ ID NO: 52827 - protein, 191 aa, Oryza sativa
MQIRHALVHLITLGMVISSALMIWKGLIIMTGSESPLVVVLSESMGLGFERGDILFLQMSKHPIRTGDIVVFNDGREIPIVHRVIEVHERRDNAQVDFLTKGDNNPMDDRILYTHGQLWLQQHHIMGRAIGYLPKAGWVTLVMTEKPVIKTNQAANLQVMGCFNSKPNNAGAIRRRHGRVEVDVCAWIMSS

SEQ ID NO: 52828 - protein, 674 aa, Oryza sativa
MNPKLLFFPLLATLLLLCHHAHAVCEPATCGDLTIKYPFWLSGPDLNRSSLAIAACGHPSFELWCSRDGVASLRGSQILVLGIDYTNSSFVAGHKRVADGGDGVCRTDFNISSSLALSPFTISSSNRAICFLYSCNGTEPPEIDGLVNATISNCSKPIYAYLGGSYDRDKPPAIKAGNCTYSYLPVLWPESPVNLTAGTNYSPLFKKGFVLEWQKNGFGDCDACNASGGQCRYNNDSAAAFACLCSDGELRGTICAGSKKTGRRTILIVLTAAAAGLLLPCIYVLIWHGKGKQLRYFLYTKTSSTSERNIEALIISYGSIAPTRYKYSEVTKITSFLNYKLGEGGYGVVFKGRLQDGRLVAVKFLHDSKGNGEEFVNEVMSIGRTSHINIVSLFGFCLEGSKRALLYEYMPNGSLDDYIYSENPKEILGWEKLYGIAIGIARGLEYLHHSCNTRIIHFDIKPQNILLDQDFCPKIADFGLAKLCRTKESKLSMTGARGTIGFIAPEVIYRSFGIVSTKSDVYSYGMMLLEMVGGRKNAKSMVENSSEKYFPDWIYDHFALDDGLQACEVTSEVEQIAKKMTLIGLWCVQVLPMHRPTITQVLDMFERSLDELEMPPKQNFSELLEHPAQEINTESTSSTINTKAAQALSEVLRVEETSLVNSKDPTVTTNYAKR

SEQ ID NO: 52829 - protein, 66 aa, Oryza sativa
MVCFGFLVFYGCVFVSAAGRGELEGNGSSLQVEESWSGMASASEANGLCCHSRLTLEVLFFFSSYR

SEQ ID NO: 52830 - protein, 569 aa, Oryza sativa
MTLRPLNTERSFLLSSPKPHSPRDACSPPVRSPSSTRLLACRKLPSSSKPMATGAGVLERSLSFKNWEPTAAEEAAVAAPPPHDEAASRCINGARPGILLLQQSSKAKQGDAATSPAQAALIEFISPKPRSELDQAATKVQKLFKGHRTRRNLADCAIVVEELWWKTYDSACLNIKSISFFDEAKQETAASRWSRAGKRIAKVGKGLSKNEKAQKLALQHWLEAIDPRHRYGHNLHLYYDIWSASSSTEPFFYWLDVGAGRDMHHQKCPRSKLYSQLIMYLGPNEREAFEVVVEGGKLMYRKSGVLVNTTEDSKWIFVLSTTRSLYVGQKKKGKFQHSSFLAGAATTAAGRLVAKDGVLQAIWPYSGHYLPTEENFREFISFLEENSVDLADVKRCSVDDDEFPSFKKTEEKPEEAEKPTEPTHDEIMDSSQIELPEVDIVKEAVVENSEDTKVAPIMASRPSFKWATANGARIGCVRDYPADLQSMALEHVNLSPRVVPSPTTNRLPIPSPRPSPKIRLSPRLHYMGLPTPTGCKLPIPSPEIRRSPRDQFMGFQTPSVSLTLPKLGK

SEQ ID NO: 52831 - protein, 513 aa, Oryza sativa
MDEYHHRMGAAADFRRDLEDLVCDHLGGCFSPTSSSSSCSAAGGGVAAGHQPDEEPESSAARRRRRESRLLSRWVARQAEEVLSSMEREVERRNREAELLALARLHPVSTLDPSSFLLSSPTAPPPRPQAPSPTAPPSLLQMWRELEHRRSDADQPSDREPSPDTADRERVRQIARRLTANTDVPTAAAAAATTGEWLGGTERQRVRLVREWVQMASQPRDSRVASRRDDTAAGERERRGEPPRLRGRQARLDVITRMARERQRELQGISGYHIVSEFPHRSRNRIQGLLRGRFLRNVVLPVEEEGRPPSVAARELGQLRQSHRVSTLRSESAVSSEDVSRFDSSVAESVGVLGSDEPQQGAEVRALTGTENTTQIMLEDVGLQEADAENAAIESPSVALDNMVEMHETQVDNRLQDEAGRDARFWQPSLDDSLDRWPNETAEDAERNWEDNAEELHSETMEDDAREHDHLQDEHDEWHDDESHGTENWQDDFQDSPLDMGPIPRTENRFIPP

SEQ ID NO: 52832 - protein, 346 aa, Oryza sativa; identical to SEQ ID NO: 50715

SEQ ID NO: 52833 - protein, 304 aa, Oryza sativa
MRPPSSSATPGTGRVSAFTMRAVARMSRARWFIFLRRVYQYQNGPRSDLGSNPFNSPGWLALELGVIMAQMVVTTAVVATSPKERPAWPLRVWVAAYNVGNVLSLPLLYWRHRHSSSGARGGTLSDDPEMHGANDPLRNRSYLMNKARAFLELFFAMWFVMGNVWVFDARLGSFHRAPRLYALCIGLLAWNAVVYSLPFLLFLLLCCFVPAVGYALGYNMNSASVGRGASDEQLAALPQWRFKEPADAPRDRDHDDQECCICLAQYKEKEEVRQLPCTHMFHLKCVDRWLRIISSCPLCKQELS

SEQ ID NO: 52834 - protein, 355 aa, Oryza sativa
MAAMATTASSLLKTSFAGARLPAAARNPTVSVAPRTGGAICNSISSSSSTPPYDLNAIRFSPIKESIVSREMTRRYMTDMITYADTDVVVVGAGSAGLSCAYELSKDPSVSVAVIEQSVSPGGGAWLGGQLFSAMVVRKPAHLFLDELGVAYDEQEDYVVIKHAALFTSTVMSRLLARPNVKLFNAVAVEDLIVKEGRVGGVVTNWALVSMNHDTQSCMDPNVMESRVVVSSCGHDGPFGATGVKRLQDIGMIDAVPGMRALDMNTAEDEIVRLTREVVPGMIVTGMEVAEIDGAPRMGPTFGAMMISGQKAAHLALKALGRPNAIDGTIKKAAAAAAHPELILASKDDGEIVDA

SEQ ID NO: 52835 - protein, 542 aa, Oryza sativa
MSDMESMTALMESTGSKLQLLQRAFAELESQSAVSLNLKWKQLEDHFHGLEQSLKKKFDELKEQEKEFKETVTKSEQMLEQQEAAVVAKELTSLERLQQKRDAALAMIFGKSKLNLSMPVINPISKSVSNNAVLNGNIASLWPKPATAHGAYLQDGNTAVKPRSQLVILCEEMNVNGLHKFISDNRKDLTSIREEIPVALRGATDPYGLVLASLEDFYFGDNLILDGKKDGNLLGVRRTCLMLMESLAQLQTDATTGFISKGQMLTASIKERAKKIALEWKSKLDSLDFDASNGNCLEAHAFLQLLATFAIFSEFAEDELCKLLPSVSRRRQTPELCRILGLSQNMPGVIGVLIENGRTIDAINLAYAFELTDQFEPVELLKAYLKEVKSMSHVKTGKMSPGVQNEINERELSALKAVIKCIEEHKLDEKYPIDPLQRRVIQLEKAKADKRRAVEAGKPQSKRPRANGSVYAPHITSFSDKSFYQAAAPQRHSYPYERQYVYGAEAHHHPTMISSAPYGMSPAHTTYYGNGYQVQYQVPYIH

SEQ ID NO: 52836 - protein, 448 aa, Oryza sativa
MGGGVTERLPEGSSEPLLPTKREGGGGGGEFAGAVFNLSTTIVGAGIMALPATMKVLGLAPGLVAILLAALLTDASIELLVRSSRAAGAPSYGAVMGDAFGWWGRRLLQVCVVVNNIGVMIVYMIIIGDVLSGTSSGGEHHYGVLEGWFGPQWWNGRFFVLLVTTLVVFTPLACLKRVDSLSYTSAISVALAVVFVIITAGIAIVKLIKGQIPMPKLFPDVPDLASIWELFTAVPVLVTAYVCHYNVHPIHNELKDPSQIKPIVHTSLVLCSTVYITTSFFGYLLFGESTLSDVLANFDSNLGIPYSQMLNDAVRVSYAVHLMLVFPMIFHALRLNLDGLLFSSSSPMSSDNRRFSVMTAVLLLVIFLSANFIPSIWDAFQFTGATAAVCIAFIFPAAITLRDPHSIAKKWDKILSIFMIVLAIVSNVVAVYSDAYSMFHRKSSPSIA

SEQ ID NO: 52837 - protein, 448 aa, Oryza sativa
MAAGVTFNWIKTPLDIRRFHDFSSLSFRCRNTFGSIQPSWLTTDQEPSFSKVRVAADYSDSVPDSKYTRDRGYHPLEEVKERPKKKDLSLTDVETARTVVEANSKGLLVFPARVHNEPHGHVAWSDFQYIVDDYGDIFFQVPDSENILEDDAANNPVTVLIGMDGPIIGETSVVTSDFSDYMDVENFIDMPDENDSKIDTEITDILIEWGMPATMRAIHPIYFAKCLTKAVHDKHREKMDSPSNGVSIVGYLRPAFIEEESYLRSLFHGECNGDGYSSDWRDECKREPAPASGTNGLIDDDKSRFDFTNVGSSTDSTIYKLEIMTVELFSIYGKQLMIDPQDFQDAEPDILANSASEIINRIKENDDQCAMALRSLCHRKKGLTVEEASLISIDSLGIDVRAFSGLEARTVRFSFNAQALSERSAEKKIRRMLFPRRKNVKPSTEDEC

SEQ ID NO: 52838 - protein, 572 aa, Oryza sativa
MNSGGRSLLSSPLFASSSPAFRGGAAAASCSSSSSPSSSSRATVVPMVHDTGGGRASSTACHYSPSLVAAEPEEHVHGRSKDDDDDAAVSLMGEKALLELLLDMALEQHAPGKKLPAEEREESEFDIYLRDDKSHVLYHPEFSSTSVSSSPLSVKSSERSDLGTASAVLTKDVALLAEETDILATQLKASQLYSVDSSKSNEELQSKGQVFVRSTRLLERRSKRRYAPRASIADVSCSADNSKKKEKSKKYGRVLEPDEPFKLFLRDRETTEFLTAKEERHLFSKIQILMKIEEAHRKLEVQCGREPTLAEWAEAVGMSSKELQSSIRTGRRCREKMARSNFRLVIHVARKYEGYGLDIQDLVQDGCSGLMKTFEKFNPSKGCRFPTYAYWWIRQSIKKSIFKNSRLIRLPESVYALLRKVGKARMECIMEGEQPTNANVARRAGITIEKLAKLRAKTRKPRSMQDHVWSDEGVTFQEITEDPNVEPPDLSVDRMMMRQQVRDFLGILSPREKEIIEHRFGIHDGEPKTLHVIGDMFGLSKERIRQLQNRALEKLKRSASLQGFDVYFDLLT

SEQ ID NO: 52839 - protein, 492 aa, Oryza sativa; identical to SEQ ID NO: 42958

SEQ ID NO: 52840 - protein, 435 aa, Oryza sativa
MDSSILPALLIALFIPILLHLVTRFKYSSYNLPPGSLGFPFVGQSISFLRALRSNTDHQWYQGRIGKYGPVSKMWLFGSPAVLMAGPAANRFIFSNKDLLFTGTRSMNLLSGRNILMLSGEELKQVRGALQNFLSPEMVIRYVSKMDEEVRRHVKVNWVGHKTVKVLPLAKRLTLDIICSVIFGQEAGSVREALATDFPAMVRAALSIPVKIPFTRFSRGLSASQRIRKLLRGIARERETLLQQQQAHGASAADDFFTYMLALRAEGAHSLTVEDIVDNAIFLLIAGYETTSVLITFMLWHLDKEPEVLSKITEEQDEIARNKGPEDALTWDDVSRMKYTWKVAMETVRTIPPIFGSFRTATETSNTRAITFQKVGWYSQPNLLHIWMQIFSLSQAISTLLDSRTTLRFLLIALCHLGEVQECVLETSLQGLRHW

SEQ ID NO: 52841 - protein, 515 aa, Oryza sativa
MGEDGGVNSSSNSPAAAVGLVLVVAICTYLAVVATRKQKRRRRRRPPVVGTAFHQLYHVRRVHDYHTALSREHMTFRLLVPAGREQIYTCDPAVVEHILRTNFANYGKGSFNHGNMSDLFGDGIFAVDGDKWKQQRKIASYDFTTRALRDFSGDVFKRNAAKLAGVVSSHAASNQSMDFQGFLMRATMDSIFTIAFGQDLNTLDGSGEGRRFAAAFDDASEFTMLRYLNPFWKLSRLLNVGAEAMLKERIKVVDGFVYKLIRDRSDELSNTKAHDTDSRQDILTRFIQATTSDSGTVDYKYLRDIILNIVIAGKDTTAGSLAWFLYMMCKHPEVQEKICHEAMEATNAGEAASIDEFSQSLTDEALNKMHYLHAALTETLRLYPAVPLDNKQCFSDDVLPNGFNVSKGDIVFYIPYAMGRMESLWGKDAESFRPERWLDENGVFQQESPFKFTAFQAGPRICLGKDFAYRRMKIFAAVLLRFFVLKLRDEKEIISYRTMITLSVDQGLHLTAMAR

SEQ ID NO: 52842 - protein, 448 aa, Oryza sativa
MAGRRQLLLLLLLWGFLLLIRLPYSASQSFIGINYGDVADNLPPPASTARLLQSTTITKVRLYGTDPAVISAFAGTGISLLLGAANGDIPNFASSPAAAAAWVAAHLPSTSSPAISAVSLGNEVLFADTSLASQLVPALQNIHAALPPNSSVKVSTVHAMDVLASSDPPSSGAFKPELAAALDPLLAFLSKTGSPFLINPYPYFAYLSDPRPETLAFCLFQPNAGRPDAGSGLTYTNMFDAQVDAVRAALDAKGYKDVEIVVAETGWPHSGGADEAGATVGNARAFVSGLVSHLRSMAGTPRAPGKPVDTYLFAVYDEDLKPGKPSEKSFGLFQTTTLAETYPTGLMRNGTAAGLAPAMAPAAAAPTLPVKPSPAPARLPGQQPQVTPLQPGSAAAAGPSALCAPGTATTTARGAAAAACSSPSAAESPRTMSVISIIAGVLLMYLLI

SEQ ID NO: 52843 - protein, 414 aa, Oryza sativa; identical to SEQ ID NO: 36563

SEQ ID NO: 52844 - protein, 373 aa, Oryza sativa; identical to SEQ ID NO: 52077

SEQ ID NO: 52845 - protein, 195 aa, Oryza sativa
MSKKIVVKLDLHDNKDKQKAMKVVSTLAGIDAISMDMASRKMTVIGTVDPVNVVSKLRKASWPAYIESLGPAKEPEKKKEGGGDAKKDGGDGKKEGGGDGKKEGGDGKKEGDGKKGEAAAAAKKEEGGGEKKVAAVAPMPMPMHQLPPPYMFNAGYMNQYRPPPPPPPAYPYAPPQYYYARDMSMEENPNPCAIC

SEQ ID NO: 52846 - protein, 150 aa, Oryza sativa
MTDSQMPNLPVTSITATALLSGFQAKLHILSSNFCLSTSCFDFTSQIRTCLSNPAVTRYLPFGDQQRLHTGCSCSPFRVNTSSPVSLSYMTTLFLNPGTARNCPSGLQHRALLIEWSEPNVGAIRFRLRASVPVQRSQKMTVPKVSIDAK

SEQ ID NO: 52847 - protein, 567 aa, Oryza sativa
MMAAAMGSPWLRIRLLPEVPPRLLRPHLRRTLSVRASASASASPDGAGGPVRVRFAPSPTGNLHVGGARTALFNYLFARSKGGKFVLRIEDTDLERSTKKSEEAVLSDLAWLGLDWDEGPDVGGEFGPYRQSERNSMYKQYAEKLMESGAVYQCFCSSEELEQMKETAKQMQLPPVYMGKWGTASDAEIQQELEKGTPYTYRFRVPKEGSLKINDLIRGEVSWNLDTLGDFVIMRSNGQPVYNFCVTVDDATMRISHVIRAEEHLPNTLRQALIYKALGFPMPSFAHVSLILAPDRSKLSKRHGATSVGQYKEMGYLPQAMVNYLALLGWGDGTENEFFTIDDLVEKFTINRVNKSGAVFDAVKLKWMNGQHLRSFPPDVLIKSFEDRWKDTGILQESESGFAKEAAELLKDGIDLITDADAALSNLLSYPLHATLSSDEAKSVVQDKLSEVASGLISAYDSGELCQALAEGRDGWQKWVKIFGKSLKRKGKSLFMPLRVLLTGKLHGPDMGGTVVLIHKAGTCGAVTQQSGFVNLDERFRILKEVEWESLVQEQESPAETAVPASR

SEQ ID NO: 52848 - protein, 125 aa, Oryza sativa
MSADRLKVKRIGDISGRGISPLRYCTTCRMVGLTLDIGCEHKSPNFNTKLASLMLMLPLSLGSITARICSLLQFSNTQSVSRSRCPSMSCSTGLRPLVTSRRNAPKANTSVRGDAFPVSANSGAI

SEQ ID NO: 52849 - protein, 310 aa, Oryza sativa
MPPQMEFLMACTDGDVARLKEVVDSMDEDDRQSLTSVRMEGYEPLFEAASSGKIDLCKYLVEELGFDVNAEANHDSGMTPLFCAVLDGQEITVKYFLDKGADPNKKDAAGFAPLHEAAKKGHVGIARLLLSKGASVDVSSSEGTPLHVAASNGKSSTVQILLEHRANPNVILPDCYTPLTAVLSATPEIVNESECLKCMKLLVKAGAIYNLATPDTPLKIATRNGLTECVAYLLEITTVKLSEHDKGSDGDRKSKLKLHGGKAFEEGDYAGAIIFYTEAMKLDPADATLYSNRSLCHLRSGAAQEGFAGC

SEQ ID NO: 52850 - protein, 311 aa, Oryza sativa
MSLPALAAGRAASMRPPRASAASGEAAAAAAADQPAGRRPVKVILPKKKPQKWSTGMAPGEYGGGPATPKPRKYWMGKEDRDPVGNTDDFIWNKDFLPHMERVIANGGADTPPTITSLTPVDEDSESGFLSINRAMSLDSVDVDLSKELQAPTRPILKTQVEAAWRGRAIGAEAVNGVASPRWRLVPTRREQAKWDRAAKAATGGSDVILRESKSRGQQGDPEVLAAKSREQYLELKQRLQLFTLGIGGIGLVSAYFSYSPEIAARADWICPVSPHAWDQCGFLSWWNWRNCEECCCPSKTAYSSGTCDDV

SEQ ID NO: 52851 - protein, 127 aa, Oryza sativa
MAGRPAPAPRPHRLPLALALQSPLPLLPATSHPSATGASRSQQPPPRRVWRNGTVGGRTQQETENRGILALLSRPLPPPPALHRSAPRRRQRPRCRHVGAWENQGGFGSDRVRQERQLGRGCGGQES

SEQ ID NO: 52852 - protein, 199 aa, Oryza sativa
MMMMGKRGGRKNPMRRTTSMTEFAPPVDVLVGGRVADEAEAEAEADEATELEVSGGGEVEEEDAAVEEASYGWFGAGADGAGVRADWLAAYRARAAPALAGLRRNSADFSAVETAAFLRACGLCNRRLGPGRDTFMYKGDTAFCSLECRQQHITHEEWKEKRALAIATAAAAPPQPPPSMPDPTAAGSDNPAGGTLAAA

SEQ ID NO: 52853 - protein, 719 aa, Oryza sativa
MAMAPLFVPPPHLLFLLPATTSSSPAASLRRLLLPPLSCHARQVLDVMPQGDRVAGPRAAEGAGAKGATAQVGVATREAGTAGRHGRGRHGGGARPWRRGEDRPARGGQHAADDGEVQGTRRGGDLKQRREGRRWTRGETQARESGKAGNSGRCQSNGSGGNASRKGKKKAKGGENEVKLRVELGMCSKRGDVIGAINLYDSAVKEGIKMGQHHYSVLLYLCSSAALGFVQPAKSGNAGSGIASIGQLHSSSTQSVGNLEGDDVQSEGHSEDQEGNKTDLFASDDGTEKPSRIPVSDELREYARTRGFEIFEKMRSEEEKVPMNESALTAVARMAMSMGNGDMAFDVVKQMKDQGIAPKLRSYGPALTAFCNSGNVEKAFEVEAHMLESGVRPEEPELETLLKASVAAQQGDKVYYLLHKFRTTVRQASSTTAKLLEDWFQSPTASKVGKRKWDSGAITKAIENNGGGWHGLGWLGRGKWTISHSHIDRNGACLACGEKLTIIDLDPKETEDFATLVAKLAIKRERRSNFDNFQKWLEKHGPFDAVVDGANVGLFSHKHISLSKINIVADVIRQRFQSRKLPLIVVHNRHLTGERMQKPSNRKLVEKWKLSNAIYATPTGSNDDWYWLYAAIRCKCLMVTNDEMRDHTFQLLERDFFPKWKERHQVRFNFEDSCVTLQMPPPCSVVIQESENGQWHIPVVSEEGSLEKDRTWLCVTRRN

SEQ ID NO: 52854 - protein, 604 aa, Oryza sativa
MDPDGDGSFHRNEAISAVQDVDQYYGDDDDYDDLYNDVNVGDGFLQSSHPPPQPPPPPQQQQQPPPISQQPPPLQAPPPPPQQQQQQQQLQAPPSLPPPPPQRQPEKVHIPGVAAVPPAPVPDRPNPVHLPPQPQPPVAAAPPPPPHNQIQPGGGDGFHRQGGGNYGGGPIVVGNGGGGDGPGGTTLFVGELHWWTTDADLEAELSKYGQVKEVRFFDEKASGKSKGYCQVDFYDPGAAASCKEGMNGHLFNGRPCVVAFASPHTVRRMGEAQVKNQQSMAQQNSGVQKGGRGGGAAGGPGGAQVGGNYGGGRGGGGGGPGGGGGGGGGGNWGRGGGGMGGRGQAGNMRNRMGPVGGRGLMGNGGMVAPPPPMLHPGGMLGQGFDPTGYGAAMGRMGGGFGGFPGGPGAAPFPGLMQPFPPVVAPHVNPAFFGRGGGMGAGGVGMWPDPSMGGWGGEEQSSYGDDAASDQQYGEGGSHGKERPPEREWSGASDRRREREKDLPPPPDWPERRHRDERDAGRERERERDRDRERERDRDRERERERDRDRERERYRDDRDRHGDYHRHGKRESDRNEDWDRGRSSGRRSRSREVDHSKRRRMSPE

SEQ ID NO: 52855 - protein, 617 aa, Oryza sativa
MNADFGAPKDLAGGLQQRRSLYQPTLPPCLQGATVKVEYGDATTTIDPTCANVVAQAFPRTYGQPLVSFVAPPPDAVDKDRAPIRVGVVFSGRQSPGGHNVIWGLHDALKAYNPHSVLYGFVGGTEGLFANKTIEITDDVLASYKNQGGFDLLGRSIDQIRSTKQVNAAMTTCNNLNLDGLVIIGGVTSNSDAAQLAEALVQNNCKTKVVGVPVSLNGDLKNQFVETTVGFDTVCKVNSQLVSNVCLDAISAGKYYYFVRLMGRKASHVAFECALQSHPNMLILAEEVALSKLTLMEVINKICDGVQARAELGKFHGVLLIPEGLIESIPEMYALLQEINILHNNNVPVAEMPSQLSPWAAALFQFLPPFIRRELLLHQESDNSAQLSQIDTEQLLAHLVEAEMIKRTKEGRYKGRKFSSVCHFFGYQARGSVPSNFDCDYAYALGRISLHMIAAGLTGYMATVANLKDPVDKWRCAAAPLTAMMSVKRHLRGPGAIPIGKPAIHPSPIDLKGKAYELLREKASSFLLDDFYRTPGGIQYEGPGCNAKPITLTIENQDYMGDIEILKDCLSKVRTMVKPGCSREVLKAAISSMLSVTDVLTVMSHPLNAELPLYHFN

SEQ ID NO: 52856 - protein, 531 aa, Oryza sativa; identical to SEQ ID NO: 43539

SEQ ID NO: 52857 - protein, 1318 aa, Oryza sativa
MVYKETANQSGIQFTCGTQEPFPDASKEENVKNRRKSSYGEATISQHFTFSWMNGLLAKGANKPLNEDDIPDVGEEESAQHISRIFSNIIVKGNFPLTVSSICKAAFLLIWKKAALNATFGVLSVVASFVGAYLIKDFVGYLSGDNGFERGYSLVLVFVGAKAIETLAYRQWFFGSLQVYLRLRTSLISQVYQKVLYLSSQSRQKHTSGEIINYVSVDIERIVNVAWYVNMVFMMPIQITLATYILWKNLGLGSLAGIATTAIIMLCNIPFTRIQKRLHAGIMKAKDDRMDMTSEVIRSMKILKLQAWDIQYLRKLEYLRKGEHLWLWEFLRLKALLAFMFWGAPAVISIMTFASCILMGIPLTAGRVLSTLATVNILKEPIFSLPELLTAFAQGKISADRIVSYLQEEEIRSDAIEEVAIDENEFSAEIDQGAFSWKTDAKIPTLQDIHVKIHKGMKVAVCGAVGSGKSSLLSCVLGEMPKVQGTVKVFGTKAYVPQSSWILSGTIRENILFGSPFETDRYERTIEACALVKDIGVFSDGDMTDIGERGTTMSGGQKQRIQIARAVYKDADVYLFDDPFSAVDPQTGRHLYKKCLMGVLRDKTVLYVTHQVEFLVDADLIMVMQNGRIAQAGKFQELQQNMAFGVIFGAHFCAVEQVCNAKGTSIYLSKHHAESEKVPSINESDAEKEISSKWQNTNMINCRQEVFRDNTEEGKLLQGEERENGYISKQVYWSYLTAARGGLFIPMIIAAQCFFQIFEVGSNYWMASACHPRTGSKSKMESTQFMVYVFISVGSALCILIRAVLVAVTGLLTSEKLFKSMMHCIFHAPMSFFDSTPTGRILNRASIDQSVLDLETASTLSESTFSVMQFLGTILIISHVSWPVLIIFIPSILICIRYQRYYSLTATELARLSGIQKAPILHHFGETFYGAAIIRAFRQEDRFYRSNLSLLDNHSRPWFHLMAAVEWLSFRMNLLCNFVFGFSLVLLVRLPQGFVNPSIGGLVVMYAWNLNTQLSEATRNISRAEANMISVERILQYTKLPSEAPTITEGSKPPMAWPEFGMISISNLEVRYAEHLPSVLKNITCVIPAEKTVGIVGRTGSGKSTLVQVLFRIVEPREGTIKIDSIDICKIGLHDLRSRICILPQDPVMFDGTIRGNLDPMNEYPDSRIWEVVDKCQLGNVVRSTEKKLDEIVIENGDNWSMGQRQLFCLGRILLRKSKILVLDEATASVDSATDRIIQEIIRQEFKDCTVLAIAHRMNTVIDSDLILVLGEGSILEYDTPTKLLQREDSTFSKLTKEYSQQSQDFKSSTAMHRMGSY

SEQ ID NO: 52858 - protein, 132 aa, Oryza sativa
MCKSSISAGLILASWFLSLGVENAEVLCLGIVSVAVFMLVLPLFKATGNILLQIAPGNVPPSALTKCFRQITACEDVSEVCQGRFWELVPGHAVGSLDIRVKNGGDCQSVLDYVHGLYQDLGIQDLTIQTDE

SEQ ID NO: 52859 - protein, 425 aa, Oryza sativa
MMMGLLAFESNQGLWNSGYYSQLFGIGGVKVTVAILWLSTGYFGGIGAPFAPYFWPYLGQLPKKKERKRPVRVYMDGCFDLMHYGHANALRQAKLLGDQLVVGVVSDEEIVANKGPPVLSMEERLTLVSGLKWVDEVIPNAPYEITEEFMNTLFNKYNIDYIIHGDDPCLLPDGTDAYALAKKVGRYKQIKRTEGVSSTDIVGRILLTFKQKEAGSMETTTDANQNTGATCDKVKSQLSNFLPTSRRIMQFSNGQAPSPGARVVYIDGAFDLFHAGHVEILRSARQLGDFLLVGVHDDQAIRDRRGYRPIMHLHERTISVLACRYVDEVIIGAPWEVSRDMITTFNISLVVHGTVTEGSSVVGIDSYAVPKSMGIFQTITSTKPITTVSVATRIIDNHEAYKKRNLKKKASEDRYYTQKKFVSGD

SEQ ID NO: 52860 - protein, 386 aa, Oryza sativa
MGGRRRRGWSEAPAFAAEQRATLVNVKLKWVKDRALDGAVSRERDLRAAHHLLDVVSARPGHRVSRPELLADSSVRRAFGGVDGVDAFLARYHTLFALRRGGGVSLTDAALDLRRREVDCLVESEPDLVSRLRRLLMLTLPRSLPLHTVDLLRWDLGLPRDYRASILRRYPDHFALDQPEGDERVWLRLLWWDDGLAVSELEKSTAGGGGGDTTCLPFPVSFTKGFGLRSKCINWLKEWQALPYTSPYADPSGLDRRTDVSEKRNVGVFHELLHLTVAKRTERRNVSNMRKLLGMPQKFTKVFERHPGIFYLSRVLGTQTVVLREAYGGGSLLLAKHAHPLATIREEYSAVMRAALPPRRRRSRESDSCSEQDEECVGGEEFELTE

SEQ ID NO: 52861 - protein, 826 aa, Oryza sativa
MAAARGGRRRRPWSSSSSCGSPFLMMLISCLLWLHREAAPSLAADTVTVGRPLSGRQVLVSRGGKFALGFFQPDNSSQRWYMGIWYNKIPDHTKVWVANRRAPLSDPDTSRLAISADGNMVLLDRARPPVWSTNVTTGVAANSTVGVILDTGNLVLADASNTSVVLWQSFDHFGDTWLPGGRLGRNKLTGEVTRLVGWKGYDDPTPGMFSLELDPGGASQYVMSWNGSSRLYWSSGNWTGGMFSSVPEMMASNADPLSLYTFNYVDGENESYFFYDVKGEVVLTRFVVDVTGQIKFMTWVDSAAQWVLFWSEPKAQCDVYSICGAFGVCAEDALPACSCLRGFHARQPRRWLQGDHTAGCARSTALQCGGGGGAQPAAQKTKSDRFFVMPNVNLPTDGVTAASASARDCELACLGNCSCTAYSYNGSCSLWHGDLISLRDTTGAGNGGGRSISIRLAASEFSGNGNTKKLIIGLVVAGVAAAVILAVVVTVLVRRSRRLKALRRVEGSLTAFTYRDLQVATKSFSEKLGGGAFGSVFKGSLPADGTPVAVKKLEGVRQGEKQFRAEVSTIGTIQHVNLIRLLGFCTERTRRLLVYEHMPNGSLDRHLFGHGGGVLSWEARYQIALGVARGLDYLHEKCRDCIIHCDIKPENILLDDAFAAKVADFGLAKLMGRDFSRVLTTMRGTVGYLAPEWITGTAITTKADVFSYGMMLFEIISGRRNVEQGQDGAVDFFPATAARLLFDGDLKGAVDGRLAGNADMGEVERACKVACWCVQDSEATRPSMGMVVQVLEGLVDVNAPPMPRSFKVLGDPSNYVKFFSALPSIS

SEQ ID NO: 52862 - protein, 179 aa, Oryza sativa
MASAPAASPAVLVVVVLVATLAAGGANAATFTITNRCSFTVWPAATPVGGGTQLSPGQTWTINVPAGTSSGRVWGRTGCNFDGAGRGGCATGDCGGALSCSLSGRPPMTLAEFTLGGSQDFYDLSVIDGYNVAMSFSCSSGVGLTCRDSRCPDAYLFPSDNSKTHACRGNSNYQVVFCP

SEQ ID NO: 52863 - protein, 845 aa, Oryza sativa; identical to SEQ ID NO: 45752

SEQ ID NO: 52864 - protein, 548 aa, Oryza sativa
MFSSAAMQQLKDDGSSARQLQLLVAALSTAGAVAAAAVVRRRHGRKAAAAAAAAAAAPPPVVMREMPRLVMAESGRVEHIEKFSHYVARQMGFQDINECPQLCKLANNYLKRTKNCMDDIDDFFANILDSESLYVKFIEELDKCILGYFAFHWDHATALISQALTVDCGTASKKKLRNLVLEATRKQRFERVTRDLKVTRVFSTLVEEMKAIGVPTAAMNGDGEEEPHCTDVMAPVAHDERSPVLLLMGGGMGAGKSTVLKEILQEPLWSKDEANAVVVEADAFKETDVIYRAISSMGHHNDMLQTAELVHQSSTDAASSLLVTALNEGRDVILDGTLSWEPFVQQTIAMARDVHRRRYRMGPGYKVDPDTGDITENYWEPADADAASPPPTRKPYRIEVAGVVCDAYLAVARGIRRAIVTGRAVRVRSQLVSHRRFAAAFRRYAGAVDGARLYSTNTMGAARLIARKDGVAGSLLVEPAEFACLDAVGGLNENATGVHDLYRGGATACGARSIWDDMIASPARADIQRELREAFRSVEHAPPNTNGA

SEQ ID NO: 52865 - protein, 321 aa, Oryza sativa
MGILSLITGKAGASGFGSGSTAEQVTAGVDATGLTVIVTGGASGIGLETSRVFAMRGAHVIIAARNTEAASVVRKKIIEENPKAHIDVLKLDLSSLKSVRAFADQFNSMNLPLNILINNAGVMFCPFGLSEDGVEMQFATNHLGHFLLTNLLLDNMKATAKSTGIEGRIVNLSSVAHLHTYPKGIEFDKLNDEKTYDDKMAYGQSKLANILHAKELSRRLKEEGANITINCVHPGLIMTNLMRHSFFLMRVLQFATYILWKSVPQGAATTCYVGLNPQLKGVTGQYFADCNVEKTSRFARNDALAKQLWEFSEKLIKSSSK

SEQ ID NO: 52866 - protein, 410 aa, Oryza sativa
MEHIHYEDENSQYLCLCPVNKALNMVCCWVEDPNSDSFKRHLARIPDFLWLSEDGMKAQIYDGCQSWETAFIIQAFCATDLVNEYGSTVRRAHEFMKNSQIMRNHPGDQSYWHRHRSKGSWTLSSADNGWAVSDTTAEALKAVLLLEKISSNVVGDPIEIERLHDAVDCLLSFVNKDGTLSTYECKRTYTWIEVLSPCESFPNIVVDYPFPECTSSVLQALVLFKQLHPSCRIKEIEKCVRNAAMFIESTQGEDGSWLGTWGVCFTYGAFLSVKGLIAAGRTYENSSSIRKACDFILSKQLDTGGWGESYVSNITKVYVNIKDDQAHAVNTAWAMLALICAGQMERDPAPLHRAAKELINMQLETGEFPQQEHVGAFNACLFFNYPNYRNLFPIWALGEYCRHLHSTRRA

SEQ ID NO: 52867 - protein, 504 aa, Oryza sativa
MEETWLFLLFSISLVAVLLATARRRRSSSIKARLPPGPSPLLFLAKFLRLRRSIFDLGPLLRDLHARHGPVISIRLFGTTLVFVADRRLAHRALVQGGSTFADRPPLPELGRLFTSDTRDINSSPYGPYWRLVRRNLASEALSPARVALFAPARRRARDVLVRGLRDRGGDGSRPVELRPLLRRAMFELLLYMSLGARLAPEALEEVERLELWMLRAFTSFPVFSFFPAITKRLFRNQWAAHVAVRRRVGEIYVPLINARRAGDGDGDDPPCYTDSLLQLRVAEEGDRPLTDDEIIALCSEFLNAGTDTTVTLVEWIMAELVNRPDIQAKVHDEVRRRPELTEADLQAMPYLKAVVLEGLRLHPPAQFLLPHGVQSDAEVGGYVVPRGAELNVWVAELGRDEVVWTAAREFMPERFMDGGEVEVDVTGSREITMMPFGVGRRMCPGYTVGTLHAEYLVGSLVRELEWLPETEGEAADMAEELDFTTVMKHPLRARVLPRPSSLY

SEQ ID NO: 52868 - protein, 978 aa, Oryza sativa
MAAPKPIWVRQAEEAKLKSEAETAAAAKAAFDATFKALSASAADDPDQDDDLHRPSSPAQASRDAYSDADDDDDDRPHAPPGPVDPSKSSAAGPGIAGGSAGAPATFTVVSKDRDSRRVPTGGARVRVRVSPAAGVGGDDLEGAVKDNGDGSYAVTYVVPKRGNYMVHVDLDGSPVMGSPFPVFFSASNTAATVVTSTFPPTLPAVSSAYPNMVNQTMPNMPNYAGALSAAFPSLLGLLPAASTGASGGVVLPGVGASLGEICREHINGKCTKATDCSKLNHPPQQLLMSVLAATTSVGALSQAPMAPSAAAMAAAQAIMAAQALQAHAAQMQADSKAAGGEASGSTDKTDKGDVLKKMVQISNLSPLLTVDHIKQLFGYCGKVVDCTITDSKHIAYVEYSKQEEATAALALNNMDVGGRPLNVEMAKSLPPKTNLANSNLPMMMQQAVQLQQMQFQQALIMQQTIAAQQAAARAATMKSATEAAAARAAEISRKLKAEGFGGETVEEKDARGKSRSPSPSARRSKSRSRSPIKYRRSRRSRSYSPPVRHTRGRRSRSPSRSYHSKYGSDRSYRDDRDKYGRSGRRESDRSRDHYSSSSRRNRSRSISPRHKKSSRSDSRSPKRHREESLSPSKSRRSARAGSRSPGQHKGSKLSPTRDHHSSRRSRRSRSRSQEKNRNSDKKDSKKSEMEDKKRRSDRGNRGDKDEKYLKDPMEDKKLDVSSVAHKRSSSASEDEMLNSNSKRSKHDAALECHERKDEDHIEEDRRDLDSVGSKSEKRSLGNGDHEKQNHDTNRKTDKSHDRDDSSRKDRKYREDESRHSRDRCSRHSSSRSHRSSRHSREKYHGDTTDQHKSKKSEEGSKSRKDDCLLDDTLSSDRRKVQSEDSPRRKHNQLAASSDVHGINHDTGVKVPNDFSEADQGIQEAKQVVHETDMSSAPRLEDPFLAQDKQDKPIVAGLNGLHEPGVDGAFVGTEESAI

SEQ ID NO: 52869 - protein, 715 aa, Oryza sativa
MAAAADATTAMTIDFLRARLLSERSVSRAAKERADQLTKRVAELEEQVRAVTAQRRKAERAAGEVLAILESQGLARFSDVADSGSGSDDEDGLESAESGSKARGDAEDALSGSEFGGTATAAAAGGLSWKGRAASHESQRRRQQQQQQLKGRHLRPRHSHRRGYFYLVAADSSPKYHPGQSCRKVKRKELRLHTEGDEGKDNAMESTEEGHERSDCTVCTDEQPDIDGEVSQDGQGSCGNGRDGDDDNPYTVEYEKDGEMERVLEKQAELIEQYEEEEYAQREWERKFNNSRDSTAGDVELCNKLNQIEKACEQRDKAAQIKDKEVSEVGGPSDKNLFANDSPSECLSTDSVSGVPQNAPEENAIKHCKVTECDHDFGEATSTVVSVDSGPQIRKDELVDKSFTEIIEGSGNNIEKLSSSLQRNYESVQNARHNEDGVDESSDGGPGYHVNACSYEHYINTPSVASRSSDTPKSKVSEWSSSCFHNHTDNQIDTQMHQPSSDGVGGVLEALQRAKMSLREKLSKPSPPSLEMLALPAPEYHYATDDSPVRDTELSLCMSTFPSQEILALPEPAEYRSRIIPRDDVKVPVGLAGLFRLPTDSFAQNELCSADGYHSRFSLTATSRENLSNHFRANLSLSRYGSEFSPDPCFSARNSMLLSTPTFGGCSNPVSDFRVGDAYFPSEVPRSSNRRGMPSGDQGMLFHFAGDYCSNKWTL

SEQ ID NO: 52870 - protein, 82 aa, Oryza sativa
MAVAADLVATTTMTRWGFGAVARGSGRGDDRGSDSSNARLRLVASRLPSAGAVLLSVFLQARCAPARPRAGVPAQLGSDVEP

SEQ ID NO: 52871 - protein, 469 aa, Oryza sativa
MCTNDFICFHDWAEGRMIRRIDVNVKNLYWADSGDLVTIASDTSFYILKYNRDVVSSHLDGGGSVGEEGVEDAFELLHEINERIRTGLWVGDCFIYNNSSSRLNYCVGGEVTTLFHLDRQMYLLGYLANQSRVYLIDKQFNVVGYTLLLTMIEYKTLVMRGDFDRANALLPSIPKEQHDSVARFLESQGMLEEALEIATDSNYRFDLAVQLGRLEVAKAIAIEAQSESKWRQLGELAMSTGKLDMAEECLLHAMDLSGLLLLYSSLGDAEGLTKLTSMAKEQGKNNVAFLCFFMLGKLEECLQLLIESNRIPEAALMSRSYLPSKVPEIVTLWKKDLQKVNPKAAESLADPDEYPNLFEDWQIALNVEANVAPKRGIYPPAEEYIIHAERPNETLVEAFKSMHIHLEEVLPDENGDDTHEAIEENGVEESQEDAVEVDVEADGSTDGAVLVNGNDTEEQWGTNNEESSA

SEQ ID NO: 52872 - protein, 214 aa, Oryza sativa
MAPPRPASPQSLPPVAATRSRGRPYEGWTLKELIGEVRRLRRAASSAPPRPAGVLDLDQGDARASDTVAPSPPSPCESQEQPHHLGKRLEDVLISLRDVAFQFIKIGRQDEVRKIVNVAHDIVVNFCNAIRAPEAFKLVAAAENVKPHLLKIDHDDNLLFLQFKAALEQVHNVNHEIAISLDKYTNCPLSGTEIAELTQPLRRLSWCCVKRPGI

SEQ ID NO: 52873 - protein, 207 aa, Oryza sativa; identical to SEQ ID NO: 50946

SEQ ID NO: 52874 - protein, 145 aa, Oryza sativa; identical to SEQ ID NO: 50048

SEQ ID NO: 52875 - protein, 54 aa, Oryza sativa
MTATLAYPGKLMKNDELYCFHSLLFTIYSAKCESMTATFIISYQSNELGHLDMV

SEQ ID NO: 52876 - protein, 61 aa, Oryza sativa; identical to SEQ ID NO: 44805

SEQ ID NO: 52877 - protein, 205 aa, Oryza sativa
MESVAIATTSRSLLPPPPFSSNRRCRRRASFLPVAASNRRHHDDDDEEVAKAHEPTSLASYGLSISPLSKDAAMGLVVSAATGRGWTTGSGMEGPPKAAGGGDRPEVSTLPWSLFTKSPRRRMRVAFTCNVCGQRTTRAINPHAYTDGTVFVQCCGCNIFHKLVDNLNLFHEMKCYVGPDFRYEGDAPFNYLDRGEDGDNIFPIL

SEQ ID NO: 52878 - protein, 201 aa, Oryza sativa; identical to SEQ ID NO: 45156

SEQ ID NO: 52879 - protein, 162 aa, Oryza sativa
MSRPARSDAHLSPEGEAAMEAEVREYYDEAAPKRHSKPSRSEPSAVYTDALVPDDSHPELDRFQQLEAHTEKLVCEGGKAGDEFVETEYYKDLGCVGKQHHTTGTGFIKMDKPSADASFHLSDDPDASERHASCKGNPATNEWIPSADTVYPASDKPNRSDS

SEQ ID NO: 52880 - protein, 215 aa, Oryza sativa
MGGAMLLTFYKGPKIMVLDQLPHPKFAHLTENPQSHPISTGNQIIGSFLGIISCFTYATWLVIQAKVSKVYPCHYSIAAMVCLFGALQSTVMALCVHRDMEHWRLGLNIRLYSSAYAGLIASGSAFPLLSWCLRKKGPLFISVFSPLMLIFVALMSSIILNEALHLGSVLGSVLIVGGLYMVLWGKAKEAADLSEDENQGKESIPVTTGGENEMK

SEQ ID NO: 52881 - protein, 190 aa, Oryza sativa
MRQHKDCNFSYAGLKTQVRLAIESRNISTDDIPISSATKDDRQIRANIAASFQRVAVLHLEERCQRAVEWALKMEPSIKYFVVSGGVASNQYVRTHLNQIAEKNGLQLVCPPPKLCTDNGVMIAWTGIEHFIAGRFDDPPAVDEPDDMQYDLRPRWPLGEEYSEGRSASRSMKTARVHPSLTSMIQGSVH

SEQ ID NO: 52882 - protein, 392 aa, Oryza sativa; identical to SEQ ID NO: 36955

SEQ ID NO: 52883 - protein, 193 aa, Oryza sativa
MGCAFSSAGALRPFEGVRVIHINGYVEDFDAPVTVGQVTGKPAAGEGQGQGRYVLCSSAHLLQPGRGPFRADDPLEAGTVYFLLPQSIFQSESSAVDLACLMNRLTSLARKGAAAASSPVEALFTAGIHHPPQPSSSCSSSKPAAAAASSGSPERCYLAAAARPAAWKPRLDRIDESFGRASMRSSSARSTEA

SEQ ID NO: 52884 - protein, 714 aa, Oryza sativa
MAPPPSSLLRDLLAADGFRNRRKPPDSNPPAAPRTTSMPLQHRRPSRPARSQSDVLTRSRLRETNNVGTSDGDGVDAGEEQRTATRRSSASLMSARSYNNNKDSGGGAMRGGSAAAVPALDESVLTALISLVAGAVKRFVRDEGFRASLRGGCMSCLGGESNHRAVLDLRVIVHTVERAASEGLDDPRDLKRASLRLHAMASLDAKEADAVSAAGVPYQRLAACAHLYMSVISKLQEKDHSSAVHVLEAFCLAPHEARTSLLPALWDRLFRSGLSHLKAWRDRESATAASSDTRVKDVEKMFVEAVDDGTRALACYYRDWLLGRSQAMSLPVVPAPPSTVLASALRFSTSTSYDIGSDVACSSGSYSPAVKFALDETPSQYDREIEEEEEAEVDEKTADAESVFHECDGTEPKSYTHSLQTEENELMPDKLANEASERKSEDERSRQPDESTSYVPISDITAIDLPTLEFCEGPDLQSDTDGSQISIFATIPSDFLCPLTRQIFNRPVTIETGQTFERHAIVQWFDKGIRMCPITGQELESLSIPDINRVLKRLIDNWKSEHCKTLNSESTCPEKELTATFVENVLSSECETSEKLEKARRLMAIGGIDFLLHKFHGGGEDEKAQAAELLLLCIRAEGSCRNYMAIRICNSSVVQLLHSEVISARSSAVRLLVELLCLKRFCLLFVTPNASKYVLYVHALPSHKIFQLSQKGNS

SEQ ID NO: 52885 - protein, 77 aa, Oryza sativa
MARKRKKARKRRHSSCFCASAARFFSSVLSKCSCTTAPSACAAASRATTSPPPTYASPIAIPIRISTIRCCCCSWCW

SEQ ID NO: 52886 - protein, 238 aa, Oryza sativa; identical to SEQ ID NO: 46718

SEQ ID NO: 52887 - protein, 790 aa, Oryza sativa
MSEMEGALRSCMEQLLIAREEREQIIVEAASEISSEKKKARELQRKLDAATKKAAKLAAENSSLAKALDAKDAAIGELRESKSASDGELAGARARLDAAQKQAASLQYEVRMLQKELEIRGQEREYDLQSVDASRRQQAESQKKIALLEGECQRLRAMVRKRLPGPAAIAKMRDEVDQPATPRRSRSVAPMSPRSVAPAAPMTPMSTSARPMTPTMSARPMTPMSARPMTPRRAAAAEHETPAAAAKLRAVEDENKALKQTLAKRDAELQFVQMKYADEACKLSVLQRQLSELTEENKQLSDAHGQTESWASALISELEQFRAAKLQGAAASEMSLLDDFAEIERLEMASGGQGLRSPKNAHSEAISSEKNDKDTVLENGISISNGQPEWVQDMCKLVMQKHETSGENIDTILEEITRALDQSANNQKGDDLNGSYDWSIMKEMVFSLTEKITSVIGISEEGNVASSQKLLLDRSEFCARLEHLVHVCHDLLHGKTDLEKFVHEVCLVLEYIINQYKNISFQEQPDTVNNNTENLDGEESFGNMNGGCDIKSPKSSSAPDIQTEALEESIQSVEGRKTDHILVNQEESQLDEELTRVILDQDEKISQENSASCEIESPHDHPSAETLAEKEEKHLASSSEISAAAEKLAECQETITNLSRQLRALKSPAVSGNLDSPMSNSRPSSYDYKPQSLACILAEGEDSSTEDAISPATKEVHSKKEPDAASRKSVAQDGSVNAALKAVEEELTQTVVHPIFPEPSQEIISADLKKKRRSPSLLGRIMFRKKVEGS

SEQ ID NO: 52888 - protein, 41 aa, Oryza sativa
MASLITVQERKEGGGGGGERGRRQQKMKGSVFHLRRKCPLG

SEQ ID NO: 52889 - protein, 229 aa, Oryza sativa; identical to SEQ ID NO: 31012

SEQ ID NO: 52890 - protein, 763 aa, Oryza sativa
MSAAAGAATLVASSASLSVPDHLRLRRFRLHLHPRPPPPHPQLRSRSLRQRRRFVLAVLQEDRSPSAPDEEARRYGLNGSAPSSGVGYDDAAVEAYLGTNGNGRGNGAAAVVKPAAESRSSAALVSAGPGPGDDERRRKERVEEIGREDAWFKQSGGDSKPEVSVAPGGRWNRFKTYSTIQRTLEIWGFVFKFIFRSWLNNQKFTYRGGMTEEKRVMRRKVLAKWLKESILRLGPTFIKIGQQFSTRVDILPQEYVDQLSELQDQVPPFPSETAVSIIEEELGASVNKIFDRFDFEPIAAASLGQVHRACLNGKEVVIKVQRPGLKELFDIDLKNLRVIAEYLQKVDPKSDGAKRDWVAIYDECASVLYQEIDYTKEAFNAEKFSENFKNMDYVKVPEILWEYTTPQVLTMEYVPGIKINRIKQLDKLGVDRKRLGRYAVESYLEQILSHGFFHADPHPGNIAVDDVNGGRLIFYDFGMMGSISPNIREGLLEAFYGVYEKDPDKVLQSMIQMGVLVPTGDMTAVRRTAQFFLDSFEERLAAQRKEREMATEELGFKKQLTKEEKFEKKKQRLAAIGEDLLSIAADQPFRFPATFTFVVRAFSVLDGIGKGLDPRFDITEIAKPYAMELLRFNEAGVEVIVKDARKRWERQSRAFYNLFRQPDRVEKLAQIIERLEQGDLKLRVRTLESERAFQRVAAVQKTIGYGVAAGSLVNLATVLYLNSIRLPATIAYSLCAFFGLQVLVGLLKVKKLDQQERLITGTA

SEQ ID NO: 52891 - protein, 258 aa, Oryza sativa; identical to SEQ ID NO: 30725

SEQ ID NO: 52892 - protein, 151 aa, Oryza sativa
MLLDDTNPSNGSSPDSELCERLSCSRPVRLPRDGEICPSRALEASKISAILMSALQVMPSHVQQFVPFRHDAERPPSPERPARNWRRTLFSWSMQESVEEAKHSTVSRANPSKSVGNLLLILLHGKWKGLMVGFLFQIEYELDIYCSLLLY

SEQ ID NO: 52893 - protein, 626 aa, Oryza sativa
MDGGGGGDPGGRVGEAKADATRAANKRRAPSPAGGGGVEAKRRRKDAMGSSVSGSRSGGGGGRRLRHGRGRRARAFRRKLEEENKNSNNRPRASNVVIAYTPNLIRRYGTLLRNISFLLPYDGQGKAYACPSDKINVFLKWSRCNFCLFFEWAEGDQMMICHMFNTLKEIHISFLINPAFLDESMEVKVTNPLLSFSSNFVEDETWALVKEMLMMMFSPVQEDERAASDLYVFTKSRDSVYFRIFKITSIPAGESENSLVLDEVGLNFCLKLLDVHGAFVGSDCDQALDGLQSQTRNELKLSPDIYYCVPNDKLGCCTLHSVALNNQNYLFFLENGLDLSHFEGFCLTLEEFLERNSFLKIKHIVGSRNDEECNFVRNIAKAIIRSMLSHLVNLFSLGKCLRMGTDLLRRRKILLKGSDVKFFQLEVIAYEEDEAINNVLQVVELVKSCFVGEMIPADLQGDLHDLKENPLKRLESVIDSSSLMSAKEKKGLLVNLHTEYKTNISPAISEDDRDSLFKHIPYLDCWMNRTEDNEYLKLVANLDSKKVALKVNKVGTDKRKPSKNGILQFDFMRNSDVHIPEKALKDGITPFRLSWTDYILTSRYPTYLRAIQKSLEPYMKSRKKLK

SEQ ID NO: 52894 - protein, 944 aa, Oryza sativa
MVGMEGKGDASVTPVRTSDRLRKRPKYFGRNYMYYNPAIRKKMKSKKRAAASQIAKKLLRKSAARAPPADSIAANLRRSTRKRRMSVNLEDYDTDSSSMEDDDLMRPRYRSSKNKVDDEVSARPKRKKLSNSSSIPRREGLRPRRSIRGQRLHPYQESEDDQESSEEQPAQDRRENGNDIEEDGNEEEVDGGDEAEADGDDEDGEEEQEGRRRYDLRDRSEVRRPSPRKEGKHRTQSPRRVLVHGIGPKNSKYLKKGGSRMHKRPRFSLPDDSDDSLLVDEPDEGPSMPWMRGGRGGMPWFLGGLDMHCPGAWGLNVGASGWGHQGDNTVSTSSLMPGIQTAGPSSKGGADIQPLQVDGSVSFNDIGGLSDYIDALKEMVFFPLLYPDFFANYHITPPRGVLLCGPPGTGKTLIARALACAASKAGQKVSFYMRKGADVLSKWVGEAERQLKLLFEEAQKNQPSIIFFDEIDGLAPVRSSKQEQIHNSIVSTLLALMDGLDSRGQVVLIGATNRIDAIDGALRRPGRFDREFFFPLPGYEARAEILDIHTRKWKDPPPKELKTELAASCVGYCGADLKALCTEAAIRAFREKYPQVYTSDDKFVIDVDSVRVEKYHFLEAMSTITPAAHRGSIVHSRPLSPVIAPCLKRHHEKIMERIADIFPFLSSVDVSKFSALSYGSSIPLVYRPRLLMCGGVSVGLDHVGPAVLHELEKFSVHSLGLPSLLSDPSAKTPEEALVHIFGEARRTTPSILYLPQFHLWWDTAHEQLRAVLLTLLNELPSNLPVLLLGTSSVAFGDLEEECASIFSSRNVYEVDQPSDDDRMRYLHALFESLLSFQMEESRSKSKDQKSSVDLPKAPKEVDGPKLSELKAKAEAEQHAVRRMRMCLRDICNRILYNKRFNVFHFPVSEEEVPDYRSVVHNPMDMATVLQQVDSGQYLTRASFM

SEQ ID NO: 52895 - protein, 243 aa, Oryza sativa
MAKMTNAYDLPARKVIHTVGPKYAVKYHTAAENALSHCYRSCLELLIENGLGSIAMGCIYTEAKNYPREPAAHVAIRTVRRFLEKQKGKITAVVFCTTTSSDTEIYKRLLPLYFPRDKKEEEIASLKLPADVGDENGGTIIDERKIRIKPLPAGSAINKSAAPAPVDIPLSDSGLTRSRNSFKLDSYLDPAFMSLIKDPDLRRKEQLEKSVQANKGFNWAKLVGFGDLGGPPLSAAEDYSLHS

SEQ ID NO: 52896 - protein, 375 aa, Oryza sativa
MTNQLKKRMMKKRKVKTLAFAITNDVCIEVNTYALIRSTTPGAITWLDSISNLPLKAERSFICNDTGALIQDPQKRFQVYNDKIVKFSTRELSDVKRVSSHHLRLLGFKPLDYLKDYHNLRPSTFIYPSDEQIFGSTRVFVALHSSMRRLGRFALAFYGNPTRPQLVALIAQEEVTSAGGQIEPPGIHMIYLPYSDDVRYPEEVHLTSDDAPRATDEQIKKASNLLRRIDLKNFSVCQFSNPALQRHYGILEALALGEDEMPDVKDETLPDEEGLARPVVVKAVEEFKASVYGENYDQEEAEAAAAKAGASKKRKALTDAAAEKSAAHNWAELADTGKLKDMTVVDLNSYLSAHGLPVSGKKEALVSRILTHLGK

SEQ ID NO: 52897 - protein, 596 aa, Oryza sativa
MEPLNDDFSRDLLVSRVFGDKDKCPEELNEVSYEIARKCGGLPLATIAAASLLLSRPDKPDEWIYVQKSLIPDLRIQPTSEGMAQLLNNSFNNLPHHLKACMLYLSIYKEDHIINPDDLVKQWVAEDFVSATEGKSLDEAARNHFYELVHRGILETEHISCSDEVVSCTVHDMVLNFIKRKAMEENFVTAIDHSQSGIRLADKVRRLSLHFGYSKDAKAPACIRLSQLRSLVFSGFWKCGPSISEFHLLRVLFLHGKHGEFLDLTRIRELFLLTYLQIEGNVCIDLPSELQGLKYLRTLHIGAMVTFLRSEVVHLPPLLHFRLPPNLGYFVDAGSVQSIEELTNLQDLQLACPQIATSDHIKHNMKLLGSIIGILKSLKSLTVVPVCFSEDSNDNENSSIAIFLDFLDKVPPPCSLLQRLELFPRVCVFHRLPSWIITIEKLCILKVAVMELLRKDIETLSMLNALTVFSLYVRTTPAEPIIFDKSGFHVLKYFKFKCSTVSSLRFDEGAMPNLQRLKMEFNGSTVEQYNLENVGFKHLSGVKVSAKICIAGTSEANRMAIASVLNNAIRQNTRISSVIIRFINRVIKGTNLHTLL

SEQ ID NO: 52898 - protein, 612 aa, Oryza sativa
MSSIKKSSRTARDLYDIEEESAKGLSQALTLYKQPQNVSSSSTRYASSSRKKHKASNDFEDDTVQGSQRMRDLTEIGSKKHSSYVLNGHRDLPLLESASFGYSLSGTNGIKGDPQSHSATKRKRSNIGQAYENSRKKDRRRPLSKLCKDSAVAVPAYSHWDPSGHSSAQYSGGKMSNAFEPSRGKFGFPLDVNNYSYSSGTSSVETLLDASCANHDGVAKVIPVKEAEVSCMPGFLNNDCSDGDEYFDTPLVMEEDALEEDHLHKYESCASVKGQISKPRKQTAEYTELVIPSPHGHRSSKKKSMSFVSQRTQENHKDRTLLAQHGRTVKGQALDTDAVEVDARVSSAFCKPPALKNNMQLAIVPADGCASTLEQQYYGSGPEHDESSETISNRSQSEKGAPSSPYYEPLQVIPPEQKSGLEPSSPHVVKPIKNARTDYKVYDVELAAQGSYKGHRVPLVSLMSKWNGKPIVGYPITVEVLKDSSSAASRNDLRPATSSLNNLLKRSEPAEPRQARSSHSSRPASRPKPSGKKKISEHDTDKSRRPHTKKSATSPRKMRRLSSFASSRRDGASRKPVVGKISGPTIACIQLRLVFSRINEALSFPVRSENPT

SEQ ID NO: 52899 - protein, 320 aa, Oryza sativa
MASKAIKRKPYTADIDRSEKQMETIIPDSVREPLLGNRTHESKSERHEPNMQPNLWDGKGQERLGWMHIISTFIAQSVRKIGNALSQFGPLLAKFFSRSCASHGSHDEQAVLLDLSPLQEERLRFLRQRLNVPFDSSSVKHQDALKELWRLAYPSRQLPPLKSDLWKEMGWQNSDPATDFRAGGFMSLENLIYFARNYPDSFHSLLHKADGKRSEWEYPFAVAGVNISYMLVQMLDLQSGKMGTKVSSQFVQLLREDEMAFDNLFCMAFQMLDAQWLTRQASYMEFNEVLKSMRIQLEQELTIGSISCVQEMPSFRLLKR

SEQ ID NO: 52900 - protein, 280 aa, Oryza sativa; identical to SEQ ID NO: 43274

SEQ ID NO: 52901 - protein, 514 aa, Oryza sativa
MLMSRRLVPAAAAARMASSSSSAAAAAVSGGAEGGGGEGRGGDTLGRRLLKLIYPKRSAAVVLRRWAEEGRTVQKYQLNRVVRELRKYRRFKHALEICEWMRTQPEMRLLPGDHAVHLDLVAKVRGLPSAEKFFEDMPERAKGPSTCNALLHAYVQHGRRDKAEAMLEEMAKAGYLTCALPFNHMMSLYMSSGELEKVPEMIKELRRYTIPDLVTYNIWLTYCSKKNSVKAAEKVYDLMKDERVVPDWMTFSLLGSIYINAGLHVKGRDALVEMEKRASRKERAAYSSLLTLYASLSDRGNLDRVWRKMRETFRKFSDTEYKCMLTSLTRFGDIAEAESFYSEWESASGTRDSRIPNTILAFYIKNGMMEKAEGFLDHIVQKGVKPSYSTWELFVWGYLSDGRMDKVLECLKKALSCLEKWDPNPQLATAIYSQIEEKGDIEAAEKLLVMFREAGYVTTEIYNSVLRTYAKAELMPLIVDERMDQDKVSMDDETRSLLRLTSKYPIGEVSTLMS

SEQ ID NO: 52902 - protein, 496 aa, Oryza sativa
MTGACEAAPARRRGLTVLPLVALIFYDVSGGPFGIEDSVRAGGGALLPILGFLVLPVLWSLPEALVTAELASAFPTNAGYVAWVSAAFGPAAAFLVGFSKWASGTLDKALYPVLFLDYLRSGGGLVLSPPARSLAVLALTAALTYLNFRGLHLVGLSALALTAFSLSPFVALAVLAAPKIRPSRWLAVNVAAVEPRAYFNSMFWNLNYWDKASTLAGEVEEPRKTFPKAVFGAVGLVVGAYLIPLLAGTGALPSETAGEWTDGFFSVVGDRIGGPWLRVWIQAAAAMSNMGLFEAEMSGDSFQLLGMAEMGMIPAIFARRSRHGTPTYSILCSATGVVILSFMSFQEIVEFLNFLYGLGMLAVFAAFVKLRVKDPDLPRPYRIPVGAAGAAAMCVPPVVLITTVMCLASARTLVVSAAVAVAGVAMYYGVEHMKATGCVEFLTPVPPDSLRGSSSSSSSSAASDNGGDDDVEDVCALLLAAGEHAGEGVSVSKENY

SEQ ID NO: 52903 - protein, 147 aa, Oryza sativa
MQLHKGISDVDDRRQKAICTERYRRRDEDESKRHVSEIDVEREEECGICMEMNNKVVLPNCSHAMCMKCYRQWRSRSQSCPFCRDSLKRVNSGDLWMLTDDRDVIDMATITRENLRRLFMYIEKLPLVAPDNIFYAYDSHVNNQSYS

SEQ ID NO: 52904 - protein, 295 aa, Oryza sativa
MHLFPAPASVVLCLAMLLLTLPIASSTVDAINTTNTTSPFCEPARCGNLTIGYPFWLAGKHPPECGYRAFQVTCDHRNASLKNGFWTYQIQHIFYHNSSFMVTNEQLTDGQCVIESFVNASSDLGLTPFKISPINRELIFLYNCNQSRLQQLPPSWAPVSCAENESPNSYAWLAGRYKPDDDLRQQPGNCTVSMIPVLGYDGAAAKDYERLIKGGFLLDYTAGPDDCEDCSRSGRWCRVNVTYDGLDCQCPEGITSSGFMCGPYSFLTQHQQRLSWFQIAYCPFRRHKAHGHNLS

SEQ ID NO: 52905 - protein, 527 aa, Oryza sativa
MLLQPISGAGAGARRSSAEGLSPPPTARLRRRVLCAIRADAPPPIHLSAAAPSRPAKPPVCTADELHHAPVSGAGWRLALWRYRPPPHAPARNHPLMLLSGVGTNAIGFDLSPGASFARHMSNQGFDTWIVEVRGSGLSIRDHDNSASSPSGAFDDISNGTLALDKSSTLEVASVQSSGFSGIDYDDLGIVALDDPPLLMEMTSFFDRISKLLEEASLNKNFHEITDKISVLSEMVESSAVIGPMREESLRLLKNFQEQIDSWEHFVATQMNLNSEYNWDFDHYLEEDIPTAVEYIRQHSRVKDGKLLAIGHSMGGILLYAMLSKYGFEGVPSNLAAIVTLASSVDYTTSNSSLKMLLPLVHPAQALNVPAVPLGTLLAAAYPWASGPPYLFSWLNHQISAQDMMHPELLSKLVFNNFCTVPAKVVLQLTTAFREGGLCNRTETFSYKDHLRYCQTPVLALAGDKDLICPPEAVYETVKLIPQHMVKYGVFGKPEGPHYAHYDLVGGRLATDEVYPCIIEFLSHHDQ

SEQ ID NO: 52906 - protein, 134 aa, Oryza sativa
MRLAISPHQINLHCSLLLPDLTPPRLSMLGESPHHPACVHSSMSDPQRLWPLRLLAVWPSSTATPVAARGQRCRLGLHRPSQELLELLPSISDSCSYVAIQNKTSRQSQRKKVSCRNFSFYPTIKHLASTICIF

SEQ ID NO: 52907 - protein, 139 aa, Oryza sativa
MDGFGIGFVLFWAFLASAPFTFHSNILSSYSCHTLSSLSLSLSLSSLLSSLTIFLSSLSPLILLCNAGIVASRSIWVSFIHVHLVHTPHTWELLQAASTIGSPIGAVFSLWARFRFLTMAAFVTTEFAGGFDTAHAAAR

SEQ ID NO: 52908 - protein, 410 aa, Oryza sativa
MASLPPPPPPPRPLLLTVLPQELVVEILIRLDDLADLARAASACRALRRLITSRAFLRRVHALHPRPLLGLLHLEHHGSRCRFLPAEPPHPSAATAAAVARAFDSDSDSDSSFSFLPGRSGDWRLRDVRHGLAVLSTRHAVTDDGCFSFPDVVVCNPLRRRYAWIPPISDDLAAPIRSLGVGVEDFDYLVAPAGREGLSFRVICRPQLPMGCDVTVFVFSSSAVIWRAATLHACRATAQLVSPQYAHGYAYWRLIRSATRLLLLDTRDMDFFFVDFEQRSVPWQAIGEAGEVGRLAMFNIAHANHTVELLSGAIRGSADEHWRHDKTIPLLPGYKWRILKLAEGYLLLQGRILGDGTSQFTPGDQLQYFTLDINTFKLERLCASTPQGISYHPQFELYRCFPPPLSFSSI

SEQ ID NO: 52909 - protein, 694 aa, Oryza sativa
MMMGREDKYVRFEDWRSEQSVMSPRRHNALSSLKERTAGVFAFLENLVHSETLKRLVLHERKLTTRTLHPQGPFLQSWNKIFVLSCIFAVSVDPLFFYIPVINDNNTCWYLDKKLEITASVLRFFTDIFYILHIIFQFRTGYIASSLTTFGRGVLVEDRYAIAKRYLSTYFLIDVFAVLPLPQVVILVVLPNLGGSEVTKAKNILMFIVICQYVPRLIRIRPLYLQITRSAGVITETPWAGAVLNLLIYLLASHVLGALWYLLSIERKDACWRDMCSNNSTVCNQAYLYCGDKENSILRTACLPIDSNDIDPNFGIYVPALNNVSQSTNFLAKLFYCVWWGLQNLSSLGQNLKTSTYAWENLFAVFVSISGLVLFALLIGNVQTYLQSAHLREEEMRVKSRDTDQWMSYRLLPENLKERIRRHEKYRWHQTSGVDEELLLMNLPKDLRRAIKRHLCLSLLMRVPMFENMDDQLLNALCDRLKPVLYTEGSCIIREEDPVNEMLFIMRGNLMSMTTNGGRTGFFNSDVLKGGDFCGEELLTWALDPTSVSSLPSSTRTVKTMSEVEAFALRAEDLKFVATQFRRLHSKQLQHTFKFYSQHWRTWAACFIQAAWHRYCRKKIEDSLREKEKRLQFAIVNDGATTLSFRAAIYASRFAGNMMRILRRNATRKARLKESVPARLLQKPAEPNFAAEEQ

SEQ ID NO: 52910 - protein, 548 aa, Oryza sativa
MLRRSRHFLPPRPRRRPRPRREAPAAEPPTPTYTRDVVRRVDAILRGHPWSAARPLLLSLPGLAWDSHTVARVLKAHPPLHKAFLFFRLAAGAGGGFRHDRFTYTSMLHLLGEAGRVPAMMRLLAEMLRAGVDPDAATFTTVMHWLAHAGDVDAAMRVWEEMRARKGKCRPTLVSYTACVKILFDAGRPAEAREVFQEMVAEGLRPSCKTYTVLIEHLANVGKFEATMEIMDKMQEAGVEPDKALCNILVQKCSRAGETSVMTRILQYMKENFIVLRRPIFLEALEALKANGESDNLLREVNPHLAFEGIECDPAFTDLGYITVRSTILYLLASRNWSAVEHMINEMTPKNIKVESHILSDIIQASCANCRPSCGLAVLRYSLRIGNELDRSAYGSLLGHYIRNGSFDLVFEIVEILIKSGCNLGTYLSSILIIKLACAGHSSTAVRIFGLLTTDKNVVTYTALMSAYFQDGKVDKALQLFLQMSANGVSACPGTYEVLIHGLQMAGRKQESEHYRRERMEMQWHLQYRNEHSPEDSLCNHLFCDFHG

SEQ ID NO: 52911 - protein, 709 aa, Oryza sativa
MLMPETDLGYKVTHLSLNTDGSSLLLAGSHNISILYVHERVSEDGDKVICRTVPVASQILPSNNDGIKVLQTSWHPFSSSHFGVLTSDAVFRLFDLSFDLEQPEQEFYLQPILPGKCQNASSICPVAFSYGSDHLWDRFSVFILFSDGSIFVLCPIVPFGSDYNKKHIQEIYEDVNSFGLKSSNQNVVTNSRLAIAWLEATFPDLSRQPADNSALMSRAHPYASLDDSLTLQGPLCRVCEENNEPESKSNSCEGKAVGFVYSSVGKDSILVTAWGSGQLQIDALADEIQPQWSIGIPTRLNVDSHGQIKSVAMICDSNSEDSWAMRSYRPSSTGSNVKSNTDAVWMGHSPPLLRLAIVDLALAKTSNDSSLSLFLDPLVPERFYCAHGGGLDMVTLHFLPFSYPEMASTPPSVHPILTTGNNEANSPFLSGFVTIADAYGHVQLVSITCPGECFVVEMKGWKEPTPLQLDMDSKSIKDVESFTTGMISKELIAGPDPPIVPSSSSLRSLTPDSIEGKSTLHHYIKVFHEYYVEYGHKVFIELKEHGDYLKTEIEDKQKRLQAVKQSLLSIEAKDQDINNRINRAFKVYDLLEKRIEGFKILPAANKKPLSQAEQEFKAQLDRFADVELDALCSSITALSARMKRFAHPAIGSAAGTGMSTWQTPKVGRSHVSDSQMSLLKSSLEKLSLLNEENNVKLRLIEHELKNQEQ

SEQ ID NO: 52912 - protein, 130 aa, Oryza sativa
MEDDEYEEGMEMEMGGHHHPHHGGGYGAEEYGAVGGEEMEDEEADGDAPDEEEITQEDAWAVISAYFEEKGLVRQQLDSFDEFIQNTMQEIVDESADIEIRPESQHNPGRQAEFAEVAPPSPPLANAVAA

SEQ ID NO: 52913 - protein, 112 aa, Oryza sativa
MPGRMAIPPSPPRRRRRITSSRRRPFTLPHLLLVTIPPSAPRDPSPPRRHGSCIFRYPSRRHWDSSPPQAIDPACDKLAGRLRLILNCCQAAAGPIFFHKLLAFLHLKMMIC

SEQ ID NO: 52914 - protein, 870 aa, Oryza sativa
MAGVGGSSSGGGDVEMGGWSELLHSSTKLLEQAAPTPHFPPLQRNLDQLEVLSTKLKAKTVRAEAPVQSLSATRLLAREGINAEQLARDLKSFELKTTFEDVFPSEATTVEEYLQQLHEMAIVSSIQEAQKDNLRSFNNYMMQVLEDDWQKEKRDFLQSLSRLSTLPKRNTNLMASGISRPALMPSSASSPQSSSGLPSKEVMPIPNKTIIENKSSVYAAVVRDLNDARGRSLPFGPATAFRAAYESLSVGAIGTKSVTMHKVWHLIQALVGEGSTHRNISRKMSLVIGARRHLEWGHEKYILETINSHPALAALGGSVGNLQKIRAFLRVRLRDHGVLDFDATDLRRQPPVDTTWQQIYFCLRTGYYDEARQVAQSSRAAFNFAPLLVEWITTNGAVSPETALTASEECDKMLRMGDRPGRPGYDRKKLLLYAMICGCRRQIDRLLKDLPTLFNTIEDFLWFKLSALREYTSASSSNVSNEGLVPYTLEDLQSYLNKFEPSYYTKNGKDPLVYPYVLLLSIQLLPAILYLSKEVGEEGYHVDAVHISIALSDHGVLPDGVGSGQKMGIMDACAEAASIIRQYGSIYLRNGNLDLALEYYAQSAAAMGGGEVSWIGRGNADQQRQRNLMLKQLLTEILLRDGGIQLLLGPSGMGEEGELKKYMMDWRSRQQFLLEAAHQCHEAGLYDKSVEIHKRVGAFAMALQTINKCLSDAICAMARSMLDGESRAAALIHSGNEIMETARYSEASVQDKDLISEQQTVLRQLEAILHIYRLARAGQTLDALRETIKLPFLHLDPQAPNVTVDVFRNLSPHVQACVPDLLKVALNCMDNVRDTDGTLRAVKSKIANLVASNMSRNWPQDLYQKVAQCI

SEQ ID NO: 52915 - protein, 1084 aa, Oryza sativa
MRRRPPPPPPPLLPMATLNTQTLITLFLLLLLAAAAAAADAGGGGEREALLRFKAGVASDPGGLLRGWTTAASPDHCAWPGVSCGGNGEVVALNVSSSPGRRLAGALSPAVAALRGLRVLALPSHALSGQLPAAIWSLRRLLVLDLSGNRLQGEIPPALACAGLQTLDLSYNQLNGSVPASLGALPGLRRLSLASNRLGGAIPDELGGAGCRSLQYLDLSGNLLVGGIPRSLGNCSKLEALLLSSNLLDDVIPPEIGRLRNLRALDVSRNSLSGSVPAELGGCVELSVLVLSNPYTPIGGSNSSDYGDVDDFNYFQGGIPDAVVALPKLRVLWAPRATLEGELPRNWSACQSLEMINLGENLFSGGIPNGLVECSHLKFLNLSSNKLTGAIDPSLTVPCMDVFDVSGNRFSGAMPVFEQKGCPSSQLPFDDLVSEYSSFFSYQALAGFRSSSFVLGTDLTSYHSFAQNNFTGPVKSLPLAADKLGMQGSYAFLADGNNIAGQLQPDLFSKCNSSRGFIVDVSNNLITGGIPVEIGSLCSSLVVLGVAGNQLSGLIPTSIGQLNYLISLDLSRNHLGGEIPTSVKNLPNLERLSLGHNFLNGTIPTEINQLYSLKVLDLSSNLLTGEIPGALADLRNLTALLLDNNKLTGKIPSAFAKSMSLTMFNLSFNNLSGPVPANSNTVRCDSVIGNPLLQSCHMYTLAVPSAAQQGRGLNSNDYNDTSSADSQNQGGSNSFNAIEIASITSATAIVSVLLALIVLFIYTRKCAPRMSSRSSRRREVITFQDIGVPITYETVVRATGSFNASNCIGSGGFGATYKAEISPGVLVAIKRLSVGRFQGVQQFHAEIKTLGRLRHPNLVTLVGYHLGESEMFLIYNYLPGGNLERFIQERSKRPVDWKMLHKIALDIAKALAYLHDTCVPRILHRDVKPSNILLDTEYNAYLSDFGLARLLGNSETHATTGVAGTFGYVAPEYAMTCRVSDKADVYSYGVVLMELISDKKALDPSFSPYGNGFNIVAWACMLLRQGRAREFFIDGLWDVGPHDDLVETLHLAVMCTVDSLSVRPTMKQVVQRLKQLQPPIREHR

SEQ ID NO: 52916 - protein, 58 aa, Oryza sativa
MAAAAASSSSSSAAATPQGVTERRGIPAASFVEDVETYLRQAGLDVNSGLAFLQERYR

SEQ ID NO: 52917 - protein, 332 aa, Oryza sativa
MGKLLCDSSSAAVAVAEAPSPAPAPPLLTWPTPDPDPPTSWAAVAALEDQQRRRLHRIWERGVAWKPPATLPLPPLVFRLDHAGEVDADGNCLFTAARKAASAKPDARDLRHRIVRRFSHLYAAAQAPDRDAIDAAVRHLYAPDLKAGWGVHVVQELKLLAPKTLRHHLDAAINDLVDLGIQREMAAETIYRERCIAVNNGDSWAKYMSVSGSAEDEHNIITLQYTEEGLLTIDENRDGHAAAFGDDIAIECLATEFKREVYVVQAHGADAMVDEDNCVFFLPHRPRGEICEPPIFLFMKGTAWCGAGADHYEPLIATVLQNVTPDKAAVVL

SEQ ID NO: 52918 - protein, 382 aa, Oryza sativa
MSAAATAAAASAANVAVIGGGISGAVCASLLAARGVAVTLFDSGRGAGGRMAQRREVMEDGTELRFDHGAPYFTVSNDEVARVVSGWEARGLVAEWKAMFACFDREAGKFTDFEKEGTIKKYVGVPGMNSICKSLCLEDGVVAKFGVTIGRMDWIQDRSSWLLASLDGRDLGHFDYVVATDKNIASPRFSGLTGRPPPLDLSLLPQLSMMIQDIPVRPCFALMLAFSEPLTKVPVQGFSFNNSDYLSWAFCDSSKPGRAHVPLNSQSWVLHSTAEYASKVINNIGPRKPSADALAKVAEELLKEFQATGLNIPQPIFMKAHRWGSAFPAIAISGDDKCVWDKSMKLAICGDFCTSPSVEGAVLSGMRGASKILRCLNFPSGL

SEQ ID NO: 52919 - protein, 158 aa, Oryza sativa; identical to SEQ ID NO: 30737

SEQ ID NO: 52920 - protein, 1114 aa, Oryza sativa
MNPQAEGDAAAAAAVLGADPAGLTALLGDLTSPANEARSRAEGMFHALRASHPDALALRLAHLLLSPAHPSAPMAAVLLRRLISPGSQAFVYPGLSPATQSSLRALLLSAASATGLSKSISKKLSDAVAELASFLLPSNAWPDLLTFLYKSIASPSSPPALQESALNILARLASHLAAGFPNLHALLLSALSHPSSADVRVAGLNAAISLIQSLPSAADRDQFQDLLPAMMRALAESLNCGNEGSAQEALEMMIELAGAEPRFLRRQLPDVVGSMLQIAEAPGLEDGTRHLAVEFVVTLAEARERAPGMMRKLPRYVGRLFAVLMTMLLDVQDEPAWHAAVSEEEDAGETGSYVFAQECLDRLAIAVGGNTILPVAAELLPSFFASEEWKRRHAALVTIAQIAEGCARVMIKNLEQVVGMVLNSFRDPYPRVRWAAINAIGQLSTDLGPELQNKLHHVVLPALASSMDDFQNPRVQAHAASAILNFSENCRPDILTPYLDGIVGKLLSLLQTGNQMVQEGALTALASAADSSQEHFQKYYDAVMPYLKSILMNATDKSNRMLRAKSMECISLVGMAVGKQKFKDDAKQVMEVLMTLQGSQMEADDPITSYMLQAWARLCKCLGQDFLPYMNVVMPPLLQSAQLKPDVSVTSAGPEDENGESDDEGVETITLGDKRIGIRTSLLEEKATACNMLCCYADELKEGFFPWIDQVATTLVPLLKFYFHEEVRKAAVSAMPELLRSAKLAIEKSQSQGRDESYLKQLSDYIVPALVEAIHKEPDTQICASMLESLNESIQLSGTLLEEGQVRSIVDGIKEVITASALRRRERTDRAKAEDFDSEEEDLLREENEQEDEIFDQIGDCLGTLVKTFKTYFLPFFDELSVYLTPMLAKDKTVEERRIAICIFDDVAEHCREAAVRYYDTYLPSLLEACTSENPDIRQAAVYGIGICAEFGGSAFRPHTGEALSRLYNVIKHPNALDLDNAMAYDNAVSALGKICQFHRDGIDASQVVPAWLSCLPIKNDLIEAKIVHEQLCTMLEKSDRELLGHNNQYLPKIVSIFAEILCAGKDLATEQTFSKMVNLLRQLQTTLPPSVLASTWSSLQPQQQLALQSVLSS

SEQ ID NO: 52921 - protein, 396 aa, Oryza sativa
MGSNLKYRAGLVLIVAVVLIWVTSAEVTQGIFTKYKQPFAITYLGASLMIIYIPLSFLKDFICNLLRRSSSSSRVSKVTNKSSFGGCAPLKNGEFQKMLEMESQKTIVINYTDVDIPVIEETKPLICGITEFDDVLKEQELSTKEIAMYGLYLCPIWFVTEYLSNAALARTSVASTTVLSSTSGLFTLFIGVLLGQDSINAAKVIAVFISMAGVVMTTMGQTWASDESEISNSGATQRTLLGDMFGLLSAMSYGLFTVLLKKFAGEEGEKVDVQKLFGYLGLFSLVLLWWLVWPLTALGIEPKFTIPHSAKVDEVVLANGLIGSVLSDYFWALSVVWTTPLVATLGMSLTIPLAMVADMIIHGRRYSAVYIFGSVQVFSGFVIANLADRFSRFLGL

SEQ ID NO: 52922 - protein, 354 aa, Oryza sativa
MRPMTSPPLLSPSSSSSRLLLLRLLLSRRRSPASRSPPPPLRRRLPLLAASMSSSSSTAATRNPGSVVADADGLARKVAAIRAAGPAKLQVIADFDGTLTRYWYDGSRGQSSHGLLRQGNEEYDAKREELFEHYHPIEICPDIPLPEKAKLMEEWWEKTHALLIEGGLTYEAIRQSVADAKITFRDGVVKLFEFLEERDIPVLVFSAGLADIIEEVFRQKLHRSFKNIKVVSNRMVFNEEGRLVSFKGKTIHVLNKNEHALDMAAPVHDNLGDPNGYTDDYSLVKKRTNVLLLGDHIGDLGMSDGLNYENRIAVGFLNNNIEKSLKDYSEAFDIVYLNDAPMVGVVELVSELCP

SEQ ID NO: 52923 - protein, 727 aa, Oryza sativa
MASPPPERAPAAEARRRRTTVYHGHRRPSPHRPTVRGGVFSDLRATTAASSQPRPPSSSSSSAPFRLADWDPSSSSSSTPSPSATAAARRLSPLARFLLDALHRHQRWGPPVVAELTKLRRVAPELVAEVLSARPPPPPPLALPFFLWAGRQKGFRHCFPAFHALASLLSAAGLPAAADQLPDLMRAHGKPVSHSQLNLLVRLHTGARRPLRALHALRRFRHEFSVQPEVHACNRVLGALAAAGHVDDTLKLFDEMSHCSVRPMPVTFAIMVRALARAGMTDKLLEMIGRMRAEVCRPDVFVYTALVKTMVRWGHMEGCIRVWEEIRRDHVDPDTMAYTTMIAGLCNAGMVEKAEELFGEMRRKGLLVDRMVYASLIDGYVSTGRVSDGCRVLKEMVDAGYRADLGIYNTLIGGLCEIEREDKAHKMFQIVVQEDLIPSSETVSPLLARYADKGEMVKFFGLVDKLVELSLPIVEILVDFLKLFACKSGNELKAVEVFNAFRRRGHYSVGIYNILIENLLKIKERKKALVLFEEMQSSDDCKPDSCTYSHMIPCFVDEGNIEEACSCYNLMMKAVWIPSISAYCALVKGLCKKGEINAAISLVKDCLGNVENGPMEFKYTLTILEACQSKSPEKVIKVVDEMIELGYSIEEIIYSAIIYGFCKYASSTEARKVLSTMRDRNIISEANYIVYEDMLNEHLKNVTADLVISGLKFLDLESKLKWRSRDD

SEQ ID NO: 52924 - protein, 50 aa, Oryza sativa
MYGHTSSKSFVNVFETSRWREDKARSLHRRVHVLEKAASLKTPTTFLSLI

SEQ ID NO: 52925 - protein, 843 aa, Oryza sativa
MQIYLFLYVKLFRPFVLTIYPFSVGNMLHLIVEACISRNLIDTSSYLWPGYVVSSGHLKDATLPQESPWLNFMQGAPLSGPLIDALIATPASSTTELDRLYHIALNGSEEEKSAAAKILCGASFVCGWNIQEYVVRMVVKLLSPPLPSNSSTQGSMSHYLAQMSTLNALLLGISYGDAIHIISLYGMVPDVAAALMPICEVFGSIPPPSNHKPAIVGEISVYSVFSCAFLCLLRLWKFYKPPQEYCLAGRGGSVRLELTLDYLLLMRNNHIDFANSSASSRNSSNNIGPLNEVPAQPLYIDSFPKLRAWYFQNQACIASTLSGLCNKNPVHQVANKILSMICRKMNKPVVSSGNLSSTSSSSVSGSSVSTPDDYQRPTVPAWEFLEAVPFVLEAVLTACAHGRFSSRDLTTSLRDLVDFLPASIAAIVSYFLAEITRGIWKMVPMNGTEWPSPGASLHSIEAEIKEILASAGIQIPSCYPRGVPPMLPLPMAALVSLTITFKLDKSSEYIHAISGQALENCAGGSSWPSMPIIAALWTQKVRRWHDFIILSCLRSPFGRDKDAVAQLIQSCFSSFLRSSCSGSDFTANRGVGALMGDAITGQGLQLPMAPGFIYLRTCRTFHDTYFVSEVILKQVIEWADKLANGFSSSGPPQLKSGRTPLSSAACMAHQVAMLGGGLLCVAGGPLLVQVLYEETLPTLLLSAREESMKDPGPVSSTLQGYAMANMLFFCGSLLWGAERTSPVMKLSFLSRRPRVVGNHMDFMAGVLDGHILLGCDHGTWKAYVSRFVFLVVKFVPSWLRDIKLDTLKKIASGLRSWNEHDLALALLERGGPQAISTVVDTLL

SEQ ID NO: 52926 - protein, 246 aa, Oryza sativa
MGVDYYKLLQVERGATEEELKKAYRKLAMKWHPDKNPNSKKEAEAKFKQISEAYEVLSDSQKRAVYDQYGEEGLKGQVPPPGAGGPGGSSYYGGDGSTFRFNPRSADDIFAEFFGFSSPFSSMGGMGGMGGGVDRGMRGSKFGMYDNDIFGSFSQFPGEASMHAPQRPQKAAPIENRLPCNLADLYKGTTKKMKISREILDSSGRTMVVEEILTIDIKPGWKKGTKITFPEKGNESPHVFLRILYS

SEQ ID NO: 52927 - protein, 332 aa, Oryza sativa
MLAAVEEDLNRAPDPAAASASYLIPLQKCIFRFLCKALVGADPAADGLVDRFGVYILDVWLALQLVPTQKVGVIPQPLEELLLHSFPLPSFVVKPGYDLLYRFVEKHGAAAVSIAEKEHGISKEEAINNILFVLGFNAFGGFSVFLPFLVMEVGKPGRDDLRRRLREEVRRVLGGGDGGEAGFAAVREMALVRSTVYEVLRMQPPVPLQFGRARRDFVLRSHGGAAYEVGKGELLCGYQPLAMRDPAVFDRPEEFVPERFLGDDGEALLQYVYWSNGPETGEPSPGNKQCAAKEVVVATACMLVAELFRRYDDFECDGTSFTKLDKRELTPS

SEQ ID NO: 52928 - protein, 190 aa, Oryza sativa
MGHMRAILRGYLMDSIPIAGSRRKRRDELRLHTAQAHAAVSVAQLAAAIAGVVSACELRSSSGGAGADRKLSTVLASAAALVATVCAEFAESAGADRSRVTSAVKAGLDSRSPAELLTLTATAATCNQHFSGETQPSDRSYKLTDAMMLSFLYAFSRSERSSCAEAESRRQQRDQQQHQQLHDDDEHQYS

SEQ ID NO: 52929 - protein, 233 aa, Oryza sativa; identical to SEQ ID NO: 30813

SEQ ID NO: 52930 - protein, 1507 aa, Oryza sativa
MAIVYEQHNKVIGPFDGTAHITVLLDRTDDRALRHRLLLLLKALMNDLSNVEVCVLVGGCVLAVDMLTVAHEASERTAIPLQSNLIAATAFMEPLKEWMYIDKDGKQVGPLEKDAIRRLWSKKSIDWTTKCWASGMSDWKRLRDIRELRWALAVKVPVLTPSQIGDAALSILHSMASAHSDLDDAGEIVTPTPRVKRILSSPRCLPHVAQAMLTGEPSIVEAAASLLKAIVTRNPKAMIRLYSTGAFYFALAYPGSNLLSIAQLFSATHTHQAFHGGEEAAVSSSLPLAKRSVLGGLLPESLLYVLERSGPSAFAAAMVSDSDTPEIIWTHKMRAEHLIRQVLQHLGDFPQKLAQHCHSLYDYAPMPPVTYPNLKDEMWCHRYYLRNLCDEIRFPNWPIVEHVEFLQSLLAMWREELTRRPMDLSEEDACKILEISLDDLVLGENGSSKQSSELSSGNLTNNIENIDEEKLKRQYRKLAIKYHPDKNPEGREKFVAVQKAYERLQASMQGLQGPQVWRLLLLLRAQCILYKRYGHVLEPFKYAGYPMLLNAVTVDKDDSNFLSSERAPLLIAASELIWLTCASSSLNGEELIRDGGIPLLATLLSRCMCIVQPTTPANEPAARIVTNIMHTFAVLSQFESGRAEILKFGGLVEDIVHSTELEFVPSAVDAALQTAANISVSSELQSSLLAAGFLWYVLPLLLQYDSTAEENATSEAHGVGARVQIAKNLHAVHATQALSRLCGLGGDGISPSNQSAFDALRALLTPKLADMLRNHPPKELLSNLNANLESPEIIWNSSTRGELLKFVDQQRASQGPDGSYDLTESHCFTYQALSKELNVGNVYLRVYNNQPDYEISDQEGFCIALLKFIAELVQKWNSLSLDENMMHQCGTAIETSVTENGDISGSTNEGKEEDSLEKHNRGVTDGDSEVIMNLRSGLTSLQNLLTSNPGLAAVFASKERLTPLFECLALPVPPESNIPQICLSVLSLLTKHAPCLEAMVAERTSLILLFQILHCNRSCRDGALTVLYSLASTPELAWAAAKHGGVVYILELMLPLEEEIPMQQRAAAASLLGKLVGQPMHGPRVAITLARFLPDGLVSAIRDGPGEAVVSCLEQTTETPELVWTPAMAASLSAQLSTMATDLYQEQMKGRVVDWDVPEQASGQHVMKDEPQVGGIYVRLFLKDRKFPLRNPKRFLEGLLDQYVSSVAATHYEANAVDPELPLLLSAALVSLLRVHPALAGHVGYLGYVPKLVSAMAYEGRRDTMASGQTTSRLQAEPSNQENSADSTVQTPQERVRLSCLRVLHQLASSTTCAEAMAATSAGTPQVVPLLMKAIGWQGGSILALETLKRVVGAGNRARDALVAQGLKVGLVEVLLGILDWRAGGRQGLCNQMKWNESEASIGRVLAVEVLHAFATEGAHCAKVREILNSSDVWSAYKDQKHDLFLPSNAQSSAAGVAGLIESSSSRLTYALTAPPPQPALVRLPSTAPALPSAPANPSGRHSYQHS

SEQ ID NO: 52931 - protein, 285 aa, Oryza sativa
MKYGRVDVTAAEQCPPEGRLPDAGPRVPADHLREVFYRMGLDDKEIVALSGAHTLGRSRPDRSGWGKPETKYTKDGPGEPGGQSWTVEWLKFDNSYFKDIKEQRDQDLLVLPTDAALFEDPSFKVYAEKYAEDQEAFFKDYAEAHAKLSDLGAKFDPPEGFSLDDEPAVEEKDPEPAPAPAAAPPPPPVEEKKEAEPTPVPVTVGAAVASSPADDNNGAAPQPEPFVAAKYSYGKKELSDSMKQKIRAEYEGFGGSPDKPLQSNYFLNIMLLIGGLAFLTSLLGS

SEQ ID NO: 52932 - protein, 628 aa, Oryza sativa
MRMRWWAAPLAAVLAVILLPSSTATLSPAGINYEVVALMAIKTELQDPYNVLDNWDINSVDPCSWRMVTCSADGYVSALGLPSQSLSGKLSPGIGNLTRLQSVLLQNNAISGTIPASIGRLGMLQTLDMSDNQITGSIPSSIGDLKNLNYLKLNNNSLSGVLPDSLAAINGLALVDLSFNNLSGPLPKISSRTFNIVGNPMICGVKSGDNCSSVSMDPLSYPPDDLKTQPQQGIARSHRIAIICGVTVGSVAFATIIVSMLLWWRHRRNQQIFFDVNDQYDPEVCLGHLKRYAFKELRAATNNFNSKNILGEGGYGIVYKGFLRDGAIVAVKRLKDYNAVGGEVQFQTEVEVISLAVHRNLLRLIGFCTTENERLLVYPYMPNGSVASQLRELVNGKPALDWSRRKRIALGTARGLLYLHEQCDPKIIHRDVKASNVLLDEYFEAIVGDFGLAKLLDHRESHVTTAVRGTVGHIAPEYLSTGQSSEKTDVFGFGVLLVELITGQKALDFGRLANQKGGVLDWVKKLHQEKQLSMMVDKDLGSNYDRVELEEMVQVALLCTQYYPSHRPRMSEVIRMLEGDGLAEKWEASQNVDTPKSVSSELLPPKFMDFAADESSLGLEAMELSGPR

SEQ ID NO: 52933 - protein, 458 aa, Oryza sativa
MQDPSTPGIFAQPVAYGPELVPAYTWDPSFALLDGVQGRPVGVHQTNYPARPKYSSNKLPSSKASRNTKSASDTIKGSSSALDTMSTSANGYPSSKTANKASGASISKGYPLSSKFAVHTNQGKDNLYQSKDIGMKESGRSWNSTEKLKARSKLNGYGDCDISDNLTDNSKNSLSPQGGHYGLSSAGGGNDVTPSPVAMSRDAYNLPDFVTKYDQALFFVIKSYSEDDIHKSIKYNVWASTPNGNKRLDNAFKLAQERVAEKGTKCPMFLFFSVNASGQFCGVAEMVGPVDFNRNMNFWQQDKWNGFFPVKWHIIKDVPNPQFRHIILENNENKPVTNSRDTQEVKFPQGSEMLNIFKNFSCKTSILDDFDFYENRQKVMQDRRGKPLATTLDHPMLKVEKPEETKRPSQFVSTVDLDTAKPDEVVFDKIATELDTAKLSEEQINKVEVEIGTTNSSE

SEQ ID NO: 52934 - protein, 492 aa, Oryza sativa; identical to SEQ ID NO: 47468

SEQ ID NO: 52935 - protein, 603 aa, Oryza sativa
MAEEVWTLRFFKHDRGPGAMVVEEPMDRDLVCFFNMVEIIEKLGYQKSDEIFFAQPGCYCRTSMTRIKGDSNVMDMLRENDSINKVDIHIFDRKVASSSALEEDVVADATDNVEANKNRDLEEKGSEQLKNSDEDLWMDQGDNTFLFVDGKEDEDSEYSDDDFDLDQEKIDYIHKLQEIKRQRADPRNRCEGDTDDEDLFVPVVDWSALSVVPVDSKDVAEAISNKAQCGVVNIQDGTDVASSNLQKKNSTKASRNVKGQNDVGSSQVEETVFSDPPSEDGGASAVEYESSDDGQKLDAQAKRRKRRRRESRVVNRRIYFDEDNIMDTTQLQEAMCFTNVDQYRRALKSYHIVQGRDYRYTRNEPRRVNVKCKEENCPFIMRGSRIAREHTFMLREMIPHTCGTTRANSRLNSTWLSYKYLENFRSDPDWKVSALQDQCMRELGTDVSKTMAYRAKRKAGEKVLGNHKKQYMRIRDYLQTVIDKNPGSTAVVSTVDRIALGMNPRFYGLFICLNAQRQGFLDGCRPFISIDGCFVKLSNGAQVLAATGRDGKNNLFPIAFGVVGKEDTKNWNWFLERLETAIGRGEAHGGWTIQTEGAHECSG

SEQ ID NO: 52936 - protein, 195 aa, Oryza sativa
MASFLSCRTPSIAIPVDSDASPRKNTPETVTSPLVNGEKSIFRDQVRGYSALGSPLRREVGNRSITRSFCIDNTDLEDGKAEKDRDRPSHFLSLPKIQNQALLSGLAYCISSCSMILVNKYILSGYGFSAGIFLMLYQNIVSVTIVSTLSLSGVIPTEPLTWKLIKVWLPVNIIFVGMLITSMFRYAPDIQIVLI

SEQ ID NO: 52937 - protein, 441 aa, Oryza sativa
MPPVAIQLYSLLFKLILRRRLSSLSASAASSSSSFGVSSRAAADHHHPSPPSNPSFSSAAGADAVATKDLHPDPLSSLHLRLFLPNPHHSAAPAAAANAPPPLRRNSFPQPAHDGGSPAAAVGQELSRRASASFSGVSPSAAPCYGGYRPTARSGRRLPVIVQFHGGAFATGAADSAANDAFCRRVARLCDAIVVAVGYRLAPESRYPAAFEDGVTVLKWIAKQANLAACGRTMARGAGSGGADSFGAALVEPWLAAHADPSRCVLLGVSCGANIADYVARKAVEAGKLLDPIKVVAQVLMYPFFMGTSPTQSELKLANSYFYDKSTCLLAWKLFLPEGEFSLDHPAANPLVPGKGPPLKLIPPTLTVVAELDWMKDRAIAYSEELRKVNVDAPVLEYKDAVHEFATLDVLLKTPLAQACAEDIAIWVKKYISLRGHELSY

SEQ ID NO: 52938 - protein, 350 aa, Oryza sativa
MERPKSVGVRELDGGIERSVAPVRPASHEGRVGEARGLEVQERPRVGDVPERPRVGDVLPERPKLKLLPRSKPIEASEPSPVYVEEKQVHQVPVVANTVQVDVIHDVHQNVVAPKAGVAGADAEGRAVERPRLNLKPRSNAVGQSDESAPKERQSLFGGARPREQVLRERGIDALASDLDKTSPVGRSKSEFAKGEQKVEAMSINPSGEKAESFPAGSRGPRNADKKDYRRDTDRSDVYRPTRREDNRRVARDVEKPEQQRPEPETWRKPVEPPKPEVVAPRFGKGASALELAQAFSKSMSDTVPQSRLTSVPSPKVPQSPGTRDQVGFSRLTDNRALHSSPSQRKINGY

SEQ ID NO: 52939 - protein, 407 aa, Oryza sativa
MWGDGKAMLKSRGGGAAGGAGGASGDEEADYCPPTPRKEWWTTGLLVRLVTVAVIFMAGVVIGLSASANVSRYYYNSHTELFFPSNTFGACERADCAPTFKSFVHPPHLAHSMSDPELFWRASLVPVADDFPFQRVPKVAFLFMTRGPLPFAPLWDRFFRGHHGLYSVYVHTLPDYKLNVSKNSAFFARQIPSEEVSWGSITLVDAEKRLLANALLDFSNERFVLLSESCIPVFNFPTVYEYLINSAHSFVESYNIDTPQCAGRYNRRMAPHILPSQWRKGSEWFELNRELALRIIADNKYYSIFRKHCRPSCYPDEHYIPTYLHLFHGSLNANRTITWVDWSRGGPHPARYGASNISEEFIQAIRNNGTRCTYNSKPTSVCYLFARKFAPSALGPLMNLTSTILDF

SEQ ID NO: 52940 - protein, 538 aa, Oryza sativa
MARGSGAGGGGGGGGGGLELSVGVGGGGGARGGGGGEAAAAVETAAPISLGRLILSGMVAGGVQYGWALQLSLLTPYVQTLGLSHALTSFMWLCGPIAGMVVQPCVGLYSDRCTSKWGRRRPYILTGCVLICLAVVVIGFSADIGYAMGDTKEDCSVYHGSRWHAAIVYVLGFWLLDFSNNTVQGPARALMADLSGRHGPGTANSIFCSWMAMGNILGYSSGSTNNWHKWFPFLKTRACCEACANLKGAFLVAVIFLSLCLVITLIFAKEVPFKGNAALPTKSNEPAEPEGTGPLAVLKGFRNLPTGMPSVLIVTGLTWLSWFPFILYDTDWMGREIYHGDPKGTDPQIEAFNQGVRAGAFGLLLNSIVLGFSSFLIEPMCRKVGPRVVWVTSNFLVCIAMAATALISFWSLKDFHGTVQKAITADKSIKAVCLVLFAFLGVPLAVLYSVPFAVTAQLAATRGGGQGLCTGVLNISIVIPQVVIALGAGPWDELFGKGNIPAFGLASGFALIGGVAGIFLLPKISKRQFRSVSMGGGH

SEQ ID NO: 52941 - protein, 439 aa, Oryza sativa
MAAAAPDKAVERLSQKLVHPSSPTPSAPLRLSWLDRYPTQMALIESLHVFKPDPARDAAGQGLAPARAIETALARALVEYYPLAGRLAVSRDSGELQVDCCGGAGGHGGVWFIEAAVPCRLEDVDYLEYPLAISKDELLPHPRPRPTRDEEDKLILLVQVTTFACGGFVVGFRFSHAVADGPGAAQFMGAVGELARGGERITVAPSWGRDAVPDPAGAMVGALPEPAGASRLEYLAIDISADYINHFKSQFAAATGGARCSAFEVLIAKAWQSRTRAAAFDPSTPINLSFAMNARPLLLPRGGAGFYGNCYYIMRVASTAGRVATASVTDVVRMIREGKKRLPSEFARWAAGEMAGVDPYQITSDYRTLLVSDWTRLGFAEVDYGWGPPGHVVPLTNLDYIATCILVKPWAHKPGARLITQCVTPDRVTAFHDAMVDIN

SEQ ID NO: 52942 - protein, 349 aa, Oryza sativa
MMLYALEETLDKIAIPPRGPGRLLLTAADLGCSCGRSSLVVADAIVQHMTKLCRGRGKHVDAVAAADPEFWFYFSDLPSNDFNTLFSLLPPHAASSGDGSGRRYFAAAVPGSFHDRLFPERSIDVFTSTFCLHWLSQVPDEVADTRSPAYNKGKVFVQGSSEETGTAYRRQFQSDMARFLRCRAAELKPGGAMFLVFVGRPSSAGPTDQGRSLNLLGTMFEESWRDLVDEGLIDGGRMDSFNIPSYAATLEEFRESVDADGSFAVNRLEHVMGGRLAVDDDPHDDRCAVGRRVANNQRSIFGPLVEAHIGRALADELFVRMERRAEELSDELVDEMGVRFHILCSLSLV

SEQ ID NO: 52943 - protein, 136 aa, Oryza sativa
MDYWLVFFRGAGDNIFDAIAVAASDHPAALRSRRDAIAQRFYTAYRWRCLPRGAPPPRHRRRSCSTPRAPLASLASVAPTAPMSSPTTAASLAMRTPSPPRPSASRPSSSTTKKSRRRRCSSCSGVCSSWSSRWTP

SEQ ID NO: 52944 - protein, 298 aa, Oryza sativa
MDESTAYRNLRGPSSFVLAMKTRLAPPPQLSDPPPPPLPAVPPSLLPPLLPPPEKRRRGRPRNCDRLTAPPGFFAPLPPPPPPQPQPPTLPAPHGQGQFGGLQPHLLQIDAGEEIIPKITALSKSNGRVICVLSVLGAVQEATLLLSSGVTSYHKGPLEIIRLFGSILTPNDQGCLRVTLASGDSSVIGGVITGPLKAATPVQVVVASFYSDVYWPNRTPKIIAPYPNSQSTIRNGSTLSSEHVNPGYVSYTAVDQHESSEVDVKPSLGMLNLASLDRHESSEVDVKPSLGMLNLASL

SEQ ID NO: 52945 - protein, 692 aa, Oryza sativa
MPHGRPPPPFPGGRDAFPQAASTVVPDPARFFAPALLSSPLPTNSFFQNFVLKNGDQPEYIHPYSVRSAAAALTLCYPARNHSPSFVIQTFVEDLTVSAASDAAAAAAGQRHRVAAFDDLSVTLDVSPSLRAFLVRGCPFVTVATADAAGPVDISVASVHAFIEVASCDDALTKWRLRMNSGQTFLLYASAPIRLAQSSVTQLSAPGFSGVIRVAYLPDPSMEAVLDQYSRCFPTAGEASLNRPFCVEYTWRKQGWGDLLMLAHPLHLRLLSEDCCVRVLDDFRYRSIDGDMVGVVGDSWVLRTDPVSPTWHSMRGISDDGVGEVAAALRKDVDALASSSITTTSSYFYGKAIARAARFAVIAEEVGCPDVIPAVQRFLKATVTPWLDGSFQGNGFLYEPKWGGLVTLQGSKDTGADFGFGIYNDHHYHLGYFLYAIAVLAKIDPSWGRKYMPQAYSMVADFMTLSRKHGASYTRLRMFDLWKLHSWAGGLTEFADGRNQESTSEAVNAYYSAALLGLSYGDTHLVSIGATLTALEMLAAQTWWHVREGDTIYEDDFTGNNRVVGVLWANKRDSGLWFAPPEWKECRLGIQLLPVLPISEALFPDISFVKELVDWTMPALSREGVGEGWKGFVYALEGIYNKESALQKTRALTGHDDGNSLTNLLWWLHSRGTADDGVVGFSRCCWYRQYCH

SEQ ID NO: 52946 - protein, 365 aa, Oryza sativa
MMAYSEPAARAVAEEVARWGGMRQTGVTLRYMMEFGARPTERNLLRSAQFLRRELPIRIARRALDLDSLPFGLSTKPAILKVRDWYLDSFRDLRCFPEVRNRDDELAFTEMIKMIRVRHNNVVPTMALGVRQLKKDLGGTKAFPPGIDEIHQFLDRFYMSRIGIRMLIGQHVTLHEPDPEPGVIGLISKRLSPMLVAQHATEDARAICMREYGSAPDVNIYGDPDFTFPYVKLHLQLMMFELVKNSLRAVQERYMNSDKHAPPVRIIVADGAEDVTIKISDEGGGIPRSGLSRIFTYLYSTAENPPDLDGRNEGVTMAGYGYGIPISRLYARYFGGDLQIISMEGYGTDAYLHLSRLGDSEEPLH

SEQ ID NO: 52947 - protein, 317 aa, Oryza sativa
MKSSPNQLSIFSYLLGICSLDTLLSPVGRKMDAISPLVILRMDNHISSFFSEFQPNGQAPISSTDKQVTPQVSHDGQVLEFAPPRRLKTEEIPNIVDDFRIAARNAIEAGFDGVEIHGANGYLIDQFMKDSVNDRTDAYGGGIENRCRFAAEVITAVAGEIGAHRLGVRLSPFADYMDCHDSDPEVLALRVIGLMNNLGVLYCHMIEPRMCVGAGEDGSKPVIAHGRLLPFRKAFRGTFMVNGGYDRDEGDKAVADGYADLVAYGRLFLANPDLPERFRRKAGLNKYDRSTFYTSDPVVGYTDYPFLDDQNSELATR

SEQ ID NO: 52948 - protein, 341 aa, Oryza sativa
MREYKHESDLLDQCSRLYDPSVSSRSFELYATQISQEIGSTSTIMDREMVSIRSLMAVVEEMMRNTDSAIRSYQKLRPNFIRRYSGTANTGFAHHAGPSGAPTYFNQPSAIVPTFDFYSGVAMRPSPFMQHTVSKFENRLEECSRMVGELEQLIQIKNDKNYSNAFESLSTVVPNVYDYLIHVATQVENLHQYAEVMRTHYRNAWRLMGDCSNPFLEADRREAAKQEATARIVHPTGVDVSVLASQPLQLSSPTGVTSSSTRAILRTPLSALPWFSIQTSPAPSPSPFSSSGSMLQPTPFGSASTLALGSTPARFASSALGGTSLFRTPPGGTHNILCVTG

SEQ ID NO: 52949 - protein, 175 aa, Oryza sativa
MAANAGNKIRNAKLVLLGDVGAGKSSLVLRFVKGQFVEFQESTIGAAFFSQTLAVNDETVKFEIWDTAGQERYHSLAPMYYRGAAAAIVVYDITNPASFTRAKKWVQELQAQGNSSTVVALAGNKADLLETRQVQIEEAKTYAQENGLFFMETSAKTATNVNDIFYEIAKRLLQG

SEQ ID NO: 52950 - protein, 783 aa, Oryza sativa
MEAMAGDKFLQKFRLYETRSKFYLIGRDKTRTLWRVLKIDRMEPTELEIEEDHTSYTENECQELLWRIHEGNRLTGGLKFVTKCYGIVGFIKFLGPYYMVLITRRRKVGTICSHEIYSVGKSELIAIPSPIVWPNVAYSRDENRYKRLLCSVDLSKDFFFSYSYNIMRSLQKNITDKNTGQVVYETMFVWNEFLSRAIRNHLKNTTWTVALIHGFFKQSKLSVAGKEFWLTLIARRSRHFAGTRFLKRGVNEKGRVANDVETEQIVFEDTPDEIPHQISSVVQHRGSIPLIWFQETSRLNIRPDIILKPDVDYKTTRLHFENLALRYGNPIIILNLIKTREKKPRESLLRAEFAKAIHYINKGLPDDKRLKFLHMDLSKLSRRKGTNVLSLLNKVASDVLDLTDFLHCEITTSKYEDASSGQGAVANSGDIENIQDQNLCATKLVPLLLQKGVLRTNCIDCLDRTNVAQFAYGLAALGRQLHVLQLNETPTIELHAPLADDLMDFYERMGDTLAIQYGGSAAHNKIFCEQRGQWKAATQSQEFLRTLQRYYSNAYTDPEKQDSINVFLGHFQPQEGKPALWKLDSDQHYNIGRQGTLTEETGRSFIKRSLSDGNILCDNTGGPVSDCNVGKNNTSSELLPMQPLEDIREPSDSAPEISIEPNPCSSTNYSTLSGRHSISEERQNYLRRLGYPELHSSNFLDLDLLSSSGNSCEEEIYERSSLINSPMDVVSIESTTSYSEQGHNDEQGRDDTDLSRSSSQMSDIRDYSDRFTHWVDGGGMLCY

SEQ ID NO: 52951 - protein, 379 aa, Oryza sativa
MANSRASRFKMSNLSEPSKEAASADDSSAVQKTGAWSNTLNILLQQASVYGVAAGYCLSASLLSIINKWAVMKFPYPGALTALQYFTSVVGVLLCGQLKLIEHDGLNLRTMWKFLPAAVMFYISIFTNSELLLHANVDTFIVFRSAVPIFVAIGETLYLHQPWPSLKTWLSLSTILGGSVIYVFTDNQFTVTAYTWAVAYLASMSIDFVYIKHVVMTIGLNTWGLVLYNNLEALMLFPLEMLLMGELNQMKGDSAKVTNWLSSDVILPVALSCLFGLSISFFGFSCRRAISATGFTVLGIVNKLLTVVINLLIWDKHASFVGTIGLLICMSGGVLYQQSTTKPKAPKAEPKEENDEEQQKLLEMQQGLESSSTQKQASS

SEQ ID NO: 52952 - protein, 324 aa, Oryza sativa; identical to SEQ ID NO: 30036

SEQ ID NO: 52953 - protein, 1074 aa, Oryza sativa
MATTSSACVSIAVLVVVLSSTSCYSSPSPTTTANGSSDTDLAALLAFKSQLTDPLGVLTSNWSTSTSFCHWLGVTCSRRRRHRRVTGLSLPHTPLHGPITPLLGNLSFLSFLRLTDTNLTASIPADLGKLRRLRHLCLGENSLSGRIPPDLGNLARLEVLELGSNQLSGQIPPELLLHLHNLQVISLEGNSLSGQIPSFLFNNTPSLRYLSFGNNSLSGPIPDGVASLSQLEILDMQYNQLSSLVPQALYNMSWLRVMALAGNGNLTGPIPNNNQTFRLPMLRFISLARNRIAGRFPAGLASCQYLREIYLYSNSFVDVLPTWLAKLSRLEVVSLGGNKLVGTIPAVLSNLTRLTVLELSFGNLTGNIPPEIGLLQKLVYLLLSANQLSGSVPRTLGNIAALQKLVLPHNNLEGNMGFLSSLSECRQLEDLILDHNSFVGALPDHLGNLSARLISFIADHNKLAGSLPEKMSNLSSLELIDLGYNQLTGAIPESIATMGNLGLLDVSNNHILGPLPTQIGTLLSIQRLFLERNKISGSIPDSIGNLSRLDYIDLSNNQLSGKIPASLFQLHNLIQINLSCNSIVGALPADIAGLRQIDQIDVSSNFLNGSIPESLGQLNMLTYLILSHNSLEGSIPSTLQSLTSLTWLDLSSNNLSGSIPMFLENLTDLTMLNLSFNRLEGPIPEGGIFSNNLTRQSLIGNAGLCGSPRLGFSPCLKKSHPYSRPLLKLLLPAILVASGILAVFLYLMFEKKHKKAKAYGDMADVIGPQLLTYHDLVLATENFSDDNLLGSGGFGKVFKGQLGSGLVVAIKVLDMKLEHSIRIFDAECHILRMVRHRNLIKILNTCSNMDFKALVLEFMPNGGLEKLLHCSEGTMHLGFLERLNIMLDVSMAVHYLHHEHYEVVLHCDLKPSNVLFDNDMTAHVADFGIAKLLLGDDNSMIVASMSGTVGYMAPEYGSMGKASRKSDVFSYGIMLLEVFTGRRPMDAMFLGDLISLREWVHQVFPTKLVHVVDRHLLQGSSSSSCNLDESFLVPIFELGLICSSDLPNERMTMSDVVVRLKKIKVAYTEWISAT

SEQ ID NO: 52954 - protein, 717 aa, Oryza sativa
MEKPASCCCYFPLRWESTGDQWWYASPIDWAAADGHYDIVRQLLHLDPNLLIKLTSLRRIRRLEALWDDDARFAGAAGHRAGVARSLLLECECSKNGGAAAAAENTLLRAGYGGWLLYSAASAGDMAFVQELMERDPLLVFGEGEYGVTDMFYAAARGGNAEVFRLLLDHAMSPRCSTNCPNGGEGARGGGGGRSSVFRLEMMSRAVHAAARGGSVEMLRELIERRSDVSEYLDFRGSTVLHAAAGRGQLEVVKYLMATFDIVDSTDNQGNTALHVAAYRGHLPVVEALVAASPSTISAVNRAGDTFLHSAIAGFRTPGFRRLDRQMELMRHLIRGRTSNIQKIINLKNDAGLTVLHMAVVGCVHPDLVELLMTTPSIDLNAEDANGMTPLALLKQQLRSSTSDKLIRQIVSAGGVLNSTVLRTRSAIVSQIKMQGGIASSPGTTFKISDAEIFLYSGIGTAESRRPSSCSSNGKCDHAHHGDAKCGNAENHGSSEKRLSSASRAKDRLKLMLKWPRQKMSRGHKKSDDGDAMDSIKKLSEQAVETPAPLRQTFTKTTALNNKRTLAVKTSTPSSATKKKLNSKLIHGIMEAMPHLASSSPASAFPRSSTPPPPQSGKMKGVCLELDDENSMTTPVFGKLKDIVLNNDDDDDAMGEPSSSGSSVNDDASAEMPARRHGCGNGRLINICFGAQGLTVEDSASGQQTSKMFKQQCLRVS

SEQ ID NO: 52955 - protein, 167 aa, Oryza sativa
MASPEPAAGADGASASQTAVVEPIRLPTPEEIKGQDIWNNCAVRSVVSGVMGGGLGVLMGLFFGALENPITAEEMTARQQIVYQAKQMGRRSISNAKTFAVMGLIFSAAECVIEKARAKHDTTNSAVAGCVTGGALAAKGGPKATCVGCVGFATFSVMIEKFLDRHS

SEQ ID NO: 52956 - protein, 612 aa, Oryza sativa
MSESNVDGIEISASNDERRDRGDAEISEDEPRQTRIRSLKKKALHASTRLTHSLKKRGKRKVGCRVPKITIEDVRDAEEEQAVSSFREVLFARDMLPERHDDYHTMLRFLKARKFDVEKAAHMWADMLHWRKDFGTDTILEDFEFHELEEVLQYYPHGYHGVDKEGRPVYIELLGKVEPSKLVQITTVERYIKYHVQEFERAFREKFPACSIAAKKHIDTTTTILDVHGVGWKNFSKIARDLVRCMQKIDGDYYPETLHQMFIVNAGPGFKLIWSTVKGLLDPKTSSKIHVLGTKYQHRLLEAIDSSQLPEFLGGSCTCSSQGGCLRSNKGPWSDPLIMKLVHCMESSALKDIGQVSDIEEAITGSVRLRALKLPERISYTSNAESGSDVDDLGSPIGQEDFEYHSLAPVHEEARESGSTCSGSDDKVVETNTRYNPPGNGSGQYSARQNPSINRVSPEPAGHVPNDGEGNADHGILKYISKKVLGVILEVLSFLRIFIRHRQQLENVPQHTTTVHSNQADLQIIKEDRVNPCLERLERLETMFNQLSRKPLEIPQDKDRAIQDSFDRIKCIEFDLEKTKKVLHATVIRQMQMAETLEAVKESDLRRRKFCT

SEQ ID NO: 52957 - protein, 543 aa, Oryza sativa
MAMMPSDSSHHGIVENSPYRTTQGRNEETGELGASWYFSRKEIEENSPSRRDGIDLKKESYLRKSYCTFLQDLGMRLKVPQVTIATAIVFCHRFYLRQSHAKNDRRTIATVCMFLAGKVEETPRPLKDVILVSYEIIHKKDPAAGQRIKQKEVYDQQKELILLAERVVLATLGFDLNVHHPYKPLVEAIRKFKVAQNALAQVAWNFVNDGLRTSLCLQFKPHHIAAGAIFLAAKFLKVKLPSDGEKVWWQEFDVTPRQLEEVSNQMLELYEQNCAAQAQPSHGNEAEGSSASVPNQRVSVKSEETPLPHQSKQSSSQHSTGAPSHHGVEHSNLEKQTVDQKMLQNDNGDHGSNKTRSNQSGSRVDFGANDGLHHDKQSMTENKNLPSHGNSSEIRDVNRNGNDGTNVTSLMVNKIDKDKVKAQMEKQRKLKGDVARKVEVIDDDDDLERQLEHDIELAVEDNKIKQERKQSSPHVMHRGDHRNADQVTGNGHLGKQNTPETAQDAPMDDIKEQRNSHGSKHHDSHDTAHERGERDYKRPRPEG

SEQ ID NO: 52958 - protein, 316 aa, Oryza sativa
MAAVTLGTETDGSILCPSSLNSVVGIKPTVGLTSRAGVVPISPRQDTIGPICRTVTDAVHVLDAIVGYDSRDAKATRAASKYIPPGGYRQFLKPDGLKGKRIGIPNGFFNFPNGTVQQIVYQQLLDTVRKQGAVVIENLDIANLAVIQDVLNNGEQIVLAAEFKSSLNTYLSDLSYSPVRSLADIIAFNNAHPIEERLKNFGQLIFLVAENTTGIGALEGAVIRQLNELSADGLEKLMQDEQLDAIITPNDLVSTVLAIGGMPAITVPAGYGKMGVPFGICFGGLKGYEPRLIEMAYAFEQATKVRKAPKFLHGTF

SEQ ID NO: 52959 - protein, 942 aa, Oryza sativa
MEQKPSPPPPPRSDEEEDGLMGCGMGGTGDIAGGDLDLMEGFLLATPGFDLSEFWHPGAASPFSPLFDIGSSVTTLTTPAPAAGEDDRDEAEMPSRGGGGLEVSPAHRGWTFQTAPQEVAVEPTVKERLRRALERIASQSQSQAQRGDGELLVQVWVPTRIGDRQVLTTCGQPFWLDRRNKRLANYRTVSMKYQFSADESARADLGLPGRVFVGRVPEWTPDVRYFSTEEYPRVQHAQYFDIRGSVALPVFEPRSRACLGVVELVMTTQKVNYSAEIENICNALKEVDLRSSDVSSDPRSKVVDASYRAIIPEIMDVLRAVCDTHNLPLAQTWIPCICQAKRGSRHSDESYKHCVSTVDEACYVRDCSVLGFHQACSEHHLFRGEGVVGRAFGTNEPCFSPDITTYSKTQYPLSHHAKLFGLRAAVAIQLRSVKTGSLDFVLEFFLPMKCINTEEQRAMLNSLSNTIQQVCYTLRVVKPKELVNDGPFEISQPTRPEFYAKSVHEDLDELCSGINVPGRTTSLEASEEVSSWIASLVDAQNKGGKGEIDVDLPFGFSKQDDEGFSVTAGWHTSPVMAPDGSMFSGFKRHEDYDVKENTCSSDPSNSNSDKAVEKRRTKTEKTVSLQDLRKHFAGSLKEAAKNLGVCPTTLKRICRQHGINRWPSRKIKKVGHSLKKLQMVIDSVHGPEGTVQLSSLYENFTKTTWSERELQGDVHFPASEQNFQLEPSVPDRPCEGRFTSHTSGSNSISPSCSQSSNSSLGCSSVPKTQQQHGSAPQLAVKEEISMDENQCSTLIKSASHAEAELQMFVEERPTMLFRSQSQVLLSEHKPIENMSNVQKARSDSLKIKAIYGEERCIFRLQPSWGFQRLKEEIVKRFGISQDTHVDLKYLDDESEWVLLTCDADLLECIDVYKSSSNQTVRILVNPSIQPLLNASFGQTGLS

SEQ ID NO: 52960 - protein, 393 aa, Oryza sativa
MRSSESSRFVQELVLYAASAALSCLVLFAGLRQLDPNRAASQKALQHKKEIAKRLGRPLVSTTPYEDVIACDVINPDHIDVEFDSIGGLDHVKQALYELVILPLRRPELFTFGKLLSPQKGVLLYGPPGTGKTMLAKAIAKESGAVFINVRISNLMSKWFGDAQKLVSAVFSLAHKLQPAIIFIDEVDSFLGQRRTTDHEAMTNMKTEFMSLWDGFTTDQNARVMVLAATNRPSELDEAILRRFTQIFEIGIPVQSERSKILRVVLKGENVEPNINYDYIAGLCEGFTGSDILELCKQAAFYPIRELLNNEKDGRKADKPRPLRQSDLEKALSTSRKGKRAANGTSTGLQSPVWIRPSDSEDDQVQSAIFEISKLMSRIVQNSQSEPQEPSSP

SEQ ID NO: 52961 - protein, 49 aa, Oryza sativa
MKVLNQRMKLMMMLMKLFKIMIILHHLQWYNFLTHFFINYIISNGIITM

SEQ ID NO: 52962 - protein, 465 aa, Oryza sativa
MAELPLAAGLLDLRPCKLAPPPPPPLPVSPSPRHHRRPHSTATACRAAPDLHSSTELADGSIVFRFARPRDDDDEEQQQRRADAVAPEAAAVVESGLDGDAAAAAEPEARDGGGEGEVTATATGLDAEEVVASGGAEATATSGLEDAGEEASDGSTARDSDTDVDTESSASTAADDDQPAEFAVPPPPAEEVCNKVDWEKDTSEVKNTDRMVPVASSTLVLASGAAILPHPSKAATGGEDAYFIACDGWFGVADGVGQWSFEGINAGLYARELMDGCKKFIMENQGAADIKPEQVLSKAADEAHSPGSSTVLVAHFDGQFLNASNIGDSGFLVIRNGEVYQKSKPMVYGFNFPLQIEKGDNPLKLVQNYTIELEDGDVIVTASDGLFDNVYEQEVATMVSKSLQADLKPTEIAEHLAAKAQEVGRSAAGSTPFSDAALAVGYLGFSGGKLDDIAVVVSIVRKSEI

SEQ ID NO: 52963 - protein, 450 aa, Oryza sativa
MGQLRSVVSAPETGDLVRRLTESYKGRRLMVGVDDVDLFKGIGLKFLAMEQLLVEHPELRGRAVLVQIANPARSEGRDIQEVQGEARAISARVNARFGTPGYTPIVLIDRGVSVHEKAAYYAAAECCVVSAVRDGLNRIPYIYTVCRQESTGLDDAAKRSVIVLSEFVGCSPSLSGAIRVNPWSVESMAEAMNAALRMPEPEQRLRHEKHYKYVSTHDVAYWAKSFDQDLQRACKDHFSRRHWGIGFGMSFKVVALGPNFRRLSVDHIVPSYRKSDNRLILLDYDGTVMPEGSIDKAPSNEVISVLNRLCEDPKNRVFIVSGRGKDELGRWFAPCEKLGIAAEHGYFTRWSRDSAWETCGLAVDFDWKKTAEPVMRLYKEATDGSTIEDKESALVWHHDEADPDFGSCQAKELLDHLENVLANEPVVVKRGQHIVEVNPQVSACHLPSFL

SEQ ID NO: 52964 - protein, 543 aa, Oryza sativa; identical to SEQ ID NO: 52957

SEQ ID NO: 52965 - protein, 432 aa, Oryza sativa
MMASRRGSGGNTSSCCALCEGSNLPSCCSACVNSKLAEYHAKLRMMKNLRDSLNARIATRLDAKRKGDEQRNWRVSKAHDIKELRDHLAELKRRNAIEKKKAEQASRDLRERTALLNLAFVTLKKKRNDSSVMHTNAMKAAQMGLMATTSEHLKMQSKAMKQLCRLFPLRRVIKDGEQNDGYNGPYDVICNARLPRGLDPHSVPSEELSASLGYMLQLLSIVVPILAAPVLHISGFGASCSRVWQRSSYWSTRQSQSKVYPLFIPRKNNCSVGEDNSWTESGSGNFGVQSVDSDNKSVLDSKRSNSFNFSIASSHSMERHQDLQRGISLLKTSVTAITTYYYNSLGMDVPSNLSTFEAFAKLLHMLSSLKVLRTTLQSNVASRSEKQGQQLNRSIWKASSAISSNSSLMDSVNTAIMFSGQPPAELQHELPV

SEQ ID NO: 52966 - protein, 418 aa, Oryza sativa; identical to SEQ ID NO: 44607

SEQ ID NO: 52967 - protein, 564 aa, Oryza sativa
MPSPTCYLLLNPTASRSHHRPRLPLPAAAPPRRRVHVSCDARRTGGGGGGGGVKREAIPAGTGKAKKQVVFFDAAPPVSQRGGGGGGEGEGEGEGEGKVARRKENAALGLVRRLTKRTLSLLSNLPLAISEMFAIAALMALGTVIDQGEAPSYYFEKFPEDNPVFGFITWRWILTPGFDHMFSSPVFLGLLALLAASLMACTYTTQIPIVKVARRWSFMRSAGSIRKQEFAESLPRASIQDLGVILMGYGYEVFTKGPSLYAFKGLAGRFAPIGVHIAMIFIMAGATLSATGSFKGSVDVPQGLNFVIGDVMKPKGVLSFVPDVFNTEVHVNRFYMEYYDSGEVSQFYSDLSLFDLDGKEVMRKTIKVNDPLRYGGVTIYQTDWGFSALQVKKNGEGPFNLAMAPLKLNGDKKLFGTLLPLENSGSSNVKGISMLARDLQSIVLYDQEGKFVGVRRPSSKLPIEIDGNEIVIEDAIGSTGLDLKTDPGIPIVYAGFGALMLTTCISYLSHSQIWALQDGSTVVIGGKTNRAKLEFSEEMNRLLDKVPELISVNEKKIDSKQSAT

SEQ ID NO: 52968 - protein, 605 aa, Oryza sativa
MQLLTAASASASSAAASPPSAHLLRLSRPPPFPHLRRRCAPHLPSKPLNLAARSPLLLARRSLPFAPRAHGDHHHGHHHHHHGHGHSHHHGPEVHGSGGGAAVMRVAKAIGWADVADALREHLQLCCISLGLLLIAAACPHIPVLNSVRRLQDALIAVAFPLVGVSAALDALVNIADGKINIHVLMALAAFASIFMGNSLEGGLLLAMFNLAHIAEEHFTSKSMIDVRELKENHPEFALLLETCGDQSAQFANLCYTKVPVHDLEVGSHILVRAGEAVPVDGEVYQGSSTVTIEHLTGETKPLERTVGDAIPGGARNLEGMMIVKVTKSWEDSTLNRIVQLTEEGQLNKPKLQRWLDEFGEHYSRVVVVLSLVVALLGPLLFKWPFFGNSVCRGSIYRGLGLMVAASPCALAVAPLAYATAISSLASKGILLKGGHVLDALSACQSIAFDKTGTLTTGKLMCKAIEPIHGHSDVTNDFSDQACCTPNCESEALAVAAAMEKGTTHPIGRAVLDHSVGKDLPLVAVESFECLPGRGVVATLSGVKAGNNEDELSKASIGSVEYISSLYRSSGESEQIKEAVKASAFGPEFVQAALTVDKKVTLFSL

SEQ ID NO: 52969 - protein, 459 aa, Oryza sativa
MDRFKMIKEVGDGTFGSVWRAINKQNGEVVAVKKMKRKYYSFEECMSLREVKSLRRMNHPNIVKLKEVIRENDILYFIMEYMECNLYQLMKDRVKPFSEAEVRNWCFQIFQALAYMHQRGYFHRDLKPENLLVSKDVIKLADFGLAREVTSVPPYTEYVSTRWYRAPEVLLQSSIYDSAVDMWAMGAIMAELLTLHPLFPGTSEADEILKICNVIGSPDEQSWPQGLSLAETMKFQFPQVSGNQLAEVMTSVSSEAVDLISSLCSWDPCKRPKAAEVLQHTFFQGCTFVPPTVRSKAGVLPKTPPCVGVKGVSEHGMPRRYSTGTLSTTKPHSNASLKSSGLSKTGVQRKLQMDRQAPQKIKKPTESNNKLTTNRVPARNSPGHPVLRHSRSLPETGRATMHKVSTLTERLTHMSVTSRTRTTPKPAAPLLKAGLGKSDLLGKTDEIPPAKRLTRKLVS

SEQ ID NO: 52970 - protein, 842 aa, Oryza sativa
MDAPGGGGGGGGGGGGVDAGEPVWDWGNLLDFAVHDDDSLVLPWGDDSIGIEADPAEAALLPPAPSPQPAEAEAEAAGPASLPSSMQAEGSKRRVRKRDPRLVCPNYLAGRVPCACPEIDEMAAALEVEDVATELLAGARKKPKGAGRGSGAAVGGSGGGASRGTPAEMKCQVPGCEADIRELKGYHRRHRVCLRCAHAAAVMLDGVQKRYCQQCGKFHILLDFDEDKRSCRRKLERHNKRRRRKPDSKGILEKDIDDQLDFSADGSGDGELREENIDVTTSETLETVLSNKVLDRETPVGSDDVLSSPTCAQPSLQIDQSKSLVTFAASVEACLGTKQENTKLTNSPVHDTKSTYSSSCPTGRVSFKLYDWNPAEFPRRLRHQIFEWLSSMPVELEGYIRPGCTILTVFVAMPQHMWDKLSEDTGNLVKSLVNAPNSLLLGKGAFFIHVNNMIFQVLKDGATLTSTRLEVQSPRIHYVHPSWFEAGKPIDLILCGSSLDQPKFRSLVSFDGLYLKHDCRRILSHETFDCIGSGEHILDSQHEIFRINITTSKLDTHGPAFVEVENMFGLSNFVPILVGSKHLCSELEQIHDALCGSSDISSDPCELRGLRQTAMLGFLIDIGWLIRKPSIDEFQNLLSLANIQRWICMMKFLIQNDFINVLEIIVNSLDNIIGSELLSNLEKGRLENHVTEFLGYASEARNIVDNRPKYDKQRQVDTRWAGDYAPNQPKLGISVPLAESTGTSGEHDLHSTNAASGEEENMPLVTKALPHRQCCHPETSARWLNAASIGAFPGGAMRMRLATTVVIGAVVCFAACVVLFHPHRVGVLAAPVKRYLSRNYSS

SEQ ID NO: 52971 - protein, 86 aa, Oryza sativa
MDVTCLTMELRKQMRRTHIVIDTVTPVDEKKEKEEKEKKEKEEKEKKEKEEKEKKKKEEEQNNPKIVCTPYYVHMVDEPSPSCCQM

SEQ ID NO: 52972 - protein, 110 aa, Oryza sativa; identical to SEQ ID NO: 31336

SEQ ID NO: 52973 - protein, 296 aa, Oryza sativa
MRVGVDRNKYQIQIPLPPKIDPSVTMMTVEEKPDVTYNDVGGCKEQIEKMREVVELPMLHPEKFVKLGIDPPKGVLCYGPPGTGKTLLARAVANRTDACFIRVIGSELVQKYVGEGARMVRELFQMARSKKACIVFFDEVDAIGGARFDDGVGGDNEVQRTMLEIVNQLDGFDARGNIKVLMATNRPDTLDPALLRPGRLDRKVEFGLPDLEGRTQIFKIHTRTMNCERDIRFELLARLCPNSTGADIRSVCTEAGMYAIRARRKTVTEKDFLDAVNKVIKGYQKFSATPKYMVYN

SEQ ID NO: 52974 - protein, 492 aa, Oryza sativa
MSSDSNSISSALSQTTPVLRLRVWVLIAIGIGILMAILFIIALWLSMRRKKKTAVGFDGRSHMEIPIVSKDINVDRVDAQSLHDSGTPIMPVQDKYEQMKGVSHLAESRSVDVDAFSQCSSVYNIEKAGSSYSEDYSSSGPGRKGSSSYGYASASPLVGLPELSHLGWGHWFTLRDLEYATNRFAKSNVLGEGGYGIVYKGRLMNGTEVAVKKILNNVGQAEKEFRVEVEAIGHVRHKNLVRLLGYCVEGIHRMLVYEYVNNGNLEQWLHGAMSGGILTWENRMKILLGTAKALAYLHEAIDPKVVHRDIKSSNILIDDEFNSKVSDFGLAKLLNSDSSYINTRVMGTYGYVAPEYANSGMLNEKSDIYSFGVVLLESVTARDPVDYSKPADETNLVEWLKMMISSKRAEEVVDPNLEIKPPKRALKRAILVGLKCVDPDADKRPKMSHVVQMLEAVQNAYRQDQKRPSSQMGSVDVESQQSAEEISNSADS

SEQ ID NO: 52975 - protein, 360 aa, Oryza sativa
MEQAAGLVYQLFQNEMFPWILALFPFLLLALHYLATNHRTPTTCKETRNHLSPPSPPRLPIIGHLHLIGDLPHVSLRELAHRYGPNLMLLHLGQVQNLVVSSPHAAEAVLRTHDHVFASRPHSLIGDILLYGPSDVGLSPYGEQWRRSRRIVTTHLLTNKKVRSYHVAREEEVHKVMTKVHELSTKGMGVDMFELFSTYSNDLICRLVSGKNFQGDKGRNKMFRQLFKANYVLLAGFNLEDYYPGLARLKAVSWVMCAKARNTRKLWDELLDEIINDRMSKQPCEHDRGNDDQDEMDFVDVLLLQERGITRDHLKAILVDMFQAGTETTSVVLVFAMAELMQKPHLMAKLQAELRTNIPK

SEQ ID NO: 52976 - protein, 227 aa, Oryza sativa
MEPPLLGLPNYHQDGSYAEYLANFQERSHTDDWFGTENMDVLVSWTKNLCSNKDLRSCSVLDIGTGSGRLSQQLAKQGFSDLTGIDHSEGAIEVARNLAIRDGFEHINFLVDDVLESKLERRFELVMDEGTLDTIGLHPDGPVKRMMYWQSVAGLVSPGGILVITSCSRTKDELVQEVESFNQRKLSAMGSEGAQASDTAVFKYIDHVQTYPIVDSSCITTVAFSHS

SEQ ID NO: 52977 - protein, 342 aa, Oryza sativa
MAPLLSPPLLADSVAKFHCSSTPTPCSGSVRRWAITRFAGAGRRRDWHRRRRTSGRGVLTVSAVAAESPSSGGGVAEDYYAVLGVMPDATPQQIKKAYYNCMKACHPDLSGNDPDVTNFCMFINEVYTVLTDPIQRAVYDEIHGYAATATNPFFDDSAPRDHVFVDEFSCIGCKNCANVCSKVFEIEEDFGRARVYNQSGNAELIQEAIDTCPVDCIHWTSAAQLSLLEDEMRRVERVNVGLMLAGMGSSVDVFRMASTRWEKRQAKVLEKVRRRVSQEDSGKGSSWSDVWGAPTRYRKNEDEARERAKRAAAAARRWREYSRKGADKPPTFKLPEAVSNKE

SEQ ID NO: 52978 - protein, 426 aa, Oryza sativa
MERISTNQLYNSGIPVTVPSPLPAIPATLDENIPRIPDGQNVPRERELRSTPMPPHQNQSTVAPLHGHFQSSTGSVGPLRSSQAIRFSSVSSNEQYTNANPYNSQPPSSGSSSTLNYGSQYGGFEPSLTDFPRDAGPTWCPDPVDGLLGYTDDVPAGNNLTENSSIAAGDELAKQSEWWNDFMNYDWKDIDNTACTETQPQVGPAAQSSVAVHQSAAQQSVSSQSGEPSAVAIPSPSGASNTSNSKTRMRWTPELHERFVDAVNLLGGSEKATPKGVLKLMKADNLTIYHVKSHLQKYRTARYRPELSEGSSEKKAASKEDIPSIDLKGGNFDLTEALRLQLELQKRLHEQLEIQRSLQLRIEEQGKCLQMMLEQQCIPGTDKAVDASTSAEGTKPSSDLPESSAVKDVPENSQNGIAKQTESGDR

SEQ ID NO: 52979 - protein, 186 aa, Oryza sativa
MALSTSRPHHLLRPLLRGFHATSQAMARPEPHEFSKPSDYLGSWEPAGDPREAWARLERLRKGYARDVRQLRRQYSYEMQLLEAERQRKAEARAEAARLANEERKATKAAAAQTRAAERRAFEKDFRQALMKERAEKLESWREKEKLKVQKKADHRELLRKKSSMWVAEDKLETTILDAIKNTTAL

SEQ ID NO: 52980 - protein, 545 aa, Oryza sativa
MASPFHSSFPLSPPSSCHGGGVLQFATRAATSPFASYCRAPAARDGGDDHDHDAGILQALAFNGNGSVHGVLDPGVEEEKEAGDGGGGGRRGTRIRARDCAKRIMGLPVEERVKVLDLLQRDDGALTVSDYNDILSALAMAGDHDSAVALFRALRPNGVTPDAQSYATAVQCLCRKGAPDEAKEALDEMVARGFRPTVATFSAVVGCLCKRGRVTRAMEVFDTMRAVGCEPTIRTYNSLIGGLCYVGRLEEALDLLNKLKESPKQTPDIYTFTIVLDGFCKVGRTDEATPIFHDAVRNGLSPTIFTYNALLNGHCKEGNPLKAYSLLMEMCGNAACPPDRISFSIVLQALLRAGETSAAWQAYKRMERAGFEADGRALDTLARGLCRQCAANVAALADAREVFGKLVASGHEPVSYTYCLMAQALARGGEVDAAVSLLGEMARRGYALRKRAYTDVVRALCERGRARDALRVLALVIARDFVPGRNAFDALLGELARQGRWPDAMAVYAAAVKRGVLVSLKRHSKEALLVQEQTETRESSVQPCN

SEQ ID NO: 52981 - protein, 141 aa, Oryza sativa
MPECHCWVPARCRQVRRPMIPSLRHAGASWFAVIAPFVRNVFTSSSRRRRDVSSPHQHDIVTSVRDAFSSLCRDEMLSVHGAFPLFVKICVVRPWRFPPLVKNRCHSFVILSFFVEIDVAVRPCIGVLLIFINIKQEWCRL

SEQ ID NO: 52982 - protein, 342 aa, Oryza sativa; identical to SEQ ID NO: 29675

SEQ ID NO: 52983 - protein, 564 aa, Oryza sativa
MSLRPSERMGIRQKGYKASMDAAEGRRRREDITVILRKADRDRALKEKRRRPTATAAAEGLPQAAHSSAIEKKLESLPMMVQGLYSDDSSMQLESTTQFRKLLSVDHCPPIDEVIRSGVLPRFVEFLTREEYPQLQFEAAWALTNIASGTAANTMAVIEHGAVPIFVKLLSSPREDVREQAVWALGNVAGDSTKCRNLVLMHGAMLPLLQQLNEHAKLSMLRNSAWTLSNFCRGKPQPDFKHVEPALPVLRELILSQDEEILTDSCWALSYLSDGSNDNIQAVIETGVCDWLVELLSHPSPVVLIPALRTVGNIVTGDDAQTQCIVGHPQALPCLFNLLTTTQKKSVKREACWTISNITAGTKEQIQAVIDSNIIAPLLHLLQHAEFDVKKEAVWAISNATSGGTFNQIEYLVSQGCIKPLCDLLVHQDSKTVLTCLEALDNILRVGEAKKNLGACNMNIFVPMVDEADGLDKIEDLQNHDNVEIYNKAVYVLESYWVQEDDQQPFLIPSVSESESDNEMFQFGSFGKGKFLFTNGWNCESESDNEMFQFGSFGEVPDLDGNAP

SEQ ID NO: 52984 - protein, 675 aa, Oryza sativa
MARPPSPSPVVPVKREPDGATAAVSDAYTPRPPLRKRRRLPSTPTQPLLLTPQAMSSTRDSFAGERSGLAPASVPTSVKRELGADGDGDGDGDRDARGKAVSVAEGNLQPRKTALAELPTLLANRRRLDRLLHELVRSHRWGDAAGVISALVSGTRHPESFDEMRSVFAVGMEIHRRLAENSGIQQNTRSRYYLRTQKLYDVWMRRLMWLPTCERKYMVKLELALFYLSQGCIDSAYNTTKTLIAKDGLKTPIVNLIHGLISYDNWYSGLPEDMQLEEFDVYCESHTVSMATHHCDENGQQDTSDDNCSIDADSSSPGCSSKSSINNWNIDKQRKFPEKPGFVHSAREDDSVGSQVDEKMVDTDFRSVFFNTANSPTCGLEKSLLPLRLKHSDGTPNACFDSYWKYKSTPNAFYEDAEKCLRVALYSTPPIMAALLPLIQILLLGDKLKDALAELEKICHSSTTALPFRLRGRLLEYFDQNQVSIISSCYAEALRRDPTCTYSMERLTRLHRKGYYNTIELLEAIALHLDSVNGKPCIWEELVSCFLRLFSEWTTDYGDCMSCNVQGDATFTASSKFSCVFFEQNTRETWKVRCTWWMNRHFSQSICTSETLTGDCKLLASKAACACHLFGPEFEYVEAVEGYLSGQKADDEIAFLSRNMQNSVRLLQTLEGLTS

SEQ ID NO: 52985 - protein, 90 aa, Oryza sativa
MIIKLQCLKNKIVKTLLMRLVMLMKQHVQRGGIMTWMVNFMLLSPQILGQGVQICAVQALRAVICHWIRWIEMQLNLLVGHIQPSQIQIL

SEQ ID NO: 52986 - protein, 1031 aa, Oryza sativa
MCTLGKQRGRGSEGLMSVNKTVKLTMPVLLALLLLSYGTGSIRCTTIAGNSTDVLSLLDFKATTNDPRGALSSWNTSIHYCWWSGVKCKPNTRGRVTALKLAGQGLSGQITSFLGNLTDLHTLDLSSNNFSGQIPPLTNLQKLKYLRLGQNSLDGIIPDSLTNCSNLFYLDLSNNMLEGTIPPKIGFLNNLSVLAFPLNFLTGNIPSTLGNLTNLNIMLLANNKIDGNIPQELGQLSNLGWLSLSENNLSGGFPQGFFKNLSSLQILSIQTTLLGGTLPFDIGNTLPNLTKLFLADNMFEGHIPASLGNASLLRGIDLSLNNSTGHIPNSFGRLSGLSTLNLETNKLEARDNQGWEFLEALRGCNNLNVLSLADNLLFGDVPNSIGGLSINLTILLLGGNNLTGIVPLSIGNLQGLISLGLDNNGFSGTIEWIGKLKNLQSLCLRNNNFTGPIPYSIGKLTQLTELYLRNNAFEGHIPPSLGNPQLLLKLDLSYNKLQGTIPLEISNLRQLIYLQLASNKLNGEIPDALGMCQNLVTIQMDQNFLRGDMPISFGNLNSLTILNISHNNLSGTIPVALGYLPLLSKLDLSYNNLQGEVPTVGVFRNVTSAYLDGNSRLCGGVTDLHMLSCPQVSNRIKRDSDITKRDYNLVRLLVPIFGFVSLTVLIYLTCLAKRTSRRTDLLLLSFGKQFPRVSYKDLAQATGKFSESNLIGRGSYSSVYRAKLAPTKLQVALKVFDLEVRCADKSFLSECEVLRSIRHRNLLPVLTACSTIDNSGNAFKALIYEYMPNGNLNMWLHKQFASVASKCLSLAQRVNIAVDIANALSYLHHECERSIVHCDLKPTNILLDDDMNAYLGDFGISNLVIESRVTSLGHSSPNSSIGLKGTIGYIAPEYAQCGHASTYGDVYSFGIVLLEMLTGKRPTDPMFENELNIVNFVEKNFPEQIPQIIDAQLQEERKRFQATAKQENGFYICLLSVLQVALSCTRLIPRERMNTREIAIKLHAIKTSYAEATKRESTLCRRELECVMELV

SEQ ID NO: 52987 - protein, 586 aa, Oryza sativa
MAPALPRRLLPWLRTPPSSSSAAAFSSAPSRGCPLHAALARRGAPAAASLALYARIREEASPPTPFTFSLLLAALASSSSSSPSPSPSAGCARLAAACLAHAQAFKCGALAHPVVTNSLLKLYCSLGLLDRARRVLYSGGAALDVVSWNTMVSGYGKGGDLGAAREVFARMPERNLVSWSAMVDACVRAGEFGEALWVFDRMMREEFRPDVVVLVSVLKACAHLGAVERGRWVHRYLETGSFGGRRGNLMLETALVDMYCKCGCMEDAWQVFDGVHRRDVVLWNAMIGGLAMNGYGERALELFRRMLQKGFMPNESTFIAVLCACTHTGRVDEGKRVFKSMQDYGIKPQREHYGCLADLLGRAGNVEEAEALLLDMPMEPHASQWGALMSSCQMHNDINVGERVGKRLIELEPYDGGRYVVLFNLYAVNGRWEEARTIRQMMEDRGAKKETGLSFIELNGLVHEFISGDTRHPLTRKIYALLEDIERRLQLIGYVKDTSQVIMDMDDEEDKGIALSYHSERLALAFGILNIPQGVPIRIVKNLRVCRDCHVHSKLVSKLYEREIIVRDRHRFHVFRDGVCSCNDYW

SEQ ID NO: 52988 - protein, 988 aa, Oryza sativa
MDSRPPETDAPAEAVPPAAAAAAAAAGDVEITRPRNDKRGYRRVVLPNDLECLLVSDPDTDKAAASMNVSVGYFCDPEGLEGLAHFLEHMLFYASEKYPIEDSYSKYITEHGGSTNAFTTCEHTNFFFDVNHDCLNDALDRFAQFFIKPLLSADATLREIKAVDSENQKNLLSDPWRMNQLQNHISLESHPYHKFGTGNWDTLEVKPKEKGLDTRLELIKFYDSHYSANLMQLVVYGKESLDNLQTLVENKFCGVRNTGRERFSFPGHPCSSEHLQVLVKAVPIKQGHTLRIPWPITPNIRHYKEGPCKYVSHLIGHEGEGSLFYVLKKLGWAMSLEAGEGDWSYEFSFFSVVIKLTDVGHEHMEDIVGLLFRYITLLQTSGTLKWIFDELQTICETGFHYRDKGPPIHYVANISSNMQIYPPEDWLIASSVPSKFSPDAIQGILNELTPDNVRIFWESKKFEGQTNLTEPWYGTSYSVEAVPPSIIQKWVEKAPVEDLHMPKPNIFLPSDLSLKNAEEKASFPCMLRKTLFSRVWYKPDTMFFTPKAYIKMDFHCPLSRSSPESSVLTDVFTRLLMDYLNDYAYDAQVAGLYYGVRPNDTGFQITMVGYNDKMRTLLETVIGKIAEFEVKADRFSVIKETITKEYENFKFRQPYQQAFYYCSLILEEQTWAWDEELAAVSQIEASDLEKFLPHLLGKTFIESYFAGNMEPGAVKGVMQHVEDILFNAPVSLCKALPSSQHLTKRIVKLERGLRYYYPALCLNHQDENSCLLHYIQIHQDDLKKNVILQLLALVAKQPAFHQLRSVEQLGYITLLRQKNDSGVRGLQFIIQSTVKDPANLDARVEAFLTMFEGTLYQMPDTEFKSNVNALIDMKLEKYKNIREESAFFWGEISEGTLKFDRKEVEVAALRDLKKEELIEFFNNHVKVNAPQKKILSIQVYGGLHSSEYEKIVHDEPRPNSYQITDIFNFRRSRPLYGSYKGGVGQMKL

SEQ ID NO: 52989 - protein, 536 aa, Oryza sativa
MAAAAALWQPQEEGLREICTLLDAHISPNSDQARIWQQLQHYSQFPDFNNYLVFLLARGEGKSFEARQAAGLLLKNNLRATFSSMPPASQQYVKSELLPCIGATNKAIRSTVGTVISVLFQIVRVAGWIELFQALHQCLDSNDLDHMEGAMDAIYKICEDVPEELDVDVPGLPERPINVFMPRLLQFFQSTHAILRKLALGCINQYIVVMPAALYMSMDQYLQGLFNLAKDPSADVRKLVCSAWVQLIEVRPSILEPHLKNVTELMLQANKDSDDEVALEACEFWSAYCDVSMPPEGLREFLPRLIPTLLSNMSYSDDDESLADAEEDESFPDRDQDLKPRFHASRLHGSETGEDDDDDDAVNVWNLRKCSAAGLDVLSNVFGDDILPTLMPLIQQNLARTDDDAWKEREAAVLSIGAIAEGCITGLYPHLPQIVAFLIPLLDDKFPLIRSITCWTLSRYSKFIVQSLEHPNGREQFDKILLGLLRRVLDTNKRVQEAACSAFATLEEVIYLIFEPFLFEIFCIIIIYFLLFSGGC

SEQ ID NO: 52990 - protein, 452 aa, Oryza sativa
MSFRSIVRDVRDSFGSLSRRSFEVRISGLPGLSGHHRGKSLGSLSELRDRPVVVDQSRWVGLPPELLRDVMKRLEEGESNWPSRKDVVACAAVCRTWREICKDIVQSPEICGKLTFPVSLKQPGPRDGLIQCFIKRDKSKLTYYLYLCLSPAVLSENGKFLLAAKRNRRATSTEYIISVDSKNISRSSNGYVGKMRSNFLGTKFVVYDTQPPYNAGSLMSCQHGSRRISSRRVSPKLPTGSYPIAHVKYELNVLGTRGPRRMQCTMHSIPASAVDPEGVVPGQPEQLLPGPFEESFRSTNTSSRFSFMDRSLDFSSSRFSEISGSANQQGEDDIPEAKERPLVLRNKVPRWHEQLQCWCLNFRGRVTVASVKNFQLIAAASSESSQLEQQQQQQQQQNHASSSSSASDHGKVILQFGKVGKDMFTMDYRYPLSAFQAFAICLTSFDTKLACE

SEQ ID NO: 52991 - protein, 691 aa, Oryza sativa
MSLLRRRKQPQPPPEQPNEDSSNGSDLDEKGKKKPGSSSSSAAPPPEAAAAAAKEATKRTRARWSCVDSCCWLVGCVCSAWWLLLFLYNAMPASFPQYVTEAITGPLPDPPGVKLQKEGLRAKHPVVFVPGIVTGGLELWEGHQCAEGLFRKRLWGGTFGDVYKRPLCWVEHMSLDNETGLDKPGIRVRPVTGLVAADYFVPGYFVWAVLIANLARIGYEEKTMYMAAYDWRLSFQNTEVRDQTLSRIKSNIELLVATNGGNRVVVIPHSMGVLYFLHFMKWVEAPPPMGGGGGPNWCAKHIKSVMNIGGPFLGVPKAVAGLFSSEAKDVAVARAIAPEVLDSDFLGLQTLRHLMRMTRTWDSTMSMIPKGGDTIWGDLDWSPEDGFECKAKNQKINDSEVSKDANGKNEVHPEPVKYGRIVSFGKDVAEAPSSEIEQIEFRDAVKGNNIAHSNTSCRDIWTEYHELGWGGIKAVADYKVYTAGSIIDLLRFVAPRMMQRGSVHFSYGIADNLDDPKYGHYKYWSNPLETKLPNAPEMEIFSMYGVGIPTERAYVYKLAPQAECYIPFQIDASAEGGDENSCLKGGVYLSNGDETVPVLSAGYMCAKGWRGKTRFNPSGSKTYVREYSHSPPSNLLEGRGTQSGAHVDIMGNFALIEDIIRIAAGATGEELGGDQVYSDIFKWSDKIKLKL

SEQ ID NO: 52992 - protein, 212 aa, Oryza sativa; identical to SEQ ID NO: 32942

SEQ ID NO: 52993 - protein, 570 aa, Oryza sativa; identical to SEQ ID NO: 44897

SEQ ID NO: 52994 - protein, 1014 aa, Oryza sativa
MAFPSGKAYYLHLLLLAILPSLVARRGAAQQGGVDEKQLLLQVKRAWGDPAALASWTDAAPHCRWVYVSCDGGGTGRVTSLSLPNVAVAGAVPDAIGGLTALTVLNLQNTSVGGVFPAFLYNLTAITSIDLSMNSIGGELPADIDRLGKNLTYLALNNNNFTGVIPAAVSKLKNLKVFTLNCNQLTGTIPAALGELTSLETLKLEVNQFTPGELPGSFKNLTSLKTVWLAQCNLTGDFPSYVTEMMEMEYLDLSQNSFTGSIPPGIWNIPKLQYLFLYTNQLTGDVVVNGKIGAASLIYLDISENQLTGTIPESFGSLMNLTNLALMTNNFSGEIPASLAQLPSLVIMKLFENNLTGQIPAELGKHSPFLRDIEVDNNDLTGPIPEGVCDNRRLWIISAAGNRLNGSIPASLATCPALLSLQLQDNELSGEVPAALWTETRLITVLLQNNGHLTGSLPEKLYWNLTRLYIHNNRFSGRLPATATKLQKFNAENNLFSGEIPDGFAAGMPLLQELDLSRNQLSGAIPVSIASLSGLSQMNFSRNQFTGDIPAGLGSMPVLTLLDLSSNKLSGGIPTSLGSLKINQLNLSSNQLTGEIPAALAISAYDQSFLGNPGLLAAGAALVVLIGALAFFVVRDIKRRKRLARTEPAWKMTPFQPLDFSEASLVRGLADENLIGKGGAGRVYRVAYASRSSGGAGGTVAVKRIWTGGKLDKNLEREFDSEVDILGHVRHTNIVKLLCCLSRAETKLLVYEYMENGSLDKWLHGNKLLAGGATARAPSVRRAPLDWLARVRVAVGAARGLCYMHHECSPPIVHRDIKSSNILLDAELMAKVADFGLARMLVQAGTPDTMTAVAGSFGYMAPECAYTRKVNEKVDVYSFGVVLLELITGREAHDGGEHGSLAEWAWRHLQSGRSIADAVDRCITDSGYGDDAEVVFKLGIICTGAQPATRPTMRDVLQILVRCEQALQNTVDGKVAEYDGDGAPFLPIRGGSRRKQLSDTKGIDDGNGSLDSIV

SEQ ID NO: 52995 - protein, 699 aa, Oryza sativa
MASKRVGPGQPVPDAGGGGDKSVLKRCIIGFYTRAIERLPVEEKPALLAAILDGGLCFGPLDPVSNIVANAIWHLSTGEDSSEHVEEVEMRQCLKTMARGSLKALVGFMTSYFRYLPTMEAMHFLRAAEGDLLAAVHLVEAERCTSAFDIGSCTTKTALRCAAGASGHPDPDRLATAMLSLSSKAHKIAHLLSRKGRLTCSDVDHLSYLLLEEGTNDQICTQQLMALVPPRLPPELADAAATFSPLAPQGVTVKDERTLERCTKSLQCVLVDKIHGFYLEALALLPQHLLRGRYHRSVVMAGHCYGPLDPVSNIILNTIWYDAAFPVPKEQHLDLDMIGRWALVRAERYSVAGLVAGLIAFAGDYNLSELQAIRCLLYANGDFATAMSVLQQALLNQERTMLSDSELCRFMDVMAKRLQLYSVMAIAAQHPSADGLQEFLISERTRAMLPMEYRRFSREDVHSVIESLLHEPPPSLGMPPELVRLSLAAERTIDQFPDATKRFWADMSSFHSKAKAALESYVLENGGPQYVIHVICGANESVADRNGPELSRINWPRSHNKFHYSHINFLASPTGPSAVGVLPTLFFAECVNHNEESDRARKNNCYPVVVPPTNAEKVRCFYCEYKGINIIHPADGNYHGCDTDFEKMARRKHVLTNSIESVFNNGLLVSNFRGAVQEDFFYFDHARDHAKGPSSCSDG

SEQ ID NO: 52996 - protein, 302 aa, Oryza sativa
MSRTINSTEGLLQNLMVGWCIWHEICLSGAFRKAYQHTHHSTYGWAYGDHELFLLLMLISQLSPDAWCDCLFSCDNADGICTCKSPERSTNCHARCCSVPTPFQVQSKNNGVIGDTSWTQFRSNNGDAVLLVPQPWPQPILFPVHIMVELEVSLKGIIVSTKKLVNLQSLAPPSLWRNEVFNLCATGGQGLNFSWKCIYEELQQLQCTFEFTLWNQHGQTYKLLLQKEQLKLGAVYLSLEVKSSETCFTCRTYEEDMFLQITNFVGHNYEGSNTCSTHQFSHGWPKYLVRAKFVQFQRGKIL

SEQ ID NO: 52997 - protein, 217 aa, Oryza sativa
MAAASFAIALLLYLGLDLPEASPAQSYAADPDNVVEITYGSAIKLMHERTKFRLHSHDVPYGSGSGQQSVTSFPNVDDSNSYWIVRPQPDTSAKQGDPITHGTVVRLQHMRTRKWLHSHMHASPITGNLEVSCFGGENESDTGDYWRLEIEGSGKSWRQNQKIRLRHVDTGGYLHSHDRKYTRIAGGQQEVCGVGDKRPGNVWLAAEGVYLPVNQQK

SEQ ID NO: 52998 - protein, 474 aa, Oryza sativa
MASVSSSPSYSSQAAVLLLLHQPPHQHGHGGACLRYRGSQSQGRGNAVATSLGLSAAGRGGAGGLLLLPPLPALRAAEGKDGRAVTKDEEEEAAAAAVEEEGEVEVRREEDKPGDDGSREAAARGSGSGRFSADYISLGIREPVYEVIEVKSNGRMSTKKISRRQLLKSSGLRLRDTRSVDPSLWLMNSMPSLLVREQAILVNLGSLRAIAMHERVLIFNYNSPGGKAFLDSLLPRLNPRNINGGPAMPFQLEVVEAALLSRIQRLERRLMRIEPRVGALLEVLPNRLTADVLEQLRLSKQALVELGSRAGDLKQMLIDLLDDPHEIRRICIMGRNCTLDKLSDNVECSVPLEKQIAEEEEEEIEMLLENYLQRCESIHGQAERLLDSAREMEDSIAVNLSSRRLEVSRVELLLQVGTFCVAIGALIAGIFGMNLKSYLETNAWAFWATTGGIVVGAVAGFFIMYSYLKTRKIL

SEQ ID NO: 52999 - protein, 683 aa, Oryza sativa
MEPVNDFQEGISTEHAFEAEPVPSLSETMTPRSMVVSFILSVTLSIVAMKVTLSSGFIPSFSIPAGLLGFCVSRASIRILDYFAVAQLPFTRQENTIIQTCVVACTSITFTGGFGTYILAMGKKAAVGDVNAQNNVEEPSFARMITFLFLISFAGMFIIMPFRKVMIIRHRLTFPSGTATAHLINSFHTPQGVKQARKQVTLLFKSFGGTIAWSLFQWFFASGPGCGFKFFPTFGLEAYKHGFFFDFTMANVGIGMMCPYMIVFSVFIGTIISCGVIWPYIESKEGIWYPSNLGPNSLNGIRGYKVFIGLSMIMADCLFVFLCIMVRTTCAMIKRRRQAMQGGGGNAQPFQGIDIADQPVKSFDDRRRAQVFLRDEIPDSVTIGCYVLLSIISIAAIPHLYPQMRYSHVALIYLAAPVFAFCNAYGFGVTDMNLASTYCKIAMFAFGSWVGIKSGGVVAALVAGGITMSILGNAADVAQDLKTGYLTLTSPRAVFISEAIGTALGCVVNPTVFWVFYRVYKMGSGDMGDMPYAKLYRGFAMLSVGDGEQGLPRHSMLLFKVFFVLALALSVFREVASRKEWRIRRYIPSTIGMAITFFMPPRVPVGMCIGSLVAYLWEKMDAGRGRMLSPALASGLICGDGVGSILLSMLTLMGARAPICIKFLSRGDNVKLDAFLATLHDMR

SEQ ID NO: 53000 - protein, 718 aa, Oryza sativa
MGSLCSKDSVAEELTPQPPPAAAAAAAPVGRLQKTESQSLKQLITLTAKEDAAVVAPVVHAVITRAESNAKAKSNAKAKSAAAVPPVVVITSLNKSYSTAGAPAHHHRLSTVDVPQVVPGGVPQGFSGEHVIAGWPSWLTSVAGEVVQGWLPRRADTFERLDKIGQGTYSNVYKARDLETGKVVALKRVRFVNMDPESVRFMAREIHAPPPPRRPPQRRPPRGHRHVAPLPQPLPRLRVHGPRPRRPRRHAGAALHGAAGEVPHGADPRRAAPLPRPGRAPPRHQGRQPADRRRRRAQDRRLWPRHLLRRRQAAAAHQPRRHALVPAAGAPPRRHRVRRRRRPLEHRLHPRRASRRQAHLARPNRDRAAAQDLQAVRVAVGGVLGEGEAAGRDAVQAAAAVPAEDRRDVQGLLAAGARPSRHAARHRAVRPGHRRRRPRQRLLQEQAAGVRPGELAQAAAEQGVRRLAPRQGGRHEAKRDGGHRRQGLHVRQAGEERAVQGGGAGAGRRWRRSPEEAGGGGGARGEPEEREPPLQLAGGQRAGVPHGAAGGRGAAGGDAERRVRVDVVQEGPRRHRRPARHHVTRGQRLRQGVQLRRRRRAAHVAAVVRTFPRHRPPPELVGGEARQLPLQPPRRRRARQRARPAGLQLHPPKGPLRRRSGHRVRREEQEDPLLRPAGAAGRQHGGHAPGARAADPAGGAQGAGRQGEDESPRQQQQQ

SEQ ID NO: 53001 - protein, 131 aa, Oryza sativa
MSWQTYVDEHLMCEIEGHHLTSAAIVGHDGTVWAQSAAFPQFKPEEMTNIMKDFDEPGFLAPTGLFLGPTKYMVIQGEPGAVIRGKKGSGGITVKKTGQALVVGIYDEPMTPGQCNMVVERLGDYLVEQGL

SEQ ID NO: 53002 - protein, 492 aa, Oryza sativa
MVPREQAEEAIVADSNGKEEEVGVMGVSAGEHGADDHHGGGGKFSMKNLLWHGGSVWDAWFSCASNQVAQVLLTLPYSFSQLGMLSGVLLQLFYGFMGSWTAYLISVLYVEYRSRKEKEGVSFKNHVIQWFEVLDGLLGPYWKAAGLAFNCTFLLFGSVIQLIACASNIYYINDRLDKRTWTYIFGACCATTVFIPSFHNYRIWSFLGLGMTTYTAWYLAIAALLNGQAEGITHTGPTKLVLYFTGATNILYTFGGHAVTVEIMHAMWKPAKFKYIYLLATLYVFTLTLPSASAMYWAFGDELLTHSNAFSLLPKTGWRDAAVILMLIHQFITFGFACTPLYFVWEKVIGMHDTKSICLRALARLPIVVPIWFLAIIFPFFGPINSAVGALLVSFTVYIIPALAHILTYRTASARMNAAEKPPFFLPSWTGMFVLNMFIVVWVLVVGFGLGGWASMVNFIRQIDTFGLFAKCYQCPKPAPALAQSPVPLPHH

SEQ ID NO: 53003 - protein, 272 aa, Oryza sativa; identical to SEQ ID NO: 30526

SEQ ID NO: 53004 - protein, 567 aa, Oryza sativa
MMSLNLAHQTGAAAAVAPAAPRTAVVAAAAGTVSAPAVAPAAAPSLQLQTQTVDPAAPAQGPDLPMAFQALVESLPEEQHPDVGGEERRKVGVPVYVMMPLDTVRKDGNGLNRRKAVEASLKALKSAGAEGIMVDVWWGIAECEGPGRYNFTGYMELMEMAKKNGLKVQAVMSFHQCGGNVGDSVTIPLPKWVLEEMDKDQDLAYTDRSGRRNYEYLSLGADAMPVLKGRTPVQCYGDFMRAFRDHFAAFMGNTIVEIQVGMGPAGELRYPSYPESNGTWRFPGIGEFQCYDRYMLSSLKAAAEAVGKPEWGNAGPGDSGGYNDWPEDSPFFRREGGWNTPYGEFFMSWYSQMLLEHGERILSAASGVYTGTPGVKISVKVAGIHWHYGTRSHAAELTAGYYNTRHHDGYQPIARMLARHGAVLNFTCVEMRNHEQPQDAQCRPEELVQQVAAAARESGVGLAGENALPRYDETARPDRDDGGGEGGGGAHGSVHLPAHGARPVPAGQLAPLRRVREAHDGVRRAGRVPRAGGAGGAGRRARHRVARARGRRRAQQLIDQPTSRVEG

SEQ ID NO: 53005 - protein, 86 aa, Oryza sativa
MTKTTTRSTSPSPSAGPWRPTASAASASPSPRPHPPPPRRPPRISRLPLPHRRTSPQPAVAVAASKPPRSPASSSRRRSSSGPRRR

SEQ ID NO: 53006 - protein, 518 aa, Oryza sativa
MKNGARKDAGGGGGGVFVPCVDIKSFVLSLAFLTVFVALWQLQPYGSLLTAARSTASVSASPCSLIATPAAAAASAGVIRSENSTADTAKTAPAAVASAVPARLARAARPARVEDPNKRELRPYGSAAALFVLMGAYRGGPRTFAIVGLASKPTHVFSNPYFKCEWLPNPTAGNPSPRPVRTKAYKMLPDWGYGRVYTVVVVNCTFPSNPNADNAGGKLLVHAYYSTTSRRYERFVALEEAPGSYDESRFSPPFPYDYLYCGSSLYGNLSASRMREWVAYHAHFFGPRSHFVFHDAGGISPEVKAVLDPWVRAGRLTVQDIRAQAEYDGYYYNQFLVVNGCLHRYRHAANWTFFFDVDEYIYLPNGQTLDQVLGKLSGYSQFTIEQNPMSSKLCVQDPSKDYSREWGFEKLVFRNSITKVRRDRKYAIQARNAYSAGVHMSQNVYGRTTHKTESLIRYYHYHNSINVMGEPCREFVPVPVNGSKLMFEGIPYVYDDNMKRLAGQIKRFEKEAIGSAHT

SEQ ID NO: 53007 - protein, 889 aa, Oryza sativa
MAQPLVVKKDDDLDEEEYYSPFLGIEKGAVLQEARVFHDPQLDARRCCQVITKLLYLLNQGDTFTKVEATEVFFATTKLFQSKDAGLRRMVYLMIKELSPSADEVIIVTSSLMKDMNSKTDMYRANAIRVLCRIIDSTLLTQIERYLKQAIVDKNPVVASAALVSGIYLLQTSPEVVKRWSNEVQEAVQSRAALVQFHALALLHQIRQNDRLAVSKLVTSLTRGSVRSPLAQCLLIRYTSQVIRESSMNSQGGDRPFFDFLESCLRNKAEMVILEAARAITELNGVTSRELTPAITVLQLFLSSSKPVLRFAAVRTLNKVASTHPLAVTNCNIDMESLISDQNRSIATLAITTLLKTGNESSVDRLMKQMTNFMSDIADEFKIVVVEAIRSLCLKFPLKYRSLMNFLSNILREEGGFEYKKAIVDSIIILIRDIPDAKESGLFHLCEFIEDCEFTYMSTQILHFLGNEGPKTSDPSKYIRYIYNRVILENATVRASAVSTLAKFGALVDSLKPRIFVLLRRCLFDGDDEVRDRATLYLKLLGGEATVGETEKDVNEFLFGSFDIPLVNLETSLQNYEPSEAPFDISSVSLETKSQPLAEKKTTGKKPTGPASALSGPVPTVDASYEKLLSSIPEFAGFGKLFKSSAPVELTEAETEYSVNVVKHIYDGHVVLQYNCTNTIPEQLLEEVVVFVDASEADEFSEVATKSLRSLPYDSPGQTFVAFEKLEGVLATGKFSNILKFIVKEVDPSTGEADDDGVEDKYQLEDLEITSADYMLKVGVSNFRNAWESMDPESERVDEYGLGARESLAEAVSAVIGILGMQPCEGTDVVPSNSRSHTCLLSGVFIGNVKVLVRLSFGLSGPKEVAMKLAVRSDDPEISDKIHEIVANG

SEQ ID NO: 53008 - protein, 710 aa, Oryza sativa
MRHRLRLLLVVLVAAAYAAGDVASSYSQPTLPAVPPVQAVRPPPAAVGGGSHSQPTFPPRAPVRAVPPPATLVSTATPGALLAAFLAKADPSAHLRFPLAVSPCSHPAVSCSADGQITRLVLESSGLNGTFAPATLSRLVELRVLSLKSNALHGPIPDLSPLENLKALFLAGNRFSGPFPASVASLRRLRSIDLAGNRLSGALPPGIEVAFPHLTFLRLDANHFNGSLPAWNQSSLKLLNVSYNNFSGPVPVTPVMAQMGAAAFAGNPELCGEVLRRECRGSHLLFFHGPGNNGSAAPPVQSAAATGDGPQRDDISLPDSSTPRSRKLRRRAAIAVAATAAAFVAVLLLCAMIAMKRGKKRRRPSSAAYPSPKKSAAMSEVSRDNTDLGYVECVPDEETAAMMMPEEKARRLERSGCLTFCAGEGASYSLEQLMRASAEVLGRGSVGTTYKAVLDGRLVVIVKRLDAAKIGAAALEAEAFEQNMDAVGRLRHPNLVSLRAFFQAKEERLLVYDYQPNGSLYSLIHGSRSSRAKPLHWTSCLKIAEDIGQGLAYIHQASRLVHGNIKSSNVLLGSDFEACLTDNCLAFLLESSEVKDDAAYRAPENMKSNRRLTPKSDIYAFGILLLELISGKPPLQHSVLVATNLQTYVQSARDDGVDVERLSMIVDIASACVRSSPESRPTAWQVLKMIQEVKEADTAGDNDSDLTSNS

SEQ ID NO: 53009 - protein, 265 aa, Oryza sativa
MEAVEDKAMVGVGGAVAAGYSSSSWGLGTRACDSCGGEAARLYCRADGAFLCARCDARAHGAGSRHARVWLCEVCEHAPAAVTCRADAAALCAACDADIHSANPLARRHERLPVAPFFGPLADAPQPFPFSQAAADAAAAREEDADDDRSNEAEAASWLLPEPDDNSHEDSAAAADAFFADTGAYLGVDLDFARSMDGIKAIGCTGRAARAGPHRRQPFLPRTLHGPQLVVVGGRDRTGRACRRARRRRPWWWWWRARGRRGRRG

SEQ ID NO: 53010 - protein, 501 aa, Oryza sativa
MKPRSSRDGHNAAAAAALLLAALVLSGDVLPAVVAGGAPSFNYKDALTKSIMFLEAQRSGKLPPTNRIKWRGDSGMEDGKLANVDLTGGYYDAGDNVKYGLPLAFTVTTLAWTAMAFEKELKAARELENVHAAIRWGTDYFLKAATKKDHLWVQVGDPNADHQCWVRPENMPTPRTLYQINDKTPGSEIAAETAAAMTASSMVFRKDKPYSRRLLNKAKLLFQFAKTHQGTYDGECPFYCSYSGYNDELLWAATWLYLATKRQVYADFIGHEAISSSVAEFSWDLKFPGAQVLLAELNMTSSGGLQSFKSQADNFVCAVLPDTPFHQVSITPGGMIHLRDGANSQYVTSTAFLFVAYSDILRRINQPVMCGAQAVQPARLLQFAKQQIDYLLGANPRGRSYVVGFGVNPPTQPHHRGASTPVLPPGYQVNCGMSFSEWFTPDRPNPNELTGAIMGGPDGGDNFSDKRGNSSCTEPCTYINSLSIGPLAALAIRGPNPIATQ

SEQ ID NO: 53011 - protein, 717 aa, Oryza sativa
MLLRLRPPPQPAASLASLLPFSPFRRFLHSPSWRPPPPPPPRRHRLLSTAVASSSSSSKVSTSLEERYDVIVVGGGHAGCEAALASARLGARTLLLTLNIDRIAWQPCNPAVGGPAKSQLVHEVDALGGEMGKIADRCYLQKRVLNSSKGPAVRALRAQTDKREYAVEMKKVVESTQNLFIREAMATEVMIGQNDNVEGVRTFFGMDFYAPSVVLTTGTFMSGKIWVGRTSMPAGRAGESASHGLTENLQQLGFETDRLKTGTPPRIDRRTVNFSGLEPQHGDEEVGWFSFDPEFHIERDQMCCYLTRTTKETHQIVRDNLDETPTYGGWVEAKGPRYCPAIEDKIVRFKDKESHQVFLEPEGRDVPELYLQGFSTGLPERLQLSLVRTLPGLENCVMLRPAYAVEYDYLPAYQCSRSLMTKKFEGLFFSGQINGTTGYEEAAAQGIISGINAARHSDGKPLIILERESSYIGTLIDDLVTKDLREPYRMLTSRSEHRLLLRADNADSRLTPLGRDIGLIDDRRWELYQSKQARIKEEKERLKSTKIPGGEFAAAVTSVSNQPVKESSTLEAILKKPHVQYKLLDKHGYGNEHLSRIEKECVEIDIKYEGFIARQQSQLQQIVNQEHKKLPEDLDYHSMTNLSLEAREKLSKVRPQTIGQASRIGGVSPADMTVLLIWMESNRRMANYKRQQSTLRSAATKADDSSDEVVHASATNA

SEQ ID NO: 53012 - protein, 655 aa, Oryza sativa
MPPPPRKRLGRAALLLAAAAYLAFLLLFELPSLDLFPSSDAAAGAAMPTHRPRRRELEASSSSSAFASPVLRRPATAVSPAPASAAAAAAGALPIFSSLLLLPRPNATATPFDGTAAEAFAAARPHLDHLRTAAAAAAEEASSSSTAPTCPTSISVHADGLPGDGVRTVELPCGLAVGSHVTVVARPRAARPEYDPKIAERKSGQEPLMVSQFMVELVGTKAVDGEAPPRILHFNPRIRGDYSGKPVIEMNSCYRMQWGQSQRCEGYASRPADETVDGQLKCEKWIRDDDKKSEESKMKWWVKRLIGRPKDVHISWPYPFAEGKLFVLTLTAGLEGYHVNVDGRHVTSFPYRTGYTLEDATGLSLNGDIDIESIFASSLPNSHPSFAPERYLEMSEQWRAPPLPTEPVELFIGILSAASHFAERMAVRKSWMMYTRKSTNIVARFFVALNGKKEVNAELKREAEFFQDIVIVPFMDSYDLVVLKTIAIAEYGVRVIPAKYIMKCDDDTFVRIDSVLDQVKKVRSDKSVYVGSMNYFHRPLRSGKWAVTYEEWPEEAYPNYANGPGYVISADIARYIVSEFDNQTLRLFKMEDVNMGMWVEKFNNTLRPVEYRHDVRFYQSGCFDGYFTAHYQSPQHMICLWRKLQSGSSRCCNVR

SEQ ID NO: 53013 - protein, 436 aa, Oryza sativa
MGKAEARSREHGGGGGGGSGSAGKIFVGGLPRDTTEADFVKHFGQYGEIVDSVIMRDKHTSQPRGFGFITYSNPAVVDRVMDDIHEFNGKQVEIKRTIPKDSVQSKDFKTKKIFVGGLPQALTEDDFKHFFQKYGPVVDHQIMRDHQTKRSRGFGFIVFSSDQVVDDLLANGNMIDLAGAKLIDANGLLCSLHRAAGGADPGRRGATSQGAVVVHLQPPPVDAIDAPRLQHGVREDPHEGHAGVQPGGQHVVVPRPPPLVPAVHDVVEGEPHGAPHEVVHRPRRRHHPRGAEEHRHVDEPDPRPARERPRQRPHRHRRQRAGEEEVVHLGVQAEAAEHPQRADHPPDDGGVEEDVVAGARPRAPLRQLRRVADVAHALQQPPRRPEVHRRRQHRPDELHEQNRANSLTFSSDESMSGFSRWGLTWTMNMERGGIFM

SEQ ID NO: 53014 - protein, 210 aa, Oryza sativa; identical to SEQ ID NO: 31882

SEQ ID NO: 53015 - protein, 200 aa, Oryza sativa
MGIDKSAAGSSSSPPRPVAAATAAVCCMCGDRGLLPELFRCAACAVRSQHTYCSERYPKAESYGTCNWCLRADQGSDGGGGGAAAASSSMARPPTGARAAAGGDPAASSRSTAAAKVVAARGHFAADLSKPIKKPPPAPAPLPPPSPAQRRILLRRSASDLGGRVRRADHDAPPPLSPGVARGRPRVRRYKLLEEVITTS

SEQ ID NO: 53016 - protein, 193 aa, Oryza sativa
MSSMRTTSCSRPPPPRRPRARGRGRGPGARAGCRRAGRAPRRVARGGQEAPAPPWRWGRRGRGRCRRGFRGDAAPSQGDHRGRRRLGVRRRRLVVANPVPDLCRPGHPDDPEAEERRASGAVPPVGSGEGARQPAPEAGDVQVGRARRRRLPPERRRRNAAPARDGRARVRRRGRPGRPVLHARGRRSHAQRP

SEQ ID NO: 53017 - protein, 399 aa, Oryza sativa
MYGSPVSKDLNLPVQPPAMSSSGLLRYRSAPSTLLAEFCDDFLPPAAAPRAASPDADNVFSRFLADHQIRDKSPPATAAAAAAAAHFPDDPTMATQHHHQQQMMFQHHPQQMASVEGLYRTVSSTGIDAATAAANAAGGGGGGLLRQSSSPAGFLNHLNMDNGYGSMLRAGMAAAGGGVGFRNGANAAAAADSPGGSGGRLKGQLSFSSRQGSLMSQISEMDSEELGGSSPEGAGGGGGGGGRGYLSGYPMSSGWEESSLMSDTNISGVKRQRDSSEPSQNGGGGGGLAHQFSLPKTSSEMAAIEKFLQFQDAVPCKIRAKRGCATHPRSIAERVRRTRISERIRKLQELVPNMDKQTNTADMLDLAVDYIKDLQKQVKGLNDSRANCTCSAKHQQYSG

SEQ ID NO: 53018 - protein, 529 aa, Oryza sativa; identical to SEQ ID NO: 45637

SEQ ID NO: 53019 - protein, 448 aa, Oryza sativa
MAGRRQLLLLLLLWGFLQLIRLPYSASQSFIGINYGDVADNLPPPASTARLLQSTTITKVRLYGTDPAVISAFAGTGISLLLGAANGDIPNFASSPAAAAAWVAAHLPSTSSPAISAVSLGNEVLFADTSLASQLVPALQNIHAALPPNSSVKVSTVHAMDVLASSDPPSSGAFKPELAAALDPLLAFLSKTGSPFLINPYPYFAYLSDPRPETLAFCLFQPNAGRPDAGSGLTYTNMFDAQVDAVRAALDAKGYKDVEIVVAETGWPHSGGADEAGATVGNARAFVSGLVSHLRSMAGTPRAPGKPVDTYLFAVYDEDLKPGKPSEKSFGLFQTTTLAETYPTGLMRNGTAAGLAPAMAPAAAAPTLPVKPSPAPARLPGQQPQVTPLQPGSAAAAGPSALCAPGTATTTARGAAAAACSSPSAAESPRTMSVISIIAGVLLMYLLI

SEQ ID NO: 53020 - protein, 157 aa, Oryza sativa
MGSMYRHLRDRSSRRRRFSPAWRQELARQESPGVAGGRRQGRWCRSWHGRRIGRDDQEIGLLPANRGGRRNPPGGDPGAERRRRRVPIHGHGRAGEVPLQLACLTDETQVRGLPFKEAGGAENGRGALLQAGRRRCHAEYFKHAKKKFLLFEKYVYI

SEQ ID NO: 53021 - protein, 117 aa, Oryza sativa
MKGIYCSHLAISASSTSLAVSMLWYFIGSDGIRIDDPSYEQETLVGLDFETSCMWSLLNICRRSATSFIVGLSSPLGFRQCMASSASFCSTTITFSSIMSKSNISQCLFWWNIKGKI

SEQ ID NO: 53022 - protein, 707 aa, Oryza sativa
MESQRGQSPDRGSDASGPKQSSVSSHGRQRNSSSSICKDFLRKFVDNELLTSSLEDWFSGHSEDCGFKKPAFDVPFDLSELQNFDYAIEGVTFQQLVRMPNALHASTSDIFEATAHLALEDFLHASIKGLWETFWGPDESMPFSVACIHSTSSKFYPAEKAISSGRLDGVCATAVLLKSLKHSQGRWDHIVVLALLRPDIGMFSGQNDQQPSPAVLGEALFFALRVLLSRSLSRSSTVLQNSDCVYVLLVDSQFGGVVNVQGDLNKLDFDLNNVYDSAAEWIKKHAQITVSSIDRVWNKLGNANWGDIGTLQVLLAIFHSMIQFCGAPKYSLDELATEHSSRLQSRRSERHLVGRQANTNGLFRFQQQSHSPEIVEVQEEGAVNVKPKEILKLEVGSVVLMEDADWQKGFQINDILTDSEPPIYSATPVEEPTKTHLLYVGSSPSHLEPAWEDMNSWYQVQRQTKVLTLMKQRGISSRYVPQMVASGRVVHPGPCNKPNSSGSCGHPWCSTPILVTSPVGETISNLIRNGLFGVEDALRCCHDCLSALAAASSAGIRHGDIRPENVIRVSNGSRHPYFVLIGWGHAILEDRDRPLMNLFFSSTFALQEGKLCAASDAESLIYLLFFCCGGVCPELDSVEGALQWRETSWSRRVIQQKLGDVSAVLKAFADYVDSICGTPYPMDYEIWLRRLRRTINEDHGKEIDTSS

SEQ ID NO: 53023 - protein, 572 aa, Oryza sativa
MEATTTDGTTDHAGKPAVRSKSGTWRACPFILGNECCERLAYYGMSANLVNYMVDRLRQGNAGAAASVNNWSGTCYVMPLVGAFLADAYLGRYRTIAAFMALYIVGLALLTMSASVPGMKPPNCATISASSCGPSPGQSAAFFVALYLIALDTGGIKPCVSSFGADQFDDADPREHRSKASFFNWFYMSINVGALVASSVLVWVQMNVGWGWGFGIPAVAMAVAVASFLMGSSLYRHQKPGGSPLTRMLQVVVAAARKSRVALPADAAALLYEGDKLACGTRRLAHTEQFRWLDRAAVVTPTTDKDDDTGSRWRLCPVTQVEELKAVVRLLPVWASGIVMSAVYGQMSTMFVLQGNTLDPRMGATFKIPSASLSIFDTLAVLAWVPVYDRLIVPAARRFTGHPRGFTQLQRMGIGLLISVFSMVAAGVLEVMRLRVAAAHGMLDSTSYLPISIFWQVQYFIIGAAEVFAFIGQIDFFYDQAPDDMRSTCTALSLTSSALGNYLSTLLVVIVTAASTRGGGLGWIPDNLNRGHLDYFFWLLAALSAVNFLVYLWIANWYRCKTITTTEAAAQT

SEQ ID NO: 53024 - protein, 434 aa, Oryza sativa
MNHEEYVEKKSLYAMKAAGDIGGKTIDASLSAAEEAKVTWVVDPKGTPGDTTFTTIAAALEKVPEGNTKRVILDLKPGAEFREKLLLNITKPYITFKSDPANPAVIAWNDMAATRGKDGKPVGTVGSTTVAVESDYFMAYGVVFKNDAPLAKPGAEGGQAVALRLFGTKAAIYNCTIDGGQDTLYDHKGLHYIKDSLIMGSVDFIFGFGRSLYEGCTIVSVTKEVSVLTAQQRTKTIEGAIESGFSFKNCSIKGQGQIYIGRAWGDSSRVVYSYTDMSKEVVPIGWDGWNIAKPESSGIYYGEFKCTGPGSDAKKRVGWALDLTADQAKPFIGTHYIYGDSWILPPPDGKSAASTSTASKSTASAIPRNSTAPATATESNSTAPATPSNSTAPVTASNSTAPATASSSNPPATKSYSGPPAAPSASSTPAKASR

SEQ ID NO: 53025 - protein, 104 aa, Oryza sativa
MLGDDGEHEGGREGCSSAAVRRQVETDRSRIEGVAFDVLVVGELEQATRRHGGGAIEAEVCSGEAFEGELVFASRWRHQLDAVEDSEYKEAGDGPDDHHGYRDA

SEQ ID NO: 53026 - protein, 465 aa, Oryza sativa
MARGSTSVEVRRDGVAVITVSNPPVNALSLDVIASLQRDYGEALRRSDVKAIVLTGAKGRFSGGFDINAFDKKPKNEKPGYLSIDFLTDIVEDAPKPSVAAIDGVALGGGLELVMVCHARVSTSSAQLGLPELQLGIIPGLGGTQRLPRLVGLPKALEMLLMSKPLKGVEAHKFGLVDAVVSADELISTACSWALEIVEDKRPWFRSLHRTDRLPALEETKKILNFARVQAQKQSASLQHPLVCIDVIEEGIISGPRAGLMKETLCGKMLEMSQISKSLRHVFFAQRATSKIPNISILGLTPRRIHKVAIVGGGLMGSGIATALISNNLLVILKEVNEQFLDAGISRVKANLQSLVKRGQMTKEDYENKLSLLSGVLDYEQFREADVVIEAVIEDLSLKQKIFADLEKYCHSNCILATNTSTIDLHLIGQKTSCQDRIAGAHFFSPCNATVGNNPYSSDFLTSCH

SEQ ID NO: 53027 - protein, 389 aa, Oryza sativa
MIHHLQRRIVSLLLLHPASPHPVAAISLGRLLSTTAPVSSKPFAAEDYLVAACGLTRAQAARASERISHLRSPSKPDAVLAFLAGLGIPRPDIATAVAADPRLLCAGVEGNLAKRVAELGDLGIPRSQIARLVPLAKIPFRSSSLATNLAFWLPVFGSLDSILRALRKNSSLLSANLDKVVKPNLAFLKQCGIDARDVASNPNLYSSRLFTSNPMKLRDAVARVEELGMVRGSRVFHRGLVAVAFLSKEAVATKTRLLVELGFSQDDVSVIFRKMPSFLTASEKRIRRAVGFLKGDVGLEERYIARRPVLLLYSLERRLLPRYYLLKVLRTKGLLDCKLCYYSTAALGEKKFIERFVHPYEDHIAGLADAYGSICSGKVANGVAPLLGL

SEQ ID NO: 53028 - protein, 621 aa, Oryza sativa
MPAAAALSDDDRLVVAHCAALSFPPASQPPPPPTTSSSSSGAGAGASFQVHHASHPYPCAAFAFPPSWSAAPGWAAAGRAAFGDAEVDPSLFPSLRSVGSGVPARANAAFLASFGALLDGSPLQSEVSRAVAEEKRIVFTGHSSGGSIATLAAIWFLETCTRRGSVNQAHPFCVTFGAPLVGDNTFNNAVRREGWSQCILNFVVPVDIIPRIPLTPLASATEGIQAVLDWLSPQTPNFSPSGMPLIISQFYENLLRSTLSIASYEACSFMGCTSSILGTLTSFIELSPYRPCGTYLFLTSSEQLAVLTNSDAVLQLLFYCLQLDPQQQLRDAAERSLSAHWQYEPIKQSMMQEIVCVDYLGVVSSTLPGRQMSSTIVGGLELSKEAMLSLSAAGQWEKQRETNQAKIDGASCTKIREALKSLNEYKRTCELHEVSYYDSFKLQREVHDFNANVSRLELAGLWDEIVEMLRRRELPDGFESRQDWVNLGTLYRRLVEPLDIANYYRHSKNEDTGSYLSKGRPRRYKYTQEWHEQSQRISFGSSLESCFWAMAEELQAEIANGKTFEDVRDRVVKLESDAHGWSMSGSLGKDIFLSRSSFVIWWKTLPENHRSASCIAKLVPW

SEQ ID NO: 53029 - protein, 340 aa, Oryza sativa
MAHPVAEADEKSPFGRLTAEEFYARHGVLHTSSTFVNPRGLRIFTQRWVPAGGDAPLLGAIAVVHGFTGESSWTVQLTAVHFAKAGFAVAAVDHQGHGFSEGLQGHIPDIVPVLEDCEAAFAPFRADYPPPLPCFLYGESLGGAIALLLHLGTRSGGATGRCSTAPCAGSAPGSCPPGRSSTCCGRRRPWRPRGGSPSPGGTSPTAPSRCRGSAPWRWRARAAPRRRPAPPRRWSSSACAASSSPGSRRWSSRSWSSTAARTPCATPGARRSSTAAPGARTRRCGCTRGCGTSWSASPRRTSTRCSATSSTGSSPTPPPLPPRVARGSSSSVGHACRVLG

SEQ ID NO: 53030 - protein, 377 aa, Oryza sativa; identical to SEQ ID NO: 33016

SEQ ID NO: 53031 - protein, 377 aa, Oryza sativa
MGEPPGKTGRRDAGGTAPAVEDRWTQLPPELLPLICKKLPDSADFVRFRTVCSAWRDAAPLSDVPPQLQWVVERRGSAFQARAHFRFYSPSSGRTYGVRGYGGRSWLVMGGACQEHLVTTVDLSTTALYNPLTGERLALPPAPYPQWRHGVVHVVAAGRRRGGAPLVVNASTRTGHFGYCRQGDTKWTLVDGRQDMGHRAYHGGRFYVNTNAQETLVIDASTGAVESVLPPPPRSADAGAGVSCGDYLVESRGKLIRAVLFPRDGVVTTSAEDYYLNVYQLQEDGKAAAAWAKVESVGDSVLFFDKHGHGFSLEPNGAAELKRDCVYFMHEKRTWLDAGEYRFLCRYNMETGEVDRVVSLPDTFGDTWVVPGLCPSE

SEQ ID NO: 53032 - protein, 347 aa, Oryza sativa; identical to SEQ ID NO: 50414

SEQ ID NO: 53033 - protein, 345 aa, Oryza sativa
MRPAVSRAAFASVLLAPRAVGVAARCASSSSSAASPSVAAATYDHASFIKEVAATDPPEHLSSLLNVLQARGEKLVSPGAKRGLIPLVVPLAESPAGNLTSLLRWPTAPSGMEMPVVEVRNHGLWLLAKNVNQYIHRVLVEADINGYADDLWSAVGDTGKKLYTKGDFKESQMADLDAYLLKKVGLFPDVIERKTSRHFEKGDYVSALITGEFYTRDQFPGFGRPFVFNAEILKRVGRTTEAKDSARVALKSPWWTLGCSYEEAAELAGWEDEQIEFIREKVSEEGKREDLKKGKAPEQVVLDEAAFLMDLASVDGNWDDVVDRIAGCYREAGLDDIAKFIAYRE

SEQ ID NO: 53034 - protein, 511 aa, Oryza sativa
MAIHHLVASLLLFFSCCHAVAAGAGVRGRLPPTLATWRQYAAAAAPPPQVVQYETRYFTQRLDHFNELPASNGTFRQRYLVNGTFWGGAAAPVFVYAGNEGDVALFASNTGFMWEAAPRFRAMLVFVEHRYYGESLPFGGTRAAAFADASAAGYLTTAQALADFAELILSLKSNLTACKAPVVIFGGSYGGMLAAWMRMKYPHIVMGAVASSAPILGLNGLSDPYSFYNVVSNDFKSESKHCYDVLRNSWSEMYKALATDAGRARLNQTFNMCKGNVDDIPGLVEKALIYGSMMDYPTPSNFLTSLPAYPVREICRAIDKPTSGNDTVSRIKDAMTIYYNSTGGLACFPGAGAEDDDPYGMFPGWTWQACTEVIMTMSYGIGNATVFPPDPFNLTAYLAGCLATTGVPPRPHWVQSYFGGYDIRNVLKRSGSNIIFFNGLRDPWSAGGILKSISNSIIALVEPKGGHHVDLRFSTKEDPEWLKKVRRQEMRIIADWLKQYYSDEAIDSMMN

SEQ ID NO: 53035 - protein, 211 aa, Oryza sativa
MKGFAPASALTVHEESWCAYPNSRTVIKCALFSKCSLTIDTVIRPDNGCSENAHNLTSEQLAAREVEVVDIALQSRDYWSKVISAPNVDLTAFRSQRTSRGPLLKGWMDSCRPVMTTYKLVIMDAPIWGLGERLEDCIIAGERALFLACHRLCFAWIDEWYGMTLDQIREMERQTDLLLKKTLKKPAKAGSKHDGKRKTLKEEIVAVGSCT

SEQ ID NO: 53036 - protein, 908 aa, Oryza sativa
MERTLLNPPPSLRSPACRTTTATRIRPSSSMATMIPTPPPMRHARLVKASAAGRRELHAPPIAPPILLGLRSPAAASYGRASGGGGRRRGARVVARMGFDMFTDKAIKAIMMAQEEARRLGHHAAGSEQLLLGVIGEGTGIGAKVLRGAGLSLKAARAEVEKMAGRGPGMVPMEIKFTPAAKNVLQASQEEAHQLGHNYVGSEHLLLGLLREHGAALVVLKNFQADPSNIRSEVIRMISDTSEDHQPVSAAVGGGSSTTKIPTLLEYGTNLTKLAEEGKLDPVVGRQNQVDRVVQILGRRTKNNPCLIGEPGVGKTAIAEGLAQRIAAGNVPETIDGKTVITLDMGLLVAGTKYRGEFGERLKKLMDEVKQNGEIILFLDEVHTLVGAGAAEGAIDAANILKPALARGELQCIGATTIDEYRKHIEKDPALERRFQPVKVPEPTVDETIGILKGLRERYEIHHKVQYTDESLIAAARLSYQYISDRFLPDKAIDLVDEAGSLVRLRNAQLPDEAKELEKKLKKIMAEKSEAIRSQDFEKAGALRGEEVELKSEIMSLVDKSKEMSKAAVDSGESPGPTVTEADVQHIVSSWTGVPVEKVTVDESSRLLAMESSLHRRIVGQDEAVTAISRAIRRARVGLRDPRRPIASFIFAGPTGVGKSELAKALAAYYYGSPEAMVRLDMSEFMEKHTVAKLVGSPPGYVGYAEGGQLTEAIRRRPYAVVLFDEVEKAHPDVFNMMLQILDDGRLTDSKGRTVDFKNSLIIMTSNVGSGVIEKGGRQLAVRRRWQRRQRVRGDQEHGGGGDEALLQAGVPEPAGRDDRVPAADEAGGEGDRRDHARRGHRADRREGDRAAGDGEVQGARRRARLRPELRRAAAAPGHHAAAGGHAHGQDARRGDLRRRLGDRRRRR

SEQ ID NO: 53037 - protein, 599 aa, Oryza sativa
MATDAADEAPLLAEEPLRPGACSRELELREFRDRYVIRSVDGGGAFAVSRSNGSLRPLSAEEAAAGSDCRVSKIYGVAGVIRLLAGSYVLVITSQRDAGSYQGSPVYNVNSMKFLCCNEAIKHLTAQEKRDEAYFMSLLKIAETTHGLYYSYDRDLTLNLQRASKLPAGRVHKPLWKQADPRFVWNKNLLEEFIEAKLDEFIIPLVQGSFQTAQFSLKEAPVRITLFSRRCNRRLGTRMWRRGANLEGATANFVETEQLAEYEGLMSSFIQVRGSIPLLWEQIVDLSYKPCLNIIEHEETPKVVQRHFHDLSQRYGDTVVVDLTDKQGDEGNLSNAFAAEMERIPNIRYVHFDFHHICRGGNFDNLQVLYNQIEEAIQKQGYFLINSKGEIFLEQSGIVRSNCIDCLDRTNVTQSFLARKSLDLQLQRMGALSSSGSISQSGDISDTFKKMWVEHGDELSLEYAGSYALKGDLVRYGRQTLPGLIKDGMSALSRYYLNNFHDGVRQDALDLISGYYTVSKGISSPFQNGGFESATYLPVASAIIVGGITATTFTLSQVGRNAQHFITSIICAGLTAGVVALVKANGKQFCSKPRLCGLI

SEQ ID NO: 53038 - protein, 415 aa, Oryza sativa
MSVASATIDRAFPTVITLSDSTSSFVGQSLFYDTDDKIDNWYEVYQSSCLFGTPETSNVTLAVGKIVLCNSPNSVSLISPTIQPVWNILLAVNALKEAGAKGIIFAAYAFDILDVVESCGSMPCVLVDFEVAQQIKQSADENTALVVKVAAAQTWIGGEVLAPKISAFSSRGPSPLYPEFLKPDIAAPGSNILAAVQDSYKFMSGTSMACPHVSGVVALLKALHPDWSPAIIKSALVTTASNEKYGVPILADGLPQKIADPFDYGGGFIDPNRAVDPGLAYDVDPNDYTLLLDCISAANSSCEFEPINMNLPSIAIPNLKEPTTVLRTVTNVGQADAVYKAVVKSPPGMKISVEPSVLQFSQSKKKQSFKVIFSMTRKFQGGYLFGSLAWYDGGTHYVRIPIAVRPIVSDNYADL

SEQ ID NO: 53039 - protein, 371 aa, Oryza sativa
MGGKKAKTVERNDHRLLCSDVLTEVFHRLPARTLASCRLVCKSWMSELTDPHFVHEHLKRSQQKLLLFANDKANDRSLAMVLADDTGATYQLTRPMASRSLFVHNSCNGLLCLGDSTGAVQLLNPTTGESATLPMPMYTAGSSQFSSCNWHCLGFCPSTKEHKVVHFYLGAHFDSFNVCCEIFTIGDKSWRQIGSFHGAPTDRGVHVNGAVYYLTKFRYIASSRINCLNLESENFDVMMLPPRKSYGGHCSLAELEGKLCLLVVEGGHDNPPRTMDILMLDSGDKTTWTHRYHISLPWLMPSCYFTPKHTLFHEGKIWVQLLARNLYCYDPSSSSTELKMACPESEFPFSTRTFIESIVPLRKDYFIKQIQ

SEQ ID NO: 53040 - protein, 419 aa, Oryza sativa
MIKHPIARNAVHGYKKLQTVLRIVLLRRTKETLIDGEPIIKLPPKTINLDKVDFTKEERAFYLTLEERSRQQFKAYAAAGTLKQNYANILLMLLRLRQACDHPLLVKGHQSEYKGDGSIEMAKQLPKEMIINLLAKLEVGEFCSVCSDVPEDAVVTMCGHVFCYQCIYERITTDENMCPSPNCGNTLSTDSVFSSGALRICMSGVSSSHASGSSSLDDESSSISQTSYISSKIQAAIDILNSIINTYALTDSDTVESNPSRVAPVKAIVFSQWTGMLDLLELSLNSNLIQYRRLDGTMSLNSRDKAVKDFNTDPEVRVMIMSLKAGNLGLNMVAACHVILLDLWWNPYAEDQAIDRAHRIGQTRPVTVSRLTIKDTVEDRILALQEEKRAMVSSAFGEDKSGGHATRLTVDDLKYLFRF

SEQ ID NO: 53041 - protein, 1136 aa, Oryza sativa
MATAGGPGRAHTVRDLAEEGKKRAVLLLVFAFGLAFLMSLTSSSVWINLPFATALIVLFRYISLDYDFRRKSTTTTDNDASRALTKTKSIEPNKIPSIQKDGKSDWKSKVNSPPVEAAIGQFTRHLVTEWVTDLWYSRVTPDKEGPEELINIVNNVLGEISVRARNVNLIALLTRDLIDLICENLELYHLCQAKIGKEKFVNLSTERRDAELKLTLITENKLHPALFSASAEHKILQSLADGLISVTAKPQDLQCYFFRCTARELLACAVMRPVVNLANPRFINERIELLALSHANKAERGVAESLEHATMVKQREPPMPTVDELAALIDPTSSGVELVRFSQDQSKAAPDTQLSNTRHPSNLKPNSSSTSLTNSSHPLESSILSSTTHGHSNSSMSLHSQSSGRTTAECYEGEWAQTMDISSQQKSQALAPEHLENMWTKGKNYKSENVKHVERVPSKSSSLGTSPVQQSAPYSTSVGHYPSAPQRQTTMSRSDDQHLIKHSTTAAYLNGTNHLRMALSRESADHASQEDFGVDSESSYATEEDENNNVTGLDSPVTRVWDSKSKGNATSSHIHHPLESPGFHKAKKNRSHIGKLKMTKTSGRKRSRSNSQKPPVWQEVERSSLLVGDDLNILNTSADDSRTDGLYDDTEVESMSRMFSGANASSLSLASTDSSYSSNYSTTNVLEDSYLKLKCEVVGASIVKSGSGMFAVYSVSVTDANGNSWSIKRRFRHFEELHRRLKEYSQYNLHLPPKHFLSSGLEVPVVRERCKLLDIYLKKLLQIPTVSSCIEVWDFLSVDSQTYIFTDTLSVIQTLSVNLDERSKEKNTKSFNSSQALNGNLVSASQSLHVHKDDTMPKEKDKDFDAVDGLRSRKRNTEQNLGIGVGNTNANLHEDLSGSDPEQNEHSFIINSGNSKKTLSSETDYPPQSLESDGYSVAPNDWMAPNLSVPLFHLVDVVFQLQDGGWIRRQAFWVVKQILQLGMGDTFDDWLVEKIQLLRKGRIVAFAVKRVEQILWPDGIFLTKHPKRKAATPPPGSQSNGMANYLTDEQRLEDAHRANFVHELMIEKAPSALVSLVGRKEYERCAQDVYFFLQSPVCLKQLAFEVLELLVLAAFPELDDIVKKWHEDKQQLYALE

SEQ ID NO: 53042 - protein, 674 aa, Oryza sativa
MAALRLPRAPTTAALAAGVPHRFPAPEGEPPPPRGPNRAHLNALLTSYGRRGRLRDAQLLFDQMPSRDVISWTALLTAYADGGDLASARLVFDDMPRRNAPSWNALLSVYLRAARPRAAHALFYKMPAKNAVSYGAIISGLAKAEMLHEAELVYEEMPWQWRDPVGSNALMAGYLRVGELAMALRVFEGMTVRDVISWSAMVDGLCKHGSVSEARRVFDAMPERNVVSWTSMIRGYVKRGMCRDGLLLFLNMRREGVQVNTTTLSVALDACAAASLAREGIQIHNLIISMGFELDIFLGDSIIIMYSRFGWMVDAKRAFDCMQQKDIVSWNSLITGYVQHDMVEEAHVLFKLMHQKDAVSWTSMVVGFANRGWMRESVELFEQMPVKDEVAWTAIISSFITNGDYLSAVRWFCRMSQEGCKPNTIAFSCLLSALASLAMLNQGRQAHAYSINMGWVFDSAVHTSLVSMYAKCGRLAEAYHVFSSISNPSLIAINSMITAFVQHGFVEDALKLFTKMQNAGYKPNHVTFLGILTGCARAGFVQQGYNYFESMRPVYGVEPNPEHYTCMVDLLGRAGLLAEALEMINSMPQNDHSDAWAALLSASSLHSNLAFAKIAAQKLLEKDPYDATAYTVLSRMFSSAGMEDEEMLKVVQLSNLASKRPGYSLIMQDKATEI

SEQ ID NO: 53043 - protein, 452 aa, Oryza sativa
MVQAVQSDDSAVQLEATTQFRKLLSIERSPPIEEVINTGVVPRFIAFLQREDYPQLQFEAAWALTNIASGTSDNTKVVVESGAVPIFVKLLSSPSEDVREQAVWALGNVAGDSPKCRDLVLASGGLYPLLQQLNEHAKLSMLRNATWTLSNFCRGKPQPNFEQVKPALSALQRLIHSQDEEVLTDACWALSYLSDGTNDKIQAVIESGVFPRLVELLMHPSASVLIPALRTVGNIVTGDDMQTQCVIDHQALPCLLNLLTNNHKKSIKKEACWTISNITAGNREQIQAVINANIIAPLVHLLQTAEFDIKKEAAWAISNATSGGTHDQIKYLVAQGCIKPLCDLLVCPDPRIVTVCLEGLENILKVGEAEKNLGAGDVNSYAQMIDDAEGLEKIENLQSHDNTEIYEKAVKMLESYWLEEEDDAMPPGDNAQNGFNFGNQQPNVPSGGFNFG

SEQ ID NO: 53044 - protein, 1064 aa, Oryza sativa
MLAPVNHLAELFLLAGDIHATLYTGSKAMHSEILNIFKEETGKFSKFSAAQNVKITLQRRFQNYINDSSRQKQFGMFLGLRLFKHLPSIPISPLKVLSRPSGCMLKPVPSITPVADGGSSLLSFKKKDLTWVCQQGADYVELFIYLGEPCQVCQLLLTVSHGVDDSSYPATIDVRVGSSVDTLKLVLEGACIPQCSNGTNLLIPLTGRIDPEDLAVTGKSARPNIQESTYLPLLYDFEELEGELNFLNRVVALSFHPSARARTPITLGEIEVLGVSLPWVDMLTDSRRGPDFVELLHEKLSSIPGNVGSKEFANSSNSFLPQNGIVGSERASSTKSSSSVLQGSSGNFVDFLTGDFDMPNQSDATENTSFVNVEQTNSFDDDFDVNPFATASETPSAKVNSQVEEFDSAHIYLKFFESFSGNIKGKGLNFEQMMKLEIKRLCLDLSAVERDRALLSIGVIPATVDPNRSVDYSYLLKLSSLADYLALLGHTVHEDRVNASIGLENINGHAIDFWNICENDESCTGDVCEVRALSSSHASATSENSSIFVECSQCGRTACKACCAGKGAFLLLNNTYRDLKIYGGSQGGGYSALADNFVCKSCCSEVIKHALYVDYVRVLRSLRKKGRTEQAVLKAVNQVCGLEFSRISDFTKSVQYGQKQLKQLLDGEESLAEFPYASFLQTVETSDDSEPLLSLLAPFGIGEQKSYWKAPLDNTSVEFSIVLGGLSDVSGAAIIVGSCGYSTSDCPIVEIWAGNKINREDRTFIGKWDVHDMMLSSPHLSGSEKTSSMSEEPRHIKFHFPNPIRCRIVSIKMTLNHIDSHSTKFREEFDLLSLSEGTFSESKPTTPQNSFIHAKRIVIFGNTLRKETNPDTSMGIMRMKTYLDRSQPLGRFRIPVEAERLRDNDLVLEQYLLPNTPGIAGFRLDFFNVVRLRVTHSPSSSELDMKEFSLIPMEDRVINPAILYLQVTIVKESGKLVVEEYRLPEVKVNTPLYYDFQDLQQDVRCVLFRLLGDVTAFVDDIAEIDGSNLRNLPLATGLSLSNKIKLYYYADTYEMGKIGSLSAV

SEQ ID NO: 53045 - protein, 1114 aa, Oryza sativa
MPVLHDVSGIIKPRRMTLLLGPPGSGKTTLLLALAGRLGKDLKASGKVTYNGHGMEEFVPERTAAYISQHDLHIGEMTVRETLAFSARCQGVGSRFDMLTELSRREKAANIKPDADIDAFMKAAAMGGQEANVNTDYILKILGLEICADTMVGDEMLRGISGGQRKRVTTGEMLVGPARALFMDEISTGLDSSTTFQIVNSLRQTVHILGGTAVISLLQPAPETYNLFDDIILLSDGQIVYQGPREDVLEFFESMGFKCPDRKGVADFLQEVTSKKDQRQYWARHDKPYRFVTVKEFVSAFQSFHTGRAIANELAVPFDKSKSHPAALATTRYGAPGKELLKANIDREILLMKRNSFVYMFRTFQLMVVSLIAMTLFFRTKMKRDSVTSGGIYMGALFFGVLMIMFNGFSELALTVFKLPVFFKQRDLLFYPAWSYTIPSWILKIPITFIEVGGYVFLTYYVIGFDSNVGSFFKQYLLMLAINQMAGSLFRFIGGAARNMIVANVFASFMLLIFMVLGGFILAREQVKKWWIWGYWISPMMYAQNAISVNELMGHSWNKIVNSSASNETLGVQVLKSRGVFPEARWYWIGFGAMIGFTILFNALFTLALTYLRPYGNSRQSVSEEELKEKRANLNGEIVGDVHLSSGSTRRPMGNGTENDSTIVDDDTEVTQRGMVLPFTPLSLSFDNVRYSVDMPQEMKAQGVADDRLELLKGVSGSFRPGVLTALMGVSGAGKTTLMDVLAGRKTGGYIEGSINISGYPKKQETFARVSGYCEQNDIHSPQVTVYESLLFSAWLRLPEDVDSNTRKMFIEEVMELVELKSLRDALVGLPGVNGLSTEQRKRLTIAVELVANPSIIFMDEPTSGLDARAAAIVMRTVRNTVNTGRTVVCTIHQPSIDIFEAFDELFLMKRGGEEIYAGPLGHHSSELIKYFESIPGVSKIKDGYNPATWMLEVTTIGQEQALGVDFSDIYKKSELYQRNKALIKDLSQPAPDSSDLYFPTQYSQSSLTQCMACLWKQNLSYWRNPPYNAVRFFFTTVIALLFGTIFWDLGGKVTKSQDLFNAMGSMYAAVLFIGVMNCTSVQPVVAVERTVFYRERGCRHVLGVSICIWPGCH

SEQ ID NO: 53046 - protein, 1011 aa, Oryza sativa
MEDIVDTFLVHDDGPDPTDPHMLLRLRKKLGKLFKKSKARRKISNLIQDINKKFEQVKARHVKYTVDSVVLKSLAATTIDPRLQNLYKRATELVGIDGPRDDLINKLSLGGDVDVSDKKMKVISVVGFGGLGKTTLAKAVYDHFKPHFKCRASVPVDQNPDMNKAFDDQVEPHFECGAFVPVGRNPDMKKVFRDILIDLDKEKYTNPNMMVLDEKQLMDELKEFVKEKRCFIVIDDIWDKESWKLIRCALQESDCGSRLVITTRISEVATHAGEAYKIQPLSRDNSEKLLYARIVDGEWKYFDNPSAKACEKILKKCGGVPLAIITIASLLASKPGEDWSEVYNSVGFGHEDNDDVGNTRRILSFSYYDLSSHLKDCLLYLCVFPEDHVIEKNSLIWKWIAEGFIHEELAAGLGLFELGERCFNELINRSMIQPVETKHEGYVDGCCVHDMVLDMIHSLSSEENFVTVLNGDERQKLPGSIARRLALQRVLVHKDGQLANITLKNVRSLIASQCFGSLCLHTPVLRVLDVINCAESETPNVLEDRDKTMPSHLGSLLHLRYLGLVDTYITKLPREVRYLKFLQTLDLRGSRIKELPEEVGLLTQLVCLRADWEIMVKIGLIGKLTSLQELWIEPAAAVYDDDAASVDDDDDAAAVDDTTKSTMKFVNELGLLRELRVLRTYFEDLNESMERALLESLSKLHNIRDLHIEGPPLVTRRVTSSARSVSCLHLRYLCLNCFVFSGLPAWIKSSLAPNLSCLDVVVLIVKEQDMETLARLPELRCLVLRLHETELVSIKIHTEDVGYFRKLRILRILGTSIWFDLHGSKCNITDNRSLASIIMPSLEFLEFAVHMRFLKDATQLGFDKLLSFEKLGRSSLQKVTIVLKCGDARLSEVEEVAAALMNSAAVHPKHPTVQTKWQDEQAVLSPYQEAYMHVSRTPELVNEAWKANIVSSGRIRALRMPVTEASSSKVICLLYRKSGKGLLALSSNAVHKLWKWESNDKNPAGMVRQEN

SEQ ID NO: 53047 - protein, 839 aa, Oryza sativa
MATVLEMLVQLAVVVTVLCAAVRAYTPADSYLFLCGTSGNATVDGRTFVGDAGLPASVLMAPQSTEANMPANQVTGAGDDSPALYQSARVFTAPANYAFSAKPGRHFVRLRFFPFRYQSYDLAADAAFNVSVQGVVFVDGYTPKNGTAVVREFSVNITGRALVIAFTPTGKKVAFVNAIEVVSHPDELIGDTAPMVNPRNQSQYTGLTAKALETVHRINMGEPKVTPNNDTLWRTWLPDWTFLHESSFAAHNQVSPAMIKYQSGYATSLTAPSAVYTTVTELNTTAAMVGNTQAQLNLTWKFNAPAVSDYLLRLHLCDIVSKATLGVVFNVYVGQWRVLQDYESSGDTFSLLATPLYKDFVLAASDAAKGTITVSIGSSTATNALPGGFLNGLEIMRIVGSTGSIDGATSPRGSKIKTGIIAGSAVGGAVLAIALGCVAVRMLRRKKKPVKQPSNTWVPFSASALGARSRTSFGRSSIVNVVTLGQNGAGAGAGYRFPFAALQEATGGFEEEMVIGVGGFGKVYRGTLRDGTQVAVKRGNRLSQQGLNEFRTEIELLSQLRHRHLVSLIGYCDERGEMILVYEYMAKGTLRSHLYGSDLPPLPWKQRLEACIGAARGLHYLHTGSAKAIIHRDVKSANILLDDGFMAKVADFGLSKTGPELDKTHVSTAVKGSFGYLDPEYFRRQMLTEKSDVYSFGVVLLEVLCARAVIDPTLPREMVNLAEWATRRLRDGELDRIVDQKIAGTIRPDSLKKFADTAEKCLAEYGVERPSMGDVLWCLEYALQLQVASPDSSVTTLQRSSSISSVVTDATVSANLGDLDGMSMKRVFSKMLKSEEEGR

SEQ ID NO: 53048 - protein, 220 aa, Oryza sativa; identical to SEQ ID NO: 31673

SEQ ID NO: 53049 - protein, 122 aa, Oryza sativa
MRISQQVVNEVAALLHSGMNTVFSVFHDIALGKDSVLFYQVFLSLWIISIIGSLTDFTTLCYTSIVAVLTIPALYQKYEECIDRYMRFAYLNLQMYEMVYERFSAKCFHRARDLVIEVLKEP

SEQ ID NO: 53050 - protein, 351 aa, Oryza sativa; identical to SEQ ID NO: 50445

SEQ ID NO: 53051 - protein, 84 aa, Oryza sativa
MVMVHMVILLPRRSEILFLSKYAHYGKPVPTRTLVPTKMEAFLEVLIQKSHLLLMMNGVNMLMTARSFLRCFFHLSSLILRLSN

SEQ ID NO: 53052 - protein, 262 aa, Oryza sativa
MLVYEYVNNGNLEQWLHGDVGPVSPLTWDMRMKIILGTAKGLMYLHEGLEPKVVHRDVKSSNILLDKTWNAKLSDFGLAKLLGSERSYVTTRVMGTFGYVAPEYAGTGMLNETSDVYSFGILIMEIISGRVPVDYNRPPGEVNLVEWLKTMVSNRNSEGVLDPKMTEKPTSRALKKALLVALRCVDPEARKRPKIGHVIHMLEVDDFPYRDERRGGKAPGQVKSGEIPPVEAGDSSGNNTPKETPKGQPKDEPFKWRNQAAA

SEQ ID NO: 53053 - protein, 382 aa, Oryza sativa
MAEQANQPTVLQKFGGQFHLGSSFSEGVRARNICPSVSSYDRRFTTRSYMTQGLVNGGINVPMMSSSPIFANAPAEKGGKNFMIDFLMGGVSAAVSKTAAAPIERVKLLIQNQDEMIKAGRLSEPYKGIGDCFGRTIKDEGFASLWRGNTANVIRYFPTQALNFAFKDYFKRLFNFKKDKDGYWKWFGGNLASGGAAGASSLFFVYSLDYARTRLANDAKAAKGGGERQFNGLVDVYRKTLKSDGIAGLYRGFNISCVEIIVYRGLYFGMYDSLKPVVLTGSLQDNFFASFALGWLITNGAGLASYPIDTVRRRMMMTSGEAVKYKSSMDAFSQILKNEGAKSLFKGAGANILRAIAGAGVLSGYDQLQILFFGKKYGSGGA

SEQ ID NO: 53054 - protein, 675 aa, Oryza sativa
MAVFIIANNPLARYAVLFAAAVFLVAAAQAQPTTPPPPPPPEMDCNGILLTYNLDRRDKIRPFVAAPEADAQPYSFRATATVLNSGTRALRSWTLRLTFHHREILVQLDGAVLTSGADLPYNTTADNATSFSGYPQTDLLTPIATAGDLTKIQATLNLVGTLFAGPPPYVPLPSALSLADPSYTCPPAINVSTSTLSTCCILTPEAAANASAGDLDAGRATSYLPRGAGDLVITYDVLQAHETTYLAQVTLENDALLGRLDGWELSWEWLRGEFISSMRGAYPRQVGATDCVYGAQGAFYKGLDFSKVLNCDRKPAVLDLPPSRRGDEDIGGIDHCCRNGTMLPKSVDAAQSKSAFQMEVYKMPPDLNRTKLYAPANFRVSGASPLNPEYACGQPVRVTPTELPDPSGLASTTLALATWQVVCNMTAAPPSKPPSCCVTFSAFYNESVIPCRTCACGCPASPAAACSTTAPSMLLPPYALLMPFERRGREAVWWAGEKRLGVPRPMPCGDSCGVSINWHVATDYAGGWSARATLFNWEGADVAEWFLAVAMEKQAYDGFEQAFTFNATAMGNGTTMILMKGREGFQYLKRESNMSGVDYPVAGKQQSVLLFTKKRGGGGIDVVGGDGFPTRVLFNGHECAMPQRIPSSAHRRCLVLLWTTLLVFMSSILLVLSLL

SEQ ID NO: 53055 - protein, 489 aa, Oryza sativa
MLLSGVATNAIGFDLSPGASFARHMSMQGFDTWIVEVRGAGLSMRGSELAVADTTSDMSRSSALDEITTQKLNGAGPAKDDSTCLAQNFEVPVVEDKFEVPVVEDKDVIESNALEEPQLVTKLSNTLARLGDTFSGYVKDSRLRSIADGFFNQVSELVPDASLTSSLEEVSEKILGLLELPQTSAISDQISHLSLRLVNILGEGQQNISPRLFGWQERLSATIEDLQKQLELIISYDWDFDHYLEEDVPAAMNYIKQQSPTKDGKLLAIGHSMGGILLYAMVSKCGCEGAEPELVAIVTLASSVDYTTSNSSLKLLLPLADPAEMLRVPAIPVGTLLSTTYPISSRAPYILSLLRSQISSKDMMDPDLLSKLVLNNFCTVPAKVLLQLTTAFRDGGLRNRAGTFFFKQHLHKIKVPILALAGDEDLICPPEAVYETVKLIPQHLVTYKVFGKPEGPHYAHYDLVGGRKAVHEVYPCIIEFLSQHDEVSS

SEQ ID NO: 53056 - protein, 125 aa, Oryza sativa
MAAMVASTATSFSYHKPRFAVECRKKDRDRDRDRERPEREKEHKYPFKVVEITPPPRCLGVRCFPTNIHCGESVTIEGQAYTVSAVTHRYQLRKGRYEPSEKRLDVLSTGRYLLNLYLDGLLDKS

SEQ ID NO: 53057 - protein, 76 aa, Oryza sativa
MLACFIDTMQLLLQVLLKGCFLVFSRHHHHGPQMHLMQQYSLLNSLEQRKITILACGFQRTGCIFISCVLLELQCQ

SEQ ID NO: 53058 - protein, 678 aa, Oryza sativa
MGSVADDAEITGPLLAAAAGGGGDSAAAAGVERVPAWREQVTVRGIVVSAVLGVLFCLITHKLNLTVGVIPSLNVSAGLLGYFLVRSWTAVLGRLGFVIAPFTKQENTVIQTCVVACYGLAFSGGFGSYMLAMDQKTYELIGPDYPGNRAIDVMNPSLGWMIGFMFVVSFLGLFSLVALRKVMVIDYKLTYPSGTATAMLINSFHTTSGAELAEKQVSCLGKYLSISFFWNCFKWFFSGVGDSCGFDNFPSLGLAAFKNTFYFDFSPTYIGCGLICPHIVNCSTLLGAIISWGFLWPYISTKAGDWYPANLGSNDFKGLYGYKVFISVSVILGDGLYNLIKIIYATIKEVMNARSKQGRLPLVRVHDDDEGSKLSAEEKLRNDTFLKDRIPSWLAGSGYVGLAAISTATVPMIFPQVKWYLVLCAYVVAPLLAFCNSYGCGLTDWNLASTYGKIGLFIFASLVGRSGGVIAGLAACGVMMSIVSTAADLMQDFRTGYLTLSSPRSMFVSQLIGTTLGCIIAPLTFWLYWTAFDIGNPDGMFKAPYAVIYREMSILGVEGFSALPQHCLAICSVFFVAAILINLLRDVTPKSVSKFIPLPMAMAVPFYIGAYFAIDMFVGTVILFVWERVNRKESEDFAGAIASGLICGDGIWSVPSAILSIMRIDPPMCMYFKPSLTS

SEQ ID NO: 53059 - protein, 68 aa, Oryza sativa
MNHRLEIPSETDPQWTSLILSCWETDSQLRPSFQQLLERLRELQRQYNVQTQMQRNASAAAKNSSIEE

SEQ ID NO: 53060 - protein, 134 aa, Oryza sativa
MVQGAMSHSLNNTEMIASDLSSLLQRRLHCHDDRGVHGVPPVAPRHRAAPHLRAPGLHLLGWRRGLHPHREAQLLPVAPERQLPRLHGHRAPLGRPHRRAVHRRPPPTLVTVRMKWVFIVALVPSAANVADMDG

SEQ ID NO: 53061 - protein, 504 aa, Oryza sativa
MKSNRNLTRGDGRRLGNAALIAFMLGSLLVLSLVRARFSPIGKPGEAIKTEEQEAMRKGSVKMETLEAADEAAASAAAAEEEEETQPKAGDTTAGGGGGGASSAAVAAASTTATDHLTKPVCYESSRRSDTCEATGDVRVHGRSQTIHISPLEQEWKVKPYCRKHDAFALSHVKEWALRPLSTADTYPAVPHCTVNSSATAFVLSTGGFTGNPFHDYTDVLIPAFITAHRFAGEVQFLVSSFKSWWTNRYMQIFQRLSKYELVDIDNDDEVRCYRSVVVGPTFHKELGVDASRTPSGYSMVDFRTMLRGALGLERAVAEPSGDRWDIRRRPRLLIISRRNSRAFLNERAMADMAMSLGFYVRLGEPDISTDVSKFARLVNSADVMVGVHGAGLTNMVFLPAGAVLIQVVPYGGLEWLARGTFKEPAADMQIHYLEYMIQLDETTLSEQYPKDDPVLKDPYSIHKQGWNALKMVYLDKQNVRPHLGRLKNTFMEALKLLPHGHTN

SEQ ID NO: 53062 - protein, 971 aa, Oryza sativa
MPAPPALCVAVDRANRLLWTGHKDGRIRSWRMDLDAAATAPAPPPGGAGDGGGSVGGSNHGGPSNAPVFKEALTWQAYGRTPVLSMVVTSYGEIWSGSEGGVIKAWPYDAIAKSLSLSPEERHMAALLVERAYIDLRNHCTVGNVCSLPASDVKHMLADYSRAKVWTVTSMTFAIWDARTRELLKVFGMDGQVESARLETPVMPEQPIEEEVKVKPSKKDKSQGSLNFFQKSRNALIGAADAVRRVATKGTFVEDNRRTGAVAQAMDGTIWSGCTNGSIILWDGNGNRVQEFQHHTSSVQCIKALGERVWAGYASGIVQVMDVEGNLLAGWTGHSCPVIRMAIGGSYIYTLAHHGGIRGWPLTSPGPLDDILRTELTNKELSYTRMEKINIMVGSWNVAQGKASAESLKSWLGSVSSDVGLVVVGLQEVEMGAGFLAISAAKETVGLEGSANGQWWIDNIGKALDEGTSFHRVGSRQLAALLIAAWARKSLKPYVGDVEAAAVPCGFGRAIGNKGGVGLRIRVYDRKMCFVSNHFAAHLEAVSRRNADFDHIYRTMSFNKPHGSTASATSVQLHRGVNVNGNQVDEVRPDLAEADMIVFLGDFNYRLYGITYDEARDMVSQRSFDWLREKDQLRAEMKAGKVFQGMREGLIKFPPTYKFQKHAPGLGGYDSGEKKRIPAWCDRVLYRDSRPISVADCSLECPVVASITSYVACMDVTESDHKPVRCTFSVDIARVDELIRRQEYGEIIETNEKVRSMLEESSFVPDTTVSTSEIILENQENIVFRITNICETSKAAFEITCEGQSSKKEDATKSEILPRASFGFPLWLEVQPAVGLIKPGETAEITIHHEDFYTQEEFVDGIPQNWWCEDTGDKECVLTVNIRGSTSTETKPHAISIRHHCPATSAPPLIISNPLSSSAAPPINALASEGPPSKRSSKKRESNHHKREQQQQDYAQFGSSEVHDLCRMRCP

SEQ ID NO: 53063 - protein, 129 aa, Oryza sativa
MAQGRGSAAGRRNAAVLAMVLLCVLLHGELAESAVYTVGDRGGWGFNSGGWLRGKRFRAGDVLVFKYSPSAHNVVAVNAAGYKSCSAPRGAKVYKSGSDRVTLARGTNYFICSFPGHCQAGMKIAVTAA

SEQ ID NO: 53064 - protein, 154 aa, Oryza sativa
MSPSRSRSNSRSRSRSRSGSKSKSKSKSRSRSRSRSRSRSPRRERLRSERVSRRSRSRSRAVAQFVEENIAATDTSQQNALLKLFVGTASSLATLLPNARMTPCVTPAARQVIWHVIAQVQDLVSYATNVLSQATLLLTAPTSGLATTVVSLGT

SEQ ID NO: 53065 - protein, 272 aa, Oryza sativa
MARRRGSAAAAAASPAVVGAVSVLALVYYSTVFVFLDHWLGLGNAAGAAHAAAFSLVVAACFFSFFCAAAADPGSVPASFAPDAEDPQRQGLKSRYCDKCCMYKPSRTHHCKVCKRCVLKMDHHCVWINNCVGYANYKSFIICVLNATIGSLYSFVVFLFDLFRTEHEYDVPYVKVIHVLVGVLLFFLSLTIGSLLCWHIYLLCHNMTTIEYREATRAKWLAQKSGQKYRHRFDLGTRKNIQMIMGPNILCWLCPTATGHLKDGTEFQITNN

SEQ ID NO: 53066 - protein, 209 aa, Oryza sativa
MAAARAPKIPPSISEQSLKSLGRIESWMSTLGSSAGRNLGQKLESSLYLKLLYSYLKEFVPSGCVPPRNMGGTLLHRTVNDGIDAAESFRRAEFFVHTLIQFWLVGDDFSPLAVQTCRAYGLPLLSLQSHANATLVEQPPAPGLGDAVKLFVMYMNRINASVDIDAPNVFEGISSWREACNSPVGYWNPLIQRPLYRFLLRTFLFCPWV

SEQ ID NO: 53067 - protein, 968 aa, Oryza sativa
MSSVENPSNGRSNGHAPANASAATANSAQATQQGQTEQNPCDAGSEADLLWKLRKYLVLLAILAAAITFQAGLGPPGGFWQQDQHGYHAGDVVLRYSYPRRYLVFFYCNTTAFGASLIVLILLLVKELSRDAIWLRSLQFAMVLGLLGLMGAYAAGSCREVRTSVYIWALLVGIFAYITLHVVFFRHLAPQWLCEIFYTIRKHWKEILGSIHGDGGTDKTGETGDSEKTKRLEQNRSFLLVLATLAATVTYTAGLNPPGGFWPDDNKPSHLAGDPVLRDHYPRRFKAFLVCNATAFAGSLVIIIMLLSNTAVDHVVKSNALRLCVLVSLFGLMGAYAAGSCREVHTSIYVFALVGAVFLYLCIQWIEHMVPIPCIKSSMEWVGKKKTHLLQKLGSFIMRGTRNPTEESRSTPRAQNPVNNRRSGTSDTAKDDVEKLRTYLLLLGILAATVTYQAGLNPPGGFWQDNNGHTAGDPILEAINPKRYKAFFYCNATAFVASLVIIILLQSQLITVGAMKRHILQTAMALDLFGLMGAYAAGSSRKFSTSVYVFILVLVVFTYFTLHVLLSMALKTQLKTKIEHVPNLFHRFTRFCFRRTEGGSDDGRSDSVELQNEEKDLEKRRKFLMMLAILAASITYQSGLSPPGGFWSDNDRHRAGDPVLHDEFPGRYRIFFYFNATAFMASLAVILLLVNKRLCDKGLKSYALRACVLVDLISLMGAFAAGSCRRVSTSIYVILVVAAVFAYVMIQILVLQVAEQKVDLLKKRRSGFESQQRSMTLTGPTGSTDKKRTEHKWRKDLMLIGTLAVTVTYQAGLLPPGGLWPSDQGNHYAGDPILKVTHPIRYKVFFYCNATAFMASTVMVILLLNNTISKYKRSLLAMKTAMVLDLLGLLGAYAAGSCRKFKTSAYIFALVIAVFIYIVIHVLLSFDEVALLVKEKGKKWMPCLKMWDQIETGASDQPSATQSGAPPV

SEQ ID NO: 53068 - protein, 430 aa, Oryza sativa
MGNAGSNGGGGSPGHRRRGSAAQGHGHHQVHGHHHQPSSPPPPPPPESSPSHYVFAAATPYPPPQYTNPNLPRYYPQYGNYYPPPPSLQVPLPAPYDHHHRGGGAGVPAGGEFPPSAHPQHYPGWPGVSGRPHPCGLQPAMPTPYVEHQKAITIRNDVNLKKETLRIEPDEECPGRFLVAFTFDATLAGSMTVYFFAKEELNCNLTAVKEDLIKPVTVSFKEGLGQKFRQPSGTGINFSVFEDSELLKQGDMDVYPLAVKAETTMPVDQKLEGEDQKMKTPNSQITQALFEKKESGDYQVRVASQILWVNGTRYELQEIYGIGNSVEGDADANDPGKECVICLSEPRDTTVLPCRHMCMCSECAKVLRYQTTRCPICRQPVERLLEIKVNNKAEEQQQPSPDSPIKVNSKAEEHQQQPSQSLPIPHREEV

SEQ ID NO: 53069 - protein, 98 aa, Oryza sativa
MLSSAGLSGGASAKPKASMLLAPPPGSAGKLRSPLPPPPNDPAAARMNSGSNAGIRAPKEPAKRNSDAFSDLSAMKQNLPSSTESAQTKSTGAGWAAF

SEQ ID NO: 53070 - protein, 66 aa, Oryza sativa
MLVSKFGTLRPWHSNFILCIPCSKLVSFQFTCFIITKLEGRHALHWEILSETLNPSNLLLNFIMNC

SEQ ID NO: 53071 - protein, 144 aa, Oryza sativa
METLRLYPPVPLLAPHESSADCVVAGFHVPQGTMLLVNTFAIHRDPQVWDEPEAFIPDRFADGKNEGKMVIPFGMGRRRCPGENLGMQMVGLALGTLIQCFDWERVGEELVDMRECSGLTMPKELPLEALYQPRASMVDLLTKI

SEQ ID NO: 53072 - protein, 518 aa, Oryza sativa
MSQHAVCCGAMFWVYLMSCVGLVMFAGLMSGLTLGLMSLSLVDLEVLAKAGTPTDKDNAARILPVVKNQHLLLCTLLIGNSLAMEALPIFLDSLVPSFGAILISVTLILAFGEIMPQAICTRYGLSVGAKAAPVVRVLLIVFFPVAYPISKLLDWVLGKGHVALMRRAELKTLVDMHGNEAGKGGELTHDETTIITGALEMTQKTAKDAMTPISETFSLDINAKLDLHTMGMIMTKGHSRVPIYSGTPNNIIGLILVKNLITCQPEDEVPIRNVTIRKIPRVSDDLPLYDILNEFQKGHSHMAVVVRRIKEPGASIEKTYSDRSDYKTNSDRSDYKINHRDAHADGLSPSRVSIAGSRRSNIEKNGEVRLYKKSEKKRDNILDFNSGPLPSYSLDQEAVGIITMEDVMEQLLQEDILDETDEYVDVHNKIKINMLPLGKSLSPTISPSNGPHSQGLRRTPMTSPLSSYHHGGSILRSPASNNPQSPGTLPTIISPERSPASQAPSRSSPNSTQVSRNS

SEQ ID NO: 53073 - protein, 504 aa, Oryza sativa
MAARRANCALVLVLALALLAARDAGAAAVPKPNWLGGLSRAAFPKRFVFGTATSAYQVEGMAASGGRGPSIWDAFAHTPGNVAGNQNGDVATDQYHRYKEDVNLMKSLNFDAYRFSISWSRIFPDGEGRVNQEGVAYYNNLINYLLQKGITPYVNLYHYDLPLALEKKYGGWLNAKMADLFTEYADFCFKTFGNRVKHWFTFNEPRIVALLGYDQGTNPPKRCTKCAAGGNSATEPYIVAHNFLLSHAAAVARYRTKYQAAQQGKVGIVLDFNWYEALSNSTEDQAAAQRARDFHIGWYLDPLINGHYPQIMQDLVKDRLPKFTPEQARLVKGSADYIGINQYTASYMKGQQLMQQTPTSYSADWQVTYVFAKNGKPIGPQANSNWLYIVPWGMYGCVNYIKQKYGNPTVVITENGMDQPANLSRDQYLRDTTRVHFYRSYLTQLKKAIDEGANVAGYFAWSLLDNFEWLSGYTSKFGIVYVDFNTLERHPKASAYWFRDMLKH

SEQ ID NO: 53074 - protein, 415 aa, Oryza sativa
MLLRRLLHSSRRLGHRLQTLTPASAATAAAASSSPVSAPLPFRRPLPASSLLWPRLLSTSGRDDDPNKPWAFTPESGDPDPFAAGEGVEAPAGEDPLGLSAAGEDPWAKDFRAEGSEKGDVFEEIFKEEAATAAVASGEKAPGAGADELWTLSGEDEKDPFAEAVLGGGLEGIGGDGAAIDEADAGEDEEEEERKRLERRAREQELMETLKGPNRAFGDLIEASGITEDMIASLILLKDVRGVPGLPPLREIEDETIEKMNATSSRADVERQKQEEIAKARVRQVDEKGRAYGTGKRKCSIARVWIQPGDGKFIVNDKQFDSYFPILDHRADLLRPFTVTKTLGRWDVTCTVKGGGVSGQVGAIRLGISRALQNWEPGLRPNLKAAGYLTRDSRVVERKKPGKAKARKSFQWVKR

SEQ ID NO: 53075 - protein, 571 aa, Oryza sativa
MCGGAILSDLIPPPRRVTAGDLWLEKTKKQQQQKKKNKGARRLPLRQEEEDDFEADFEEFEVDSGEWEVESDADEAKPLAAPRSGFAKGGLKNTTVAGADGPAARSAKRKRKNQFRGIRQRPWGKWAAEIRDPRKGVRVWLGTFNSPEEAARAYDAEARRIRGKKAKVNFPDGAPVASQRSHAEPSSMNMPAFSIEEKPAVMSAGNKTMYNTNAYAYPAVEYTLQEPFVQIQNVSFVPAMNAIEDTFVNLSSDQGSNSFGCSDFSQENDIKTPDITSMLAPTMTGVAIQQQLQQLQQMQQVQNDQKQKIQPDQSYQVPTSAVLPSPTSLPSHLREKFGFSDPNANSSSFITSSSSDNMLDSSFLQGSSKAVDLSRFNQPVASEQQQQQQQAWKQKFMGSQSVSFGGSVLHNSPTSKDGSVENKIGRDVQNQSLFSPQVDSSSLLYNMVPNLTSNVSDGNLSTIPSGSTYLQNAMYGCLDDSSGLLQNTGENDPATRTFVKVYKSGSVGRSLDITRFSNYAELREELGQMFGIKGQLDDPDRSGWQLVFVDRENDVLLLGDDPWESFVNSVW

SEQ ID NO: 53076 - protein, 505 aa, Oryza sativa
MLPPPQVIDATPSGAISSTNFPGGRNSTAGSSNTSLSQQQHTTVSSTAQASSSGHIAAAIAGAAVTGLLCAIVAIYLIVSSRRKKKMDGLVYHYDGNNYFVPSSQFGGSSRNHHPPPSAIMLNSGGASADGGGYYNSGTFSGGEGTGPAGSKSRFSYEELTGITSNFSRDNVIGEGGFGCVYKGWLSDGKCVAVKQLKAGSGQGEREFQAEVEIISRVHHRHLVSLVGYCIAAHHRMLIYEFVPNGTLEHHLHGRGMPVMDWPTRLRIAIGAAKGLAYLHEDCHPRIIHRDIKTANILLDYSWEAQVADFGLAKLANDTHTHVSTRIMGTFGYLAPEYASSGKLTDRSDVFSFGVVLLELITGRKPVDQTQPLGEESLVEWARPVLADAVETGDLSELVDPRLEGAYNRNEMMTMVEAAAACVRHSAPKRPRMVQVMRVLDEGSMTDLSNGIKVGQSQVFTGGSDAADIQQLRRIAFASEEFTGEFEQRTTNSNSESRPMNRIPE

SEQ ID NO: 53077 - protein, 350 aa, Oryza sativa
MSSIDLMDVTTVSTSQFSSQTTVIKDIKNGAGVYSFNLTWDDIAKNLKPKISNPMTTFDVYRNPRNKNAGSFMRLSDFLAFAKGKELSGVMISIEHAAFMAEKLGFGVVDAVIKALDDSGYSKQTAQKVMIQSTNSSVLVKFKEQTKYNLVYMLEEDVRDAAPSSLADIKKFANAVSVRTTSIYPESKHYLINQTSHIVQTLQSAGLPVYVYVLMNEFVSQPNDFFADATTQINTYVQKKGAGVDGIITDFPATVHRYRLSPCTSKESNLPTFMLPVQPGGLSGTIIDPAAQPPAMAPMPLLTDSDVAESPLPPVKNVTAPAPGASRAIKMRTDASIIVALLVLCASLII

SEQ ID NO: 53078 - protein, 622 aa, Oryza sativa
MGSSSLPRAAVLAVALLLLLADSGEAFFDLFSIFRPRSDSDYFPFDGSPGQAKRKPKIEQEEDGAAPATATGLTKVPPLGAPSKAALDTIVLPVDDSAGHAGSWTIVSENSGVSAMHLAVMRHGKAIMFDTSTTGRSLMRLPMNNCRADPRAKREGTMDCWAHAVEFDYSTGALRSLKTATDTWCSSGAFDADGNLIQTGGYFEGDKAVRRLDACDTCDWREYPNSFAEGRWYATQQVLPDGRFIVFGGRRAFSYEFVPQPGMTNGQSIKFPLLRETTDDVENNLYPFVNLLPDGNLFVFANDRSVVFDHRTGKVVRELPKLAGGGRNHPASAMSAMLPLDLRNLTRGADPEPEVIVCGGALKTAFRLGENNTYQPTLRDCARISLGKIDAVWAVEAMPVGRVMGDMLVLPTGDLLMLNGAAKGSSGWGFARQPILSPILYSPRHPEGSRFRPLAASTVARMYHSTSAVVPDATVLVAGGNTNAAYNFSGVDFPTEVRVERFAPPYLSRELTGNRAVIDVASVPAGGMRYGTKFTFRFHTPVAAVEWGDVRVTMYAPPFTTHGYSMNQRLLVLPVAGFSAQGQMYELTVDTPRKPELAPPGYYLVYVVSKDVPSEAAWVKIQ

SEQ ID NO: 53079 - protein, 77 aa, Oryza sativa
MAGLRPPDRHSPAWHEPQAQPQYTPTAAPHFLERHTRPIPWSLLLRCRPQQPASALHLAWLGAAPANACVEQLPPHW

SEQ ID NO: 53080 - protein, 283 aa, Oryza sativa; identical to SEQ ID NO: 29633

SEQ ID NO: 53081 - protein, 259 aa, Oryza sativa; identical to SEQ ID NO: 31765

SEQ ID NO: 53082 - protein, 729 aa, Oryza sativa
MAASPLPRWAPTPSPTRPLRTPGTPSAGAGAASSSSSSSSSWRSCVPLLTTFSSVFGSSAARRGGGLSGGEPPPALPHAGRHDIVGGIAPLDGVEAAVERRRKDEMMMSATTACSRGVFLTWDDLSVTAPAAAAGCGGHGRRAVILDGLSGYARPGEVLALMGPSGCGKTTLLDALAGRLSPNMKMRGDILINGLREKLSFGTSAYVTQENVLMATLTVTEAVHYSAQLQLPDSMPAEDKRARADRAIRQMGLGAVAGVRIGGRVCKGISGGQRKRVSICVELLASPALLFLDEPTSGLDSAASYHVMSRIAGLARRDGMTVVAAVHQPSTEMFELFHGLCLLATGRTVYFGAASDAIEFFESNGFPCPLRRNPSDHFLRMINKDFEESEEGSTIISPRAAEVIQKLMGSFKSCGTLRTEKEACAMINQGASPIPQRQATFLTKTYVLTKRSIVNMHRDAGYYWLRFVIYIAICLSIGTIFFNVGSNFASIQARASMLMFTSTLLTMMAIGGFPSFVEDMKIFRKERMSGHYGATEFVISNTLSSIPYLGLISIIPGAIAYYLTGLQRGIDHFIYFAAVLWACTMLVEGLMMIVAAVVPDFLLGIITGSGVQGVLMLNAGFFRLPSDLPKPVWKYPTYFISYHKYATQGLYKNELLGLVFEDIGGGGLTISGEYILKNYLQVELSYSKWVDLAILVAMIIIYRLLFLVIIKISEIVKPRMLHFLCASKV

SEQ ID NO: 53083 - protein, 108 aa, Oryza sativa; identical to SEQ ID NO: 42364

SEQ ID NO: 53084 - protein, 265 aa, Oryza sativa
MDPAPTLAAELWRTPYLGGGGGGGGGGRGLEAAASGVTEQSNGSRGGGGGGGAGRRRQREAPALEDDSSRIVSASGGGGGGQDLTDSEAKRFKASKSSGDNSSLRTEAETDSRNASKSGDQNPPPPEPPKQDYIHVRARRGQATDSHSLAERARREKISERMKILQDLVPGCNKVIGKASVLDEIINYIQALQRQVEFLSMKLEAVNAHVNNGIEAFPPKDFGAQVYNTAPGLTFDPQTPREYAQGSTPSEWLHMQIGGTYERVT

SEQ ID NO: 53085 - protein, 246 aa, Oryza sativa
MAIAGVLFLLFLARQASAAGYGGWQSAHATFYGGGDASGTMGGACGYGNLYSQGYGTNTAALSTALFNDGAACGSCYELRCDNAGSSCLPGSITVTATNFCPPNYGLPSDDGGWCNPPRPHFDMAEPAFLHIAQYRAGIVPVSFRRVPCVKKGGVRFTVNGHSYFNLVLVTNVAGAGDVRSVSIKGSRTGWQPMSRNWGQNWQSNAFLDGQSLSFQVTASDGRTVTSNNVAHPGWQFGQTFEGGQF

SEQ ID NO: 53086 - protein, 109 aa, Oryza sativa
MVAARVFQLTRELGHRTDGETIEWLLRQAEPSIIAATGTGVTPEEAPPAAVAIGSSSVAAAAAAGGHGGAFVHVPYYTALLMQPPNADEPPMASAASASGTTAADENNN

SEQ ID NO: 53087 - protein, 601 aa, Oryza sativa; identical to SEQ ID NO: 47679

SEQ ID NO: 53088 - protein, 374 aa, Oryza sativa
MSVFNVTDQNGQKIMDESVLDEIVKYIHKCLGADSCFLPSRRRSVGVEPSSDYTLIELTGTDRPGLLSEVSAVLTNLECNVVNAEVWTHNKRAAAVMQVMDRKTGLAISDTQRLARIKERLSYVFKGSNRSQDTKTTVTMGITHTERRLHQLMLEDRDYERYDKDRTNVNPTPVVSVVNWLDKDYSVVNIRCKDRPKLLFDTVCTLTDMQYVVFHGSVDSEGPEAYQEYYIRHIDGSPVNSEAERQRVIQCLEAAIERRVSEGLKLELSTGDRVGLLSDVTRIFRENGLTVTRAEVSTRGDKAVNTFYVRDAAGSSAVDLKTLEAIRQEIGQTVLQVKGHPDHRKSPPQESPSRFLFSNLFRPRSLYSLGLIRS

SEQ ID NO: 53089 - protein, 508 aa, Oryza sativa
MGLQGNKATHDFLSLYAAAATATDYSPLPRHPDSKPSAPAPPPAQDFFLKTHDFLPQVEKRADQTPPPPPPPPPHAAVTAEKQLLHQHALAAAGAFTINHAVAAAATAVKQEPPFAPWCQPVAAVDPRGHQWSLPFAARAVAVASSRPQQQQQQPPPPERKGGGGFMDAGSRSSGGAGFDDDDGHAARREVSSSLKELTVRVEGKGGSCSGSAGTDQMPNTPRSKHSATEQRRRSKINDRFQLLRDLLPHNDQKRDKASFLLEVIEYIRFLQEKVQKYEVSYPEWNQENAKVVPWTNIYFRSSWKNAQNKGQVPADHSPDPPELLKNGSPYMFPFTGNSDNNNAVETAAASGAQDQAETDPMSRVSYRSVDTPSPNNVADKVTSQPHAQLVRPSPAENHTVNCDKLNNSDLAIDEGTISLSSQYSQELLNKLNHALENSGIDLSQASISVQINLGKRAMKRSTPAATSTSKELTDPASNSQAMGRQLRLGDGAEEHRQASKRHKSDNS

SEQ ID NO: 53090 - protein, 149 aa, Oryza sativa
MCGGAIIADFVPPAGARRAAASDISDNAVLSAAGAGDESFAAAKAPAPGRKTAYRGIRRRPWGRWAAEIRDPRKGARVWLGTYATAEEAARAYDVAARDIRGAKAKLNFPPTIGAAAVPPPSKKRRKAAAAANHHHHHHQQESSGSSSA

SEQ ID NO: 53091 - protein, 129 aa, Oryza sativa; identical to SEQ ID NO: 48762

SEQ ID NO: 53092 - protein, 233 aa, Oryza sativa; identical to SEQ ID NO: 30813

SEQ ID NO: 53093 - protein, 681 aa, Oryza sativa
MLTFEALSETAEFARKWVPFCKKHNIEPRAPEFYFAQKIDYLKDKIQPSFVKERRAMKREYEEFKVRINALVAKAQKVPEEGWTMADGTAWPGNNPRDHPGMIQVFLGHSGGLDTDGNELPRLVYVSREKRPGFQHHKKAGAMNALIRVSAVLTNGAYLLNVDCDHYFNSSKALREAMCFMMDPALGRKTCYVQFPQRFDGIDLHDRYANRNIVFFDINMKGLDGIQGPVYVGTGCCFNRQALYGYDPVLTEADLEPNIVVKSCCGGRKKKSKSYMDSKNRMMKRTESSAPIFNMEDIEEGIEGYEDERSVLMSQKRLEKRFGQSPIFIASTFMTQGGIPPSTNPASLLKEAIHVISCGYEDKTEWGKEIGWIYGSVTEDILTGFKMHARGWISIYCMPPRPCFKGSAPINLSDRLNQVLRWALGSVEILLSRHCPIWYGYNGRLKLLERLAYINTIVYPITSIPLIAYCVLPAICLLTNKFIIPEISNYAGMFFILLFASIFATGILELRWSGVGIEDWWRNEQFWVIGGTSAHLFAVFQGLLKVLAGIDTNFTVTSKASDEDGDFAELYVFKWTSLLIPPTTVLVINLVGMVAGISYAINSGYQSWGPLFGKLFFSIWVILHLYPFLKGLMGRQNRTPTIVIVWSILLASIFSLLWVKIDPFISPTQKAVALGQCGVNC

SEQ ID NO: 53094 - protein, 487 aa, Oryza sativa
MTAATSKNVVVLFPFPGHGHLAAFLSFAGVLHRALPDVAITLVSTPRNVASLRRATSAGHDSFLLHELPFVPADHGLPAGWESSDGVPHNRFPDFLEALEVLQPAFDDFVAGATAAGDVAVCVVSDPFLAWTVTVARRRGCAHAFFVSCGAFGSAVVHSLWSHLPIRPDEAGRILLPEYPDVVIHRSQVSSNVLHPPTAVKHRVEAFFGRQIQLGYKTDALLINTVEEFEPTGLAMLRRTFRLPVIPIGPLVRASTKTTSPETDATAGAITSFLDSHPPSSVLYVSFGSQFSIQAEHMAELAAALEATGRPFVWAVKPPDGHNINGEIQPKWLPDGFEERVTATKKGLLLHGWAPQVGILAHHSTGAFLSHCGWNSVLESMTHGVPIIGWPLAGDQYYNAKMLDEEWGVCLRVEGARGDMDMSAIIVDKATLVAVVETVMSPTAKAAEMRQRARAIKEIMEAAREGGHGSSANQALEEFFKTMKLNG

SEQ ID NO: 53095 - protein, 501 aa, Oryza sativa; identical to SEQ ID NO: 38080

SEQ ID NO: 53096 - protein, 450 aa, Oryza sativa
MDIYTTSHHSTIMAASSVTGSRRLCILFYLLTVVATVVTAASAHTAHNATADEEYWEKRAEEARSFNRAAYVSDPVATLNRFNADVLRATTRRSLARYTGPCMATNPIDRCWRCRDDWATDRKRLARCVRGFGHRTVGGAAGKIYVVTDASDDEMVIPRKGTLRYGVIQDRPMWIVFARDMIIQLRQELIVNHNKTIDGRGAQVHITGAQITLQGVQHVIIHNVHIHHSVPHGGGMIRDSKRHYGLRTRSDGDGISIMSSSNIWIDHVSMSNCSDGLIDAVSGSTAITISNGHFTKHDHVMLFGAGNSDAQDEVMQITVAFNHFGKGLVPRCRFGFFHVVNNDYTHWLMYAIGGNMNPTIISQGNRFIAPDDLNAKEVTKREYTPYDEYKEWVWKSQGDVMMNGAFLNESGGQNERSYDQLDFIPAKHGKYVGQLTKFAGTLNCHVGMPC

SEQ ID NO: 53097 - protein, 560 aa, Oryza sativa
MVPMAKALAVVSAFCLLVAPAAAARSLVDVIGGAFGGRKDYYTPGPTGQHHSSSPSHSHKAPPCAPTPPQGGGGGYNPPSPSIGTSPTTPGGGGGYTPTPSDTPPSPSSDTSPSTPGGGCSSSPTPCDAPPSPSSDTSPTTPGGGGGYSPTPSDTPPSPSSDTSPTTPGGGGGYTPTPSDAPPSPSSDTSPTTPGGGGGYTPTPSDAPPSPSSDTSPTTPGGGGGYTPTPSDTPPSPSSGSSPTTPGGGGGYTPTPSDTPPSPSSGSSRTTPGGCSTPTPCGTPPAPSSGTSPTTPGGSYYPPTPSIGDVPPSPSSDTSPTTPGGGSPSTPCDTPPSPSSGTSPTTPGGGYYPPTPSVGDVPPSPASGTSPSTPGSGGYSPSTPCSAPPSPSSGTSPTTPGGGYSPSTPCNAPPSPSSDTSPTTPGGGNYPPAPTIGNVPPSPSSGTSPSTPGGGCSSSPTPCDAPPSPSSDTSPTTPGGGYYPPTPSIGTSPSTPGTGGGYYPPSPSTGGYTPTPDVPISTPSSPYSPLVPTPPSSTTPMPSTPTRHPSRAHTGCRTRA

SEQ ID NO: 53098 - protein, 105 aa, Oryza sativa
MEIIVTFGLVYTVYATAADPKKGSLGTIAPIAIGFIVGANILVAGPFSGGSMNPARSFGPAVASGDYTNIWIYWVGPLVGGGLAGLVYRYVYMCGDHAPVASSEF

SEQ ID NO: 53099 - protein, 152 aa, Oryza sativa
MSSSPIRPCLCHGGGGHGNDDLGGPCYSHSYAPLAHPPHVPLSSPGRCTDLKKKKEKEEREGEESGRKGHWRAASLVVDLLLCCLALDGAHAAGAAGGRGEQRRSELRWAAVEVDAEQAMAAAGGGRPSWAARRWCGSAQRWWAACSPPAPL

SEQ ID NO: 53100 - protein, 325 aa, Oryza sativa; identical to SEQ ID NO: 36156

SEQ ID NO: 53101 - protein, 72 aa, Oryza sativa
MRQARQAADAERAGGDGLAAPIKWAWAGGTEAGRRRPRPPLPQIRPEGKRRDGWPAGGGMGGRLVSRFFLFF

SEQ ID NO: 53102 - protein, 738 aa, Oryza sativa
MARLERGSLVVGGRELLERAPPSVALRRPAVVASPGGAAFLGATAPAPSSRHVFSLGTLASGWKWLSLFRFKIWWMIPTVGEDAAGVPAETQMLLLESRSEAGAALYALMLPVLDGGFRASLQGSPENELQFCFESGDPEVQTLEAVDAVFINSGDNPFKLMKESIKMLSKIKGTFSHIEDKEIPANLDWFGWCTWDAFYKSVNPVGIEEGLKSLCEGGAPPRFLIIDDGWQETVNGFKEVDEAFIEQTVFAERLIDLTENDKFRGETCKNLGDHVKKIKEHYGVKYVYIWHALHGYWGGVLTTPDAMKKYNPQLVYPVQSPGNVANLRDIAMDSLEKFGVGIIDPAMIYDFYNDQHSYLSSVGVDGVKVDVQNVMETLGKGFGGRVALTQKYQQALEESIARNFKGNNLICCMSHNTDSIFSSLKSAVARASEDFMPREPTMQTLHIATVAFNSLLLGEIFIPDWDMFHSKHESAEFHGAARALSGGGVYVSDKPGMHDFSVLKKLVLPDGLILRTKHAGRPTRDCLFNDPVMDGKSLLKIWNLNKFSGVIGVFNCQGAGNWTYPVKENAHVPTTVCITGDLSPSDVELLEEIAGDNWNGETAVFAFNSCSLSRLQKHQTMEVSLSTMTCKIYTIALIKVFGGFVQFAPLGLVNMYNSGGALENVTSTGDCSEITIQIQCRGPGRFGAYSATRPEICSVDEHEVEFKHTDDGFLAFDLSHGSSQDNLRNIEILYRAS

SEQ ID NO: 53103 - protein, 301 aa, Oryza sativa
MTRCAVVAAVAAVLLVAGAAAAGGGEEEEAPSTCARRGPGFVDALASRCPCIRIEPSPPVEVRGEAIAKELNLRHRGVTYSVLFYAAWCPFSSKFRPIFEALSTMFPQRYHFTVEESSAMPSLFSRYGVRGFPAILLVNETTMVRYWGPKDLSSLVDFYKETTGFDPIAYFDVDHQDSTGDFRPVTPGDRSLRKIAKDEPFVLLAVLFIILKVAAHFVPIVVSHLKTFLVVRVQNLNLGIRRGSSQLLERALNVLDVKRLCSKLRLSNKTRDLRKGASNARAWASSFTSVSLGESSSSRQA

SEQ ID NO: 53104 - protein, 350 aa, Oryza sativa
MAKPRASAAAAKAPASTPPKTVHSALVTYASMLSLLSLCPPFVILLWYTMVHADGSVVRAYEHLREHGVLEGLKAIWPMPTMAAWKIIFGFGLFEAALQLLLPGKRFEGPVSPSGNVPVYKANGLQAYAVTLITYLSLWWFGIFNPAIVYDHLGEIYSALVFGSFVFCIFLYIKGHLAPSSSDSGSSGNVIIDFYWGMELYPRIGKHFDIKVFTNCRFGMMSWAVLAVTYCIKQYEMNGRVADSMLVNTALMLIYVTKFFWWESGYWCTMDIAHDRAGFYICWGCLVWVPSIYTSPGMYLVNHPVNLGPQLALSILLAGILCIYINYDCDRQRQIPSDKWEMLNMGQSSI

SEQ ID NO: 53105 - protein, 144 aa, Oryza sativa
MRPQSSAVRPCLIPSDASTAPSSSTVMNPSPFRSNTSNASRMLASSTSQAPPPPPPPPSTRMTVSYSWVNSSMSTHPSPLASMRAMVAASSSLCTGIPSLSSDSVSSSRVIRPSPSRSNSSNTRRSSACWSHAIPSPPAGARRR

SEQ ID NO: 53106 - protein, 523 aa, Oryza sativa
MVVLAASIISKSGKALVSRQFVDMSRIRIEGLLAAFPKLVGTGKQHTYVETENVRYVYQPIEGLYLLLITNKQSNILEDLDTLGLLSKLVPEYSPSLDEEGVCKTAFELIFAFDEAICLGNKENVTVQQVKQYCEMESHEEKAHKLMMQSKINETRDVMKKKASELDKMKMERGKLDKGGYSAISGPRVVEKAFGDMSITGSGFGSGSGLGGLSMDMDSFASKPKGRPSAAATAPGKGLGMKLGKTQKTNQFLESLKAEGEVILEDVQPSSVQSRVSPLPPSDPVTVTIEEKLNVTVKRDGGVNNFDVQGTLALQVLNDTDGFIQLQIENQDVPGLSFKTHPNINKDLFNSQQVVGAKDPNRPFPSGQNETPLVKWRIHGMDESSLPLSVNCWPSVSGNETYVNIEYEAAEMFDLHNVVISIPLPALREAPSVRQIDGEWRYDSRNSVLEWSILLIDQSNRSGSMEFVVPPADPSTFFPISIGFSASSTFSDLKVTGIRPLKDGNPPKYSQRARLVTANYQVV

SEQ ID NO: 53107 - protein, 476 aa, Oryza sativa; identical to SEQ ID NO: 47251

SEQ ID NO: 53108 - protein, 212 aa, Oryza sativa
MPAFKAPAPGFSVRFSPFHEQRLLAAASQHFGLVGNGHLLVLDLSAAAAPGGAPAPPPVFAFPTSDALFDCAWSESHESLCAPSAATSTASTPPGRLRLRVRRPHRPRLGRARAGAHAGHPGARPRGALARLGQVRSVHPRHRLRRQVDPRLGRPRAAGAAGAARRARVRRQARQVLAAPAGHAHVLLLRHDGVHVGLPQGGRAAREVWPPH

SEQ ID NO: 53109 - protein, 795 aa, Oryza sativa
MDPDVAVERLISQDPFHEVRRKRDKKKEIKAPQETRPRPFYKPAFRGSKTGGDSTGSGKGPTKKETELHSLPKSSVSDSVKESNPTEKISAADHATINDSLILSSGQADAKSTPLQPPSQVKHGWGGMPGRPSMADIVKMGKPQAKPVRSVACNTGMPTIGGSVISNATNHTSKDSQDLVLPSQVNSVATDRIPNGTNEVSPASNDSSIDVLPPREGLEVPESVATVKPGSSTADVYKDEVEEDMDSDKNKDMSASNADDRTSSGPYPASSKEVHSEHTQIATHHNDLIVETEDSQSDGNAFENNRVADSEGNMSATDKQFEQLILHEEKKSKSSEDNPAVIIPDHLQVSNADCAHLTFGSFVSGTLDAPVSLKTANGDEEVAAVSDNHSIDQSDVRIHEYENKDTVAPAADEHVASSTKSDTENVDVAPVQQPELRTADLIDVPNNTMYNNLSTSDYATPSAVQPDSSAHIYLQEHRQLQNISPLSSFMQGNIPNGLLPPALPPLRDFDPAFSLLLTNPPLATMVHGTTSSSMGNATTVSTQPQEIVNPGASSNPQLNQSQPSTSTSIASGPPLPQHLTLHPYAQATLPLGYASMIGYPSLAPSYTYLPPPAFQQPYMNSGLFHQAAAAVPNSSVKYPLPQYKGNVSLASLPQQASLLSSYVGGFGAASSMPGNFALNQSTPSATAAPGFDGTVPAQYKEGDQFVSLQQSENAAMWMHGASSRTMPPLAANALYYQGQQGHQGGLRQGQLPSQFGAPLAPTQPGLGHEHRNPSDGNLSSAAAAAQANQMWPNSY

SEQ ID NO: 53110 - protein, 449 aa, Oryza sativa
MRSFPFFLTQIHVKWFETPLDPCAAILVLIVTALLCLGIKESSFVEGIITIANVIVMLFVICAGGYLAFQNGWSGYNDEQGYFPKGVAGVLSGSATLFFAYIGFDAVASTAEEVKNPQRDLPWGMCLTLSLCCFLYMMVSIVIVGLVPYYALDPNTPISSAFAKYGMQWAVYIISTGAVFALIASLIGAILPQPRIVMAMARDGLLPPLFSAVDPTTQVPTLSTILSGICAAILALFMDVSELAGMVSVGTLLAFTMVAISVLIVRYAPPNEIATKVALPGSSESLTSDSGYSEPDEENSEDLLGNVQDIPTANEANKIRRQKAIACIILIFLGVVTIVSSVSFSFFPLFLRSIAGAFGSLLLVSATIALWFIGQDKSSLRQTGGFMCPFVPILPVCCILINVYLLMNLGIHTWIRVSMWLAVGAIIYVFYGRKYSSLTGVAYQRISPA

SEQ ID NO: 53111 - protein, 454 aa, Oryza sativa; identical to SEQ ID NO: 36538

SEQ ID NO: 53112 - protein, 485 aa, Oryza sativa
MVVTFTSRRSEPVLLRPARPTPRETKQLSDLDDQRTLRYYETVVGFFRRCDGGAAGAVGAPADPAKAIRAALAEALVYYYPVAGRLREVADGGGAGNRLVVDCTAEGVVFVEADADVRLEDFGQPLLPPYPCVGELLCDAGDTRAVVGKPLLLMQVTQLKCGGFVLGFHICHNIADGFGMAQLIMAIANLARGEPAPTILPVWRRDLLTAARLGSGAVARTPFASAAAASASASSPALQNGARRAAAAADAMLSTPPDRMVVEYFLFGPREVSYLRGQLPAHLADSTTVFELLTAVMWRCRTAALGYGPDLRVRLMITMNARGRWNAHTPLPRGFYGNAHVSPVAEAAAGDLLGRPLADTVELVRRTKRGMTRERMSAMVETVAQLREWPPSSMDRVYEVSDIKWTTVNLLKFGWAEFAGGGIPLAGDLTSKLGSDHTRCKNSAGEVSTVVSMLLPRVAMARFKKEMAVLLNKDDKKSLTIMSSL

SEQ ID NO: 53113 - protein, 393 aa, Oryza sativa
METFGWAGGGQLMHHDDIYLPRSVGCGRPFELDDAFLGACFGAQLQCDGGVGGGDGGGCLQGTSGFGAVAGDPLGLLCSGDVFASVAEGAGGAHDDGLLDAALAFSRNQLGGAACDGSDGGAVSNGAMLSSYSGTTGGNISSGESNNYSGGGGGYDADVVSPTSTMSAATQSLHPKRKLYDDHHHPAGIAAAAAAPPLAPCPRPTTGAVAAKRRASTSATSITFGHQPHHHHAGATTAGYEPDMEAMAQVKEMIYRAAAMRPVHLGTEAAADKPRRKNVRISSDPQTVAARLRRERVSDRLRVLQKLVPGGNKMDTASMLDEAASYLKFLKSQVQKLETLGTTTTTSKLPQQYYSGNINSSNNHHGFLGFAANNNTISAGYANSNAGNATKLL

SEQ ID NO: 53114 - protein, 84 aa, Oryza sativa
MNLCISFSDDHNQLIPIAANSSVELALRLKLSFRKKIACLSQFVLSCTFYIRSSLCFDCWGLKVFVLFPQFCVLFFHFIAMPLV

SEQ ID NO: 53115 - protein, 457 aa, Oryza sativa
MMSGSESQQEREHRQQQEMNISFGMMMNHGHHHYGQHQQQHHHHPPPSSSSSSSMHAAAASFIKEASAGAYDHLGELDQALFMYLDHGSHAASHQEQRQTLNIFPSQPMHVEPSPKGEISLVLSPAAVGTKMARSPDHHHHHQQQAAAAMEELATGSRRQDHHHLQHQPFAAEPAGINRDVKPVTAKKDHRRGVSTGERDPKTLRRLAQNREAARKSRLRKKAYIQQLESSRIRLAQLEQELHTARAQGVFFPGSGGLIGEGGSGKGVLLGGIDGVGGGGGGGLSSEAAMFDVEYGRWQEEHHRLMYELRAALQQQLPEGELQVYVESCLAHHDEVAAIKDGAIRGDVFHLISGVWMSPAERCFLWLGGFRPSEVIKMLVAHVEPLTEQQIVGVYGLQQSALETEEALTQGLDALYQSLSDTVVSDALSCPSNVANYGPDGRRHQQALHPRGLRPPG

SEQ ID NO: 53116 - protein, 163 aa, Oryza sativa
MKGNMEMNNLCVEQEGSQLPEENKNKVQCKYLSWEETSESDLWDCRPDLVLGADIIYDPVCVPHLIRVLSMLLRRGNNRGTNNVANKEETSNEFSSAATEVPVAYIATVIRNAETFNCFDKAAADAKLSVVNITNSEAPLSLLPYMLSYDRSSVQLLKITLLS

SEQ ID NO: 53117 - protein, 136 aa, Oryza sativa
MRFIKNYGRIAHNALAYAMNDEFSRVLHQQMEYFSSNPSADTLNRLRGEVSEIHTVMVDNIEKILDRGERISLLVDKTSTMQDSAFHFRKQSRRLRRALWMKNAKLLAVLTAVIVLLLYLIIAAFCGGLSLPSCRS

SEQ ID NO: 53118 - protein, 363 aa, Oryza sativa
MSPAARRGNPSRSASAIVADTATGYHLLKVDGYSLTKATPTGSSLTSTQFTVGGHRWRIKYYPNGDSADSADYISIYLLLDEKASLDLKVEAKYLISFADQVKTQPSLKYRTVRTFHRQGSWTWGYGKFIKREDFEKSDHLRDDSFTIRCDILVVHKIHTKETAEILPVETFVSVPPSDMNQQFGDLLETEKGADVVLEVGGQTFAAHRCVLAARSPVFRAELYGLMKEGDTAGVVCIEEMEAQVFKVLLRFLYTDSLPEMKEEEDVMCQHLLVAADRYNLERLKLICEEKLCKYISVGTVSNILALADQHHCDGLKKACFNFLGSPANLSAVVAGDGFKHLSKICPSLMEELVVVLALPGSS

SEQ ID NO: 53119 - protein, 295 aa, Oryza sativa
MAASPAMPSLLLLLLLAVLVSAADAYDSAASANTNAGAIPDPNILNMEAMCPKTTDVKACQQLVKNMPSNIVAGKKDARSIARGCIATAWFVARDGAKDCTAAVDECKDKVDQCLDSCRHAFAAVNDALEPQGTGDDAVKVPEDEKLLAIHASLTQLLRGPTGTRRPPLCNTCCQDGSCTEEKKRNVVALFVQLWSLLDFADAVLEDLYPLTKLPGDKAAGSDTSAAAAGSTADKETSAAAGSTADTATSAAAGSTSAKETSPVAGSTADKTYAAAGSAPPVVDTAPAPPVTTYD

SEQ ID NO: 53120 - protein, 550 aa, Oryza sativa
MSLVEELPPRGPSTNPKVRIVFGVIGVLKLAVRSYFLVITGRDCVGSYLGHAIFKLTGLKVLPCNNSLNTSSAEQKKMESEFSELLDAAERTIGLYFSYDVNLTLTSQRLHDLGDQFKSLPLWRQAEPRFLWNGYLLEPLIENKLHQYLLPVIQGSFQSIHAEVGSEKVNVTLIARRCTRRIGTRMWRRGADPEGYAANFVESEQIMQSKEFTASYVQVRGSMPFLWEQIVDLTYKPSFDVVRVEEAPRVLERHFHDLQKKYGAVVAVDLVNTHGGEGRLYERYAKSIEPILSEDIRFVHFDFHQICGHIHFERLSQLYDQIEDYLKKHRYFLLNSKGEKMEEQTGTVRTNCVDCLDRTNVTQSMIGRKILESQLQKISVLGDNNTISDYPAFDADYKVLWANHGDAISTQYSGTPALKGDFVRYGKRTTQGILNDLWNAMARYYLNNFADGTKQDAMDLLQGHHISSVSRDMPTPTKGLIENHASFRLAFALLLAAVIFLIMSLRRARNDVFHLVLSLLWSGFCFGITRYVKANGRKFTNRPRFHLSRH

SEQ ID NO: 53121 - protein, 399 aa, Oryza sativa
MKPPRRWMYGRGGGKGKPAGLLLLGVFLCLSVVLLLLLHGSSPSLEGEGRKPEAVEAAGGGGEEEEVAVARAEVEEAPLPPGNARLAFLFIARNRLPLDLVWDAFFRGDKEGRFSIFVHSRPGFVLTRATTRSGFFYNRQVNNSVQVDWGEASMIEAERVLLAHALKDPLNERFVFVSDSCVPLYNFNYTYDYIMSSSTSFVDSFADTKAGRYNPRMDPIIPVENWRKGSQWAVLTRKHAEVVVEDEEVLPEFQKHCRRRPLPEFWRDWDRPIPAEAWKAHNCIPDEHYVQTLLAQHGLEEELTRRSVTHSAWDLSSSKDRERRGWHPVTYKISDATPALVKSIKDIDNIYYETENRKEWCTSNGKPAPCFLFARKFTRAAGLKLLDLSLIAANGASTM

SEQ ID NO: 53122 - protein, 360 aa, Oryza sativa
MARRSPCLTAAVLLLGALAVASALVDEAAAAGQGLGHGARFMSKQGRAMYEKPPELEPKPKPKPKPHPKHESKPEPKPEPKPEPKPYPEPKPETKPELKPEPKPNPEPKPEPKPEPKPEPKPYPEPKPKPKPEPKPEPKPEHKPEPKPEPEPKPYPKPKPEPKPGPKPEPKPEPKPHPEPKPEPKPKPVPHPEPKPEPKPEPKPHPEPKPEPKPEPKLHPKPEPKPHPEPEPKLKPEPKPEPKPEPEPKPEPKPEPKPEPKPYPKPKPEPKPVPKPKPIPHPGPKPKPKPDPKLEPKPHPEPKPHPMPEPEPKPKPEPKPEPKPYPEPKPKLKPEPKPGPKPIAPPNKHKPPHMPPATNQ

SEQ ID NO: 53123 - protein, 200 aa, Oryza sativa; identical to SEQ ID NO: 47768

SEQ ID NO: 53124 - protein, 61 aa, Oryza sativa
MRRPRRRRSRGPRRSASARPAPRPRPRWRTKPSSILLNIMAGLSAMLSKNWSRIMNQIQNL

SEQ ID NO: 53125 - protein, 212 aa, Oryza sativa
MRPSGVESSAPPLPIRSRAHLPPPSLLSRVSAVASPPSMNLTLALAFAGWGAGRSISSPPLLPRRPRRPEILGVEAAAAETASRSRCRRGSLLAARRRRMMRRRGAVESSEQLVDSFTHRSVVWNAAASGTSRRILSATRTPLRLRTVARSRPRPSPPPCSPAPALSPPTPCSPGRMATAPTTSWTTAMTPSRPTSSSASLSTPASTASAPR

SEQ ID NO: 53126 - protein, 195 aa, Oryza sativa; identical to SEQ ID NO: 30538

SEQ ID NO: 53127 - protein, 64 aa, Oryza sativa
MSVQFTSEHVCYVNCNYCNTILVVNVPNNCSYNIVTVRCGHCTMVLSMDLAPFHQARTVQDHQV

SEQ ID NO: 53128 - protein, 307 aa, Oryza sativa
MLVVTKPGQLPVEFLEPSAAQKLVIGFDCEGVDLCRHGALCIMQIAFPDAVYLVDAIEGGKELIEACKPALESEYVTKVIHDCKRDSEALYFQFGIKLHNVMDTQIAYSLLEEQEGKKRGYDEYISFVSLLADPRYCGMAYPEKEEVRTLLRQDPNFWTHRPLSEMMIRAATDDVRFLLSIHEKMMEKLSKVSLWRLSVRSELYCRCFCINDNKYADWPPLPTVPDEIEPDVYVPEVDILSVLDVPPGKMGRVIGRKGSSIMEVKASCNVEIHIGGAKGPPDRVFIIGPVQEVRKAEAILRGRMLEF

SEQ ID NO: 53129 - protein, 568 aa, Oryza sativa
MSSAAIAISPMVEEFALLPICFDGSRSPHCLSGSQLQDSIIIFLAVPGAPPMPMSVLGSESIASVKLRIQRFKGFVVNKQRLVLDGHELARNNCHVKDYGLADGNVLHLVIRLADLRLINIETTSGKKFQFQVDQSRNVKYLKSKLAVEGDEDLGEDHKLECDGKELEDHQLIADISKKDDAVIHLFIRKPAKLRTQQVDKDTVVTVVTPQEKENLQNEAHAVNPAKPAGARPALVEPIIVNHKVKLSLEVMRMISSAIAGLENGYLPVMTAEGSGGVYFMQDASGEKNIAVFKPRDEEPMAKNNPRGLPVSTDGEGMKRGTLVGEGAFREVAAYILDHPIGDHESEERIGFSGVPPTALVRSLHRGKSFKIGSLQMFIQNNGSCEDMGPRAFPVKEVHKIAVLDLRLANADRHAGNILVCKDEEGGNYKLVPIDHGYCLPGKFEDCTFEWLYWPQAREPFSDETIAYIKSLDAEEDIKLLKFHGWELSARCARVLCISTMLLKKGAARGLTPYDIGRILCRETVNRDSEIEDIVQEAEGHVLPGSSEVIFLETVSEIIDRHLDKKFA

SEQ ID NO: 53130 - protein, 358 aa, Oryza sativa; identical to SEQ ID NO: 30145

SEQ ID NO: 53131 - protein, 274 aa, Oryza sativa
MLPPAARLAARRLLGLATSSASESAAARRLSRSPISYAAAGCSSRLFSTALNYHLDSPENNPDMPWEFTEANMKKVNEILSHYPSNYKQSGIIPMLDLAQQQHGGWVPVAAMNAIAKIVEVAPIRVYEVATFYTMFNRTKVGKYHLLVCGTTPCMIRGSREIEEALLEHLGVKRNEVTSDGLFSVGEMECMGCCVNAPMIAVADYSKGSEGYTYNYYEDLTPKRVVEIVEMLKRGETPPRGTQHPERKNCGPAGRNTTLHGEPKPPPCRDLDAC

SEQ ID NO: 53132 - protein, 94 aa, Oryza sativa
MGRGKVVLQRIENKISRQVTFAKRRNGLLKKAYELSILCDAEVALVLFSHAGRLYQFSSSSNMLKTLERYQRYIYASQDAAAPTSDEMQNNYQE

SEQ ID NO: 53133 - protein, 502 aa, Oryza sativa
MLFVLHHNQREHFRPPVVDKGSEFEETHHEKVNFTEELLSSTSFARQLTDQMTLAKAYVVLAKEHGNLQLAWELSSQIRNCQRLLSEEAVSGKAITKEEAHPIITRLARLIYKAQDSHYDISTTIVTLKSLVNALEERAKAAVVQTAEFGQLAAESVPKNLHCLTVKLTVEWLQNPKHRGRSEEHRNSTRLVDNNLYHFAIFSDNVLATSVVVNSTVSNANHPQQLVFHVVTDRVHFGAMSTWFLINDFKGCTVEVRCIDEFTWLNAAASPLVRQLSEMETQGFYYGDSKNLEREIKFHNPKFVSLLNHLRFYIPQILPNLEKVVFLDDDVVVQKDLTQLFSIELHGNVIGAVETCLESFHRYHKYLNFSHPIISSKIDPHTCGWAFGMNIFDLIAWRKANATALYHYWQEQNADLLLWRTGTLPAGLLTFYGLMEPLDRRWHVLGLGYDVDIDDRLIESAAVVHYNGNMKPWLKLAIRRYKYIWERYVNFTHPYVRECLLH

SEQ ID NO: 53134 - protein, 63 aa, Oryza sativa
MLVSLSDLLWLRNFFLELKLLMNIFMKLWCDNKLVITTVTNLVQHERTKLCGDRSFFYQGKTR

SEQ ID NO: 53135 - protein, 659 aa, Oryza sativa
MSMSGSDFGAPCDDPKIFRNICRDRILKDLLQPDKDKETKSSWKVLIMDKFTVRIMAYACKMAEITDAGISLVEDLFKRREPMPSMDAIYFLQPLKENVIMLLSDMSGRCPLYRKAYIFFSSPIPKELVSYIKNDSSVIPRIGALREMNLEFFAIDMQGFTTDHDMAFTDLYSAQHNSKKFNDTISTMATRIATTFASLKEFPCVRYRAPKGTDPMTTPKFDMVPKWLATAVWDIVSKYKSTIPEFPQKETCELLIVDRPIDQIAPVIHEWTYDAMCHDLLEMDGQKYIYEVSKAGSEPERKEALLEDHDPLWVELRHIHIADASERLYDKMNNFVSKNKAAQLHSRDGGEISTKDLQKIVQALPQYGEQVEKLTLHIEIAGKINKFIREYGLRDIGQVEQDLVFGDAAAKEVISILRSKQDMSPENKLRLLIIYAIVYPEKFEGDKGEKLMQLAKLPHDEMDAINSLRYLVGSDTKKASRPGGFSLKFDAQKKKNAARTERQDGDETWALSRFFPLIEELIEKLSKGALPLNEYPSMSEPSSTEQGSTQSAAATKPAQAQPMSRRSRRTPTWAKSRNSDDSQSSDSSVLRHGSNDFKRLGNRIFVFMIGGATRSELRTVHKLTMKLKREIVLGSSSIDDPPQFISKLKMLTAGGANDV

SEQ ID NO: 53136 - protein, 271 aa, Oryza sativa
MSKGPAPFLNIGKRAKDLLYKDYNFDQKFSLTTTSNSGLGLTATGVKIDELFIGDIQTQHKSGKTTVDVKIDSESRVSTTVTVDEALTGLKTSFSFRVPDQKSGKLDLQYLHDHFALNSTIGLTSTPLIELAATIGTNELSAGAEVGFDSTSASVTKYNSGICYNKHDFSAAVLLADKGETLKASYIHTFNETNGATVAAEVTHKLKTKENYFTIGSSHAIDSSTLLKTRFSNGGKVGVLCQHEWRPKSTVSISAEYDPKVVSSPSRFGVA

SEQ ID NO: 53137 - protein, 294 aa, Oryza sativa
MDKDWMKTSRSSAEYNIGVDKFIEFALSNSAHNNRIICPCKNCGNRYWLGEHKVREHLICDGFLAGYTSWIHHGESMSTSKPSVASSSHHEQNDDMDQMLLEGLGMYDSRTLGTDDGAEDDLDVDAEAYYKLVNDGSQELYPGCKNAISVDGQALNDCVDILVNTVFNQHTIIPRAYGMISKLGSAQARCIPWPRDNLMHPSGQALHSKVSTIARHNSANQGNSVALTEVFKHNSIDNALQSVVGHKRKVHDLTPKENIGREDTHSRAKKIGKARPDSPYANFTNSQLLTTSRF

SEQ ID NO: 53138 - protein, 215 aa, Oryza sativa
MGRGKIEIKRIENSTNRQVTFSKRRAGILKKAREIGVLCDAEVGVVIFSSAGKLSDYCTPKTTSVFPPLSRILEKYQTNSGKILWDEKHKSLSAEIDRVKKENDNMQIELRHMKGEDLNSLQPKELIAIEEALNNGQANLRDKMMDHWRMHKRNEKMLEDEHKMLAFRVHQQEVELSGGIRELELGYHHDDRDFAASMPFTFRVQPSHPNLQQEK

SEQ ID NO: 53139 - protein, 347 aa, Oryza sativa
MPTDETAAAAPATTALSGHGCTVCVTGAGGFIASWLVKRLLEKGYTVRGTVRNPMDPKNDHLRALDGAGERLVLLRADLLDPDSLVAAFTGCEGVFHAASPVTDDPEKMIEPAIRGTRYVITAAADTGIKRVVFTSSIGTVYMNPYRDPNKPVDDTCWSDLEYCKRTENWYCYAKTVAEQGAWEVARRRGVDLVVVNPVLVLGPLLQATVNASTEHVMKYLTGSAKTYVNAAQAYVHVRDVAEAHVRVYDCGGARGRYICAESTLHRGDLCRALAKLFPEYPVPSRCKDEAAPPVKGYLFSNQRLRDLGMDFVPVRQCLYETVRSLQDKGLLPVLPPTADDHHHPSS

SEQ ID NO: 53140 - protein, 284 aa, Oryza sativa
MASSVPNGHGAATATGEGGTPPPPPPSSSSSLVFLGTGCSSAVPNARCLIQPPDPPCAVCSQSLSVAPELNPNYRCNTSLLIDYCQDENAHKYILIDVGKTFREQVLRWFVHHKIPCVDSIILTHEHADAILGLDDVRIVQSFSPTNDIEPTPIYLSQFAMDSIAQKFPYLVRKKLKEGEEVRRVAQLDWRVIESDLQIPFVTSGLEFVPLPVIHGEDYICLGFLFGRKSKVAYISDVSWFPPSTEHGHILYSFCIGCNARMLVLIGNSPLDGLVLTTMHRCPL

SEQ ID NO: 53141 - protein, 1107 aa, Oryza sativa
MDSDDEAAAAAMAARARETLRKSASSSSSSPYARSTDDGPVASASCDARLERCCREVGAAVAVVEEPERVVSGGGALPEFVGEGGGEGIYRVPLRAAMHPGRPPPLEVRPHPLRETQVGSFLRALACEPRRRQLWAGSESGVRVWGLDDVFAAAGCGARRGDEESAPFRESVPVPPVLCVEADASNALVWTGHKDGRIMSWRMDLAAGSDDDDAPLFREALTWQAHSRTPVLSMVITSYGEIWSGSEGGVIKAWPWDVIAKSLSLMPEEKHVAALRIERSYIDLRNNAAAGNISSFPAADVKHMLADHSRAKVWCLTSMAFAVWDARTRELLKVFGMDGQIESARLEAPVMPEQFIEEEIKAKPVKKDKPQSSFNFFQKSRNALMGAAGAVRRVATKGTFVEDNRRTEAVVQAMNGTVWSGCTDGLIIMWDGNGNRLQEFQHHCSSVQCMKALGERVWVGYASGIIQVMDVEGNLLAEWTGHSCPVIQMAIGGSYVFTLAHHGGIRGWPLASPGPLDDILRTELSNRELSYRRLVNIKMLVGTWNVGQEKASYESLMSWLGRAFFDVDLVVVGLQEVEMGAGVLAMAAAKESVGLEGSANGQWWIDNIGRTLDEGISFHRVGSRQLAGLLIAAWARKDLKPHVGDVDAAAVPCGFGRAIGNKGGVGLRIRVYDRRICFVNNHFAAHLENVSRRNADFDHIYRTMTFNKPHGSAASATSVQLHKTVNANGNQVDEDIPEMAEADMVVFLGDFNYRLYGITYDEARDMVSQRSFDWLKERDQLQAEMRAGKVFQGMREGLIRFPPTYKFQRHLPGLAGYDSGEKKRIPAWCDRILYRDSRDVLTAECSLECPVVAKITSYEACMGVTDSDHKPVRCAFSVDIARVDEFTRRQEYGKILQSDKRLHSLLRESHFVPDTIISTNNIILENQEHVVLRITNDCQRNKAAFEILCESQSISKQDGTKSEFPPRASFGLPLWLEVEPSVGLIEPGQTMEVTVHHEDYYTQEVFVNGVLQNCWCEVTRDKEAVLLVNVTGSTSTETITHRINVRHCCSTISASPPINPPSITTPSVDVLSGEASTRSSKKNPLNYLQRSDFKPFGSSEVHDLCPL

SEQ ID NO: 53142 - protein, 375 aa, Oryza sativa; identical to SEQ ID NO: 32784

SEQ ID NO: 53143 - protein, 694 aa, Oryza sativa
MAPAWDRAKHALATRLCIRFPARQRAVEDAPAEDEAPPPPAAAAARAVPEEKLKSPSVSVRRLSSSGSWGKKKVCAICLGGIRTGGQALFTAECSHEFHFHCISSNVNHGNYVCPVCRAEWKELPFQGTQPGDTAYGRARVSTVNWPQDEGQMSVVRRLSHGYSGNLQQQLAVFRTPEASIFNDDENIDPQSETVDDHNAVTNSVEIKTYSEFPAIQKSERRKVFAILIHLKAPKSLDSVSSRAPLDLVTVLDVSGSMSGIKLSLLKRAMSFVIQTLGPNDRLSVVAFSSTAQRLFPLRRMTLTGRQQALQAISSLVASGGTNIADALKKGAKVVKDRRRKNPVSSIILLSDGQDTHSFLSGEADINYSILVPPSILPGTSHHVQIHTFGFGTDHDSAAMHAIAETSNGTFSFIDAEGSIQDAFAQCMGGLLSVVVKDMRLCIECIDEGVSLTSIKSGSYASQVAGNERSGLVDIGDLYADEERGFLVTLHVPAAHGQTVLIKPKCTYLDAITMENVQLDGEEVIIQRPAYCVDCTMSPEVEREWHRVQATEDMSAARSAAEDGSFSQAVSILESRRRILELHAAHSSDSQFLALIKELREMQDRVESRQRYEESGRAYMLSGLSSHSWQRATARGDSTELTTLINTYQTPSMVDMLQRSQTILPSVVEMLNRSSTVATSKSFSSYLPTSRHIA

SEQ ID NO: 53144 - protein, 664 aa, Oryza sativa
MGKPKPASATAAPRGHKRRPKRTRPSGKGGGPEPREEKRKRRELDGVGLAEESPPPGSSLGKILSTESGAIGLEQSDEDDMEDEHTVPGDDETNDMINNKDDAFDEMEASCSFHRHVSRIITNEEVNALLKQKCKFKWEVPAEDIPKSKWVGTGEKMEGAYVDLIGGVKGKLRDHWQNTLSDQLNSRLNFFSLCSSYRDIMHCNKKPFYLKGGSTVDSSTMDSYLMHALNHINRTREIVVKNDGKLRSDPSKDILDDNSFLDQGFTRPKVLFLLPLKSIARRVVKRLIQLSPLSQKDIIAKFEGKFGESDDEVEEPVQSNKPADFDLLFAGDTDDEFLFGIKYTKKSMNLFSNFYSSDIIVASPLALIKKINGVDDNGKEPAKERDFDFLSSIEIVVVDHADVILMQSWSHLYAVFEQLNQLPSKEHGTNVMRIRPWYLDQHARYYRQTILLSSYLTPEMNALFNGLCLNYEGKVKLVTEFKGVLSKIQFEAPQVYERFDASSITEVDDARFDHFCKKVYPKIQESDEGRVLLFVSSYFEYIRIRNFLKSQEASFCRIGETTSQQDISRARLWFFEGKKKILLYSERSHFYHRYKIRGAHHLIIYSLPGRKEFYPELVNMLSESENRKCTVFFSRLDLLKLERIVGTFAAQRLVSSDKSIFVFR

SEQ ID NO: 53145 - protein, 380 aa, Oryza sativa
MMVAGVIRSNQNGGGGGGTVSGAARISPAVVFVLVILAVVLFVSGLLHLLVRFLLRRGRGRDGGGGGDAEAAEGVEESALQRQLQQLFHLHDAGLDQDVIDALPVFMYREVVVGVGGGGGAGGGAKEPFDCAVCLCEFAGDDRLRLLPVCGHAFHIDCIDTWLVSNSTCALCRAALGAGAAALFDAARRRDGRRGGPESAGGRRVPRPPRQVQEPLQGGRRRPRPRRRRRRRRRRRRRRWHYHARGRRVEQQQLGRQAVLLHGLLPVRPRRGELAGVRTPEARRRQWQGEAERARRRQPGRQRRRRRRRREEDRRRQQGRQLLGVQDLAVAAARQGEAAGARLRRLAGGGRPAAVAEEKPRGFLMLISMVCLQFAKLFQS

SEQ ID NO: 53146 - protein, 346 aa, Oryza sativa
MPSGCIILLSCRFIDLLHEAPLSGHREPRSIVGGTLYCILLAGYAAVAVSAPWIFYLVPDMIPPLLCSSNVIILILTGIFQQYWVHQVRKVRLQGYYDFSEKLKRLAQLPFATVASGVASMLLIIVWQPLVHILSVSLLLRIAIVVEAICAGCFMSLYLWHIHKYNSLNGHPDILRSLYSALQLQPSSSLEERRYYDGRFSDQQMALLQYQRENIHYLSEEVLRLQECLSKYQRTDVGSTPQADLAHLLASRDQELRALSAEMNQVHSELQLARSLIDEKDSEIQRIRVSNNQYIEENDRLRAILGEWSARAAKLERALEAEQISSIELRKNIAKLRGQTYKDQNT

SEQ ID NO: 53147 - protein, 661 aa, Oryza sativa
MVEKLKEKEDDEKNEAEDREWLGHKLKDEDVLLVLSGFNYPALWNQVLDLLTSMSCSDCAVVLCTNDSKMAKYCCSNDSANDGPQIIYSLVDIYLNRALALLSHSYGYEEGHLKEILRNILAKCCLDVFCMKMLLHALYYNPDMTKHQLQFLNISLGKEFTDHGRQDRIMAFCYQALPNSYKNCLWYSTIFARGSGVRRASLIRRWIAQGLIAQVNQSSAEDEAGHCFEAMHSQKLIVSSGLSGTRKVKSCTVHPVVSGLISRESSTVEDLLLNNQLPLDLDLLYSIRHGMQLHPANSNIKKFLNSLSSSSRLLLTVLDLEGRKGLKAGDLHTVCKIHKLKYLSLRNTDIAQLPKEIGQLKLLETLDIRGTRVQVFHTALPMLKHLLAGCIIDYPKEDIIKSKESFSTVSMPRAVATMEKMEILSRVKVSNSAKELNNIGDKLEHLKKLGVVLSGKKASLIDLFLQVDKLHRCLRSLSIRMDPPGNWDSIDVILLRPPKLLESLHICSIRSGLPPRIKELHQLAKITLRDTFLNQGALDILSMLKGLRYLRLCYHSFAEGALSFVKFVELVDLVIEDDIVNSVALGNNTYGGDPDKLEKIVWSFTHMEELSGVSTLQSLTHIELNGRTWHLQNLEKLKREVDECGITFTLNPPENGQGSRL

SEQ ID NO: 53148 - protein, 140 aa, Oryza sativa; identical to SEQ ID NO: 34727

SEQ ID NO: 53149 - protein, 802 aa, Oryza sativa
MSLSSLSRALARSARSSRQRQGSLLGGHGGLRASSPPLPCGELGFLRSYVTSVIGNRAAVASGAGKGGDWRFLLASRQFRRLFSDKSKKNHGKHSEEENKGKGDESDKSDSKKQSSSGDQWNFEESIKQFKDMIAPLFLFGLLLLSASASSSEQEISFQEFKNKLLEPGLVDHIVVSNKSIAKVYVRSSPSIDRIQDSDIHITTSHLPGIESPSSYKYYFNIGSVDSFEEKLQEAQKALEIDPHYYVPITYTTEAKWFEEVMKYVPTVLIIGLIYLLGKRIQNGFTVGGGPGKGGRSIFSIGKVQVTKLDKNSKNKVFFKDVAGCDEAKQEIMEFVHFLKNPKKYEELGAKIPKGALLVGPPGTGKTLLAKATAGESGVPFLSISGSDFMEMFVGVGPSRVRNLFQEARQCSPSIVFIDEIDAIGRARGRGGFSGGHDERESTLNQLLVEMDGFGTTSGVVVLAGTNRPDILDKALLRPGRFDRQISIDKPDIKGRDQIFRIYLKKLKLDKEPSFYSQRLAALTPGFAGADIANVCNEAALIAARSEGTLITMQHFESAIDRVIGGLEKKNKVISKLERRTVAYHESGHAVAGWFLEHAEPLLKVTIVPRGTAALGFAQYVPNDNLLMTKEQLFDMTCMTLGGRAAEEVLIGKISTGAQNDLEKVTKMTYAQVAVYGFSEKVGLLSFPQREDGFEMSKPYSSQTASIIDTEVREWVAKAYEKTVELIKQHKDQVAQIAELLLEKEVLHQDDLVQVLGERPFKTLEPTNYDRFKQGFQDEDSNRNAELSNADGASSLGEAVAS

SEQ ID NO: 53150 - protein, 598 aa, Oryza sativa
MAAKNHARSQDFWRRFWSMLSYACSELCLIILLHVAAGASYLATRLARIHKLKMPCILCTRMDHALHGKPWFSSDLVCAAHRSEISSLAYCSSHNNLAQCDDLCKRCTVATNDVVDTRRSKSRQLCSCCSEPFTKARNAHRISETASVSGEINREQIPADHSKDKAFVVGIEEVNESDSSPRTYEQSTKNNGASGNAGTAKLAPSGSTVPMRVFVDRNSSVKNGFISRANLSSPRPSQIISAKDSNSTTQQEVKAFLSQMSTVRGIDSSWSDGAPSPGINAQTDESNANGRRPSLERNYSVIEPSDANLADEVEGESSPENLKRLLELNKKSMSALYKELEEERSASAIAASQAMAMINKLHEEKAAMQMEALQYLRMMEEQADHDHEAIQNLHDLLTEREKELLDMDAELENFRRLVQNEQFNGGKHDIAGIMNETDMPFEVLNDLGYTKNTMSGFEDEMAYILESISRLEDKLCVSTNRLASDDAKINQEGLIGGADFGSSPTHGESTSDQQDDGNKSVQNHKDNCSCSHPEDGKTSDANLKDEVSLLHTRLQALEADQEFLKHVLNSLRCSPDGLQCVQAIASHLLELRRIATQR

SEQ ID NO: 53151 - protein, 591 aa, Oryza sativa
MCGILAVLGVADVSLAKRSRIIELSRRLRHRGPDWSGIHCYQDCYLAHQRLAIVDPTSGDQPLYNEDKSVVVTVNGEIYNHEELKANLKSHKFQTASDCEVIAHLYEEYGEEFVDMLDGMFAFVLLDTRDKSFIAARDAIGICPLYMGWGLDGSVWFSSEMKALSDDCERFISFPPGHLYSSKTGGLRRWYNPPWFSESIPSTPYNPLLLRQSFEKAIIKRLMTDVPFGVLLSGGLDSSLVASVVSRHLAEAKVAAQWGNKLHTFCIGLKGSPDLRAAKEVADYLGTVHHELHFTVQEGIDALEEVIYHVETYDVTTIRASTPMFLMSRKIKSLGVKMVLSGEGSDEIFGGYLYFHKAPNKKEFHEETCRKIKALHLYDCLRANKSTSAWGVEARVPFLDKNFINVAMDIDPEWKMIKRDLGRIEKWVLRNAFDDEEKPYLPKHILYRQKEQFSDGVGYSWIDGLKDHANEHVSDSMMMNASFVYPENTPVTKEAYYYRTIFEKFFPKNAARLTVPGGPSVACSTAKAVEWDAAWSKNLDPSGRAALGVHDAAYEDTLQKSPASANPVLDNGFGPALGESMVKTVASATAV

SEQ ID NO: 53152 - protein, 526 aa, Oryza sativa
MEYGITPAGGFRWRSYRDLIRDVFIAGDMYCGPAKLLFPQITGSAGEDQARCGWSSASSVASSPVVSSSYMSSSGSPAWSSASSSPVHKLRVIAQQMVGDGYIQELIRAFGRRRPDELIFQRWFSQLDVDFVLVLHTDGMVRADSFSVEDLMALIKRWIRALLTMVQVLNITLLELPLPVAGSTERMAAAADHAQFTGFAEESILRMLAFVDAVTLSALNVNDDHRHRTPELLPGMLQLYACVSEACDLLVSAGMGKDEITKMQALDAMNNGILMQSRRKLSDAIWVMMEKVRALFLMDACWQVSQEAAASGTHETTELTMNYITLLWRNHTMLDYFSVFVSDADSFSSVARLIAEMITCLECKLEETSLSIPDLGLRFIFLLNNWHRVLQRVESLRDLPAAVRQERILLLHASDSKIKRYIDDYLNASWSPLLRCLLIDKPFVALGRSHESKIETQLQTTYATQKFWKVPNPQLRQRLRRAIMSKVIPDYSKYIEQMDRQNKINRHLVVTSPEQLEQQIEELFEG

SEQ ID NO: 53153 - protein, 260 aa, Oryza sativa
MSSILRSIQLRNSIWSSFPVRFLKQQAGLSTVELLDPRSCGKRHFTTQVQEHGKEVAAAATILVFDLETTGYFHKDHRIVEFALCDLSGGKNSTFETLVNPERTVPDYVEHLIKIGTDLVCRPGIPRFSDVIPLLLAFVRSRQAPGKPVLWVAHNAKQFDARFLAQEFDRCSAPLPADWLFFDTLLLAKKMVKAEGKKRRTSLEALREHYGIVSHDDAHRAMRDVMILSQVFQKMTFDLKLTNEELINEAMKASEFSKIS

SEQ ID NO: 53154 - protein, 242 aa, Oryza sativa
MPFPHGGVGPAACAGLPYVFPRRRVASPSSPPQLPNRSPLNSRPLLSTWNTMTVAAEVDASPDGEERRKQACNRTTIYRFLPSFSFFFLSFVSPSHMSGYFFSSSSPDDFTFARNLSGCCCVEGGEGGNFGGGGGRSGGWRQRWRCPMRSGSGSDGSGYDKAGMDSGKYVHYTPGQVEALERVYAECPKPRFSRRQQLLCELSILANIEPKQKIKVWFPKQKVSKSMQGYTIKLVCLLCVWL

SEQ ID NO: 53155 - protein, 72 aa, Oryza sativa
MYLSGPMSASSSSSSKTLGACQSLYSSDSNNAGRKGQAVHLVSSRQVHPPNLGSSATEIRPEMRAATWCLLS

SEQ ID NO: 53156 - protein, 383 aa, Oryza sativa
MAERRSNMMMIYGFNLLIVAAAVRSSSSSILGDATVVSTDDRWVRRRLLLIDGMVDGKRMRKTVVVAKDGTANFTTITQALGAAPPRGRFGIFVKAGVYEETVNITRPNVVLWGEGIGKTVITGSRSCPIENNKTKTDMMPWTATVTVQGHGFIAQDVTIENKAGPTGTPAVALRCDSNMSLIHRCRIDGYQDTLWAQNNLQVYLRCDIAGTIDFVYGNAKAIFQYCRLLVRNPGNGKHNAITAQGRNDPTSEESGFIFQGCNITAMEGESLAGVDTYLGRPWKNHSRVVFMGCFMSDIINPDGWVHWNKATPVEETTRTVEYLEYGNKGAGAETADRVKWKGVRVITEAEANRFTVDHFINGNQWLPNLVNGEQINYTHGLI

SEQ ID NO: 53157 - protein, 396 aa, Oryza sativa
MLSCLKKLEINGSSSSLLMVEGGSAVRYQFPVKKLVIRKCGASGKELTLLLSHFPKLSDLTMYRLEKIAMLGVAEQQITATSASSPSLSGNKLENARFGQEQQQPRGEDEKAAASSGLLLLPTQLQELFISCCSKLILHHDSLGENMEGRLRGIEGGLQGLRSLVSLTIIDCPDFFSSYSSSSSSFPFPSSLKYLSIDRVSGMETLSLLSNLSSLTNLGIECGDLRGEDLCSLLAQGQLTRLRVNKNPKFFVGINPSSLQHLVTDDIAGVLVVPICGLLSPSLTKLTIFCNNEVKRFTKEQNMALEHLSSLQELSFSFCRLQFLPSVLHRLVSLKRLEISCSEFISSLPKSGLPSSLEILDVSGGSEELKRQCRKLRGTIPIIKDSDWDLIDSFLD

SEQ ID NO: 53158 - protein, 427 aa, Oryza sativa
MPSPLKERPAGRLGRLLAALRPARAGPLPVQTGFPTSLADLVVKNHGRLKKPSASASRRKKRGGPEAPPSPSPSPSPSPPPQPSSPPPPPPSPPPAAAVSVSPPTQPRPRPELPPVEAVLRRQPKGRVFGLGLGFVSLVGVVSLALLVIWSKKVVAAVTVASFSLFLLESVRSSALSRRPRRPAANNKLDLDGRGYVSPIREVEPARASFSDSSRRSELSILTIEERSEVGDDSIVAIEERIAAGGDDSSNAKVKTKKRSWRKLIPRKLQKGMKGKEAEDSSGSFRSSEGNRGDATATDSSDSRRGMRTKAADAFVARSMDSSPSFRGNGGDTDADAYSNATRVEIDAPADVLAGDGDAVGGTRSSVALLVVAVVLVGLVAGKLPAVVFTVLCGVFISSVQRLPAGGDGNGDRSFTWWFRIKPKDVN

SEQ ID NO: 53159 - protein, 563 aa, Oryza sativa
MSLWKHPAAAGDGEVVETVVELLARVRGMVPPALGAAGAAEGFPGRWKAIAAKLEGLPACLSDLSSHPCFAKNALCRELLQSVAATLAEAAELAARCREPPAAGKLQMQSAIDALAGKLDLNLRDCALLVKTGVLSDAFTPPPPTDEATSTATAAQADVRELLARLQIGHTEAKSLAVDGLLEALNKDEKSVLSVLGRANVAALVQLLTAPATKVREKAATVICQLAESGGCEGLLVSEGALPPLIRLAESGSLLGREKAVITLQRLSMSSDTARAIAGHGGARPLIEMCQTGDSISQSAAAGALKNLSAVPEVRQALADEGIVRVMVGLLDCGTVLGSKEHAADCLQNLTSSSDSFRRAVVSDGGLRSLLVYLDGPLPQESAVSALRNLVSAVSPDSLVSLGVLPRLAHVLRVGSTGAQQAAAASICRISTTTDMKRVVGEHGCVPLLVRMLDAKSNGAREVAAQAMASLVGYPPNAREVRRDGKSVPCLVQLLDPSPANTAKKYAIACLLSLAAAKRCKKLMISHGAIGYLKKLSDMDVAGAKKLLERLERGKLRSLFSRD

SEQ ID NO: 53160 - protein, 858 aa, Oryza sativa
MDSSAGDPGDGVPSKRARTERDPYRVETMEFLVLVKSELPDDVYSHFVRSMIKIRRQRNMSIEKCKEIILEILDGQPEAIQVFEHFIQGYSPCRAKMRSKAHNFVERVKACPDISREDFHALLNVLAKYYKNEIKTSEEVLEKVERIIGNYPEFLEEFKIFVPHHLRAHLPNEKSCTSPKSSRVSETFVSFTLDAMNKLDGLRVKATNGRNQATPLKYTQDQNQNHEGRGYSLRHKQTKRTTGLIENPRKQGDDKSPHAEDDEEHKAEPLLQWSTSRENELPLKVDPSNCKHCTPSYCLLPKNCVTLQSSYQTELGRSILNDSLVSVTSGREDCYKFRTKNQYEENMFKCEDDLFESDMLLQRFRATADFIEDLQYRFGSNVKIQEHLTPLHKRCIEQLYNDSGIDMLDALSESENTSSALAVILSRLNQKIGDFSEARLSLNKMCPDTVANNYYRSLDHCSPSFKQLDMERMSPKALLAEDKQISRIKSHTDIHIHEDVGVIINYAYSRSCSTEDKPMMNWTKLVKAFVSVKFQWPDLKDTVSRRNVCEHCGMSRDFLNNIPVAVLTNEFVFSSKEVESLRAKSNESTSSLDHFDAEVEEGEFIPDVENIQLRVRCLPTNNSMHSTYGHWSGSEEHKSSRDDSNNEVGSSEYFGRTSKECDANRGISCCTLAVLCRLLQVMYERLLVAKNLSEGASTHDSYAHFKEKLCSLIDGSTDNWNFEQHCLKFLGPNSYVLFTLDKLIDRVIKQICKIYPSREDSSVLQRQERSRRTFNILKDPALPARRTNSSKELLHHQNARGTSIELPKQGREEAKGGCESHGDTGKMKQNHFQRRKKRALENGPPSFSQPGSGNQAHN

SEQ ID NO: 53161 - protein, 971 aa, Oryza sativa
MPNNAAIGSIVAAVGVVAVVCAIAAVTSSKKDRNGELTANVRLSTVCSVTRYPGRCEQSLGPVVNDTIDPESVLRAALQVALEEVTSAFNRSMDVGKDDDAKITKSAIEMCKKLLDDAIEDLRGMASLKPEEVTKHVNDLRCWLSSVMTYIYTCADGFDKPELKEAMDKLLQNSTELSSNALAIITSLGELMPAAKSNGSTGAHRRLLGLQGSEAAEGVSLRELLAVHDKVQELTDVKDVSRHLLSETLDAITEMSHDAGRRLLGVTLSEATDDSDDSGLPGRRLLSMSFHDADHGVHGGDHRRLSMSFHDADHEVHGGEHRRLSMSLNDADPEEQGGEHRRLSMSLNDADPEVQGGEHRRLSISLNDADPEVHGDEHRRLSMSLNDADTEVHGGEHRQLSMSLNDADTEVHGGEHRRLSMSLNEAGTEQPSGEHRQLSVSSSDAGSSTDSTSDSDTPGGDPKEPAAVDDSKNAVPGEPAAAAAAEHRQLGTLFNAIHNMTSKADTVKRRLLSMPQDGSDATEHEGGGRALLSIQLQSIADMSAEMNRHLLAAELPDELAGKRQLLSTTLRELNEATTAAKGQLDKIENGTAHSDAIPERILGDEYRATPHHRLLTTDVVGTIEDIEHERHNQPKPGEFPSWVSAHQRRLLQAGTQKPDKVVAKDGSGDFKTITEAVNAVPKNSPTRFVIYVKAGEYNEYVTIPSSLPNIFMYGDGPTKTRVLGNKSNKDGVATMATRTFSAEGNGFVCKSMGFVNTAGPEGHQAVALHVQGDMSVFFNCKFEGYQDTLYVHANRQFFRNCEVTGTIDYIFGNSAAVFQSCLMTVRKPMDNQANMVTAHGRTDPNMPTGIVLQDCHIVPEQALFPVRLQIASYLGRPWKEYARTVVMESVIGDFIKPEGWSEWMGDVGLKTLYYAEYANTGPGAGTSKRVTWPGYRVIGQAEATQFTAGVFIDGLTWLKNTATPNVMGFVK

SEQ ID NO: 53162 - protein, 497 aa, Oryza sativa
MNLIKHAAFAASFQGETDCTSHASARKFSTSGSSPLLDSTEGNGFKGHSMLAPFTAGWHSTDLEPLIIERSEGSYVYDSKGNKYLDTLAGLWCTALGGSEPRLVKAATDQLNKLPFYHSFWNSTAKPPLDLAEELISMFTAKEMGKVFFTNSGSEANDSQVKLVWYYNNALGRPNKKKIIAQSQAYHGSTLISASLSGLPAMHLKFDLPAPFVLHTDCPHYWRFGLPGEAEEEFATRLADNLENLILKEGPETVAAFIAEPVIGAGGVIPPPKTYFEKIQAVLQKYDVLFIADEVITGFGRLGTMFGSDLYNIKPDLVSLAKALSSAYVPIGATLVSPEISDVVHSQSNKIGFFAHGFTYSGHPVSCAVALEALKIYRERNIPAHVKQISPRFQEGIKAFAGSSIIGETRGVGLLLATEFANNKSPNDPFPVEWGVAQIFGAECKKRGMLVKVVGDEIAMSPPLIMSQREVDGLVSIYGEALKATEERVAELRSKKK

SEQ ID NO: 53163 - protein, 190 aa, Oryza sativa
MAPPPAAAAAVDGVGVGVGAHSVFVYGSLMQDEVVRTIIKRVPPSSPALLPNYHRFNIKGRIYPAILPVQSKKVAGKVITGVTDAELQILDEFEDVEYVRTRVEISLTDTSETMLADTYVWADAEDPNLYGEWDFEEWKRLHMKDFLAMTHGFMDGLEQPESKSRVETYQSFMQEIQQPGTTTTTTQVEI

SEQ ID NO: 53164 - protein, 589 aa, Oryza sativa
MASKAMPRAPPAAPNLQSLKLCSQNDSSLETTSPSKRSALVPGRSAESSKPNPEVVQKEQKSTQHQNESIDLTGSNDPAEVKAEGNLVPKRLADEEKGVVEDGIANGSLKSSSALGKEHGIASASGSARLVGRSETGERGFSSSRCRPSTSSDVSDESACSSISSVTKPHKANDSRWEAIQMIRTRDGILGLSHFKLLKKLGCGDIGSVYLSELSGTKSYFAMKVMDKASLASRKKLLRAQTEKEILQCLDHPFLPTLYTHFETDKFSCLVMEFCPGGDLHTLRQRQRGKYFPEQAVKFYVAEILLAMEYLHMLGIIYRDLKPENVLVREDGHIMLSDFDLSLRCAVSPTLIRSSNPDAEALRKNNQAYCVQPACVEPSCMIQPSCATPTTCFGPRFFSKSKKDRKPKPEVVNQVSPWPELIAEPSDARSMSFVGTHEYLAPEIIKGEGHGSAVDWWTFGIFLYELLFGKTPFKGSGNRATLFNVIGQPLRFPEYPVVSFSARDLIRGLLVKEPQQRLGCKRGATEIKQHPFFEGVNWALIRCASPPEVPRPVEIERPPKQPVSTSEPAAAPSDAAQKSSDSYLEFDFF

SEQ ID NO: 53165 - protein, 411 aa, Oryza sativa
MATKQQDASTSGAAMSMKEYLKRYQSDDAQGKAKKKKKKKPKPAAAVGGGVLIVDEDPTWHKPVQIEEEPASSGDERPLVDEDIEVKRMRRLEAIRAARPYNAIAEDGSGWVTVAAPEDSDGGLTGRRRRNDTPSPERGGAGRKDLSPPRRRQRQDTPSPDPRDAAGKDLSPPRQRRRRQDTPSPKGSEVAGGHDDLSPPRKSRQQRDPSPPRRLSRHDSKESQDISPPRRRTRHDSEEPQDLSPPRRKGRHDSEEPKDLLPPWRRVRHDSEEPKDLSPPRRRTRHDSEEPEDLSPPRRRTRHDSHEPKDKLPPLKRQALGDGDISPPRKGRKEVAPKEVRKAGLMTAEEVKEDIRKIKEDERLKFAAQDPSVIGKGAKAVFRDKQGKRISEEDMRKARRHETKGNTYRMG

SEQ ID NO: 53166 - protein, 249 aa, Oryza sativa
MGRGRVELKRIENKINRQVTFAKRRNGLLKKAYELSVLCDAEVALIIFSNRGKLYEFCSTQSMTKTLEKYQKCSYAGPETAVQNRESEQLKASRNEYLKLKARVENLQRTQRNLLGEDLDSLGIKELESLEKQLDSSLKHVRTTRTKHLVDQLTELQRKEQMVSEANRCLRRKLEESNHVRGQQVWEQGCNLIGYERQPEVQQPLHGGNGFFHPLDAAGEPTLQIGYPAEHHEAMNSACMNTYMPPWLP

SEQ ID NO: 53167 - protein, 585 aa, Oryza sativa
MPVNVEPSDLSVDKSIQHALVVGDYKGAVNLCLAANRMADALVIAHAGGSALWESTRNQYLKNTVSPYLKVVSAMVGNDLMSFVSTWPLNAWKETLALLCTFARKEEWNVLCDTLASRLLGVGDTLAATLCYICAGNIDKAVEIWSRDLKSEDGGKTYVDLLQDLMEKTITLALATGHKSFSASLSKLVENYAELLASQGLLKTAMEYLKLLGSDEHSHELAILRDRIAFSTEENHAASTSVHAGSINSSAYPTIQPSYSTPDPSQNLYQGTSQYAVPSNQYQDYQQQSNTAYGTYNSTYSQQPTQMFVPSNTTPVISQPNATPAPVPQQPVKAFTPTNLPGLKNPEQYQQPTLGSQLYAGANPPYTSGQSTPYQGVPPTTYHQPRPPTQFQTVPTAPPAVSSATVPGTTPSQMFPGPVANNPTSRFMPSNNPGFVQRPGLSPVQPSSPTQAQGQPQPVVAPPAPPATVQTADTSKVSAELKPVIATLTRLFDETSKAMGGSQVKKREIEDNSRKIGTLFAKLNSGDISPNVSSKLIQLCSALDSGDFATAMHLQVLLTTSDWDECNFWLAALKRMIKTRQNFRM

SEQ ID NO: 53168 - protein, 520 aa, Oryza sativa
MDAQMAAAAAHHPLPHQQKAANLARTFTKLLRRKRADAVAAATAVGEPGVPDAAAASVVGDEYECSVEAAAAGVPSLSKLKLSGNLGAAYSLDAFFRNAAEKKAAGVAGVAVAQTSPQVAPDVAKDSLLANLFAGVSAVKAAYAQLQLAQFPYDAEAIQAADAALVAELTRLSDTKRRYLRDPAAAAKNAAAAGHTALYAHAEEQRHLLKTYQITARKLEGELRAKEAEADRARSSLTAELRAERAMEARLHPGRTLASLDELHLSGLNPTHFLTALRHTVKSIRSFSKSMLNSMQSAGWDLAAAAAAVHPGVQLRRAGDTKFVFESYVAMKMFANFHRRDFNLSFLDEREFYDRRRFFEEFTELKAAPASAFLDARNARWGGFGKFLRAKYLSLVHARMETAFFGRLEQRGIVSAGPGFPESSWFADFAEMARRVWLLHCLFYAFDGGAEEDGASIFQVRTGARFSEVYMESVSDGRSDEAAAAAAEERVVGFTVVPGFRVGRTMIQCRVYLSRPGRRP

SEQ ID NO: 53169 - protein, 374 aa, Oryza sativa; identical to SEQ ID NO: 33481

SEQ ID NO: 53170 - protein, 377 aa, Oryza sativa
MADAEDIQPLVCDNGTGMVKAGFAGDDAPRAVFPSIVGRPRHTGVMVGMGQKDAYVGDEAQSRRGILTLKYPIEHGIVSNWDDMEKIWHHTFYNELRVAPEEHPVLLTEAPLNPKANREKMTQIMFETFNTPAMYVAIQAVLSLYASGRTTGIVLDSGDGVSHTVPIYEGYALPHAILRLDLAGRDLTDYLMKILTERGYSFTTTAEREIVRDMKEKLSYIALDYDQEMETAKTSSSVEKSYELPDGQVITIGAERFRCPEVLFQPSFIGMEAAGIHETTYNSIMKCDVDIRKDLYGNIVLSGGTTMFPGIADRMSKEITALAPSSMKIKVVAPPERKYSVWIGGSILASLSTFQQMWIAKAEYDESGPSIVHRKCF

SEQ ID NO: 53171 - protein, 477 aa, Oryza sativa
MDTGMRVALHRQVSSGSLKESGELRRQSSLESPRTGRAATRFLFGRQSSMDPNRRRGRSQSPVGLAEDLTVPDNLDATMQLLFLACHGDAAGVEALLRGGVDVNSINLDGRTALHIASCEGHPDVVRVLLTWKANIDARDRWGSTAVADAKCYGHTEVYNLLKARGAKIPRNRRTPMMVSNPGDVPEYELNPSELQFKKGDEVVKGVYQVAKWNGTKVHVKILDRECYCDQEVINSFRHELTVLEKVRHPNVVQFVGAVTQNIPMMIISEYLPNGDLSSCIPRKGKLHGQKVLKYGLEIARGMTYLHQCKPDPIIHCDLKPKNIFLDSGGQLKIAGFGLTRLSKISPGRVKLADHESMVDSFSHYTAPELYRNEIFDASVDAFSFGFILYEMVEGTHTVHGKSSEESGHTIRYDGMRPSLKNKLRGYPPDFKALIEECWDTQGIARPTFSEIIIRLDKIYAQCMKQGTWKDSLKIWK

SEQ ID NO: 53172 - protein, 102 aa, Oryza sativa
MNEKMHAISADGVDPKRNDRCWSEEHNTSEVEYGRRWIRRFGGLTCRGRRWREPRAPSCRSRLLRPPPQLVVGRRRRRRCPSRSQRRACRAWGRSAPPARSS

SEQ ID NO: 53173 - protein, 706 aa, Oryza sativa
MVRFSCFSYSSRHHRSKKLVASSVEDRWAYPNLTQKVDGKNCSNSNVEQLRSPPFEDCCRSEDFSFCTENESGKIKKSQSLGDMLEMEKLYDFDKTNNKGEDCAIDGSHDGKTCTGECTRKKKENRTSCCGDFTDPHQHECQSSLGNSEHLIEKQCDCEDIVSTYCLVNSEEQSFLPEPQPLLSRSQSVNLDVHIPTVIEDSIDSAQLGLRSRSFGNLSSLDGAPYTEEARVSPSHCKEASEDFVQSNAQSQCHCRDEHINNSSTDEISQCCVESGNDCHHSDFTSTAAVTPVRNSNSFDDPPSLSHDAGNTEEIFQQIDKREVATSVKNCEPEPCYQNCCTSSRKEFNVRRIENWISQIPDSNDIAPYEQGECSSSAHLMNSKQVDTIRKLNAKSPLGMETAYNYIAMLKPSSSIAQLSNLGLVAIPILSAFSDLRLLNLAGNSIIRITSGALPKGLRMLNLSRNNISTIEGLKELTLLRVLDLSYNRITKIGHGLASCPFLKELYIGGNKISEVEGLHRLKLKVLDLHGNSLSSSKCLDQLANCGTLQSITLEGNPAQRNVGDEQLKRHVLRLLPHLVYYNKQAVRSRRCSKPQGGGGRHGRAVDLGGGGGGGGGRSKRLELRLPRRSACASVALKSSGCHHHVRAGAAAAAHGSVRTSRQSRNNAPPMAPTIRGADRSSEGERRLPGTEISGQIFRIRSADDL

SEQ ID NO: 53174 - protein, 69 aa, Oryza sativa
MDLLVVPYSSDPSLKLMQWPLFLLASKIPIALDMAAISTKRFRSLETYMRRRVYEMCCTGMLRVIQACS

SEQ ID NO: 53175 - protein, 87 aa, Oryza sativa
MFQGNDGARRANSFHHLGCLLLAEHNIISEAFLTASSWSRCVIMIQRYKEVLVYSVLLAKFEPSQSGKANTHIMHGASHVYFLIDSL

SEQ ID NO: 53176 - protein, 355 aa, Oryza sativa; identical to SEQ ID NO: 52101

SEQ ID NO: 53177 - protein, 193 aa, Oryza sativa
MYVASEAKDPFFRVGYNSLGGFATINHLHFQAYYLKVQYPVEKALTEKLTTLGNGVSIIQLVQYPVSGFVFEGGACLEDLSDVVSKVCIFLQENNKPFNALISESGKRVFLLPQCYAEKQALGRVSQEFLDMRINPAVWELSGHLVLKRRKDYDEASEATICRFLVEASLSESEFQELKSCILEFLSSAAPEE

SEQ ID NO: 53178 - protein, 518 aa, Oryza sativa
MPHSRSDSGSGSRGADPCRGRKRGRLLMLEEEEEEEESGMEGCSAPACGDVRGDFVGWCSDRHQVASCSGDQTQSASMFAAMQENACSIDSKGVVCPQSGLGYSAGQNGTHGGGGSMLHQNLEGCMYMNQLGQMCGPYPPEQLYDGLSTGFLHRDLAIYAVFGGKMANPVSLGSLKQFLSQWSSDSVVATRDESVENKKMAPVNKLILPDNLSSEESCWMFEDAEGRRHGPHSLAELSYWHHSSYLHDLSMIYHVDSKFGPFTLVSLIDWWSGGTEHSESSANDSGSLNALMDDVVEDISHQLHAGIMKSARKVFIDEIFSSVLPEMIACRKTEKQMAAKRKSQAAKTDNVSNKNALVLKGKGDGTSTRPKSLNSYNNKVPEDPSVAVQSTAMQYEFADILSAVWETIYNKSMKSIWDEVLYDPVMDYCDAWLKRKNESNLLSTVVPGASDNQKMQDTDEMSPKAICDSDAPESDMDFPPGFGPNQESAEHSHSACVEYVTEKTDGRSGSSITLFSGP

SEQ ID NO: 53179 - protein, 397 aa, Oryza sativa
MPLTREAADAFGVATITLFAIFAVLGLFCIFQSIYFRFRIRRGAFIPLGYFNGPWVTRIVLILITIWWGVGEIVRLSFLKRKLFSSILLQKGVCDAYILSNLGFAEPSIFFAFAFLLHGSLQKRELGTLNQRWNWKTIGYMLVFCVPVFFVQALLVFVGPTFVKDENNTHGRKKIAKYFIRTSMPVGDTNICTYPLFGTIFLGLIDAILMSYVSYVGSRVLSLVINKALRRRVSLLMLSVLFFLPIRVLLLGFSVLPQPGDVAFEVIIFLSFLMMISCTTVGVLLLVYYPVADSLALREIGQREITEMVPYDDYYYEGASLVANQSFREIERNSDTSTKRGSISFRTMIREDQLQQDGVDEIGFSSRSGAHIGSPSPSGSSPSAAMPMLPLKEVPRY

SEQ ID NO: 53180 - protein, 76 aa, Oryza sativa
MSANAITVVPFTVVDLFVLVVWVLANHLPYVKPRDGFKIYFYWLTDTASVFSSPIDMPSCSLIHGFSASTCNDRSV

SEQ ID NO: 53181 - protein, 832 aa, Oryza sativa
MAEQQLMHGTLDATIFEATNLTNPTRLTGSAPEGIRKWWEGVEKTTGVGQGGTRLYATVDLGKARLGRTRVIDDEPVNPRWDERFHLYCAHFADNVVFSVKVSLPIDAALIGRAYLPVGDLLSGEVVERKLDILDEHKNKLPHGPTIHVRLQFKDVAVDGDGKWWGAGVGNAGYAGVPCTYFKQHTGCGVTLYQDAHVPDTFAPTIPLAGGAHYQQGRCWEDVFDAISNAKHLIYITGWSVFTDITLIRDPSRQRPGGDATIGELLKRKASEGVRVLMLVWNDVTSLQILQSLGIKWGFSQTHDAETFQYFEDTDVHCVVCARHPDAGGSIVMGVKVPFASTHHQKTVIVDHDMPAGAGSGLRSIVSFVGGLDLCDGRYDTQSHSLFRTLDAAHHKDFHQPSIDDAELAKGGPREPWHDIHSRLEGPVAWDVLYNFEQRWRKQSGHGDLLVNLTALEHLIAPQSAMKLPVIGNDDHEAWNVQVFRSIDGGACDGFPSNPDAAARLDLVSGKNNVIERSIQDAYIHAIRRARDFIYIENQYFIGSSYGWRPDDGVRPEDVEAVNLIPRELSLKIMSKIAAGERFTVYVVVPMWPEGHPDSQAMQAILDWQRRTMEMMYADIAGALKAKRMDADPRDYLTFFCLGNREVKRSGEYVPGHHPRDGTPYAKAQKTRRFMIYVHSKMMIVDDEYIIVGSANINQRSMDGGRDSEIAMGAFQPHHLNIGGQLARGQIHGFRMSLWYEHLGGEPHDDFLHPGSLECVRRVNEMANKHWELYASEELHEDLPGHLLTYPIAVAKDGTVAALPGAKFFPDTEAPVLGKKAINPLMTPDITS

SEQ ID NO: 53182 - protein, 433 aa, Oryza sativa
MFGAGVADLVEGVSKLSHLSKLARDNNTASRIVEADRLHTMLLAMADARAVLIKLADRVHNMKTLEALPLGKQQRFAKETMEIFVPLANRLGIASWKDQLENLCFKHLNPEEHKDLSSKLTKSFDEVLITSAVDKLDRGLRDAGLSYHNLSGRHKSLYSIHNKMLKKNLTMDEIHDIHGLRLVFEKEEDCYRALDVVHELWPQVPGRFKDYISRPKLNGYRSLHTVVMSENVHPFEVQIRTKEMHLQAEYGFAAHWRYKEGTCRHSFVLQMVEWARWVLTWQCEAMNKERPASLGDSDAIRPPCPFPMHSEDCPYSYTRQCDHDGPIFVILLEHDKMSVQEFQANSTVMNLMDRVGTNTPRWSPYSIPMKEDLRPKVNHEPISDLSRKLSMGDVVELTPALPHESLPNYREEIQRMYDRGGFALATRGGSSRR

SEQ ID NO: 53183 - protein, 137 aa, Oryza sativa
MGGRRVAAAGRVLQRGVRADRRGRVGAAGERQGRRRRVVPGLPHPVRISGLLCLPACVVFDLWLCGLSFITSMHGSWNRKPDFIIRTPREEIDSRSCFRSKAFFFRGVAMLFAIDWRRNCKMSCCLINCSANIFLLS

SEQ ID NO: 53184 - protein, 85 aa, Oryza sativa
MPNYMFFPCLDGLSNTSSQDIHSIEGPMCKASWLLLAQMYDSGFLCRSFHFWGFKSTFGLVGLQNVKLQNLLNMVLVTSSVFVGA

SEQ ID NO: 53185 - protein, 199 aa, Oryza sativa
MQIEVQRRLHEQLEVQRHLQLRIEAQGKYLQSVLEKAQETLAKQNAGSVGLETAKMELSELVSKVSTECLQHAFSGFEIESSQMLQGHTMHLGDGSVDSCLTACDGSQKDQDILSISLSAQKGKEIGCMSFDMHVKERGSEDLFLDKLNRRPSNHPERCERRGGFSMSCQTANLDLNMNDTYDGPKHCKKFDLNGFSWA

SEQ ID NO: 53186 - protein, 529 aa, Oryza sativa
MSFCSCSSPNACVSDAGFEVSSRVLMSDEQGRSGLLATWRRLIVETPSPGAGADAAHPGTKSLPLAAARTHRRDPLANLTMYSGGWNISDQHYWASVAYTAVPLILVGMLWFIVFGIVLLIISCCCCFCRKKYNTYSPATYFISLILLIIFTLATIAGCIILHCGQELFHSSTIKTVDYIVGQGNLTVDSLRNFSGSLAAAKNIGVDQVFLPVQVQQKIDVIEDKLNSSANEFSTRALENSKKIKHVMDKMQYNLMVIAAVMLGLAIFGFLFSILGLRFLVSLLVIAGWFVLVITIMMSAAFLLLHNVVADTCVAMDDWVTHPQAHTALDDILPCVDVATANESMYRSEEVTVQLVALVNNVIVNISNRDFPPSFRPLYINQSGPLMPKLCDPFNPDMSPRKCAPGEVNFDTAAAEWKKFECQTTGPPGSEVCATEGRVTPAAYGQMTAAASISQGLYQYGPFLMELQDCSFVRETFTAISDNNCPGLELYSRHVYLGLLLISGAVMMSIVFWMVHTRQRRRRSLGLGR

SEQ ID NO: 53187 - protein, 339 aa, Oryza sativa
MLAAAAAALRPAPTTAAFSPSTARSPPPTLLSFAPPRSHQRFHLSATAEGAGTTAAQEGASASASAPPVDEARLAQFAADWQAARAERDQGKILKLQVIRANSGGLIVRFNSLQGFVPNPLLSPAHWCKDPKRPIQDVTKDLVGSSISVKVVEVNEEERKLVFSEKDASWFTHSSLVKIGAIYDGIVGSVFHYGAFVHLRFPDGNYHLTGLVHISEVSWDLVQDVRDFLNEGDTVKVIVVNIDMEKSRIALSIRQLEEDPLLETLDKVIPLEADQSPSAGIISSDSSPSEADLLPGLDGICNELLQEDGYDFCLCVFFFLVYGFLMLMYYFMCPVALLD

SEQ ID NO: 53188 - protein, 1052 aa, Oryza sativa
MASRGGDGLVGGGRGPLGGRDGRGRGPAGGRGGGRGGGHPQQQQQQQPGYGRGDGGGRGPAPAAGGVVGRGTGGGGGGGRGDGGRGRGRGGGGGDGVRPAMAAAPAASTPGPVAVAARSTPPPTPAVQIPAVASSSSAQPAAAAQPPPAAAAVSALARDVGRQLAVVAGGGRPAPPAAPPAPIPVSSKGVAPPSRPGFGTVGERIVVRANHFLVRVSDNDMIYLYDVSLSPPPKTRRINRVVMSELARLHRESHLGGISFAYDGSKALYTAGKLPFDSMDFKIKLGKELREIEYKVTIRRAGQADLHHLHEFIAGRQRDSQQQTIQALDVVLRESPSLNYVIVSRSFYSTMFGRQDIGDGLECWKGYYQSLRPTQMGLSLNIDISSTPFFKPISVVEYVKNCLGTPTNANGPDPRRPLSDIDRLKVKKALRGVRVETTHQGKSSKYKITTITSEPLSQLNFSMDGTTQTVIQYFSQRYKYRLQYTSWPCLQSGNPSNPIYLPMEVCTIVEGQRYSKKLNDKQVTGLLRATCQPPQKREQKIIEMVQHNNYPADKVVSDFRINISNQMATMPARVLPAPTLRYHDSGKEKTCNPRVGQWNMINKKMVGGAVVQKWTCVNFSRMHIDAVHRLCGELVYTCNAIGMVFNEMPEIEVGSAAPNNIEAALSNIHTRAPQLQLLIVILPDVNGYYGRIKRVCETELGIVSQCLKPGRKLLSLDRQFLENVSLKINVKAGGRNSVLQRPLVPGGLENTTIIFGADVTHPASGEDSSASIAAVVASMDWPEITKYKALVSAQPPRQEIIQDLFTMTEVAQNADAPAQKAEGSKKNFICGGMFRELLMSFYSKNAKRKPQRIIFYRDGVSDGQFLHVLLYEMDAIKKAIASLDPAYRPLVTFVVVQKRHHTRLFPEVHGRQDLTDRSGNVRPGTVVDTNICHPSEFDFYLCSHAGIQGTSRPTHYHVLHDENRFSADQLQMLTYNLCYTYARCTRSVSVVPPAYYAHLAAFRARYYDEPPAMDGASSVGSGGNQAAAGGQPPAVRRLPQIKENVKDVMFYC

SEQ ID NO: 53189 - protein, 1218 aa, Oryza sativa
MLTKFETKSNRVKGLSFHPRRPWILASLHSGVIQMWDYRMGTLLDRFDEHDGPVRGVHFHATQPLFVSGGDDYKIKVWNYKTHRCLFTLHGHLDYIRTVQFHHEYPWIVSASDDQTIRIWNWQSRTCVAVLTGHNHYVMCASFHPKEDLVVSASLDQTVRVWDIGALRKKTVSPADDILRLTQMNTDLFGGVDAVVKYVLEGHDRGVNWASFHPTLPLIVSGADDRQVKLWRMNDTKAWEVDTLRGHMNNVSCVMFHAKQDIIVSNSEDKSIRIWDATKRTGIQTFRREHDRFWILSAHPEMNLLAAGHDSGMIVFKLERERPAFSVSGDTVFYVKDRFLRFFEFTTQKEVQLAPIRRPGSVSLNQSPKTLSYSPTENAVLICSDVDGGSYELYIVPKDSAGRADYLQDAKKGAGGSAVFVARNRFAVLEKSSNQVLVKNLKNEIVKKSPLPIATDAIYYAGTGNLLCKAEDRVTIFDLQQRLILGELQAPSVKYVVWSSDMESVALLSKHAVVIANKKLVHRCTLHETIRVKSGAWDENGVFIYTTLNHIKYCLPNGDSGIIKTLDVPIYITRVIGNNIFCLDRDGKNKLVTVDASEYIFKLALLRKRYDHVMSMIKNSQLCGQAVISYLQQKGFPEVALHFVKDEKTRFNLALESGNIQIAVASAKEIDDKDHWYRLGIEALRQGNVGIVEYAYQRTKNFERLAFLYLITGYMDKVGFMCKIAGQNNNLMGQFHNALYLGDALKRVEILENAGQLPLAYITATTHGLTEIADRLAAELGENIPSLPEGKARSLLIPPAPLTASGDWPLLRVMHGIFEGGLDATGKAELEEDDEAAGADWGDEDLDMVDASEAMANGGDGFDAEEGEANEEDGEEGGWDLEDLELPPEAETPKNAGNARSAVFVAPPPGMPVSLIWTQKSSLAGEHAAAGNFDTAMRLLSRQLGIKNFAPLKPLFVDLHMGSHSYLRALATAPIIPIAVEKGWSESASPNVRGPPALVFTFPQMEDRLKAAYKATTDGKFPEALRQFLSILHTIPLIVVDSRREVDEVKELIEIVREYVLGLRMELKRKELRDDVNRQQELAAYFTNCKLQRVHMRLVLGSAMGLCYKQKNFATAEHFARMLLENNPNEAQARRARQVQQQCSGKKDSSELNYDYRNPFVVCGATYVPIYRGQKDVSCPYCGSRFVPSIEGQLCTICELAVVGADASGLLCSPTQSR

SEQ ID NO: 53190 - protein, 638 aa, Oryza sativa
MGYHQPVHGGAAAGAGGSGGGGGGDHLHQHHHPRLHSPRISGGGSMTRRANSFKRGEIELQIGSPRSPRGDGVGSPLAESSSASEASAGGGGAVHHHHHQSQQQQLRFRLFKRPGSGAGEVVLGLGIRERRRIGNLLFLAFCGVCLLLGVAKIWAGGWFALPGDDKDADLQDLSISFSSDGGYQFDSHFGHVGGKESDRMLMTVGSEDSVPEAPDVWSQPSSGKFRQCIISNSHKKEDSHTNGYILINANGGLNQMRFGICDMVAVAKILKATLVLPSLDHTSFWADDSEFKDLFNWRHFIESLKEDIDIVEMLPPAYKHIEPVAKAPISWSKVNYYRDEILPLLKKHKVIYFTHTDSRLANNGLPSYIQKLRCRVNYRSLKYSQTIEDLGATLVSRMHQDGSPYLALHLRFEKDMLAFTGCSHSLTSEEEEELRKMRYEVSHWKEKEINGTERRSMGGCPLTPRETSFLLKGLGFTRSTRICLVAGEAFGNGSMQALMDDFPNIYSHSTLATKEELEPFRNHQNMLAGLDYIVALQSDVFLYTYDGNMAKAVQGHRRFENFRKTINPDRMSFVNLIDEYDEGRMSWDDFSSEVKRIHRDGERIGAPYLREPGEFPKLEESFFANPLPGCICEKLNDE

SEQ ID NO: 53191 - protein, 741 aa, Oryza sativa
MGRNGSVKRTSSSRAAAAFTANPRDYQLMEEVGYGAHAVVYRALFVPRNDVVAVKCLDLDQLNNNIDEIQREAQIMSLIEHPNVIRAYCSFVVEHSLWVVMPFMTEGSCLHLMKIAYPDGFEEPVIGSILKETLKALEYLHRQGQIHRDVKAGNILVDNAGIVKLGDFGVSACMFDRGDRQRSRNTFVGTPCWMAPEVLQPGTGYNFKADIWSFGITALELAHGHAPFSKYPPMKVLLMTLQNAPPGLDYDRDRRFSKSFKEMVAMCLVKDQTKRPTAEKLLKHSFFKNAKPPELTMKGILTDLPPLWDRVKALQLKDEAQLALKKMPSSEQEALSMSEYQRGVSAWNFDVEDLKAQASLIRDDEPPEIKEDDDTARTIEVEKDSFSRNHLGKSSSTIENFFSGRTSTTAANSDGKGDFSFEAFDFGENNVDTKIMPNGYENARSENSSSPSTSKQDPESKYWRSTSGQKQQTSGTPAVHSGGVNSSTTEKGHGVERDATVQLASDKLRTETRRATNLSGPLSLPTRASANSLSAPIRSSGGYVDSLGDKSKRNVVEIKGRFSVTSENVDLAKVQEVPLSSLSRKSPQASPLKKSASVGDWLVNTKPMSNSHHVKELCNSSVSSSILIPHLENLVKQTMFQQDLIMNVLSSLQQNEKVDGVLSGISPQLRNTDSDTMVGSVNSEKERSLLVKISELQSRMITLTDELIAAKLKHVQLQQELNALYCREEIEDIRDDDNEET

SEQ ID NO: 53192 - protein, 361 aa, Oryza sativa
MAALLLLAAAMVVVVFAHAAAAQRYNAIYSFGDSISDTGNLCVGGCPSWLTTGQPPYGKTFFGRPTGRCSDGRVVVDFLAEHFGLPLPPASKGGGDFKKGANMAIIGATSMDAAFFKSIGLSDKIWNNGPLDTQIQWFRQLLPSVCGNDCRSYLSKSLFVVGEFGGNDYNAPLFAGRAMTEVRDYVPQVVSKIIRGLETLIRMGAVDVVVPGVLPIGCFPIYLTLYGTSNGADYDRNGCLKSYNSLSSYHNTLLKRSLSNLQRTYPHARVMYADFYSQVTAMVRSPQNFGLKYGLKVCCGAGGQGTYNYNNKARCGMSGSSACADPANYLIWDGIHLTEAAYRSIADGWLKGPYCNPPILH

SEQ ID NO: 53193 - protein, 124 aa, Oryza sativa
MRNFDKMHFFFKSLLAFFFFPIDVLPHLFLIVLFTLFVIAVFPSLNPRFVKLDDTRFVFHHFNRVDDLQKPIENPENINWESYARGAVYALQNFGYDLKKGIIGYISGVKGLDSSGLSSSAAVS

SEQ ID NO: 53194 - protein, 717 aa, Oryza sativa
MATDREKEREAELESAMYTNCLLLGLDLAVLGSPSSPAAGPRVGLFRHSNPRLGEQLLYFLLSSLRGPAQSAKDFDKVWPIFDSAQSREFRKIVQGIISELEQQGALPRSNSRVSSLATCCGPRFVELLWQLSVHALREVHRRTFAADVASSPLPAALTDVSYLHAAALLPVTKARIALERRKFLKNANIAVQRQTTWSNLAHEMTAEFRSLCAEEAYLQQELEKLQDMRNKSKLEGELWDERISSSSGQNSHLVSKATRLWETILARKGQHEVLASGPIEDLIAHREHRYRISGSQLLAAMDLSSSVPHSELLSARASEASPFLDKQEQMSALFQGKEEALSRLDDRNGRAQQQTVDVAEILRRWTHALQRIHKQSLHLAKANDGDGPELLRSASDGETSAHADSLTATLAEHRQHLVSIQGLINQLKEAIPAMQQSIADLSEEVNSVSSNPMDKIISRLSPSVQNSGFGRAEESSSELSEMTSKLSSTHLDKAGSSPALKLPPLFSLTPSSSGKGTQAQKRNALGRQPSQEILSEEKTLPLPSTKDETNGSIHENEGYFAHNIRRSVREAALSKPLRNPERPHDQSSGDGSEHFFIPLSTGASKMEIDAVDNNRRMQKLGFSSPQMKFSDLHFNVDSPMHATPVLSSKLNGHDDPNTVTSMLDPVSGLGHQSFITDDALDQVFSPPLLLETSLFQDAYEDLLAPLSETDTALMEH

SEQ ID NO: 53195 - protein, 79 aa, Oryza sativa
MSLTRPPALLLRDVLVDGEDEEDARSPEFMALRVVAGEDRAVDGLHRRPLLPPPASHPALREGRAFRSRVSPACTFFLI

SEQ ID NO: 53196 - protein, 468 aa, Oryza sativa
MAAASTFPLALLLAIVAACCVAGGEGGALVGDTCTASSASSCGAGMRCATCSPLPGMGPPVCSRTTPLDPKAHGTDLAFNRYTWLTTHNSFAIVGSPSRTGTPIIAPPNQEDTVTAQLKNGVRGLMLDAYDFQNEVWLCHSFGGKCYNFAAYQRAMDVLKEIGAFLDANPSEVITVFVEDYAGPGSLGKVVGGSGLSKYLFPPAKMPKGGGDWPLLKDMIAQNHRLLMFTSKRGKDGSDGLAYEWDYVLETQYGNDGLVGGSCPKRAESMAMDSTKQSLILMNFFSTNPSQSWACGNNSAPLVAKLKACYDASAKRWPNFIAVDYYMRSKGGGAPLATDVANGRQQCGCDSIAYCKPGSAFGSCSLSSPPAAPPKMAAASPPAAAPAPAPEMAPSSPPAEPPETATEAAGSAVRPASIKLEKDDTTGTSPADTAKSSSSNRSPHPSSCSFLFGLLLPSLLLLHLYISD

SEQ ID NO: 53197 - protein, 619 aa, Oryza sativa
MEPGAPWRDPRQGYLYGVGSAVQMPMQQRSDAAAAGGVLKRSLGDMERWQQHQHQQRQIAMQQQLYLRTVRQRTAAASAAVSPLTSADIAAVLGGPPSQPLVLSGSSMGGAFGSPSSTLSSITTASRAVAMPLMQPQLQRQQQVTYMASSPQVQAFGTARALPPAPATSDLSILQELEKQLLGDDDEVEAAMSGTGSAVTGSEWEEQLNSITAAPSPPLTAATTPNNNNNAVGMTRSPSNSSTSTASSSASCSPPTSATTSRQLLSEAAAAIADGHNETAATHLTALKRAANSRGDVEQRLVAMMVAALSSRIGQTASVPDICGGETRAGSQLLHDISPCFRLALHAANVAIVDAVGDHRAIHLVDFDVSAPQHADLIRCLAARRLPGTSLKVTAVTDPASPFTQSVTATLHLQKLAERAGIDYRFKMVSCRAGEIEASKLGCEAGEALAVNLAFALSHVPDESVSPANPRDEILRRVRALGPQVVALVEQELNSNTAPLTTRFTDACAHYGAILESLDATIPRESAERARAEAALGGRAANAVAREGADRLERCEVFGKWRSRFGMAGFRPVALGPGIADQVLARQGPVAAGFAVKAENGVLRLGWMGRVVTVASAWR

SEQ ID NO: 53198 - protein, 449 aa, Oryza sativa
MWPPLAALLRRLSSHPFDSPAIHANLVKSSSISSPIPATALLTAYANAGLPAAASRLFDEMPTRDAVAWNALLACLVFHARPCAAVAAFRDMATAGFTPTATTLCTMAKACATSRALRPGRQVHARSILACQGDVIMATTLVDLYMSCGLVEEALRLFMCTDCPKDVALYNAVISGCVENGRFREAFFILGRIELNGITLTCALTACSATANLMYGMQVHCKALRGGFTLETILCNALIDMYAKCGRTTAARMVFDRMACRNVVSWSSMIDAYSHHGHGEAALDLFKRMDETVPVVLPNAITFLAVLSACGQSGLVDEGRAMFHLMKRQYGINPGPEHYACFIDLLGRAGQIDEAWDLYCSFSTTRSELSGSICVAMLNACRANMDVVRGNKVALHLLEVDPENPGSHVLISNFHAAARQWFESDESRRIIIDKGLRKEAASSHISSTG

SEQ ID NO: 53199 - protein, 424 aa, Oryza sativa
MSELPLYLLLGIFCGLVSTTLSRCTALSMEIVQSLQTATGLPKAASPALGGLIVGLLALVYPEVLYWGFENVDILLESRPFTSGLSAAVLVQLIGVKVLATSLCRAFGLVGGYYAPSLFIGAATGMAYGKVVRFTFTGPDSLFQIPFLDVASPQAYGLVGMAATLAGVCKVPLTSVLLLFELTQDYRIVLPLLGAVGVSSWIASPQRFSRSNRSKPDSSEVKSSNFKQEKSVPSQTQGASVDTDKPITDLCKLESSLCVYDAKHENFQENLTVAEAMKTKYISVSKTTPVVEALSLMLVEKQPFVMIIESNRSLIGLVTLKDIQDFCRTAKTTRVQTEEPVQTYVCGAVKCKMWPVTPQTSLTTVEKIMDSYGVDQLPVVSEHVDRQDRGLLVGFVDEEGIAIARRAVATKDLLSFTSEIKGDR

SEQ ID NO: 53200 - protein, 415 aa, Oryza sativa
MGRCVQGGGGNGAAVLRAGARVRVGEVVEVLHGGAVRRHQHHGGLLLHALLHLRLRRPHRPVRHELPRHRRRRGVQGDRHRRHGGVGAHALRLRRRQGRGAVVVHHRVLPRRAQQHARRRRAAARRHVREVGAGPRGADRRRAVHGVVPAPAHGVRAPQGLGRRRRRRRRAGGDVVVVAAGEAERRRDERRRRRGAGRRRRRPATVLGDGEDGGAEAGEEPERVRQRSRRRVGVHRVQVAPELAGDRDGVAAGDVQDWHGDVHVQHGVVHGAAGEGDSVRGGADGAGDGAAVRRRSARHARRRRRPRPPRRRPAPRHHTGRTASIDCFLRFRKGVWASCRCTQHGGYIRNIDLSADSDCILRGSGLCLTCIYSTACLLILDLLRSNKNYLEIPIPHGTDNSSAQLDPTIENNLVP

SEQ ID NO: 53201 - protein, 94 aa, Oryza sativa
MLLRRGAASSSSSMAFPAPSFYPSSNSASLKCTVVAALDGGAQRRFQHSLEVGDLAAASEPLAQGFGSGGCCWRSQRFKVAAALPTVFWRSSTW

SEQ ID NO: 53202 - protein, 453 aa, Oryza sativa
MALNYSSCSLTSSFLMNEDCAGMMCGCGCWSEEASPLSSGGVNSLWWDELEFELELEEEEEFDPVDLLPTDPFGMNLETTFTAAIASCIEDLTVMSSAGRFGDSRDDAVFADLSYYLNKAFVLSPEFQFGGYRGVFEGPLGFGGLSAGEGDSFGFMKNPSSSGNADDSFGFVETPPTSGNAALECGDAVEVVPVQEGGVPHEGMLFALDYLGLRDILSVERVCKTLHSAVRNEPLLWKSIHIEGDLRQRISDAGLLHLTQKCPDTLQCLSIACCVNITDQGLKAVLESNPRLTKLSILGCPRLTLDGLISNLKSFNTKAVFGIKHLRVGTLFSLRKEQYEELLSLLNTDKTQEVHNRGPRFLHANRFLSDCNDGYALDIEMCPICQNYKLVYDCPDEGCDDRRSGNCKGCTVCILRCYECGRCVDKLAFKESFSLDWVCPNCQEKKDLSPPMK

SEQ ID NO: 53203 - protein, 801 aa, Oryza sativa
MAGANASTVKPVVAACYDNNLVNSQGMFLGDEPLRFALPLLLVQVSIILILSAAAHHVLRRLGQCRFVTHMLVGIFLGPSVLGRNPHLRTALFSERGTYILESVSLVALILFLFSMAVKTDLTLLRRPTARALAVGLAGSLVPLAVTLPVFHALSPSLPADLRGSSLITELAVRLSLSSFPVVADALAELDLLNSELGRVALNASLITDVTSWFLRACFAAAFLITQAKSPLFTAKVLASFAAFVLFVFFVARPAGRYIARKRTPPGDLLSEGSFVLVVIAALLSALVTDVIGFKFMIGPMMLGLALPGGMPIGATLTERLDSFFIALFLPVYMALAGYRTDLAELSLIGVSAEHEEKFCALELFVALCVAGKMVGCVAAGLFFSMPFREATVLALMLNIRGIVEVAAINNWGDTMKATAEHYSTLTLSMVVITAVATPLIKLLYDPSGRFARAKRRTMEESRPNAELRVMACLFSEDHAAPLLDLIEASGSSRDAPVSLIVLHLTELVGHAASVLKPHRKSRSSCGNPTPSDRIVNAFRYFEQQAPLGAVTVSPYVVASPYSSMQHDVCLLAHSRKANLILLPFHKSSDGARSTANNAIRGINRSVMQYAPCSVGILIDHGVAAGSACATASNSTLQRVALYFLGGADDREALAYVARMAECGLVAVTVVRLKLRDWVGMGGRDEMRDEEALQEFWQRYSCAGAERVAYVEKTVEDGEGTASVVRAMSDKFDLLVVGRREGGGDGAEGSSAAALTSGLSEWSEFPELGVLGDMLASADFAAKVSILVVQQQAATRNDADY

SEQ ID NO: 53204 - protein, 367 aa, Oryza sativa
MDDHMGRRTVGGLLFTKGGSILLFREDSARHKATNCCTRHGCSSKHLAGKDKQTHRAATAAKEASETPRRSQIFRKPSTRTPQGSTATDNISRNAASSYSENDNRPRETPGRDLIARLKERVNASRKRSLNRENSPSSPNGLSATSSSSSRTVSRPSHRAASRIRKADEGANAGAVNVRRDSSGDTRRNSDRDVDDFLLVEQAARDSTEGFISGFLARYRSNHQGLLSSLDDSIEDANGYWRFNMEGSEELENYFIFNDRYRGMRMDIDGMSYEELLALGDRIGTVSTGLSEDALSKCLDRSMYMATTSGTHEDCERKCSICQEEYSDGEEVGKMVCKHYYHFSCIKNWLRQKNWCPICKSVALNTN

SEQ ID NO: 53205 - protein, 98 aa, Oryza sativa; identical to SEQ ID NO: 50561

SEQ ID NO: 53206 - protein, 935 aa, Oryza sativa; identical to SEQ ID NO: 44414

SEQ ID NO: 53207 - protein, 902 aa, Oryza sativa
MMSFRSKDRNVQPRFNWPWRSESPLSAQLLIDIPPEIELSDYRRLPGSGSESPSGLLHGEGFKDEPIADLDIFFERLYEYFCAKGLRCIVTKWIVEMLNVLFMVCCIGFFFLIVDWNALGHLKCGVEALESGEKPCDLMQVVKHNPLVPFTFPKMITIGSMVILTTYGLINFLKFFVQLRSTLNIRDFYCNSLKITDLEIQTISWPKIIEKVVLLQKSQKLCVVRDLSEHDIIMRIMRKENYLIGMVNKGIISFPIRPWVPGAGPTVKSHLQNRRNHLILPKALEWTLNWCIFQSMFDSKFCVRKDFLTSPAVLKKRLVFVGISMLILSPCLVIFPLVYLILRHAEEIYNHPSTASSRRWSNLSRWIFREYNEVDQFFRHRMNNSAVHSLNYLKQFPTPLISIMAKFISFVSGGLAGALIIIGFLGESVLEGHIFGRNLFWYTIVFGTIAAISRKVVADELQVIDPEGAMCNVVQQTHYMPKRWRGKEDSEVVRREFETLFQFTIVMLLEEMASIFISPYLLIFEVPKRVDDILRFISDFTIYVDGVGDVCSLSLFDFRRHGNRNYASPFDALKTLRSSQGKMEKSFLSFQSVYPSWEPNAEGKQFLTNLQKFKEKQIRQQALAQYQAMEASGFVASTRGHRDDIFHQLLPSDIHNRAEAISPAVYNLGPLGLLDTDQRSHPYILDWYYVCHPPHLDRTEAPYFNEVFPETSENTGSAAFKASEIEEARGWDSDMVPPPRADRDEWNFNHERVRSHMDASTSSNLFHHAPVEHHDTKGNIIDWWDQAPEHSTGQQGSFLEPPEFGNRYVAGNRSSYHSGDVSDGSVEELERSYNRSSSSWRRPQDLSTTRYMDDSDIEEGLNLPFADLPQKDEDARHGTSDTNDPTPVGLPVRIIPRGSDPV

SEQ ID NO: 53208 - protein, 576 aa, Oryza sativa
MKAGERPKLVRGVRQESRRFRLLVIVVGFFLVSLTFVLVSKPDAILFSLNGKLPVEQAPTSILIQQKVNEPSGESRKTSTDALRGDPKVVDDEVDAKPKGTGGGSEEEEGRVLSEPDPTSGMMEPTHNKDGNGHKSHQETLGGGGDGESKGNDEEGEHAEQKHKVTLPTVSNYTIHDAAEDTENAKQEGMNNVQQGSKPLCDFSNFRANVCEMRGDVRIHPTATSVLFMEPEGSQRDEVWKIKPYPRKGDEFCLSHITEVTVKSSKVAPECTKYHDVPAVIFSLTGYTGNLFHDFTDVLVPLFTTASEFNGEVQFLITDMALWWTIKYQTVLQKLSKYPVIDFSKDDQVHCFKHAIVGLHAYMEFTIDSTKAPHNYSMADFNRFMRGAYSLGRDSVTVLGEYPKIKPRLLIIKRHRTRMFLNLDEIISMAEELGFEVVIDEANVSSDISRFARLVNSVDVMMGVHGAGLTNCVFLPQHATLIQIVPWGGLDWISRTDFGNPAELMGLRYKQYSIGVDESSLTDQYPRDHEIFKNPISFHQRGFDFIRQTFMDKQNVKLDCKRFRPILLEALDNLNP

SEQ ID NO: 53209 - protein, 816 aa, Oryza sativa
MGETTGERALTRLHSMRERIGDSLSAHTNELVAVFSRLVNQGKGMLQPHQIIAEYNAAIPEGEREKLKDSALEDVLRGAQEAIVIPPWIALAIRPRPGVWEYLRINVSQLGVEELSVPEYLQFKEQLVDGSTQNNFVLELDFEPFNASFPRPSLSKSIGNGVQFLNRHLSSKLFHDKESMYPLLNFLRAHNYKGMTMMLNDRIRSLDALQGALRKAEKHLAGITADTPYSEFHHRFQELGLEKGWGDCAQRVRETIHLLLDLLEAPEPSALEKFLGTIPMVFNVVILSPHGYFAQANVLGYPDTGGQVVYILDQVRAMENEMLLRIKQQGLNITPRILIVTRLLPDAHGTTCGQRLEKVLGTEHTHILRVPFRTENGTVRKWISRFEVWPYLETYTDDVAHEISGELQATPDLIIGNYSDGNLVACLLAHKLGVTHCTIAHALEKTKYPNSDLYWKKFEDHYHFSCQFTADLIAMNHADFIITSTFQEIAGNKETVGQYESHMAFTMPGLYRVVHGIDVFDPKFNIVSPGADMSIYFPFTESQKRLTSLHLEIEELLFSDVENTEHKFVLKDKKKPIIFSMARLDHVKNLTGLVELYGRNPRLQELVNLVVVCGDHGKESKDKEEQAEFKKMFNLIEQYNLNGHIRWISAQMNRVRNGELYRYICDMRGAFVQPALYEAFGLTVIEAMTCGLPTFATAYGGPAEIIVHGVSGYHIDPYQNDKASALLVEFFEKCQEDPNHWIKISQGGLQRIEEKYTWKLYSERLMTLSGVYGFWKYVTNLDRRETRRYLEMLYALKYRKMATTVPLAIEGEASTK

SEQ ID NO: 53210 - protein, 311 aa, Oryza sativa
MVLKKSLTIMEAALSVAGCYLCAVPRSKGTKVLVCCSVDLMESSSVHMSYKCSYVKQPPPVSEINQIVTEARIYSDQFRQNCPNTPFPSSKFSTDVLNKAKDLKLIGDCTLEKLNYLQTDEHQKFITTKEHGQEQYLEKTSFPYLEVLNLWPGETCHFMGRFLITWRTSEVVVNGMCLHDSQKHTCQYCMVNQDGSLAIRHMFDTDWLFLAEVCKIHPLEENKNYSNALCDKLEDAKLVQHSRYLQLSAMKSLQILRSIPAPARRMLPVLTNSQGAVLSIPSIGFRCCPSLLIEAVFSPRVPLGGGYTSYL

SEQ ID NO: 53211 - protein, 770 aa, Oryza sativa
MGEEKSQQRRRQGHPLLRGGGAGKQAGRRYTHGFSASQMVALAALCGALAPSLPPDTRDDDDDDARGGRYGGAGASDAKAVRDFLLASAADPPVPDEVAELMTRMCLREALALVRAVLWLLGTRLGTLALCGGRCVSWGRWPFVLTFAEMPVERREEALGRWSRVTVLPPLRAFFLVVKVFCLYVFYSWIDESSENPHWRAIGYSPPTDEPPAEEHTEATKRPLDDGVVETINLTDASLPSSLAEKGLAVTDDAARNVCRVECDVAIVGSGCGGGVAAAVLAGARPQGGGHREGQLLHVAGLHVLRGPVDQPALRVRWVRHHDERRRAAPGRLHGRRRLGGELVGLPQDARVRAQGVGGRARAPAVRHPRLRRRHGQGVRAARRDVGVYGGRAPEQGPPQGVREAGLQGRRGGEELVGGTLLRQLRFRLPHRGQARHGHDVAGRRGGPRRGDPDGVQGGEAGAGTRRGEGQAVRRRGGQEHQPGDHEDAGGARQGDRVGGRLAPHARAAAAERAHQPAHRQEPPPPPDRPGVGLLPGHDAGPEGEGVRGRHHHVDAQGGDLRRRRAAPCHPRDADDGRGRDGDADALAVRARLEGADAPVRPDGAHLLPGQGPRVGDGARRAACRVPPRRGGQGGHPRRLAARAAGPRRGGRGGGGHAPERRAAAAVRGADRGGAGGVPRRRHRGARAAVEERDVGPLLLGAPHGQLPDGRHGGRRRRRRPRREREAERLYVCDGSVLPTAVGVNPMITIQSVAYCLANGIADSLSAKTT

SEQ ID NO: 53212 - protein, 419 aa, Oryza sativa
MDGKELLSPSELSYYAHQQHQHQHQQHQQQHRMLGGGGGGGGHSASPLAGMHGGPSVIRPMPNMGMSPTAILQSIGPGPLAGMQFQMDAAPPPPPLMHNSMASVSASAGAGSPTVPPSATPMEPVKRKRGRPRKYGPDGTMKVSTAAAAQHQQQMLSAPPRMGSVSGADMVGGGSGMDDSAQKKRRGRPPGTGKKQQLSSPVKLSGGNAFSGSAGTSFTPHIITASPSEDVAGKIVAFANHSSRAVCVLSATGSVSRVVLRHPADGAMSRVHASSHYKNPAIYEGLYEILSMSGCYNLMNEGQSDGLSVTLCSPERHIIGGVLGGALVAASTVQVVLGSFVQGGSKPKSKKAGKQQQQQAAAAAFSSDSLAGGGQDASPSSGHNQNLTPPPPVTTTGGWPSSGIFDTRSSNIDINSSRG

SEQ ID NO: 53213 - protein, 371 aa, Oryza sativa
MIRRFLYIADHCFTGPSLSHRLRRVNPSHLFYPDGHPLATKPERATVEVEDARLPPPAMAFCSPGTTATAMGMEFMRRNDGSIVGIDHTGRAVLYDPAARAVRTLPALAAPKLMPVSAAVGDDLYVMETTPLPDGAGCFEALVRLEDNPAESDSDKWEVGDNYLWQPLPPPPPPPSPCVNAYAAGFEGSSRGMICGYAVAGDGDGGTRILVSTTTNGTYSFDTASSAWSKAGDWELPFRGRAEHVPEHGLWFGISDMDGTILGAWNLSSAFQQPQPPVASLQVKGFSVESHSDDRRRRELEVYASQVVHLGGGKLCVAKMFSVDRRERGEINFAMLTGVEVVRGRGGKLRVVKHKSRRYNFGQDYTPVYLL

SEQ ID NO: 53214 - protein, 1007 aa, Oryza sativa
MAEAEEKRVGVGEARAPLAVEALRGKIVEKVKGNRVTLIVGDTGCGKSSMVPQFLLEENMEPILCTQPRRFAVVAIAQMIAESRNCQVGEEVGYHIGHSNVSNLNSKRSRIVFKTAGVVLEQMRDKGIAALNYKVIILDEIHERSVESDLVLACVKQFMMKKNDLRLILMSATADITRYKDYFRDLGRGERVEVIAIPSSPRSSIFQRKVLYLEQIVDILKMDSESLSTKYCSGPNTAADAGLKPDVYELIHRLLLHIHQNEPDIGKSILVFLPTYYALEQQWIRLLSASSMFKVHILHRSIDTDEALQTMKVSKSCRKVILATNIAESSVTIPGVAYVIDSCRSLQVYWDPIRKTDSAELVWVSKSQAEQRKGRTGRTCDGQIYRLVTGPFYNSLTDHEYPAILRLSLREQVLMICCAESRAMNDPHVLLQKVLDPPDSDVVEDALESLVQIRALDKPTSPRGRHEPTFYGCLLNSLPLSFDASVLALKFGDTGSICEGILISIMLDIQPLPIVQPFGHQQLCKMYRNNYFEEEGIDLQTGKKEAALVGNLCAFQFWQRMFKDKYRLDCLINVVNTHEPKASNGFVAKPEDEWCAFHNLVPTALNYISEIYDDIMGTLHRFRPSFLVKINPPMYLQPSEFHHMCLRHEVLELENVNSLPLEAENSHLDSHRRCAATPYVSPADFGTTTVVKTLKTLIKEMKTQSAADRVTYRELVHGYVQPALENVMCVFFLNGSCNRGDTCHFSHSSRAPRPICKFFLTLQGCRNGNSCSFSHDSGSLVSSSITSGICSQENRATSVCCKRLLPAAGDGHILVMNDKSLQFACKLCNYYDPTKIIACTPGPHSFESDSVTKGLKILQNLADPSYLFIGGEHKLSVPWTKLSRVFWFADIDSNESISEQVVLQKFFQHIAIKTLSEKMSDLQVIVIMNNAKFVQLQVERLARECFLFLGESFMFDEATLGWFSDTPNYPRGMQVSAPVAYIFSMHPPTGIQFGDYASELRKVLYSN

SEQ ID NO: 53215 - protein, 386 aa, Oryza sativa
MAFREDKYVRFHDWRSEHSVGSEKTVLEGRHNVFDSLMDRTVGAFSFLGNSSHPETLNKPASEEKKSKTRVLDPQGPFLQRWNKIFVISCLIAVSVDPLFFYIPVIDGDNICLYLDKKLEIIASVLRFFTDIFYLLHIIFQFRTGFIAPSSRVFGRGVLVEDTFAIAKRYLSTYFLIDFLAVLPLPQVLVLVVLPRLQGSSVMTAKNILMVIVICQYVPRLIRIIPLYLQITRSAGIITETAWAGAAFNLLIYMLASHVLGALWYLLSIQREDTCWKDACSRHDGCDSGSLFCGSNAARNNSFLQDFCPTNGTDNADPTFGIYLPALQNVSQSTSFFEKLFYCFWWGLQNLRSVEITFVLFSLEEHILQYCFYIVFYLLQFSWSKS

SEQ ID NO: 53216 - protein, 843 aa, Oryza sativa
MVKFTVEELRRIMDKKNNIRNMSVIAHVDHGKSTLTDSLVAAAGIIAQEVAGDVRMTDTRADEAERGITIKSTGISLFYEMSDESLKLYKGERDGNEYLINLIDSPGHVDFSSEVTAALRITDGALVVVDCIEGVCVQTETVLRQALGERIRPVLTVNKMDRCFLELQVEGEEAYQTFSRVIENANVIMATYEDTLLGDVQVYPEKGTVAFSAGLHGWAFTLSSFAKMYASKFGVDEFKMMERLWGENFFDPATKKWTNKNTGSATCKRGFVQFCYEPIKQIINTCMNDQKDKLWPMLQKLGVVMKADEKELMGKALMKRVMQTWLPASNALLEMMIYHLPSPSKAQRYRVENLYEGPLDDVYATAIRNCDPEGPLMLYVSKMIPASDKGRFFAFGRVFSGRVATGMKVRIMGPNYVPGQKKDLYVKSVQRTVIWMGKKQESVEDVPCGNTVAMVGLDQFITKNATLTNEKESDACPIRAMKFSGSPVVRVAVQCKVASDLPKLVEGLKRLAKSDPMVLCTIEESGEHIIAGAGELHLEICLKDLQEDFMGGAEIIVSPPVVSFRETVLEKSCRTVMSKSPNKHNRLYMEARPLEEGLAEAIDDGRIGPRDDPKVRSKILSEEFGWDKDLAKKIWCFGPETTGPNMVVDMCKGVQYLNEIKDSVVAGFQWASKEGALAEENMRGICFEVCDVVLHADAIHRGGGQVIPTARRVIYASQLTAKPRLLEPVYLVEIQAPENALGGIYGVLNQKRGHVFEEMQRPGTPLYNIKAYLPVIESFGFSSQLRAATSGQAFPQCVFDHWDMMTSDPLEAGSQASTLVQDIRKRKGLKEQMTPLSDFEDKL

SEQ ID NO: 53217 - protein, 238 aa, Oryza sativa
MAWRRGFGREEEDAAAAGESGLELCLGLPAYFSSSSSSKPSEGSTAAPAFALRSNGTNASKPSGAAAAAPVVGWPPVRSFRRNLASSSSSSSKQAPPPPSSSPQNGDKASKDGGAEKGMFVKINMDGVPIGRKVDLAAYGGYAQLSAAVDKLFRGLLAAQSAAADGEADAAAAGEMVGGGEYTLVYEDDEGDRMLVGDVPWQMFIATAKRLRVLKSSDLPPPSLMRAAGSRKRAAADS

SEQ ID NO: 53218 - protein, 707 aa, Oryza sativa; identical to SEQ ID NO: 53022

SEQ ID NO: 53219 - protein, 305 aa, Oryza sativa
MRNLLTDSFELSKVDQAPANVDIELGLQGGMSSSAQPGFEGFFEQVREIEKLHETLTKLLKDLQNSNEESKIVTKASAMKEIKKRMEKDVNEVTKTARLAKSKVEKLNKDNAANREKPGFGKGSGVDRSRTTTTVSLTKRLRERISEFQTLREAIQKEYRDVVERRVFTATGERADEETIDKLIETGDSEQIFQRAIQEQGRGRVLDTLQEIQERHDAVKEIEQKLLELQQIFLDMSVLVEAQGEILDNIESQVSGAAEHIQTGTNLLQKARFLQKNTRKWTCIGIVILLIIILIVVLSLKPWSK

SEQ ID NO: 53220 - protein, 948 aa, Oryza sativa
MDDFVLVDDFGPFKPPAASASTTSFSASHYDDMFDSYFNRSAEPAEPSPSSSAPSPPPPVFDKPVFDDADADAADPFDAIPLFGDGGDGGEGEDFLDSLGKGAKKPDVSEPEVVGFDDDLIPALGNTKSKTPVGEEEVEQEAEAVGFVDDVIPEWFGGSASTTPMKPTPQAEPKATGFEDDVIPGFGESTSHHDSPWEEPRTRPENESISSSKTSVSMPGDAFVTLGATSNLGNSNFGLFTDHLDNMGKSESKNMDPCSTANGMLDSSNIFVGVPKPMSSSSFASEKESVFGDSKSLDGIYSMNHSIKMPKEKPVQQASAETISSILPEMHIHEAPGTTGFNNSDPLSTSMQDQLPEENQCSKMSDDVWLTVSDVVLVTQPTSAPPPSRPPPTLAAKKGPTESNTSNAYPHDHNQGYNPFISSTNTSKTPKIDELEDFVMAKPSSLANGCLQDLNHNGIGIGQDSSTSAAGFMDWAELKHSKGVNQGNFDSLFASSQYQEKEKAVLYASGMESRDEEELLEHEKKQREKEEEQRKLERDREEELEREREMMRRREHEERKRREKEREARHIVEKAMREARERAAAEARMQAEREARQRAERAAVQKAAAEARERAAAEARERAAKAAAEAKERVAEEARERAAKAAAEARERAATEAREKAAAEARAKAERAAVDKVAAEARRRAERAAVERAAAEARQRAANEARKRAEAEARARESQQKTAQPDLDSFFGMPSRSSSVPRSQTATTNPFDVQPQGGSDFGSIRRTSSGSASPFAQPPSTNLMDDLSSIFGAPSSSAVFQEVDGESEERRKARLERHQRTMERAAKALAEKNERDLQVQWEQEERHRIGETLDFEIKRWAAGKEGNLRALLSTLQYVLWPECGWRPVSLTDLITAASVKKEYRKATLCIHPDKVQQKGANLQQKYIAEKVFDLLKEAWNKFNSEELF

SEQ ID NO: 53221 - protein, 64 aa, Oryza sativa
MQEKANATCRCCLATTAEAQAYGLQRQWICCREPDAQAFAMADLMKEPTILCLPALRWFEKLCH

SEQ ID NO: 53222 - protein, 1006 aa, Oryza sativa
MSERRRSQEEEAVREMRRSQEEDEVEERVIRESSEAEERKRVREKEDDDLEEFQLQLVLEMSARDNPEEMEIEVAKQISLGFCPPQSSTAEALAARYRNFNALGYDDRISDGFYDLYVTGNGPASITMPSLKDLRAQSLSHRVNWEAVLVHRGEDPELMKLDQTALIMSLELRESKPSEFVGNDLVQKLAGLVARHMGGTFFDSEGMLVKYQKMMRYLRTSIGSVVVPLGQLKIGLARHRALLFKVLADNIGIPCRLLKGRQYTGSDDGALNIVKFDDGREFIVDLVADPGTLIPSDGAVLSTEFEESSFSNNHHFNKDNDIRQLGSSNSLSNSACSSFECELLDRRSTWINVGPSDSDGATTSQTSKNNQQNTLSDSFGILSVSTFTSENRPITNESRSTDDIAAAKNKERSSVTINSSSTSPSPSSPEVGSTPAVRRMKVKDISEYMINAAKENPQLAQKIHEVLLENGVVAPPDLFSEDSMEEPKDLIVYDTTLFQSKDEMKKRMNELGSREYADRGHGPLLPHHPGHELPSKVPHRAPLDSLKPVEGLGIDHPPDIQDNTSFISQYEPSAPPQEASSQLTKQLPVTAAAVATAAVVASSMVVAAAKSNNDVNFDVPVAAAATVTAAAVVATTAAVSKQYEHLEPGNQLHSLPSPSEGNESIEKSADEFWDKQNFEIDHGQDNTLDQEKDSAEVRQDAERTSDKSSGTESAKSEITLDDVAEFEIQWEEITIGERIGLGSFGEVYRGEWHGTEVAVKKFLQQDISSDALEEFRTEVRIIKRLRHPNVVLFMGAITRVPNLSIVTEFLPRGSLFRLIHRPNNQLDERKRLRMALDVARGMNYLHNCTPVIVHRDLKSPNLLVDKNWVVKVCDFGLSKMKNKTFLSSRSTAGTAEWMAPEVLRNEPSDEKCDVFSYGVILWELCTLLQPWEGMNAMQVVGAVGFQNRRLDIPDNTDPAIAEIIAKCWQTDPKLRPSFADIMASLKPLLKNMTAQAPRQRVQQTDE

SEQ ID NO: 53223 - protein, 658 aa, Oryza sativa
MEEQQVKPSDSHPPPATPVDSQDSTAPPVRTPDPVSQATSNDSATQFASTVHVAPSPAPVPNAVPIQDAAGREAQSSIFSTSGLSSWAKNLKIPQPSSGQESPTGKNTFSRLTSGLGLRLSPKGPQQDESAEGSTTPTTAQSGVFGSFTKGIVDSSKNAVKAVQVKARHMVSQNKRRYQEGGFDLDMTYITENIIAMGFPAGDLSSGLFGYFEGFYRNHMEEVIRFFEMHHKGKYKVYNLCSERLYDASLFEGKVACFPFDDHNCPPIQLVISFCHSAYSWLKEDIENVVVVHCKAGKARTGLMISSLLLYLKFFPTAEESIEYYNQKRCVDGKGLILPSQIRYVKYFERILTYFNGENQPPRRCMLRGFRLHRCPYWIRPSITVSNHNGVLFTTKKHPRTKELMPEDFWFSAPKKGIMVFALPGEPGLTEVAGDFKIQFHDRQGDFYCWLNTTMMENRVTLNPTDLDDFDKRKLPSPGFQVEVVLVDYDGSQPPKPKPAAASTDQKSEADSSTGTVAKGNNASSAEVSNKESARNDKDDVFSDSEAEDGSSKGRREKVSRNVEGTTNAAKASETSSVQKEASAAASRIEKVSITSEQGSARTPDAAPLKSGVSSKSSSTTAPPPPPAAADSSMSEFKAIAADASVFSFGDEDDYESE

SEQ ID NO: 53224 - protein, 700 aa, Oryza sativa
MITFVDSAAKERERESDKCLDPQLWHACAGGMVQMPPVSSKVYYFPQGHAEHAQGHGPVEFPGGRVPALVLCRVAGVRFMADPDTDEVFAKIRLVPVRANEQGYAGDADDGIGAAAAAAAQEEKPASFAKTLTQSDANNGGGFSVPRYCAETIFPRLDYSADPPVQTVLAKDVHGVVWKFRHIYRGTPRRHLLTTGWSTFVNQKKLVAGDSIVFMRTENGDLCVGIRRAKKGGVGGPEFLPPPPPPPPTPAAGGNYGGFSMFLRGDDDGNKMAAAARGKVRARVRPEEVVEAANLAVSGQPFEVVYYPRASTPEFCVKAGAVRAAMRTQWFAGMRFKMAFETEDSSRISWFMGTVSAVQVADPIRWPNSPWRLLQVSWDEPDLLQNVKRVSPWLVELVSNMPAIHLAPFSPPRKKLCVPLYPELPIDGQFPTPMFHGNPLARGVGPMCYFPDGTPAGIQGARHAQFGISLSDLHLNKLQSSLSPHGLHQLDHGMQPRIAAGLIIGHPAARDDISCLLTIGSPQNNKKSDGKKAPAQLMLFGKPILTEQQISLGDAASVDVKKSSSDGNAENTVNKSNSDVSSPRSNQNGTTDNLSCGGVPLCQDNKVLDVGLETGHCKVFMQSEDVGRTLDLSVVGSYEELYRRLADMFGIEKAELMSHVFYRDAAGALKHTGDEPFSEFTKTARRLNILTDTSGDNLAR

SEQ ID NO: 53225 - protein, 815 aa, Oryza sativa
MVKFSREYEASIIPEWKAAFVDYKRLKKLIKRIKVTRRDDSFAAANAAAAADHLLPPPPAEKEAGGYGFSILDPVRAIAARFSAGQQPSASEDEECPDRGELVRSTDKHEREFMERADEELEKVNAFYTGQEAELLARGDALLEQLRILADVKRILADHAAARRARGLARSRSMPPPPPSSSPPSSVHGSSGRYLLSGLSSPQSMSDGSLELQQAQVSEGAAVADEVMAALERNGVSFVGLAGKKDGKTKDGSGKGRGGGGGGGGGVLQLPATVRIDIPATSPGRAALKVWEELVNVLRKDGADPAAAFVHRKKIQHAEKNIRDAFMALYRGLELLKKFSSLNVKAFTKILKKFVKVSEQQRATDLFSEKVKRSPFSSSDKVLQLADEVECIFMKHFTGNDRKVAMKYLKPQQPRNTHMITFLVGLFTGTFVSLFIIYAILAHVSGIFTSTGNSAYMEIVYHVFSMFALISLHIFLYGCNLFMWKNTRINHNFIFDFSSNTALTHRDAFLMSASIMCTVVAALVINLFLKNAGVAYANALPGALLLLSTGVLFCPFDIFYRSTRYCFMRVMRNIIFSPFYKVLMADFFMADQLTSQIPLLRHMEFTACYFMAGSFRTHPYETCTSGQQYKHLAYVISFLPYFWRALQCLRRYLEEGHDINQLANAGKYVSAMVAAAVRFKYAATPTPFWVWMVIISSSGATIYQLYWDFVKDWGFLNPKSKNRWLRNELILKNKSIYYVSMMLNLALRLAWTESVMKIHIGKVESRLLDFSLASLEIIRRGHWNFYRLENEHLNNVGKFRAVKTVPLPFRELETD

SEQ ID NO: 53226 - protein, 634 aa, Oryza sativa
MELKPGMSALVTGGGSGIGKALCIALAQKGLFVTVVDFSEENGREAASLVQNENKKFHGDLKVPSAMFIKRDVTNAGDLSAAFGKHVDTYGGLDICINCAGIAIKTLVYDDRSDGTSTWRHAVNVNLVAVIDGTRIASQIMRSGKKPGVIINIGSAAGLYPMNFDPIYSGTKAGVVMFTRSLAPLKRHGIRVNVLCPEFVQTNMAEQLSRRIIDVTGGYIKMEDIVNGTFELIKDESKAGACLWITKRRGMEYWPTPEEQRKYMLNLPKSKRMLTQNTFSTVQTPEFYEKIVVHTLSHNFRDATRLERVRLRLPVEPHNALVKIIYAGVNASDVNFSAGRYFSGGAKETAARLPLDAGFEAVGIVASVGDSVNHIKVGSPVALMIFGAYSEFTQVPAKHLLPVPRPDPEVVAMLTSGLTASIALEKAGQMASGQVVLVTAAAGGTGQFAVQLAKLAGNKVVATCGGKCKAALLSSLGVDRVINYQNEKIKDVLKKEFPRGADIIYESVGGEMFDLCLNALAVHGRLIVIGMISQYQGEHGWKPRNYTGLCDKILAKSQTVAGFFLIQYAHLWQDHLDKLFDLYASGKLKVSLDPKKFVGVASAPDAVEYLHSGKSVGKVVVCIDPSYSQTLAKL

SEQ ID NO: 53227 - protein, 165 aa, Oryza sativa
MLVGSWSELARSGTLAAGARPNHDRSVFRPRATPSYDASLDEAFTPLDGDGERQINVLTSDESFVGVRLYYIEAADIARLREQARATRVQAVSAYLWKALAAVVGSRDARCRMVWWVDGRRRLTLSSSPELRAAMRRTCSAQYVQIMVLHFSKVDHSSGNGNMMQ

SEQ ID NO: 53228 - protein, 759 aa, Oryza sativa
MASAAAAAATARGPRYAPPDPTLPKPWRGLIDGNTGYLYFWNPETKAVQYDRPTAPPPSSPPAQQPPERPRNSDPAESQAQAGASRTQNAAPADDRARNDHLNDHFERRTEAAGSHAQNVPFTEQNTRSNPSSQPCSAAGVYPAQNVFSEAASGDRTSPEAYRAKHEITIVGNEAPAPFMTFQSTGFPPEILREVSAHNLHDYLMHFLVSFSKEIRRSLCVHTTYVITTLDVHLSRLFKSTIYVKVQQAGFSAPTPIQAQSWPIALRNRDIVAVAKTGSGKTLGYLIPGFILLKRLQHNSRDGPTVLVLSPTRELATQIQDEAKKFGRSSRISSVCLYGGAPKGPQLRDLERGADIVVATPGRLNDILEMRRVSLHQVSYLVLDEADRMLDMGFEPQIRKIVKQVQPKRQTLMFTATWPKEVRKIASDLLSNPVQVNIGNTDQLVANKSITQYVDVITPPEKSRRLDQILRSQEPGSKIIIFCSTKRMCDQLARNLARQYGASAIHGDKSQAERDSVLSEFRSGRCPILVATDVAARGLDIKDIRVVVNYDFPTGVEDYVHRIGRTGRAGATGVAYTFFCDQDSKYASDLVKILEGANQSVSQQLRDMVSRGGYGGRSRRWASSDDSYGGRGYDSGYTSRSTDNYNSGYGSQSGNGSSFHSSFHNSNSGNQFGDTSGFQTSFHNSSSNNQTSDNPSFHASSNNDQPGDGLSFHARFYSSSRGSDQSRTNNAGFRDRSRSPPSNRNHEDPGSKAVGVSNW

SEQ ID NO: 53229 - protein, 438 aa, Oryza sativa
MATAQQESISSGGDGNNNNNKQVAVVVVEEASTPSSAFKFNVHAPEFVPAMSPTASPMSAPAGSSSFYSPFGLHVQPDHWSFFHDHEPVFFMPDFKFAAAAAASAQPKPTSAADMPHKIVKQVEYQFSDINLVANEFLLKIMNKDSEGYVPLSVIASWKKIKSLGATNQMLVKALRTSTKLIVSDDGKKVRRRQPFTEKHKEELQSRMIIAENLPEDSSRNSLEKIFGVVGSVKNIKMCHPQEPSTARASKSDTLVSNKMHALVEYESSQQAEKAVEKLNDERNWRKGLRVRTVLRRSPKSVMRLKRTEFDLNSDDEQSPMSSDLSPTATATAAELSAEAAGHDQGGEQQMMNSSKKGGGWARGGRGKLQVAAPHSPQSAPAGSVGHFEPASPRHKLPASPRHKCPSSPRQPPPHAHGPRMPDGTRGFTMGRGKPLLV

SEQ ID NO: 53230 - protein, 484 aa, Oryza sativa
MLLFVQHPTPNREGRGAIDMVRAPAGADPPPFLQTRMDMAASSSSFSLSQSHSQSQTQAHKVEEEEHAADPPSPSRNASSKYDFVKVKVWLGENADHYYVLSRFLLCRMLTVTKIPNHVAIKIALELKKLLVDNSLLDVSQSDLEANLFKLMEKRGYGEDYINRYKMMTRFHHQRVPLVVLVCGTACTGKSTIATQLAGRLNLPNVLQTDMVYELLRTSTDAPLTSVPVWARDFDSPEELITEFCRECRVVHKGLAGDLKKAMKDGKPIIIEGIHLDPSIYFMDEEKRDDNSKMEKKVAECEQSPASVESKTERQQENELHEKRMDDSQECMSEEGGISEGLSCAKSHVISSSDSAYSKEKNPRAEDEGHKDLDLQKNNTTKKDKPAAEPIVVPIVLRMSDFDHKALLEEWTATRASRDNCLPQDHRKLINNLKLIQDYLCSFESQGLTVVDISANSFPQTLDWLHSYLLQVPEKRAYPNVLSL

SEQ ID NO: 53231 - protein, 541 aa, Oryza sativa
MDPHPTPFAGKRRSVAAAPAKIAAPKPKSIASTRTKTTRKSPPAPPPPRPRRAFGTVRSSNAHDAPEKPPPLQKAPKVSPPPPQKPDKVSPPPAQKPSKVSPPPPPPQKSAKVSPPPAAKPPKLSPPNLAKATKPSRLAAKPPKKAAPGPELDPKPRKKAQRVSFQEDAAMSVAPGSGEKVKVSTDDAAGHTPMVAVRALEKKVSVVASAETPFFSAQNCSNCSLDPLEESTYWLAHIHLAESVGKHRVAAAFFQLAFECQAQPIHRIQSELRNYTVRHESASTLTTLFDELLLAHGGIPVNQPKFETDGFEVVDTPLTTDSDDKRLDSTTTQVDERCSECDCGGDIVDVAVPSIVKPLEEGMDQPSFERKLNDGFEFDDCEAVIVDKLVGGHSDLEKIVDVNGPSDSETMQSACRSSIDRLSLKGSPVVSGLSQRQLSSDSPLDKLSPSARSLSAKRLSSVSPLDKKSPFGSSSSKRLSSSCPSSKKSFSSKALSSKRMSSGNASAGVGDLNEVIADMEFDCPASDDQLELKEHGDSEIN

SEQ ID NO: 53232 - protein, 881 aa, Oryza sativa
MSDADGFGCEHRRPSKRRRDGPDHALLPVSREVLMGHPDDPAAAAAAVGAESSSASSYLGVVAAAASASASAAGGFSCGAHFFVRATDSRTVSMHAAWGDTVGAVLAHLADRGYGRDLRLVYAGRQLAPETALADLRLPPDSTLHLLSRLRSTPYPDAWQLASYIASTAAAAKSDPAHTSSAANINELVKEFILCAHRANMRQRHDRDSPLFDAQPTGDHAAQYLEIFRQAGAPFALVRLYAANPSSASHHHAENAIKCFLTMDPSALPPDVLPVMAPVLLEFCGLLSFSVGKRDELYISSRSMLATVLSLPSGLPPCIKSPSKLIEQVLPFAEEIVGVVMDELASLDMTVSSKNLEDLSNFFKVLRQQALRWVPNGGPLPKNLYNSERGHNDTWVWKLHEMSMNLLNRVDECLKRLEMDLSLSSENRGVNISQSRWVARSHMLVMLTQLDFISMIYEDLAHNLRLVLLAHRDPLNALVRCSKRNEHLHWLVKHKDLLCFESRRNLVLMMLPEGKDEYGELHEMLIDRQHLLDESFEYIIQARPSELRSGLFMEFKNEEATGPGVLREWFCMVCQALFSPQQVLFSPCPSDRQRFFLNGTSAVDPLHLKYFIFSGRIIGLALMHRVQVGITLDRTLFLHLAGRSIKLEDISAADHVMYASCKRILEMDAAVVDGLELTFSRDVHELGSRRTIELCSGGKDLHVNIRNRELYIDLLIKSTFVDSISVQLTHFVRGFSDILVDPELQKVFFEFLDLEDFDGMLGGSNKTINLEDWKLHTQYNGYKEKDRQIIWFWKAVESLSIEQQRQLLFFWTSVKYLPSDGFGGLASKLYIYKVSESADRLPSSHTCFYRLCLPAYPSLKVTRNQLQKITQEHVSCSFGTW

SEQ ID NO: 53233 - protein, 705 aa, Oryza sativa
MYKMMYPSWNDISVYISEYWSVIIATVIFASVTGVTIYYTVNQLNKNISLSLMKAIRARARKYKKLKDKVPASSHIWRKELGSRSKGLKCCVCLKSVSSPQYMGGVIHQCDICGATAHPSCSGNAHKDCKCVSMVGFEHVIHQWAVQWIDTSDRSEEDSFCCYCDESCNGAFLAGSPIWYCMWCQRLVHVDCHNNLSIETGDICDLGPLKRLILSPLCVKELHWTGAAGLISSITHGANELASNVRERIRSRGKKYRKGTISVDSDSSGTIDPPSDIEGDSQETNNAAKRREDHANGELPEVHESSESENDKQLLTENKTSIPNGQHEDSHVHNNQKYEIVDVPSDSRPLLVFINKRSGAQCGDSLRQRLQILLNPIQVFELGKQQGPEVGLTLFRKVPHFRVLVCGGDGTVAWVLDAIEKQKFEAPPPVAILPAGTGNDLARVLSWGGGLGIVEKQGGLFSVLKDVEHAAVTVLDRWKITIKDNQGKLMSQPKYMNNYFGVGCDAKVALDIHNLREENPERFYSQFMNKVLYAKEGAKNMMDNTFDYFPWDVKLEIDGSKINIPQSYMGGVDLWKNEDDVSDNFHPQSMHDKMLEVVSFTGMLHLGRLQVGLSRAQRLAQGHHIKIEIKTKMPIQVDGEPWSQDPCTIVVSHHCQAFMLKRVSEEPIGHAASIMADVLENAENNGIITASQKRTLLHEIASRLL

SEQ ID NO: 53234 - protein, 872 aa, Oryza sativa
MKLYDSSANPLRIVEDPNPVQPSGAKRLGESTAEMKQSSKKTKRYPEIPQELYAKLTGNAASSKHHPKAADISNSGTPHHLLPVLGLCAPNADQMNSYKGSVCGPSTKEQKRASGELANKPLLTPAVDHSSEQKHDGQPTPCKPMFPGSSEETLRRLNNIIPDSYFPFQPIPPISGKGIGDHVENPVSSIPSFQGKLGLPNFSLEDSIPLKHLKSVPDLFPNLSLGTSNEYLRNCVPELPNSSFLPSFMADIAGTSKQKNKFMADMSGLLPGLAINPVQQIHSSMPENHKKVLDKLMMRAQYSSSKFLKNASNKFLKKSLKPDYWSEDELDALWIGVRRHGRGNWEAMLRDPKLKFLSHRSHEELASRWILEEQKIIEEPMPTATRSSNSTSFPGISDAMMSRALNGSSFSKLRMEPPKLQSHLTDIQLGCNDIPTRFSHVEPTNYMNLSEGGPSLTPWQDFKNRSGHSGDFPGPLDKWEKPDMGLIPPFMPNPFMKESIGSLPINRHSSNSIQQNEVGSSSHESILHGFSDGQAKLFHEMQRRVKLGKLPIEMNLNHTKLSDPLAENSGDFESSKPNKLPHWLQEAVRAPPSKPPECELPATVSAIAQSVCLLLGEQKPAIPPFPIPGPRLSLPKDPRSAPKKRRVHKVQQASSLVDHSKTTVGQGDHNSTPSAPLSMEAAPASPAVIKSSDTPSLNLNSPSSSSAGSRGQNASTPSTFEEPERTMEVSEPASVAAATCPSRPEPPETGTHRIEFSAVDDMDTGSCRSPVRDTPDPDNQKSELSGSGNTPTELSVLPLVDAPGTSSEPAVVPVSSDEESTQEGVPGKAVSTGDQEKRTPPDESENSGAANPVSAAQTADEDKVDEMITDEH

SEQ ID NO: 53235 - protein, 867 aa, Oryza sativa
MIHLHSPPTAPAAFGGAGSADWRRRRRWSWSSSSRAPVAKGGHLRPCVWRRGGDDGGGEDHHADSGGGGGGGAAWRARATTAGVSSSSSTAKGLQANIIEHETPRITKWPNESRDLDDHQQNNEADEEADDELQPLVEQVRSMLSSMEDGAITASAYDTAWVALVPRLDGEGGTQFPAAVRWIVGSQLADGSWGDEALFSAYDRVINTLACVVALTRWSLHHDQCKQGLQFLNLNLWRLAEEEPDTMPIGFEIAFPSLVEAARGLGIDFPYDHPALKGIYANRELKLKRIPKDMMHIVPTSILHSLEGMPGLDWQRLLKLQCSDGSFLFSPSATAYALMQTGDKKCFAYIDRIIKKFDGGVPNVYPVDLFEHIWVVDRLERLGISRYFQREIEQNMDYVNRHWTEDGICWARNSNVKEVDDTAMAFRLLRLHGYNVSPSVFKNFEKDGEFFCFVGQSTQAVTGMYNLNRASQISFPGEDILQRARNFSYEFLREREAQGTLHDKWIISKDLPGEVQYTLDFPWYASLPRVEARTYIGQYGGNDDVWIGKTLYRMPIVNNATYLELAKQDFNRCQALHQHELQGLQKWFIENGLEAFGMTPEDVLRAYFLAAACIFEPNRASERLAWARVSVLANTISRHFYSDMSSMKRMERFMWSSLYEENGNVLGLEGYAKDGILARTLCQLIDLLSQETPPVREGQKCIHNLIRCAWIEWMMQQINMKDGRYDKGRVMHPGSCTVHNKETCLLIAQIVEICAGRIEEAASMINNTEGSWFIQLASSICDSLHAKMLLSQDTKKNETTINQIDKEIELGMQELAQYLLPRVDDRRINNKTKQTFLSIVKSCYYAANCSPHMLDQHISEVIFEQVI

SEQ ID NO: 53236 - protein, 816 aa, Oryza sativa
MGEAAGDRVLSRLHSVRERIGDSLSAHPNELVAVFTRLVNLGKGMLQAHQIIAEYNNAISEADREKLKDGAFEDVLRSAQEGIVISPWVALAIRPRPGVWEYVRVNVSELAVELLTVPEYLQFKEQLVEEGTNNNFVLELDFEPFNASFPRPSLSKSIGNGVQFLNRHLSSKLFHDKESMYPLLNFLRAHNYKGMTMMLNDRIRSLSALQGALRKAEEHLSGLSADTPYSEFHHRFQELGLEKGWGDCAKRSQETIHLLLDLLEAPDPSTLEKFLGTIPMVFNVVIMSPHGYFAQANVLGYPDTGGQVVYILDQVRAMENEMLLRIKQQGLNITPRILIVTRLLPDATGTTCGQRLEKVLGTEHTHILRVPFRTENGIVRKWISRFEVWPYLETFTDDVAHEIAGELQANPDLIIGNYSDGNLVACLLAHKMGVTHCTIAHALEKTKYPNSDLYWKKFEDHYHFSCQFTTDLIAMNHADFIITSTFQEIAGNKDTVGQYESHMAFTMPGLYRVVHGIDVFDPKFNIVSPGADMSIYFPYSESRKRLTSLHPEIEELLYSEVDNNEHKFMLKDRNKPIIFSMARLDRVKNLTGLVELYGRNPRLQELVNLVVVCGDHGNPSKDKEEQAEFKKMFDLIEQYNLNGHIRWISAQMNRVRNGELYRYICDTKGAFVQPAFYEAFGLTVVESMTCGLPTFATAYGGPAEIIVNGVSGFHIDPYQGDKASALLVEFFEKCQEDPSHWTKISQGGLQRIEEKYTWKLYSERLMTLTGVYGFWKYVSNLERRETRRYLEMLYALKYRTMASTVPLAVEGEPSNK

SEQ ID NO: 53237 - protein, 283 aa, Oryza sativa
MLDDVDDEPFADGISSPIAQHIYDFCDDGNGGDLFAAVNAAAAAGSDMFTASSEDASASSSSTATAPIAGGGDTLSPPLPSLDSTLSALLEQDEPPGAGGGGSMVMSMMGMDEIGEYQRMMECGGALLGATHAADGADMAFGNAAAAELQMGGGGSSPARLPATGTTETTSLEDTSFKTVRLSNEERKEKIHRYIKKRNERNFSKKIKYACRKTLADSRPRVRGRFAKNDDYCEASRSIGSQNHEEYEQIGGVKGEDMLDSDALAHISGMSSYMYNHTVESWI

SEQ ID NO: 53238 - protein, 858 aa, Oryza sativa
MMAESKRFDTQSPGCLEGLFNFLALNQRLQMPKAIAYRKHNEGSSNTLRVKVPKPKNRSENDESVPKGTNSPKAKVGTFIWRTLMFKKKTLKKDQKKSDSPANSPSSSRLTRSRSIHHSKCFEYVVPDELASQYHTMIESSSNEVDSFHSAPPLVQESPKVPNFQESCKSSGAKHSFNAEAPCETVPQSSNDETEAASKQKSRDAATHHSKEFMDFLELFNAHRELFLKILHDPSLLVPLENQDQEASSSGAVPLNKSDSFPRPGGSSGKRNPIFDRNDSENNRRSEIQKSPSRLKSDIETAKVIGTRMPDGVEGSSVSLTESKSLRKSGTTSNRFKVIRKKIKAAVKENRKELARITKDGVFHKLPYGQKMAGFMKSPSTDKYVQEEKQMRKSYSIAESIDKYSTLYESISRDPKISPERPSTMFEGDAKLKDKKPPPSMKRIASLPEMRLYSPQRDVLSEVSDSQIVPKTHDLESGCFSSQQTDPFSICTDGSFYPDDITERTADIYSEHNYGESALLGSLEEDLRSILRSPSLPSVAQSFSHRRINSLPSFDRSFFQDRVTNVTEHSIADSEPTFEHMQLEDDDWLVKPPHPPGPYDASLKDDEWLVRPLKSSGVDTIDHEDEEWLVSTSQLPGGNAADFEDEEWLVKPVQSSSADALDSEFQFIHEFAEDAGSLHIYVNDKNEADFHYVKDILKKSGFSCGEADWYASNQPLSPVIFEEAEFSCQETYTANDDPHSVVRRMLLFDLINEVLMDIYDSSLVTGPWHSRFDSRTRPIPMGSHVLGEVWGKVSYNLSLQWKPDLTVEDVVAHDVMMKDRWMNLVYDAECLALDLEDMVVDDLLDDIVLQIVLISIDA

SEQ ID NO: 53239 - protein, 335 aa, Oryza sativa
MDQSLKWASKLFRKRHNILQSKSYELLVTFLQASYYRAFSRTLKKAKVVKFTHTDSRIVNNGLPPSIQRLRCRANYEALRFHKEIEELSTALVDRLRNGSNHYIALHLRYEKDMLSFTGCSHNLTHKEADELREMRLNVRHWKEKEINSRERRLQGRCPMTPREVALFLKAMGYPSSTKIYIVAGEIYGGHSMDSLKAEYPNIYTHYSLATVDELEPFKLYQNRLAALDYNVAVQSDVFVYTYDGNMAKAVQGHRRFEGFQKTINPDRQKLVGLIDKLDEGTLTWNEFQSEVKIHHENRLGGPYQRLSGRSPRQEEYFYANPLPGCLCKRMQRIK

SEQ ID NO: 53240 - protein, 102 aa, Oryza sativa
MAAPLLLSTIISALVVVASSTRGTMANGVFQVRRKFHIVDGVYKGSDIGALQIHDGNRHRRHNLMASELPLGGFSIPYGTGYALIISAFGHVCVCLVGWCGY

SEQ ID NO: 53241 - protein, 568 aa, Oryza sativa
MAASPESSPSSANSTTPSAPSPSSSLSKSPSPPSPSSPPPPASTNAPPKSAGGVSSSTQAQPSSESSSESTTTPSAPAERKSGGSSRGESGRYRGDVTAGVFVGLFVVAMVAVLAGVVAIVVCCCIKITKKKKRPPPPNMPFFTDEKGNVYYATGGLPPMWQQHGSSNYSIPPPPPPGWHMSSSAGGFSGEMGMGYSSGPYGPALPPPSPNVALGFSKSSFSYEELAAATSGFSAANLLGQGGFGYVYKGVLAGNGKEVAVKQLKSGSGQGEREFQAEVDIISRVHHRHLVSLVGYCIAANQRMLVYEFVPNGTLEHHLYRGGNGDRVLDWSARHRIALGSAKGLAYLHEDCHPRIIHRDIKAANILLDANYEAMVADFGLAKLTTDTNTHVSTRVMGTFGYLAPEYASTGKLTEKSDVFSFGVMLLELLTGRRPVDTSNYMEDSLVDWARPVLARLLVAGGEEGGLIRELVDSRLGGEYSAVEVERMAACAAASIRHSARQRPKMSQIVRALEGDASLSLDHHHDDDFSASSEISRHRQVAFDSGDYTDDYSTTSTSTHSSRLPPKR

SEQ ID NO: 53242 - protein, 619 aa, Oryza sativa
MSVLSSFSGLQVHSTALTSGEVEILSCTVLVCLFMVQHWGTHRVAFLFAPVVIVWLLLLGALGVYNIVVWNPRVLRALSPYYLVRFFQHTGKDGWISLGGILLSMTGTEAMYADLGHFTAASIRVAFVGLIYPCLVLQYMGQAAVLSKSPHCDIHFVFFESIPTGIFWPVLVIATLAAIVGSQAVISATFSIVRQCTALGCFPRVKIVHTSRRIHGQIYSPEINWILMLLCIAVTMGLRDTTLIGNAYGMACAGVMLVTTLLMALVIVFVWQYSCLVAALFLVAFGVVEAVYLSAALMKVPQGGWLPLVLSLVFVAVMYVWHYGTRRKHQFDVQNKVSLRWIHALGPSLGIVRVPGIGIIYSELATGVPAIFSHFVTNLPAFHQVLVFICVKAVPVPHVRDEERHLVGRIGPREFRMYRCVVRHGYKDVLAEDTDFENDLVLRIAEFVQMEADFDQRCSISDDGVVASVEVEGRMAVVPRPSDLARTGLLMREPGEEESVVARAAAAAKPESLIHSMHTMHEAESPGFASRRRVRFEVANQHTDPRVKEELSALVEAKHAGVAYIMGHSYIKARKSSSVFKKFAVNVAYAFLRKNCRGPGLVLNIPHISLIEVGMIYYV

SEQ ID NO: 53243 - protein, 66 aa, Oryza sativa
MYRCSLYLVLKIVFSSFLLVSYVRYEERIANSIFLRVGMMFTILGTKPTGILCIVYTLEILRENYS

SEQ ID NO: 53244 - protein, 687 aa, Oryza sativa
MGSEAAAARPVVVTVNGERYEAVGVDPSTTLLEFLRTRTPVRGPKLGCGEGGCGACVVVVSKYDAVADEVTEFSASSCLTLLGSLHHCAVTTSEGIGNSRDGFHAVQRRLSGFHASQCGFCTPGMCMSIYSALAKADRCSSRPSPPPGFSKLTAAEAEKAVSGNLCRCTGYRPIVDACKSFAADVDLEDLGLNAFWKKGADDERADVGKLPAYSGGAAVCTFPEFLKSEIRSSMGQANGGAPAVAVTGDGWFHPKSVEEFHRLFDSNLFDERSVKIVASNTGSGVYKDQDLHDKYINISQILELSAINRSSKGVEIGAVVSISKAIEILSDGGAVFRKIADHLSKVASSFVQNTATIGGNIIMAQRLSFPSDIATVLLAAGSTVTIQVAAKRMCITLEEFLKQPPCDSRTLLVSISIPDWGSDDGITFESFRAAPRPLGNAVSYVNSAFLARSSVDGSSGSHLIEDVCLAFGAFGAEHAIRAREVEEFLKGKLVSAPVILEAVRLLKGVVSPAEGTTHPEYRVSLAVSYLFRFLTSLANGLDEPENANVPNGSCTNGTANGSANSSPEKHSNVDSSDLPIKSRQEMVFSDEYKPVGKPIEKTGAELQASGEAVYVDDIPAPKDCLYGAFIYSTHPHAHIKDINFRSSLASQKVITVITAKDIPTGGENIGSCFPMLGDEALFRSSCF
